United States Patent Application Publication US 2004/0214272 A1 - sequence listing, part 9

SEQ ID NO: 34155 - DNA, 395 bp, Zea mays
  Clone ID: MRT4577_131153C.1
cgcattcgttccaactcctgagcactttctcctagtgccagacaaagccaatcgagggcaaaatacaacattgacttcaacggcacccgaacaaggggttaggggaaaaagggagcggccggccgcaaggtcggccggccaaagaagaagtcggtgtctaggtacgagaaggcctgtcttcagttccccgaaggccgaatcgggcgctacttgaagaagggccgctacgcgcagcgtgtttgcaccggcgccctcgtctacctcgccggtgtcctctaatacctctccgcttaggttttggagctcgcccataatgcttccagggacaacaagaagactcgcattatttcgcgccacgtgcttctggctatccggaacgacgaggagcttgggaa

SEQ ID NO: 34156 - DNA, 312 bp, Zea mays
  Clone ID: MRT4577_131154C.1
ggccgccctttttttttttttttgggtttttttgggtgtagcctccgttaattcagcagcacaacctacaccagtgatttactctttacggaccagagtacttactaaacactgactttttttattctggctttggctagaacttaggatctctagccgaattccgaggtcacatacgcgtggaagctaactactaggtattgtacaggggtatctaaatacaatttactgcacggagattgacatcgaagggactggaaaaacaagcttcctactgaactgaaagaggttgcacctcaatactatttggac

SEQ ID NO: 34157 - DNA, 314 bp, Zea mays
  Clone ID: MRT4577_131155C.1
aagcgctggacaactccaggtagttccgtaggaacatgtacatgtgcaagggcacgcggaccaagcgctgagatgtgacagagccatgggacagccgagagaccgacgggatacacatgggtgactggtgcggggcaaccatcaccaacaaacctgcacgggctgttcaatactgaatctggaaccaccctgggacatgcatagtgaacatcaaagaagagaccggccgccccgggcaaggaatgagcattggacgactacggcggaacaaggacgagaaggacgtcacggacaaagatgggaaggactgggct

SEQ ID NO: 34158 - DNA, 431 bp, Zea mays
  unsure (1)..(431): unsure at all n locations
  Clone ID: MRT4577_131156C.1
nncnnaaaaaaaattctccttcatnnnntnanaaaaacaaaaccgcaggggggccacaaggagggaaaagcgagggtcaagccccatattagcgagcggacccgccacagaagacggcagaaagggaaacaaaagggcaaaacagngccagacccagcaggaacccggcgacaaccacaaggattctggggatacacaagcacgaaccatccatgagaagcagggggaaaaccctctactgggccttgaacatgtggcggatcaggtcgaccacgcgggtgctgaaaccccactcgttgtcgtaccacgagacaagcttgaccaagtggtcgttcaaagcgatccccgccttggcgtccaaaatgctcgacctgcttgtaccaaggaagtcggtagaaaccagaacctgctccacataacccatgataccc

SEQ ID NO: 34159 - DNA, 319 bp, Zea mays
  unsure (1)..(319): unsure at all n locations
  Clone ID: MRT4577_131157C.1
ccttcctgccttcccccaccancagcagtctcttccgttcntccaactagctgctttgntctctgcttnttatttgcagcaccgccccctgccattcagccggctgcctgctgccttcccccggcgntttcttctcttcagccgcctggcggcgttggtctctcctgcttattttcagcagcaacaacttctaccattcagccggcttgctggggtgagccctgcttccttcttggtccgtctcccgttgctgccgttctaccagcacgcttggcctgacgctggcacccttttaccgctgccgcaattgctgccgttc

SEQ ID NO: 34160 - DNA, 108 bp, Zea mays
  Clone ID: MRT4577_131158C.1
tcgagccatcatgctgtagagttggggttagtcgtgaactactgaggtttaattgaattttggccaaagtgcttaaccacacaattcactactgtaccgacattgaca

SEQ ID NO: 34161 - DNA, 265 bp, Zea mays
  Clone ID: MRT4577_131159C.1
caactacgcctgctggacacaagcctaaaccgagcagtgcgtgcttatcgttcaagtagagcacggagctagagagtgtagctagcacgcacagaagcaaaccaaaactgccatgctctcatacctacaccaggtgttgtagtaagcctgtgaagtgaggtgacacaggccgggagaagcgcgcgccacagagacgagaaaagatacacagatagctagatcgacatgccgcctgagctggagcaccatgagcagcagacagccg

SEQ ID NO: 34162 - DNA, 469 bp, Zea mays
  Clone ID: MRT4577_13115C.1
actggtacattttaaatctttttacgggaaagatacaccttcaacttaaataaaaccaacacaaaaaggccttactcatattttatcgaacataaaacttacaaaggctcacacataaacagaaactgttctccaggctagacactaaccactcatcacatcatgccaaaagaacgggactatatactcggaacaacgacgaaaaccagagtgatactttcccaaaaactatcctctcaagggacgctaaagacctaccttagcacgcatgcatgcctctgccccatgtcttgggccttaataataatccataatccattttctttcttaacaatcttaacattcacccttttaacgctatttatagtacactttattccccaaggatccataaatttctataaaaaactcttttttttaatttaacattgttttaaaaagaattctcacttctccctctaaaaccttt

SEQ ID NO: 34163 - DNA, 593 bp, Zea mays
  Clone ID: MRT4577_131160C.1
agcagtggtaacaacgcagagtacggggaatgatgtgatgatttaggttctctggcgtattgtgcatgccatgattgaggaatcaacgatccatcgaggcgaggctatctatatagtactggaataggggcaagcccggcacacttaaagccattccaacaatcttattcgtcgtaagcccttctagcaggagctgagtaaaggtccgctcaaggccatggaaaggcagatagtacttgatacaggacgagcccagtctctatctagtacgatattctggtatgtttcactgaattggcatttctagataccaaacaagtaaaaaacagcaagttagttagctcagttggcataggcaaaaaaaaaaaaaaaaaaaaaaaaaaaaaaagtactctgcgttgttaccactgcttggatttttcttattttataaagttatgggaccctggctttaaaatctttcttttttctcggctcgaaagagaaaaatcaaagtcaggtagccgacgaaaaccgaaatagcacagatacaaagtaaagaaagtatacacgcgataatagatagatatatattatatataatgttagaagga

SEQ ID NO: 34164 - DNA, 443 bp, Zea mays
  unsure (1)..(443): unsure at all n locations
  Clone ID: MRT4577_131161C.1
tggacaggagctacaccaccaccgcactgctccaggagctgcacctcccccaccaccacctggaggaggtggaagaaataanttataaagaattaatacaataatattacatggacgacagtgaagaggaccaatggcattctaataatgataaagacaaataattgagttgtttcgacaaactttacgaactaggaatattaagttagcatctaaatgctgatgatcagaagcatgactaaatacaagacaaaatctgagagaaaggagcgccactgagaacaggatagttgtaaacaaggctgaccaaaacattgtatatactaagctaagataaagaaattctttgaagaacacttgcatactgaagaagagatacgatattgtctagagggtagaggctactttgatgtgagggaccaagatgatcaatggatccgagt

SEQ ID NO: 34165 - DNA, 331 bp, Zea mays
  Clone ID: MRT4577_131162C.1
tttccacgcgtgcgcacacctgtagggggcgggctacgtcgaacatcccgaggaaggacacgaccagcgaggagctggaaccggcctgcgcacacagtgcaccaaagactccaaaacccaaaccacacgcaccctgactactatatcaccgcctctcatgcctccgaacgtcggacactatcatgggcggctgcaacagaacgcgctccatccacaactgacatcacaactagggccacaccaggggctacatgaaatcaataggactaccaactaatccgtagcaactatgtgaacgtaacagctgaacatcatctgaagcaacagcata

SEQ ID NO: 34166 - DNA, 234 bp, Zea mays
  Clone ID: MRT4577_131163C.1
tctctctctccccccccacagtccgtcccgtcccccaccccacctcagcaatctcgcgcacgctccccgatgacccaatctccccgacgctgccacttccagtgccagcgccactcctccctggcatcccagtcccggccacgtatcggttcacgggcggggcagcagcaccaccagtgctccgcggctgatgcgcgcacccaatgcacgcggtcgcatccgccaacatggccc

SEQ ID NO: 34167 - DNA, 1110 bp, Zea mays
  Clone ID: MRT4577_131164C.1
caataaaattgcactcgggccaagatgaattagtacttggtctgggtgcgattttatatcaaaatatactgcccatcttaagctggtatgactgtcttcactctttaaaattatgtgctcatattaggaaatttactatctccttggaaattttactatctgattctcaattcttgttcctcatcaagtatttttgtcactggttgtatacgactattttcctttatcttaccccttggtttcacgtgcttcaactaataaatatactgtatattctacacaaataaacaccatatacagctaaaccaaacacaccattattgctccagattccagaatgatattcatactgggcctttagaatgatatgtcctaggatatatattaacctttaatgttctctttttgtttctcttgttgctaccctaccccactccatctggctgctcagggtgggcatgttaaaatcatggatgaactactggagcgtcgaaccaaaggggcttgcggctgtgagttgacgctagcttcctctgactcacttattgcttattacaagcatgcgaacaaataagcaggaagctagctagtttgcgcttcggagcaaggaaaggtatccgccttgtaggttcctcacgttggtgaagcccgcgttgacgaggtctgcagtggcgagtttggaccggatgccagagcggcaacccacaatcaagttttggtccttggcgtagagcgcggaaacctgttccacaaactggggattcttctccttcccatgcggagtgacggagaggtagtagggaacattccgagcaccggcgacatggcccttgtcaaaatcctcccacatcctgacatccagatagtggtgtgtggaagagctgaggagggcgcatgcttcctccgcatccaccgtcggaacacaagcagccatgagcaatactgtgtggctccggaaagagacccgccaactgtctttttattgaatcttttaaagatagatattatgattagtccttttctttactatctaccgtccttctattttttttttttagttattcactggagcaattatatatgaagtcaatccgaggcaagtttcccgaa

SEQ ID NO: 34168 - DNA, 1220 bp, Zea mays
  Clone ID: MRT4577_131165C.1
cctcgaggccggccgggccgggacacagtattgctcatggctgcttgtgttccgacggtggatgcggaggaagcatgcgccctcctcagctcttccacacaccactatctggatgtcaggatgtgggaggattttgacaagggccatgtcgccggtgctcggaatgttccctactacctctccgtcactccgcatgggaaggagaagaatccccagtttgtggaacaggtttccgcgctctacgccaaggaccaaaacttgattgtgggttgccgctctggcatccggtccaaactcgccactgcagacctcgtcaacgcggcaagcttaccttaacctagtgctatctcatcttagatttacaactaattgtttttttatatatttattataagagtgagtttattgtgtacgtgtgctgcatataagcagggcttcaccaacgtgaggaacctacaaggcggatacctttccttgctccgaagcgcaaactagctagcttcctgcttatttgttcgcatgcttgtaataagtgagtcaacatatgcttgaaagatctgttcatgaagaagcagcatcaactccatcatgaaaaatgattaatgacactgcaaatgtgcatacccaacaactttactatctaaaaatgcaggcaataagtgagtcagaggaagctagcgtcaactcacagccgcaagccctttggttcgacgctccagtagttcatccatgattttaacatgcccaccctgagcagccagatggagtggggtagggtagcaacaagagaaacaaaaagagaacattaaaggttaatatatatcctaggacatatcattctaaaggcccagtatgaatatcattctggaatctggagcaataatggtgtgtttggtttagctgtatatggtgtttatttgtgtagaatatacagtatatttattagttgaagcacgtgaaaccaaggggtaagataaaggaaaatagtcgtatataaccagtgacaaaagtacttgatgaggaactagaattgagaatcagataattcagaatgaattaagatagtaaaatttccaaggcagacatatgggcttaatatgagcacatatttttaaagagtgaagacagtcataccagcttaagatgggcagtatattttgatataaaatcgcacccagaccaagtagtagttcatcttggcccgagtgcaattttattgt

SEQ ID NO: 34169 - DNA, 2905 bp, Zea mays
  Clone ID: MRT4577_131166C.1
aattcggcacgagggtttggtcgtgaacctgccgctgtggctgtgctgcatcccccaccctcgccgctccctcgtccaaatccaccagccgttcgctttcctctcctctcctctccatcatcccggccggctcgccagtcgccaccctccctttcctcttttcagctacagttgagcttgggcagtagtaggttggttctgcttcccttcccctcccccgatcccttttccttgctggggatcgggaggccttcaggcttcaacccatcttcctccctgtccacatctcgctccttgtttggggtagtgccggctggtggtgccgctactgctagccgggaacccaatttcttgataggactggacgactggtgcgtgccaaccacgagtttttcctgttcgctttgctttctcggctcagctactgctgctctgctaggaacaccaacagtagtgtgttcttgcgccggcttttcttgccgtgtttcgggtcgatattattgggagggtgggtctcccgtcccgtttcgatgaggccggaggagagagatgctgccgtggggagagtcagggaccagttccccgtcggcatgagggtcctcgccgtggacgacgaccccgtgtgcctcaaggtgcttgagaacctcctgcgccgctgccagtatcatgtgacaacgacgaatcaggctgttgtcgccttgagtatgctgaggcaaaacagggacctgtttgatcttgttattagtgatgttcacatgccagacatggatggctttaagcttctagagcttgtggggcttgaaatggacctccctgtcattatgttatcggtgaatggagagacaaaaactgtaatgaaggggataactcatggtgcctgtgactatctcttaaaaccggttcggctggaagagcttaggaatatctggcagcatgttgttaggaggaaattcagtaactgtgatcgtgctaacattgatggctatgaggagtgcaataggccatcaaatgcagattttgatcttgctcacagccaaattacagctggaccacctgaccaaagtgggaggcccagcaaaaagaggaaggaatatcatagtgaagaggaagatgaaggagaagagagtaatggccaagataacgatgatccttcagctccaaagaaaccaagggttgtttggtcagttgaactgcaccgaaaatttgttgctgccgtcaatcagctaggaattgacaaagctgtgccaaaaaggatacttgaactcatgaatgttgagagactcacctcgggagacgctccgaagagcgcgtcggatttgagcttccctaaggtccacagcgagcttagctctagcagctgcagcttcgacggcctcctcaactccataatcaaagtggagaaggacgatgcttccttcagcgatgacctgggatgcgacttgtactccctgggtgcctgtatatgatctctaccttccacgtatctgcatctgcatctgtgttaatctcccattgtatgctgtgcagctagtgttaatcttaggtagaattgtagctgtgcgcctatctttgcttgcccacagccaagaaaaaaaaattgatgtctgcacgtgatgtgctagcagtaagatatctggattgtggaagtcaaagcccatttgctaaatcgagctggacacgtccagctgccacagaagtggatacacgaagaaactggcgatctatctactatcctttctgcgagtggccgggctaataatggtgttcctggcacactccaaagtgtcacgaacagtcacttgctgcagcaaggctttgttgaacgtagacaagacaaagttgttatccagccatcttcatctgcaagttcagatcgtcctgaaggcactgttggagtttcctccagtctgatggattcctgtgcaacccagcagagggttgttccattgtcagccttctctagcagtgcatctccaatgaatggctcgttttgcagcaacggtgtagctgagttgggtgctacatcctctggaggtacaagtattttcccctccaatgacctgaggatagaaagagacagcaaagtgggagctagctcttttggtagtgtgatacttctgtctccagacactgtgccaaaccaaaaatacttgaacttcggcggtgaaagcgatttgagatcgaacatggatggagggaacgcaggcaatctgttgaatcccaagctactatggagttgtttgccggcctctcagccgcctaatcttatcggaagtcatcatcccatgagccaaagactgaaccttggcggctcaatggtcagacagacaacagcaagtgcttcggcagctgccccacagacaaggatcgacatgtttatctccggagacgctccgaagagcgcgtcggatttgagcttccctaaggtccacagcgagcttagctctagcagctgcagctttgacggcctcctcaactccataatcaaagtggagaaggacgatgcttccttcagcgatgacctgggatgcgacttgtactccctgggtgcctgtatatgatcgctaccttccacgtatctgcatctgtgttaatctcccattgtatgctgtgcagctagtgttaatcttaggtagaattgtagctgtgcgcctatctttgcttgctcacagccaagaaaaaaaaaattgatgtctgcacgtgatgtgctagcagtaagatatctggatttgtggaagtcaatgcccatttgctaaatcgagctagagacactgttggcacgagttgattctaaaagcggccttgatgatctaggcccaatttgaatgtcgacacctggtaatgacacgtggtgttcaaaaaaaaaaaaaaaaaaaaaaaaaaaaaaagaaaaactcgagggggg

SEQ ID NO: 34170 - DNA, 1018 bp, Zea mays
  Clone ID: MRT4577_131167C.1
aaaaaaaaaaaaaaaaaaaaaaaaaaaaaaaaaaaaaaaaaaaaaacaggccggccgggccggcacacagtattgctcatggctgcttgtgttccgacggtggatgcggaggaagcatgcgccctcctcagctcttccacacaccactatctggatgtcaggatgtgggaggattttgacaagggccatgtcgccggtgctcggaatgttccctactacctctccgtcactccgcatgggaaggagaagaatccccagtttgtggaacaggtttccgcgctctacgccaaggaccaaaacttgattgtgggttgccgctctggcatccggtccaaactcgccactgcagacctcgtcaacgcgggcttcaccaacgtgaggaacctacaaggcggatacctttccttgctccgaagcgcaaactagctagcttcctgcttatttgttcgcatgcttgtaataagtgagtcaacatatgcttgaaagatctgttcatgaagaagcagcatcaactccatcatgaaaaatgattaatgacactgcaaatgtgcatacccaacaactttactatctaaaaatgcaggcaataagtgagtcagaggaagctagcgtcaactcacagccgcaagcccctttggttcgacgctccagtagttcatccatgattttaacatgcccaccctgagcagccagatggagtggggtagggtagcaacaagagaaacaaaaagagaacattaaaggttaatatatatcctaggacatatcattctaaaggcccagtatgaatatcattctggaatctggagcaataatggtgtgtttggtttagctgtatatggtgtttatttgtgtagaatatacagtatatttattagttgaagcacgtgaaaccaaggggtaagataaaggaaaatagtcgtatacaaccagtgacaaaaatacttgatgaggaacaagaattgagaatcagatagtaaaatttccaaggcagacatagggcttaatatgagcacat

SEQ ID NO: 34171 - DNA, 2042 bp, Zea mays
  Clone ID: MRT4577_131168C.1
ggcccagcaaaaagaggaggaatatcatagtgaagaggaagatgaaggagaagagagtaatggccaagataacgatgatccttcagctccaaagaaaccaagggttgtttggtcagttgaactgcaccgaaaatttgttgctgctgtcaatcagctaggaattgacaaagctgtgccaaaaaggatacttgagctcatgaatgttgagagactcaccagggaaaatgttgcaagtcacctgcagaagtatagactctaccttaaacggctaagtgctgtggcatcacaacaggctagcattgttgctgctttgggaggcaacgacccctttatgcggatgagtgcatttgaaggactccatggttatcaatcttttgtctcttcagcagctctgccatctttcagtccacagggactgttaaatagaaataatccagcatcatttgcgattcaaggggtgtctgcttccaggccaattcagattgcaaccggcaataccacaatgagtcattccattggcgatccaaataataaatatcaccttagcttaccaggcactagtagcctacaaggaaatctagcacaaggtttgccaactccagttgggcaggtccagctgccacagaagtggatacacgaagaaaccgacgatctatctactatcctttctgcgagtggccgggctaatagtggtgttcctggcacactccaaagtgtcacgaacagtcacttgctgcagcaaggctttgttgaacgtagacaagacaaagttgttatccagccatcttcatctgcaagttcagatcgtcctgaaggcactgttggagtttcctccagtctgatggattcctgtgcatcccagcagagggttgttccattgtctgccttctctagcagtgcatcgccaatgaatggctcgttttgcagcaacggtgtagctgagttgggtgctgcatcctctggaggtacaagtattttcccctccaatgacctgaggatagaaagagacagcaaagtgggagctagctctttcggtagtgtgatacttctgtctccagacactgtgccaaaccaaaaatacttgaacttcggcggtggaagcgatttgagaccgaacatggagggagggaacgcaggcaatctgttgaatcccaagctactatggagttgtttgccggcctctcagccgcctaatcttatcggaagtcatcatcccatgagccaaagactgaaccttggcggctcaatggtcagacagacaacagcaagtgcttcggcagctgccccacagacgaggatcgacatgtttatctccggagacgctccgaagagcgcgtcggatttgagcttccctaaggtccacagcgagcttagctctagcagctgcagcttcgacggcctcctcaactccataatcaaagtggagaaggacgatgcttccttcagcgatgacctgggatgcgacttgtactccctgggtgcctgtatatgatatctaccttccacgtatctgcatctgtgttaatctcccattgtatgctgtgcagctagtgttaatcttaggtagaattgtagctgtgcgcctatctttgcttgcccacagccaagaaaaaagaattgatgtctgcacgtgatgtgctagcagtaagatatctggattgtggaagtcaatgcccatttgctaaatcgagctggagacactgttggcacgagttgattctaaaagcggccttgatgatctaggcccaatttgaatgtcgacacactggtagcctaaaccgccgtttgagtaatgacacgtggtgttcatgtaaacaaatccaaaagtttaaaacaaattgggagatttgaagtcgatgctcaggtgctgccgaacccaatgccaactcgacctgactgcctccgtctcgacctcgcttcccgcacgccatcaaaccctaaagccctcgtctcctcgagttgagtagtggaacttttgggttctcctggctctggtctttgtcgaatgtcgacgcactgactgttactgtatcggttgagct

SEQ ID NO: 34172 - DNA, 391 bp, Zea mays
  Clone ID: MRT4577_131169C.1
ccgggccgggactttttacttgacacctcggcggccggatacctattctcttctcccacacgctggccatagagacgcacagtggcaaatgccatggcgtggctcgtcccgcactgtgctggtgtcttctctcctgtcccaaggacgaggcggtgggcagccactggaaggagaaggcgctcgcggacaggaagaaggcgctcgagagccgcaagatcatctgcgcccgcgccaagcagtacgccgaggagtaccacgcccaggagaaggagcttgtgcagctcaagcgagaggcccggatgaagggaggggtccaagagagcaaaagagggcaggcccctcgcgaggggtgcagagccgcgggggggggggggggggcggccagagccga

SEQ ID NO: 34173 - DNA, 481 bp, Zea mays
  Clone ID: MRT4577_13116C.1
cctcctttttttttttttttttttttttttttggttcctctgaaccacaaatagattatatattacattcaaagttacaaaatattacacatattgttcaacaaatattacattccaaatgtttttacaataacatctaatcttcccttagaactatttctgcagcttcgtttagtaattgatcaacaactttgtccatgatagcttcagccattcttctaatctcgtcatccccctttacgtgggggtctgtcgatggctcggcaggctctgagggaggagaaggtgcgaccatgttacaaagtgtaaacaagttcaaaatcaaaaggttacaacaaaaagccaaaaattactagttaatacctattcgcccttcgagatccacacttttctcagcggcctctgctacttttctagcgtcatgtataccattctcgcttctccgtatatctcttgagcctctcccggccaccgttttccc

SEQ ID NO: 34174 - DNA, 351 bp, Zea mays
  Clone ID: MRT4577_131170C.1
cgtgtgtccgattgtgcgtacacactaggaggcagaccatggcgttgcagcggacggttgcgccccacccgtgcgaccacaactcctgtgacgttcgtcacagatacaccagcaggtagctaccgctctatgtatacgacaggggggataaccatggactaccaccccacgataccaacgatgtccacgaaagagacgtgatggatcgagcggatggcgcggacattagcataggatactgataggagaccctcaacaacgagctggcgcttgacacaaagcacgttcaaagtcagatgctgacgatgaacgtaccggacgagggcatagtcacgataccccggccgctgg

SEQ ID NO: 34175 - DNA, 356 bp, Zea mays
  Clone ID: MRT4577_131171C.1
agatgactacccacggaaatacggagctgggggcggctcaacacctgcacccaacttttcaaatatatataacatctattttgcttatgccgaccaggcgaagaccatgaacctactcgtgtttgttatattaattcaaactatcacctattgatgcatcacatatgtataacgtaatgaactatgttgggaactagtcaacaggttctactgcgatcggcttacttcaggtctgtaacctcaacacctttaggaccaagttcattcttgagctctcagacctcatgggccattctggtcctcaatacttcaacgagcacacatctattgctgggtatggtcctagtcacacacat

SEQ ID NO: 34176 - DNA, 734 bp, Zea mays
  Clone ID: MRT4577_131172C.1
ccgggatctcatgcacgccgatcacacattggacttgcactggtgcttgctcataattactagttcatcagcaaacaacaaacaatggcaccgaggcttgcgtgcctcctagctctggccatggcagccatcgtcgtggcgccgtgcacggcccagaactcgccgcaggactacgtggacccgcacaacgcggcgcgcgccgacgtgggcgtcgggccggtgtcctgggacgacaccgtggccagggcgactgcaagctgatccactccggcgggccctacggcgagaacctcttctggggctccgccggcgccgactggtcggcgtccgacgccgtgggctcctgggtgtccgagaagcagtactacgaccacgacaccaacagctgcgcggaggggcaggtgtgcggccactacacgcaggtggtgtggcgcgactccaccgccatcggctgtgcccgcgtcgtctgcgacaacaacgccggcgtcttcatcatctgcagctacaacccgccgggcaacgtcgtcggcgagagcccctactagactgtcatgcatactacaattatatatatatacgcttaatattaacttcagcatgcatgcatattataaatagtgttgtcaactctgtatatcattatattacgatgattatattgttgatgaacataataagtcaataaaaccatgcaggcgatttgtgagccgaaaaaaaaaaaaaaaaaagcggcc

SEQ ID NO: 34177 - DNA, 729 bp, Zea mays
  Clone ID: MRT4577_131173C.1
ctacaagaccctctacttcgtccacctgcagaacatatccatcggcggaactcggtttccagctgtctccacgaaaagcggcgggaacatgttcgtcgacacaggcgcctccttcactcgattggaaggcactgttttcgctaaactggtgacggaactagacagaatcatgaaggaaagaaagtacgtcaaggagcaaccgggcagaaacaacggccaaatttgctactcgccgccgtcgaccgctgccgatgagagcagcaaactgccagacatggtactgcacttcgccgactccgctaacatggtgctgccctgggacagctatttgtggaagacgacgtccaaactgtgcctggccattgataagtcaaacataaagggcgggatctcggtcctgggcaatttccagatgcagaacacccacatgctcctcgacaccggaaatgaaaagctttccttcgtgcgggccgactgcagcaaggtgatctgaagtatgcagcatgcaacacacagctaataataataagcgtcgcatgaagtaacaactatatatttatctgcttatatatgcagcatgcaatatccgtatgtaataagagaatgcatgtgcttgccgctatatatatactgccatgcatgtgtgcatgcagcaggtactgtaagctgcttcgatcctgtattattgtgagattttctgcgaaatataagcatataaaatgttaaaac

SEQ ID NO: 34178 - DNA, 1331 bp, Zea mays
  Clone ID: MRT4577_131174C.1
ctgctaatacttctatagggccattgggtccctcgaggccggccgggccatggttccctagccaactatagctgctaatagctgtagctgtacgtgtgtagccgagagactccattatattatattgctcgatctctccatctgaacgtacacacagtccaacacagatggccgccgccaccgccctggtgagcagcagcagcctccgcgccccggcggccttctccgtcgtcgtccgcgcggcctcccggccggcgcctgtcgtcgcagtagtgacgccgctgcccgcggccaaggcagctgccgcccgcggcgccaggctgcgcgcgcaggccacccacaacgtcaagctcatcacgccggacggggaggtacagctcaagatgcccggcgacgtctacatcctggactatgccgaggaacaagggttggacctgccctactcctgccgcgccggcgcctgctcctcctgcgtcggcaaggtcgtctccggctccgtcaaccagttcgaccagagcttcctcgacgacgaccaggtcgccgagggctttgtgctcacctgcatcgcctaccccacctcggacctcgtcatccagacgcacaaggaggatgcactcgtcgagtcgtactagtatagtcagcaattaatgcaccacgtacgcacgctctccttgcattggcatgcatgtaataataataataacgacgccgccatgtaataataactaactatacatggtcctcatgcgtatgcataaaaaaaaaaaaaaaaaagtataaaaaaaagcccaacaaaaaccgaccacaaaaaaaaaaaaaggcccctcacgccgatcacacataggacttgcactggtgcttgctcataattactagttcatcagcaaacaacaaacaatggcaccgaggctagcgtgtctcctagctctggccatggcagccatcgtcgtggcgccgtgcacggcccagaactcgccgcaggactacgtggacccacacaacgcggcgcgcgccgacgtgggcgtcgggccggtgtcctgggacgacaccgtcgccgcgtacgcgcagagctacgcggcgcagcgccagggcgactgccagctgatccactccggcgggccctacggcgagagcccctactagactgtcatgcatactacaattatatatatatacgcttaatattaacttcagcatgcatgcatattataaatagtgttgtcaactctgtatatcattatattacgatgattatgttgttgatgaacataataagtcaataaaaccatgcaggcgatttgtgagcgaaaaaaaaaaaaaaaaaagcggcc

SEQ ID NO: 34179 - DNA, 266 bp, Zea mays
  unsure (1)..(266): unsure at all n locations
  Clone ID: MRT4577_131175C.1
aaaaaacaanccatccaaacaccctaagggcggcccctacaagggggaaaggcctgacaccaccacaacaccatctacccccctccaacaaaaacaaaaaccccaaattcctacaaactaaaaacaaaggggataaaccggacaaattttatcacacaacaaaaaatggccggaaaaacaaaagttatcgttaaaaaacaaaatagcttccaaaaaccttataagggcgtcctaatcaaagaagacccactttgagaaatttctgc

SEQ ID NO: 34180 - DNA, 926 bp, Zea mays
  Clone ID: MRT4577_131176C.1
tgggaccctcgaggccggccgggtattctgttgtcctaggcgtagaggaaccacaccaatccatcccgaatttggtggttaaactctactgcggtgacgatactgtaggggaggtcctgcggcaaaatagctcgatgccagaataatgcacgccgatcacacattggacttgcactggtgcttgctcataattactagttcatcagcaaacaacaaacaatggcaccgaggctagcgtgtctcctagctctggccatggcagccatcgtcgtggcgccgtgcacggcccagaactcgccgcaggactacgtggacccacacaacgcggcgcgcgccgacgtgggcgtcgggccggtgtcctgggacgacaccgtcgccgcgtacgcgcagagctacgcggcgcagcgccagggcgactgccagctgatccactccggcgggccctacggcgagaacctcttctggggctccgccggcgccgactggtcggcgtccgacgccgtgggctcctgggtgtccgagaagcagtactacgaccacgacaccaacagctgcgcggaggggcaggtgtgcggccactacacgcaggtggtgtggcgcgactccaccgccatcggctgtgcccgcgtcgtctgcgacaacaacgccggcgtcttcatcatctgcagctacaacccgccgggcaacgtcgtcggcgagagcccctactagactgtcatgcatactacaattatatatatatacgcttaatattaacttcagcatgcatgcatattataaatagtgttgtcaactctgtatatcattatattacgatgattatattgttgatgaacataataagtcaataaaaccatgcaggcgatttgtgagccaaaaaaaaaaaaaaaaaaaaaaaaaaaaaaaaaaaaaaaaaaaaagcggcc

SEQ ID NO: 34181 - DNA, 266 bp, Zea mays
  Clone ID: MRT4577_131177C.1
caccattttcttctctgcaagaacaacaacacgcgtcggctcaaccatattatgcggcttaaacaaccaacaccatcacagctccaccgaccccaacactgaaccaccacacaagccatgctataccgcgggagacagacaacccccaccccgcgaaacacgagcaccaccacccccgcaatcctgacgtccagcccacaccctcggtcaccgcaccatcaaactgaaaaccacaccgcacactaccaacaaccacaccaagcact

SEQ ID NO: 34182 - DNA, 411 bp, Zea mays
  Clone ID: MRT4577_131178C.1
tttgggctgatttatgtgcttgtttatgtgcttgtttatgtgcttgtttatgtgcttcgaaggtaattctatatagccttaggagtagaactccttcaatccttcgtctcttccactaacagagtctctgaatgacgaaaaattcttcgagctcagaaggtccgtcggcaccacttccaagaacctcccggatgtaaaggacctcgtgaaaaaggaatcatcgatctagtaacgggcaagtgcggatttactcactaaaccgaagaccaaggagctgccgtcggcgatatcaggactcctggcctacgacgtaaggtacattctcctataagctaccgtcaaggccgtcctaaccgagacattatgctgagaacggtaagactctaccgttaaaccatcggagaatacgat

SEQ ID NO: 34183 - DNA, 393 bp, Zea mays
  Clone ID: MRT4577_131179C.1
ccttggggtttaacttaaaaaaaagcctggggggggggggggggcccattgatccccaatccatgctgggtgatgcatgggtttggtggggcccagggtgaaaacaggattaaaaactggcaaagagggacctttaataaaaaaaacaagggggggacaacaaacccgagaggaacgaagataaaccctttggactaggggaaaaaaaacggggggaaaaaagaaaacttgggcgggggggccccaccgttaaatttctccaattcccctgggagttgccgaaaccccccccccgggtgccaccgccgtaacccgcgccaccaccaccggaggcggcggcgccaccaccgtaggccccgccacccccgtaaccgccgccgccataaaggggcc

SEQ ID NO: 34184 - DNA, 348 bp, Zea mays
  Clone ID: MRT4577_13117C.1
gggggtaaaaatatttatattgggggggggcccacctaaattgccccgatcaggggctgacaatttggggacccatagacgggggaaagggccacttttgggccccccgggaaccaaaaaaaagaacgaaagaacccccttatgggggaaccccaaaacagcagctgggggggccacccaaacccccagttgttttcatcaaccccaaaaacttttttctcggggggggaaaaaaaacccggggggtgggttttacccaccaaaaaaacccctggttttccggcaccccgggttgcccccgggaaccctgaacaggccccgggagggtccccacttttccctaagggg

SEQ ID NO: 34185 - DNA, 454 bp, Zea mays
  Clone ID: MRT4577_131180C.1
gccggccgggccgggactgcgagattcaggactcgacctcttgcgccgacgtcatgaccttcaagtgccgcaacggtggccgcaacaagcatggacgcggacacgtcaaggacatccggtgctcagactgcgccaagtgctgccccaaggacaaggcgatcaagaggtgtcacgcgaggaacatcgcgaaacagggggccatcacgtacgtccagcaagcatgtccatatgatgtgtaactgctccctaagctggacgccaagatcgcactgctgcgagacgtgcgaggagcatgtgtcacatcgtccacctcccctgccgcgagaaggaggaggaccaggagccgccggagcacttcacgcgcatggaggataggcctgctggaggacaaagagggccccgccctgctactggtggtgctgctacaagtccagctccagcaccggctgctggt

SEQ ID NO: 34186 - DNA, 1005 bp, Zea mays
  Clone ID: MRT4577_131181C.1
gtgcgaggctcgaggctggacggcagctccaccaatcgcagctccgctgccctgctctccacctcctccagacctccaccatggacgagccgccgctccatccaccgcccctcccccatgccctcaccaccgccgagtaacacctcctcgccgccgcccttgccttgacggattcgaataattcgtggaagagaagttcttattcccttgccttcagccgtactgcggcggcggaatctctctctggacttctccccgatgtccgtggcggccgagcaggaggtggcgccggccgtcgtggccgtggctgtggccgtggccgaggcggaggagtgggaggtgtgcgcctgctgcgggctcagggaggagtgcacgccggcgtacgcggccggcgtgcgcgcgcggtacggcgggcgctggctgtgcgggctctgcggcgacgccgtgggcgaggaggtcgccgccgggggcggctcggtgctggagctcgaggcagcgatcgcggggcacgccgccttctgccacgcgctcggcgggcgccggacgccggccgcggccgagcggctcatcgccgcggtgcggcggctgctccgcggcgccgacgcgggcggcaaggaggaaaaagccgtggtggtggtggagttccaggaagcctcttgaccgcctgcctgaatttgaatgggacggatcgaagatttgttcttgcaggcggcgctagctagctactctgctagtcctcttttcgtaatttgcattttgattagttctcaatatttgtatgcttaaattcggacatgaacgctgaaatttctccagcccttgtacacgccctaggagatgtggaacatcagaaattttggagaaagagggttgtgagagatttgaagtatatataaaagctacaagatgggagaatcccatctttcatgtcataaaaaggccccgtttcatgatttaagaaagctagtggtggtcgattctgatgcagaaaaaattaaaacaaaa

SEQ ID NO: 34187 - DNA, 262 bp, Zea mays
  Clone ID: MRT4577_131182C.1
ctacgagacgacggtcccgacgcaggacaccaagcaggcgtaccacgagataagctgcggacggctacgctgcgcgttgatgcggggaggtacgtgggtggggatcgggccgtggaaggacacgctggtgcctccggacccgagagagaagcgcctggtagcgcccggcgagctcgtcgggcgagcgcacgctctggctctcgaggtggagccgtacagcttcaggaacgagaagcagtagctgcagttcgacttccggcag

SEQ ID NO: 34188 - DNA, 484 bp, Zea mays
  unsure (1)..(484): unsure at all n locations
  Clone ID: MRT4577_131183C.1
gattgaactctgttttattcatcattgttcatcactcgagaacagaaggacatattagatcgagaaaagagaatagatcctctcgggttagggtttacctaaccctaggttatagggtttttaggccacagtaagagactttgtctcgaccacaactcccagtaactagacgaagacagagaatagaaacttgctcagattagggtgtttaccctaaaatttatcatggatctaaaccaacaaagacccagagggtcttggtccatcccatgaaccgacgatgctccttctctttcctaaccctagttcactcgtgttaacagagaccgcaaacaaggctagggatccaaagatcctcagccaagataagtgaaatttagaaaattagataaagcacaaagtaaggttagggttattgaaaaccctaactgccctcaacaaaaccgcnacggtcgaggtgcaaaaagacattgtcaaaatgatc

SEQ ID NO: 34189 - DNA, 191 bp, Zea mays
  Clone ID: MRT4577_131184C.1
gcaccaacgggttccaaggttccgcagattcactcagaactctgagctctgagcgccacgtgcttcttgaccgaggacctacgaggctccggatcacacgacgtcggcctcacgaggctggtccggatggcgcccggcgagggcggcgacactagccctttcctcaagggagacttgggggagttcggcta

SEQ ID NO: 34190 - DNA, 185 bp, Zea mays
  Clone ID: MRT4577_131185C.1
ggcgagcggccggtctaaatgatgcaagcttttatacgtgtgcatgcgacggcgcagctcggggataggggcacttacattcaattgcgcggcctccgattgacaacgtcgcgactggttaaaccctgactttaccgaacttaattgcattgctacagatcacacttttggccggttgcgtaata

SEQ ID NO: 34191 - DNA, 347 bp, Zea mays
  Clone ID: MRT4577_131186C.1
atagcatgtttagcggtttttttttttttgggaaacccgggacattcgctatttttgaaaaaattgtacttggtaacccccttatcgggggggaagaagaataaatactggggggggtcggaaaatgccaccgttttaagggaccccacaaaccgatggatcgaccttcgggtgcgtggcacgcacaacccgaaatggggggagtgaagctccccccctggggaaaaaaaattcaacgcaaaaccctgccccaaaggaaaaaaggcaatctcttggttggaaaaagactttgcaaagggttttgtggggacccccctttctcccaaaccgggggcgagtggacccca

SEQ ID NO: 34192 - DNA, 704 bp, Zea mays
  Clone ID: MRT4577_131187C.1
attgggacctcgagccggcgggaatatttaagaaagcatgagaatgaggctattatacgatgctgctgtttatggatggcgtggcgatggtcgacgtgcttgtcggcgtcggggcttagcatcgcgtgcggacattctcatccgtcccatggtacagagaatgctgagtcaccgagctaacagcgggcgccacggcgccttctaaacctagcaagccttcatagaaggcgacagcaagatactcggattacggagcacctggccaccagcggaagggcactgaaaagcttgacgacttctttgggcacacgcgccacgaaaacactgccggatgtgagactgctgcggatgtaccgcttgcctgtggatactgccgcgtgaaggaacagaaacagaggaatccaacctactatggacgaggaccttatagttatctaataaatacaactatggggtttcctcacaagcgctgaaactgaacctgcagcaagaccctgaactgcgggcaacagatgccgtgccagccttcacaactgccatttgagttctggatgacgccacagcacggccgaagactctgtgccacgccgagatgacacgacgactggatgcacatcgtcaactatcgcgctcttggcgaaggatctggcatacgaggtgacgaacaacgtgatcaacgtggacctacagtgcatcgaggacct

SEQ ID NO: 34193 - DNA, 209 bp, Zea mays
  Clone ID: MRT4577_131188C.1
ccacttcttaccttaatctcgcgagaagcgaaaccggaggaggagggtgcgaggggatcgcgagcagccgaacccgaacccgaagccggaggcctagtagatgaagacgttcgatccgtggccggtcttcttccgccgggagtggaagcgcaattggcccttcttaacggggttcgccattacgggtttaatcataattaaaatgacgg

SEQ ID NO: 34194 - DNA, 387 bp, Zea mays
  Clone ID: MRT4577_131189C.1
ggagcttttgctcatgggtctgttttccactaggaagcatattggcttattgggtcaaccggtcaagtaaaaatgccattactgtacccggaagctgctctacctttgcatgagaaattattcatgttaacatgtccctaaataaaataacctattgctgaaactagtccacagccaagcgaaacaaatatcttcaggtttaggcaaccataatcaagtattgaagaagaaattaggtaacgtaacatgtataactcaaaaggaagcacaacagcactgcaataataggataaagtaagaaccagtctagcatataatttaaaacacataataccacaaagttgcgccaattcaaggttcagagaagtacctcaacaagtgtaatac

SEQ ID NO: 34195 - DNA, 164 bp, Zea mays
  Clone ID: MRT4577_13118C.1
aaaagcaaaacgcccggccatgggggagtggattatatttaatcccgggcccaaatggattaaggaatatatcctgctgttagaacggaaactaatacaacaaagtccgggggggcaaaagggctgaacattacccaggagtttaaatggaaaccccaaattgg

SEQ ID NO: 34196 - DNA, 387 bp, Zea mays
  Clone ID: MRT4577_131190C.1
cgtcgacgccaccgccggagaaagcgatgtggtcgtctcggccctcgtcgccgtcggcgccggggccgcggtcgtccccttcgccaggcgtatgctccgcctccgcaccgcccctgcttcgagccccacgtcctcgtcctgagcttcgcggtcctcctccgcctctcctccaagaacacatagggactattgtgaaggtattgatttgggatttctggagcttattatcagctcgtcgtacgtattcgcatgtcactggggacggagtagcagaataaatgaatgaaatgatcattcaagtgctcagttcagccactgtctattttttaaaaaaaaagctcctgacgaggccattttcgaactggacaccctctatagagaagacct

SEQ ID NO: 34197 - DNA, 488 bp, Zea mays
  Clone ID: MRT4577_131191C.1
tttttttttttttttttttttttttttttttttttttttttgttttttacaacaattcataattccagacctttaatttttaagggcatggcagataacttggggccaaactgggcgacaataattcaataactaaagagcccgagaagggcagagcccaaaccctggtatacaagggctatagggacgcatgcgcccggcaagggcagggcccaaagcctgcatgcaaagggggtggaacggaaccctaataagttggcaggcatacaggtacaagcctacaaaccaggacaagaattccaccaaaagggggggagaaactggcttccttgacaaccgccagcctgggaactaccccagaggggggggtattcacgattctagttaacaaaggcactttgggacctaaacaccgatccggttggtaaccttcttaaaagagcaaacgtctttcggacccaaagaggacgccggggtgcaacccgggt

SEQ ID NO: 34198 - DNA, 148 bp, Zea mays
  unsure (1)..(148): unsure at all n locations
  Clone ID: MRT4577_131192C.1
ntatggaccggncgtgagctcgcagttcagctcgagctccaagggtgcccggtcaacaacctatctaccacgtagcaagcgattggcgcctcaatatcaatctcaagttcacaagtaggtgtacaggtcaagggcaagaacacacctg

SEQ ID NO: 34199 - DNA, 330 bp, Zea mays
  Clone ID: MRT4577_131193C.1
gctatgctgctcttcaacccagagctccatatgccataacatcagccgcgaacacactgcgttgtttctcgaaatatgtgctgactacatcactgcactcgactattaccgcctgctctaaactcgacatcgtccgcgatgaccgaactggtaaaactacactttgtaacgatcatctcactgcatagcttgagacgacacatgctccaaccattgatgcggaacatcatcctatggatatcaccactaactgtcctaacatcacgatctactactgtcatacacgaacgtcaagatacgccagatgacctcacgcatggatactatatc

SEQ ID NO: 34200 - DNA, 397 bp, Zea mays
  unsure (1)..(397): unsure at all n locations
  Clone ID: MRT4577_131194C.1
gggcacaacaacgacaacaacnggggcnagcaaaccnngcngccgacgcgcagcaacagcagnnncnnccanncaaccaacnagcngcanggaacncngcgncnnannngcaacaacaacaacnaccanncagccagcnaccggcngccnacccccaggggggcgggcanncaaccaacgggcagcanngaacncnccggcnnannnacagcagcaacaacnacnaccanncagccagcnagcnggngngagcccngcnaccnncnnganacaaccacagnngnngccgnncnaccagcacgcngcgccnaacgcnggcacccncnnacaacggcaacaanngcngccanncaaccaacnngcnnngacaaacccagcagcgnncnaccaacaaccc

SEQ ID NO: 34201 - DNA, 624 bp, Zea mays
  unsure (1)..(624): unsure at all n locations
  Clone ID: MRT4577_131195C.1
gacgcctgcaggttccggtccggaattcccgggtcgacccacgcgtccgctagtccaaagccagcaggaatgatgttctgtctctgtctagtgtgccataccctcatgaaaaattgtcctgtggtggaccccaggggaccctaagaaacctcacgtttaccacagtcagatggcagccagatttctttgggggccaaagtttttatgtggtccaaaattgggcacacctctggcaatacacaccccagataaagaccccctagatataaatcctgttaacttattacttttccgtcagaaggaagccattatacatgacaaagcatagggagaggcaggatgcccagtgtgcagaccacgagacagttgagatagttgggttaagagactagacaaagcatagctgtgtgcaacgtcacgatgttcaattatgtttctaagtccattgtccctgcacattcagactccattcgctgttgcattatacattatgtacccacagacattgcctcagggttgcaagctcttaaaagaaaaatttatccacatatccatgtattgtaaagaagaataaaagttgaatttacttcacatganaaaaaanaaaanaaaannnnnnaaaag

SEQ ID NO: 34202 - DNA, 722 bp, Zea mays
  Clone ID: MRT4577_131196C.1
aatagccgaacggaatcccagatcactcagaaattgccaccgaaaagggaacaaagcgagccagccctcgcccggccgggaaccaagcctgctccccccgcctaggccagtatgataatagagaaaaagcaagcaggagggatgggcgagtgagatgcttcgttcacgttccagcgacggttaaagctggtggagctggtgccattggcgatgcccagatgcgagcatgtgcagcctggttgacgtcagacgagctaggcacgttggacgggcctaaagcgttcgacgaaatacctccccaagagtgcgctgtgtgccagaccggcatagcgtcttggtttcgttgcacattaatctaacctttgatgcaactaggagagattttattatccaagattgtgaaagtcagacatttgcttgtaccttcccattatgaatggatattctcgaagatggaaaatattctcgaagatagaaagtatgagctaatattcattgacacatatacatacatacgtttacatgaatggttttattaaattctgtaagcaaggggattatgattctattttgttgtcagccctagaaattttgtgttttttattaatattgtggaccttgcagcctttgcacatggtcaggctcttgtgtatgcgcagttggctttaattcagtattcacagatacttggattgcaaaaaaaaaaaaaaaaatttgtgggc

SEQ ID NO: 34203 - DNA, 745 bp, Zea mays
  unsure (1)..(745): unsure at all n locations
  Clone ID: MRT4577_131197C.1
ccaccgcggtgcggccgctctagaactagtgcaccacccggccggccccatctcctctcctccctgcgtcgcacccatcccctgctcccatggcaggccgagctccctggtaccgcgcgagcgcgcccctggctccctccgaactcgccccagcgctctgcttggtcatccatctccctcctcggcgagctctctgccagctccatcgtccccagcgccgactgcccacctcccatggccgcgccctgggatttgcctggagcctgcatcccctcgacactggagctctctggcttgccccactgcacgccgagtttctcctctgcgcgacacgcttgggatgcttgccggcacttagctccaccgcgcgtcatgaagtccctacacgcaagctgtctgtcggccgagctccatcgtgtcgcatctccagctcgcccttgtgcttgccatggcagtcgagttcctctgcgtagccgcggttcctcggctccggccggacctccacctcgcccatggcgattttccccgcgctcgaccacagctcagcccagagctccctctgctcattcccaagccgctccttctctctctcccatgatgtctgctcggtctctgctcgtatttttgtccgtaccgagctccctcgccttcaagctcacgccccgcgcgccctcaaatcgcccggccgttcgctttcttccaantcactctctggtgtcgttcagccggctcggctcgacgacat

SEQ ID NO: 34204 - DNA, 218 bp, Zea mays
  Clone ID: MRT4577_131198C.1
gggttggggtttttttttttttttttcccccggaaaaaaaccaaaaacttgggctcccaacaagtacagggcgggaccctggggaaaaggccccccggccaaacagtcccgtggatctccacattcctccgccaagggggaggcaggcccgtcccccccagttggctggcgcggaacggtgtttggagggcctttaacaagggggctgggccccccat

SEQ ID NO: 34205 - DNA, 685 bp, Zea mays
  Clone ID: MRT4577_131199C.1
catccacttgtgtactttcgacgtcgtcttcctcagtagcgcccccttctttctccacccgccgtcgacgcagctgccttccagccatctccatatccgtttcgccgtccccttcctcctcatcaggacccgcgcaagtggctcgtcaagcgcgtcgtcgggatgcatgggggctccgtcacctaccttgtcgaccccggcaacaacgactcctcctccagaaccgtcgtgataaactacgcctatgctcgagacaatgaaacactatttgatattattagtgtgaagatggcagcggcggcggggccgtacaaagagatgctggaagtggtgaacgcgtgcgcgacccggatccggtggcgcctcagtccagcttccaagcgccgcctcctcaacggttgcgtcctgtggtactggtcgactatggtggcacaatgcctcagctacaagaaaatctttgtggcctgctatatcttgcccgacagttcaagctctacaaggttaggtctgttcagtttggctagaaaggcatcccctacctgaacacctacgacgaccggaccattcggtaccccgaccctcttattaaggccaacgacaccatcaagatcgatctggagaccaacaagatcatggacttcatcaagttgtatttgccctttcatggacttcaatcagttatata

SEQ ID NO: 34206 - DNA, 603 bp, Zea mays
  Clone ID: MRT4577_13119C.1
tgggcgcgacctgggcgccggtgtcttaatcctcgcgggccgccggggcctcctcttcatccgttggacggtgctctgccggctcggccatggcgttcggcgcggtgccagtagggctgggggcctgagcttgctggatgcgctcctgctaccgaacgcgtgggcgagtatatagccttggccgacaggcccgggtaatcttgggaaatttcatcgtgatggggatagatcattgcaattgttggtcttcaacgaggaatgcctagtaagcgcgagtcatcagctcgcgttgactacgtccctgccctttatacccaccgcccggaatctatctatctatctatctccttggaaacatatatcagacgatgccccagcgcgtgccgctgatttgatgcaagtatgcggttttcatttgtaaatcggagtcgatccatactaagcgatacaggaacaccctgtatcaattttcacttgtgatgaaattgcacatgtactcatttgttgtacacacatacacacacagaaaaaaaaacgttagaatataagaggatatatgtttgtcaatcgaccgttagacaaaatgaatactcagattcctca

SEQ ID NO: 34207 - DNA, 1806 bp, Zea mays
  Clone ID: MRT4577_1311C.1
agcagtggtaacaacgcagagtacttttttttttttttttttttttttttttttggtttttttttttttttttttttttttttttttgtttttgtgtgtgtgtggggcattgggtacctcgaggcgggccggggctttcctctcgttatttagccctccgttcccgaccctcatcctccgctccagacttccagcatctccgctccggctgcgctctgccttgctttcctgctacctgctctagcgcgagcgagagaggtacggcggccgatctggcggcgcaggcggagggctcggccggggccggcaagtcggcgccgaacatggggaggggccgggtcgagctcaagcggatcgagaacaagatcaaccgccaggtcaccttcgccaagcgccgcaacggcctgctcaagaaggcgtacgagctctcggtgctctgcgacgccgaggtcgcgctcatcatcttctccaaccgcggcaagctctacgagttctccagcacgcagagcatgccaaaaacacttgaaaagtaccaaaaatgcagttttgcagggcctgaaacagcactccagaatagagagaatgagcaactgaaaagtagccgcaatgagtacctcaaactgaaggcacgtgttgataatttacagcggactcaaaggaacttgcttggtgaagatcttgagtcattaggcataaaagagctggagcacctggagaagcagctcgattcgtccttgaagcacataagatctacaaggacacaacacatggttgatcaactgacagaacttcagaaaaaagaacaaatgttttgtgaagcaaataagtgtcttcgaagaagactggaggagagcaaccaggttatatggcagcatgcgtgggagcaaagcgagcggcattctgaagtgcagccgcagcagctcaatggcaataacttcttccatcccctcgatggtgctggtgaacccacccttcagatagggtatggtcctcatatattttccgtgaatctcgtcttcctaccctaaatattgtgtgatactatttcgatgcctagctagcaggcttgggaagatgcatgaacatccaaatagtttttatcatatagaaatgatcttcaaactaaatggtgttttcttttaactagattaattttaccctatgctcgtttgatcgtcctaccaacgtacacgatcatcaaaatgacaccttgtcctattttttcctgatggaagaaaaggcaaaatcacatgcatggcatgtcacaaactagagaattcactgtgattgtaaattgttaaatctttaactacaaaacaagtccaatgtagtactgaactactgatgacaagttcttatcacagagtagctctttgtaatgaaatttaaaagctgattcgttcctccatttgtgcaatttgtttgcaggtatccttcagaggcactgactagctcatgcatgaccaccttcctgcccccgtggttgccatgagatcgaactactgcgcaattccgaattaataagcatggccgcatgcagctgcctgtgctatacgttgtgcttggagtgtacttcaaggttcttgcatgacaagtatgtgtgtaacatttgtgatgaacatggaaactatccacttaattctcgaataatcaatgaactgggtaagattgtaacatagtgctttatgcctaaaacattaatttaggctgcgtgtgaatgatggaggttgtgttccgcgtgttcagttttctagtaacagcagtttagggttggtgaggaaaaaaaaaaaaaaaaaaaaaaaaaaa

SEQ ID NO: 34208 - DNA, 364 bp, Zea mays
  Clone ID: MRT4577_131200C.1
tttttttttttttttttttttttttttttttttttttttttttttttttttttttttttttttttttttttttggggcaccccaaacgttgtttaaaattattggaaaaaaaaaaaaatgtttacggaaaggaatttttgccgaaaaaaggcacatccaaaggtcccaattttatgtaaacatgtaaaaagggcttataaaaacacagtagtggttcctgttaataaaaaaaaaagcccgtaagaagcccgcgccaaagttctttgaaaagacaaacctttttaagaccgccgtatgtaaaaaaattccaaaaaaaaccgaaacatggaaacaacatttcctcacaaaaactttgggtaagacc

SEQ ID NO: 34209 - DNA, 775 bp, Zea mays
  Clone ID: MRT4577_131201C.1
ccggccgggatccacttgtgtactttcgacgtcgtcttcctcagtagcgcccccttctttctccacccgccgtcgacgcagctgccttccagccatctccatatccgtttcgccgtccccttcctcctcatcagataaactacgcctatgctcgagacaatgaaacactatttgatattattagtgtgaagttctttcgttgcggagatggcagcggcggcggggccgtacaaagagatgctggaagtggtgaacgcgtgcgcgacccggatccggtggcgcctcagtccagcttccaagcgccgcctcctcaacggttgcgtcctgtggtactggtcgactatggtggcacaatgcctcagctacaagaaaatctttgtggcctgctatatcttgcccgacagttcaagctctacaaggttaggtctgttcagtttggctagaaaggcatcccctacctgaacacctacgacgaccgcaccatccgctaccccgaccctctcatcaaggccaacgacaccatcaagatcgatctggagaccaacaagatcatggacttcatcaagttgtatttgccctttcatggacttcatcaagttatatacttagttaggctcaatgttagcacaaacagttgatgagcaagtttaaatttagagtacacttatgtatgagttatttgacaatgcttatttatgagatattgaatattatttatctatattatattaattatagggttattaaatatatgggtatgtattttttctctttt

SEQ ID NO: 34210 - DNA, 506 bp, Zea mays
  Clone ID: MRT4577_131202C.1
aggtgttcaggtaggggatgcctttctagccaaactgaacagacctaaccttgtagagcttgaactgtcgggcaagatatagcaggccacaaagattttcttgtagctgaggcattgtgccaccatagtcgaccagtaccacaggacgcaaccgttgaggaggcggcgcttggaagctggactgaggcgccaccggatccgggtcgcgcacgcgttcaccacttccagcatctctttgtacggccccgccgccgctaggataatgcaatcatgcttgtggacaaattatttatcctgcatcgcttgtcaattgagaggttcatcttcacactaataatatcaaatagtgtttcattgtctcgagcataggcgtagtttatatgattggaccttcaccatccttgactacaggaaaaatgcatgaccacgacggttctggaggaggagtcgttgttgccggggtcgacaaggtaggtgacggagcccccatgcatcccgacgacgcg

SEQ ID NO: 34211 - DNA, 1141 bp, Zea mays
  Clone ID: MRT4577_131203C.1
gtccactacgagcttgatcaaacgccaggagtacctcaaatgatggcaggtgccattgcaccacctaggcaaataaagccccagagagctgaatattgttcagaaatagagcttggagaatcgcaatggataaactgtgacattcggaacttcaggatggacatcttaggacaatttggagtaattatggctgaccccccttgggatattcatatggagctaccatatggcacaatggctgatgatgaaatgaggacgcttaatgttccaactctgcaaactgatggtttgatttttttatgggtcactggtcgtgccatggagcttgggcgagaatgtctggagctctggggttacaagcgtgttgaagaaattatttgggtgaagaccaatcaacttcaacgtatcattcgaactggtcgcactggccattggttgaatcacagcaaagaacattgtcttgttggaataaaaggaaaccctttagtgaacaggaacatagataccgatgttattgttgctgaagtccgtgaaacaagcagaaaacctgatgagatgtacgcaatgctagaacgaattagcccaaggacaaggaagttggaactgtttgcaaggatgcataatacacaagctggatggctttcactgggtaaccaattaaatggagtaaggcttgttgatcaagggttgagagcaaggtacaaagctgcttaccctgatgttgaggtccagccaccatcacctcccaggacaagcacgccaatggatgttgaccaaagtagttcacagaaggttgctgcgctagatggtggcgagaggcccgcctgatgctagcaaacttacttgcgagttatcgtgtcaggacccactactgatcatataggtttcatcgcgttacccctgttgtaaaattaggcagctcagtttgtgtttggctactgaggattgtttcagtatatcatgtgaaagaaattgcccgtgtaacagccccagcaaatattgccgccaatgtaatcagggcccatcttgtcttattttcgaaattccaagtgcatctgtatatccaaaaaattgaaaagaaatctgcttctcttttctgggggcaataattttattcattgcaagacaaaaaaaagcggcc

SEQ ID NO: 34212 - DNA, 1122 bp, Zea mays
  Clone ID: MRT4577_131204C.1
cggacgcgtgggcgccaccttaccttggtggggtggcagctcgcacacagttgcgagcgcattgcttgcattgcgcagccgcaggccgcagcacgaagctagccagtaggcggtagatggcgagcagcgcggggaaccgcttcctgaggcagctgagcgcgagcaacggcgacgagggggtcgggggcggcctgcagatggaccagcaggagtacggcccccccgacgtggggaggaggggatcccggcggtggtcgaagaagcgggccgccgccgccgccgccgcgaggggctacggcgccggcagcgggaatggcgtgaagcagccggcctctgccgcggggaagcgggtgatggtggtggtggacgagagctcgggagccaaccacgccatgatgtgggcgctcacccacgtcgccgacaagggggacttcctcacgctgctccacgtcctgccgcgctccggcagcggcaggggcgaggaggcctcctccctcgccaactcgctcggcacgctctgcaaggcctccaggccagaggtggaggtcgaagcgcttgtgatccaagggcccaagctgggcaccgtgctcagccaggtgaagaagctggaggcctccgtgctggtgctcagccagtgcaggccatctccctgctggttaagctgcttcctgcggagcagcggcgaggagtttgtggagcagtgcatcaaccaggcggagtgcctgacgctggcggtgaggaagcagagcaagggcgtcggtgggtacctcatcagcacccggtggcagaagaacttctggctcctggcctgacaaccatgcattttacctagctagttactactgctacatgatcacatttgttttaagtcactcccgtatatgtgctgtcatttcgtgtcatcaagtgcgtcacaagaaagaccatctctctctctccttcatcctgttgtaaagcgaaaagagcctccgaatctgaccacctttctacgaacctgtatcttccctgcaagtctttagcgtgcgtgtagtactgtgatctgcactgaacaatcatgtaatgctgcataaatgaccaattctgttgtaaaaaaaaaaaaaaaaaccggcgcttcttgcttgc

SEQ ID NO: 34213 - DNA, 810 bp, Zea mays
  Clone ID: MRT4577_131205C.1
acactccccttctctctcccttctttcatctcccctccccatctggatcctccgccgccggttccccattgctgcctccatcgcccccactcctcgccggttccccattgctgcctccaccgcccccgctcctcgccggttacccattgctgcctccaccgcccccgctccgaggagggccacgaaggccggatcctggactcgttgtcgcgcgccagggcaaatttgcccacaggaaatgcatacagagatggtgcaacaagaagggaaatgtgtggtgtggcctgtctgatctatctagcagcggcggcggggccgtacaaagagatgctggaagtggtgaacgcgtgcgcggcccggatccggtgacgcctccgtccagcttccaagcgctgcctcctcaacgatatcctgtttctctgcactgggttgcggcctgtggtactggtcgactatggtggcacaatgcctcagctacaagaaaatctttgtggcctgctatatcttgcccgacagttcaagctctgcaaggtgaggtctgttcagtttggccagaaaggcatcccctacctgaacacctacgacgaccgcaccatccgctaccccgaccctctcatcaaggccaacgacaccatcaagaaatcgatctggagaccaacaagatcatggacttcatcaagttgtatttgccctttcatagacttcatcatgttatatacttagttaggctcaatgttagcacaaatagttgatgaggcagtttacatttagagtacacttatgtatgagttatttgacaatgcttattta

SEQ ID NO: 34214 - DNA, 361 bp, Zea mays
  Clone ID: MRT4577_131206C.1
ttgcaaagcaggtgtccgtggtgggtcacgactggcgcgccatcatggcgtggtacctatgcctgttccggccgaaccgagcggcggcgctggtcaacaccagcgtgagctatatgcgccacatgttggtgcgcgccgccgccgccgccgtaacgcccatcgactacttgcaccggacctacgggcccagctactacatgtgccgattacagacaaacaatttgtcgacggccggccggacgacggctaccaccgatcgactagcccgaccgatgtgggtcactgcacgcaacacccggtgcgggtgacgacggtgaagcacacaggggccaggtcgggcacgtactgccgcaaggggaag

SEQ ID NO: 34215 - DNA, 2946 bp, Zea mays
  Clone ID: MRT4577_131207C.1
cggggttgggagtgtcttgccacgctcgtgaatcgctctgctttacgcggccttgtccttgaaccacctcgccgtgcatccatatagcccccgatgcgcccttccctctgcacgtagccatatcacaccgcacacagtactcgtcctccttgcagagcttgcaccaacacgccaccttaccttgctttgctcgcactcgcacacagttgcgagcgcattgcttgcattgcgcagccgcaggccgcagcacgaagctagccagtaggcggtagatggcgagcagcgcggggaaccgcttcctgaggcagctgagcgcgagcaacggcgacgaagcggtctgcggcggcctgcagatggaccagcaggagtacggcggcgccggcgtggggaggaggggatcccggcggtggtcgaagaagcgggccgccgccgccgccgccgcgaggggctacggcgccggcagcgggaatggcgtgaagcagccggcctctgccgcggggaagcgggtgatggtggtggtggacgagagctcgggagccaaccacgccatgatgtgggcgctcacccacgtcgccgacaagggggacttcctcacgctgctccacgtcctgccgcgctccggcagcggcaggggcgaggaggcctcctccctcgccaactcgctcggcacgctctgcaaggcctccaggccagaggtgcacacctgcaacaacacatgcatttgcatttgctgattagtggagttcaattgtaactagttactagctcctaaggagcgcgcgtttagccagcttaggcggcagcatatgcttggagccttcctgctgcggaccagcgaattggaggtattagctcactgaataagcctactccagcggcagagccgcgaggagtttaaggagaagtacagcaaccaggcggagtgcctgaccctgggggtgaggaagcagagcaaggtcgtcggaggaaagctcatcagtacccgttggaaaaagtggttaaggctctcggcacttgagcaattgaggttgcctatctatacttgtatccagttgcataaatcgtattcgtagaaagacgagatcagaatcccctttttttcctgcttggatcaggatctaggtccccaaagggcaccatatgcagcgttcgagacaactctgtagacaaccataaaaatggtgttgtactatctctggcttcaccagctgtccagctccctgctccaccactagtggacctgttctatggtggatccaggtaaatctaaatctggaataacttatttttttggctttgtgaagttgttccaaacaaacccatagcaatcaactccaaaggaagtaagcaacacagactggaggagggctctctatttcctccctggtcccctaaaatctggaaccatgaaccatcgcattatgaaatgcaatatcctgcccggtttctgtttgcttcaatcaacgccatagttattttaatgtctgtgcacctgcctgcttaaatacgacagtagaggcgcatcaactgttcctttgtcttgttgtgctgtgccctgtaaatgtaaagaagaagaggtcatggtggctcacgatgagaaatgggtgtgaatgatggtaggtggaggtcgaagcgcttgtgatccaagggcccaagctgggcaccgtgctcagccaggtgaagaagctggaggcctccgtgctggtgctcagccagtgcaggccatctccctgctggttaagctggtaaggcactccgcaccccgtaccccttctcctatcttatccgctctgcatttgtctcggaaatgtgaagctctcagaggtcaactatggaccagtaaaattggggtgagggaatctctcatgatgccaatccatagcgtttcgtttaaaaatggaaaacgaagcttagacttcagaactagtaatttacatgtctgcaattccagcagaatattcgactagtatcagatttagcttatcctctcaggtaaacaatcctaaaagcaataggtcaaggctcaggagtgagctgattggcacttatttagttgcgtttgcgtctcaatgtatactttctgtaagataaatcaggtaaaaaatgtaattatgagagggcctactcgcaagtggtggccaaactatttgtaaagaatcctcgctcgccaccgttcagtactagggtccatggctttgggtgaaaataacgcctttaggatgcagctccatgtgcaatccataaatccaagatgccatgcatgtccttctagatacatctctcccaaacaaaagcaagaaccacgcacacagatgccagcgagatacgagtacagtacactttttgctgcaatgtgacatcacatgtggaggggcagctgaacctctctaggttggataggattattagggcaaatgtagtaagtactcttcacatcagtgtctgataaccagccgttgtttgagcaaattccaatgctgtgaccctttctttttgcagcttcctgcggagcagcggcgaggagtttgtggagcagtgcatcaaccaggcggagtgcctgacgctggcggtgaggaagcagagcaagggcgtcggtgggtacctcatcagcacccggtggcagaagaacttctggctcctggcctgacaaccatgcattttacctagctagttactactgctacatgatcacatttgttttaagtcactcccgtatatgtgctgtcatttcgtgtcatcaagtgcgtcacaagaaagaccatctctctctctccttcatcctgttgtaaagcgaaaagagcctccgaatctgaccacctttctacgaacctgtatcttccctgcaagtctttagcgtgcgtgtagtactgtgatctgcactgaacaatcatgtaatgctgcataaatgaccaattctgttgtaaaaagaaaaaaaaagggcggccg

SEQ ID NO: 34216 - DNA, 642 bp, Zea mays
  unsure (1)..(642): unsure at all n locations
  Clone ID: MRT4577_131208C.1
gggtcgnacccacgccgtccgtccgcattgcatcgtgccgccggctgcagcagcgaaaacgaagctctggtacatggcgagcagcgcggaggagcgcttcctgaggcagctgagcgcgagcaacggcggcgacgaaggggtctgcggcggccagcagctgggccacaaggagtactgcgcggagaggaggggctcccggcggtggtccaggaagcgggccgccgccgcgaggggctactgcggcgggtacgacgactacgacgtgaagcagcaggcggaggccgcctctgccgccgcgaggaagcgggtgatagtggtggtggacgacacctcgggctccaagcacgccatgatgtgggcgctcacccacgtcgccagcaagggggacttcctgacgctgctccacgtcctgctgccgcactccgcctccggcggcggctgtagcaggggcgaggaggcctcctccctcgccaactcgctcggcacgctctgcaaggcgtccaggccagaggtggaggttgaagccctggtgatccaaggccccaagctgggcaccgtgctcagccaggtgaagaagctggaggcctccgtgctggtgctcggccagggcaggccgtctccctgctaccgctggctaagctg

SEQ ID NO: 34217 - DNA, 412 bp, Zea mays
  Clone ID: MRT4577_131209C.1
gactagttctagttcatgagcggacactatagcaggtccaagcaaacctacgcttgcgtgcgacggcttatttatgctatagggcaccggatactaatcgactgcccggggttatagatcctcgggactgggatcaaccgggggactacccaattttttcgcctgccagcatatgtgctgttgggcagctgtggtattcggcaagaggaccacaccgtacgtccttaacagcaggacacagcctgaatggcggaatggcacgcgctcttaattgacacatgaagcgcgctatgtatgatgcgaactcacatactgaccgatgcactggccaaggaactgtagcaagttccttaccgtaagttactgcccattcttgaacagttagctcgatatccaagacctgctctaaatc

SEQ ID NO: 34218 - DNA, 178 bp, Zea mays
  Clone ID: MRT4577_13120C.1
ggccagtatacaatgctgatgctaccgcagctggcggtgccatgtatgagttggagatcgaagcatacctcacagagcacagcgagcaagtgctatgtctcatccgccctcaatgccccacatgggtcccgccaccgtgaggggtacgctcgtccgaaccttcatcaggagtcacttg

SEQ ID NO: 34219 - DNA, 615 bp, Zea mays
  Clone ID: MRT4577_131210C.1
aacaagggacaaagaacagggggcaggtcccataaaaaggatcttttttttgttaaaaacaaaataacgggggttttttgctttcccccataagggaccccggggaaaaaccaaatcctggaaaaggaagggattaaaaaccccgcccaccccacgcggaaaattttaaaaattcgggggggcagcctgggggaaacccaacctccatagttaaggggggcccccaaaatcgtttccccatccaaaaaaacccccggggggcatttgattacccccaaggctgcaaatgcataaaccaagctcctaaaccctttttccaaaatataggggaggccggcaaaaaaaagaaaaaggccccatcgggggcggggggggaaaaaccaaaccgaacgggcgggtggggacagaccccccccaaaaacaaaaaacccttcacaaggcctttgcccaaagttacttttggcagggggggaggaaaacaaattccctctttttggaaaacatccaaaaaagtagggccgggcttaggaacccccaatccataaaaagccggggttaaaaacaggacccaaacagggctaatcctaaaacaggcccagttactttaataatttt

SEQ ID NO: 34220 - DNA, 758 bp, Zea mays
  Clone ID: MRT4577_131211C.1
atcccagcacgtctcgtctcccggccctcccacaaaaaaaaactgctcggttgctgctcctgctccgccgcgccggcatcacgtgtggcatcttagccgtgctcggttgctccgactggtctcaggcaaagagggctcgcatcctcgcctgctccagaaggttgaagcacaggggccccgactggtcgggcctttaccagcacgagggcaacttcctggcgcagcagcggctcgccgtcaccaagcgccacctcgtcgagaccgaggccgccgagaagttcggcaccgagctccactcctttgtcgtcggcctcgagggctcccctgacctgaaggccgcacgagaggtcgctgactacctcggaaccatccatcacgagttccacttcaccgtacaggacggcatcgacgcgatcgaggaggtgatctaccacgacgagacgtacgacgtgacgacgatccgggccagcacgcccatgttcctgatggctcgcaagatcaagtcgctgggcgtgaagatggtgctgtccggggagggctccgacgagctcctgggcggctacctctacttccacttcgcccctaacaaggaggagttccacagggagacctgccgcaaggtgaaagccctgcaccagtacgactgcctgcgcgccacaaggccacgtcggcgtggggcctggaggtccgcgtgccgttcctcgacaaggagttcatcaacgtcgccatgggcatggaccccgaatggaaaatgtacg

SEQ ID NO: 34221 - DNA, 373 bp, Zea mays
  Clone ID: MRT4577_131212C.1
ccggatcgtcccacgcgtccggtgcttggggactgagaggtctagggtctgatatgcatgcccgatgacatcgcgctgggcggggacactcgcactggtgaggcatcggctaagatgagtttcgcctgcctggatgcttgtgctacgatgagcttgcttgataagacgtagttgcttgagtgcgcaatcatgtgcatggaaggacctacggaaactgtctgcatggacatgcccaacccgttcatacactgctgactatcacatgacacgaacgcttggagtgtgtgcttaccgcgttctgatattccatgaccctgatcacatgtctgcatcagttacatgatacatgcgctatgctactaacaaaccctac

SEQ ID NO: 34222 - DNA, 1286 bp, Zea mays
  unsure (1)..(1286): unsure at all n locations
  Clone ID: MRT4577_131213C.1
attctcagcacgtctccgtctcccggccctcccacaaaaaaaaaactgctcggttgctgctcctgctccgccgcgccggcatcatgtgtggcatcttagccgtgctcggttgctccgactggtctcaggcaaagagggctcgcatcctcgcctgctccagaaggcaagagcacccgtccatccattgcacttagtttcctccagtccactacccaacaccctagcagagtctagactagctagcattttagtgtcagttcgtcctccgtcgggccgcgcgccgagggatcttgattcctgggaagtgtgaaccaaggactggttcactggttggttggtgtcgttttattttgcctcttcaccggggtcccaggaggctcttctcataggaatcataaagaatcgaacggtagagactagctctagctagggtgggccgttctgaaaataaaggagctagcatagcatgggaaccttcgtcgtcgttctcgctgctagtaacccgggccccgtggtgttttttgtgttactgattacaatgatagcgttgctccggttagttggttattagtttgagttttgactggcggaggacctgcctgacgatccacgtgccgtgcgcaggttgaagcacaggggccccgactggtcgggcctctaccagcacgagggcaacttcctggcgcagcagcgtctcgccgtcgtctccccgctgtccggcgaccagccgctgttcaacgaggaccgcaccgtcgtggtggtggccaatggagagatctacaaccacaagaacgtccggaagcagttcaccggcacacacaacttcagcacgggcagtgactgcgaggtcatcatccccctgtacgagaagtacggcgagaacttcgtggacatgccggacggggtgttcgcgttcgtgctctacgacacccgcgacaggacctacgtggcggcgcgcgacgccatcggcgtcgacccgctctacatcggctggggcagtgacggttccgtctggatcgcgtccgagatgaaggcgctaaacgaggactgcgtgcgcttcgagatcttcccgccgggccacctctactccagcgccggcggcgggttccggcggtggtacaccccgcactggttccaggagcaggtgccccggacgccgtaccagccgctcgtcctcagagaggccttcgangaggcggtcatcaagaggctcatgactgacngccccgttcgnggtccttcctctccggnggggctcgactcctcgnntcgtcgcctccgtcacc

SEQ ID NO: 34223 - DNA, 443 bp, Zea mays
  Clone ID: MRT4577_131214C.1
cgtcccttgcacccgtccgtaagctgggatcctctaaagcggccgccctgtgggtttttttttttttttttttttttttttttttttttttttttttgggccctttaaagatgtacaaatttttcttattccttatttttccaatggataatttaaaaggcttgccaccctttcagaacaaataaaacgtgaatttttttttcaacgcaggcggtgtataggcaacaaacttttgccagatagacaactttgttgcctacgagccaaccgaaactccccaccccccaccgtggtggagttttgaagaaaacataaaacagcttccaggtcttccctcactcagagagggaaccacaccggggggggatggacaatttccattttcaacctaagaacgttggcggggaacacatttttcgacattggccttttgggcctgaaaa

SEQ ID NO: 34224 - DNA, 2311 bp, Zea mays
  Clone ID: MRT4577_131215C.1
cattgggtacctcgaggccggccggggcatcccagcacagcacgtctcgtctcccggccctcccacaaaaaaaaaaaactgctcggttgctgcgtgctgctcctgctccgccgcgccggcatcatgtgtggcatcttagccgtgctcggttgctccgactggtctcaggcaaagagggctcgcatcctcgcctgctccagaaggttgaagcacaggggccccgactggtcgggcctttaccagcacgagggcaacttcctggcgcagcagcggctcgccgtcgtctccccgctgtccggcgaccagccgctgttcaacgaggaccgcaccgtcgtggtggtggccaatggagagatctacaaccacaagaacgtccggaagcagttcaccggcacacacaacttcagcacgggcagtgactgcgaggtcatcatgcccctgtacgagaagtacggcgagaacttcgtggacatgctggacggggtgttcgcgttcgtgctctacgacacccgcgacaggacctacgtggcggcgcgcgacgccatcggcgtcaacccgctctacatcggctggggcagtgacggttccgtctggatcgcgtccgagatgaaggcgctgaacgaggactgcgtgcgcttcgagatcttcccgccgggccacctctactccagcgccggcggcgggttcccggcggtggtacaccccgcactggttccaggagcaggtgccccggacgccgtaccagccgctcgtcctcagagaggccttcgagaaggcggtcatcaagaggctcatgactgacgtcccgttcggggtcctcctctccggcggcctcgactcctcgctcgtcgcctccgtcaccaagcgccacctcgtcgagaccgaggccgccgagaagttcggcaccgagctccactcctttgtcgtcggcctcgagggctcccctgacctgaaggccgcacgagaggtcgctgactacctcggaaccatccatcacgagttccacttcaccgtacaggacgggcatcgacgcgatcgaggaggtgatctaccacgacgagacgtacgacgtgacgacgatccgggccagcacgcccatgttcctgatggctcgcaagatcaagtcgctgggcgtgaagatggtgctgtccggggagggctccgacgagctcctgggcggctacctctacttccacttcgcccccaacaaggaggagttccacagggagacctgccgcaaggtgaaagccctgcaccagtacgactgcctgcgcgccaacaaggccacgtcggcgtggggcctggaggtccgcgtgccgttcctcgacaaggagttcatcaacgtcgccatgggcatggaccccgaatggaaaatgtacgacaagaacctgggccgcatcgagaagtgggtcatgaggaaggcgttcgacgacgacgagcacccttacctgcccaagcatattctctacaggcagaaagaacagttcagtgacggcgttggctacaactggatcgatggcctcaaatccttcactgaacagcaggtgacggatgagatgatgaacaacgccgcccagatgttcccctacaacacgcccgtcaacaaggaggcctactactaccggatgatattcgagaggctcttccctcaggactcggcgagggagacggtgccgtggggcccgagcatcgcctgcagcacgcccgcggccatcgagtgggtggagcagtggaaggcctccaacgacccctccggccgcttcatctcctcccacgactccgccgccaccgaccacaccggcggtaagccggcggtggccaacggcggcggccacggcgcggcgaacggcacggtcaacggcaaggacgtcgcagtcgcgatcgcggtctgacgagagtacgtgctcgcgcacctccctgctagcttctaccgggctgcagcctgcagcatgcactgtgcgagcacagccgatcagcgccaataaactggaggataagaacgactggtagctgtgtgtgtgtgtgtcgtgcgtgcccaccggccatatcccggtgcggcagcacgtgctattgttacgtgttgtactgccaccagcgtacgtgtctgtgtgtctcgatcatatctgtacgtttttagatttagaagagaaaaaaaaaaagtatgtccgtgtctgtatgtctggatcatatctgtacgttcttagatttagaagaaagaagaaaaacaatatatacgtaaaaaaaaaaaaaaaaaaaaaaaaaaaaaaaaaaaaaaaaaaaaaaagaaaaaaaaaaaaaaaaaaggccccta

SEQ ID NO: 34225 - DNA, 265 bp, Zea mays
  Clone ID: MRT4577_131216C.1
attcggctcgagcggaaatagcaacaccctggcttcaacaacatccggactgagcacgaaacggggccctttgaggccaactcgggatggcaacccagacaagcaacaacggaatcggcgcacagaacccggtgacaatactgctatcgcaacccaagcatcgctggggaatccggcagcagtcgcgcgccaaccgcaccgaatgcgaccaccacctgcccaccccgggcataactctgggcgcggtgcttatggtcgtcaatga

SEQ ID NO: 34226 - DNA, 108 bp, Zea mays
  Clone ID: MRT4577_131217C.1
gcggttaggcacacccatgcacgtgccaacatctgtatccaatccagtgccaggtacatggaacctggggtgttggtatttccccaaaccttggccagtgcgactatt

SEQ ID NO: 34227 - DNA, 591 bp, Zea mays
  Clone ID: MRT4577_131218C.1
tttttatataaatgtatttaaaattatattagcttaattgttctaagtttaaattaagattattataatggaattgaattccaacgatccaaacatggtgtacaagttattaagatagatcaaggcacgacggatctggataaaatatctagaggccataaaaatacctcgaaattttctaaattagatttagcatatgaaaaatgaaaacatatctagaaacgactaggtgacccctaaaatattctaattgatctttaagtgtgttctaaaaaactattcacgataaaaagacgcaaccaatcattatggatgaaaacaataaccaaaaatctagtaaccctatacattaagacaatatcatcttccaaaattattgtatttaaaaaattaaaatttaaatttctggtaacatccgattatagttggcaataaatatattatttattaaacattggtaattttcgaccggctgacaattatttcggaatgatgacattgttctgaccgttctatccctagatcctagatgattatacgttaatttaaatgcataatgctgggttccgtttagttggaagggataatttt

SEQ ID NO: 34228 - DNA, 948 bp, Zea mays
  unsure (1)..(948): unsure at all n locations
  Clone ID: MRT4577_131219C.1
ngaaaccgggagagagagagaggtgctctcctccttttggcccctttgcattgggttgccgcaacactacagacacaaacacagtctaggaggcttcttccgctcgctcagggagaggaagcggaaggcttggaaggagaagagaatggcggggcggcgcgcggaggaggagtacgactacctgttcaaggtggtgctgatcggggactcgggcgtcggcaagtccaacctcctctcccgcttcacccgcaacgagttctgcctcgagtccaagtccaccatcggcgtcgagttcgccacacggacactccatgttgagggcaagatcatcaaggcgcagatctgggacacggcaggccaggagcggtaccgggcgatcaccagcgcctactatcgcggggcgctgggcgcggtcctggtctatgacgtgagcaagcccaccaccttcgagaacatcagccggtggctcaaggagctacgcgaccacgccgactccaacaccaggatcatgctcgtcggcaacaagaccgacctgaggcacctccgggccgtcgccaccgacgacgctcggagcttcgctgaggcagaaggcctgtcctacatcgagacgtccgcgctggaggccaccaacgtggaggaggcgttccagctcatcctgggcgacatttaccgggccgtcagcaagaagcctgtggcgtccgacgaggttggcgccggccagggaggcgtcaaggaaggtaagaccatcgatgtggcgactggtgctgatgccgccgctcacaagaagcagtgctgctcggcttagaagttagaagaacccatgctggtggtctctcgttcagtggcgtatgtgttgttgtgatggttgtcgttgttgttttttttctcttcttccagtccaaaagtttgttgattcgttttgccaaaaaaaaaaaaaaaaaagcggcc

SEQ ID NO: 34229 - DNA, 174 bp, Zea mays
  Clone ID: MRT4577_13121C.1
cgaagaaacagattataacttgctgactatgatggcagttcgaactacgtgtttgggtgggaacaggggaccttctccaaccttctttaacattcgggctcatattccttactgccattggttggaggaactgccctattaccatatttattggaggagagagttgatgagaca

SEQ ID NO: 34230 - DNA, 846 bp, Zea mays
  unsure (1)..(846): unsure at all n locations
  Clone ID: MRT4577_131220C.1
ggcaaaccggnagtatatacggagacacctcctccttttcccccatttgcattgggttgccgcaacagtgcaacactacagacacaaacacagtctaggaggcttcttccgctcgctcggggagaggaagcggaaggcttggaaggagaagagaatggcggggcggcgcgcggaggaggagtacgactacctgttcaaggtggtgctgatcggggactcgggcgtcggcaagtccaacctcctctcccgcttcacccgcaacgagttctgcctcgagtccaagtccaccatcggcgtcgagttcgccacacggacactccatgttgagggcaagatcatcaaggcgcagatctgggacacggcaggccaggagcggtaccgggcgatcaccagcgcctactatcgcggggcgctgggcgcggtcctggtctacgacgtgagcaagcccaccaccttcgagaacatcagccggtggctcaaggagctacgcgaccatgccgactccaacaccaggatcatgctcgtcggcaacaagaccgacctgaggcacctccgggccgtcgccaccgacgacgctcggagctttgccgaggcggaaggcctgtcctacatcgagacatccgcgctggaggccaccaacgtggaggaggcgttccagctcatcctgggtgacatttaccgggccgtcagcaagaagcctgtggcgtccgacgaggccagcgccggccagggaggcgtcaaggaaggtaagaccatcgatgtggcaactggtgctgatgccgccgctcacaagaagcagtgctgctcggcttagaagttagaagaacccatgctggtggtctctcg

SEQ ID NO: 34231 - DNA, 1120 bp, Zea mays
  Clone ID: MRT4577_131221C.1
tgggtacctcgaggccggccgggggtggctgtagtttattggtacctcgacgccggtggggaatagagcccgagcgccgagggggggagggcaaaccgggagagagagagacacctcctccttttcccccctttgcattgggttgccgcaacactacagacacaaacacagtctaggaggcttcttccgctcgctcaggtccctccgcctccgccgtatcggagggagaggaagcggaaggcttggaaggagaagagaatggcggggcggcgcgcggaggaggagtacgactacctgttcaaggtggtgctgatcggggactcgggcgtcggcaagtccaacctcctctcccgcttcacccgcaacgagttctgcctcgagtccaagtccaccatcggcgtcgaattcgccacacggacactccatgttgagggcaagatcatcaaggcgcagatctgggacacggcaggccaggagcggtaccgggcgatcaccagcgcctactatcgcggggcgctgggcgcggtcctggtctatgacgtgagcaagcccaccaccttcgagaacatcagccggtggctcaaggagctacgcgaccacgccgactccaacaccaggatcatgctcgtcggcaacaagaccgacctgaggcacctccgggccgtcgccaccgacgacgctcggagcttcgctgaggcagaaggcctgtcctacatcgagacgtccgcgctggaggccaccaacgtggaggaggcgttccagctcatcctgggcgacatttaccgggccgtcagcaagaagcctgtggcgtccgacgaggttggcgccggccagggaggcgtcaaggaaggtaagaccatcgatgtggcgactggtgctgatgccgccgctcacaagaagcagtgctgctcggcttagaagttagaagaacccatgctggtggtctctcgttcagtggcgtatgtgttgttgtgatggttgtcgttgttgttttttttctcttcttccagtccaaaagtttgttgattcgttttgccagatagtacctttgttggagggataatcatgctcacatatatattctctaaagcaagcagttatatatgattataccatcacc

SEQ ID NO: 34232 - DNA, 352 bp, Zea mays
  Clone ID: MRT4577_131222C.1
gtggaatacagtagccaaaattgaaccaccgtggggggcaaaatatttttcgttcttaagccccctggtctttctggaagtggtggtgacacgacacacatttttctcaatactcacaagagcctatatatgtgcttttttccccatacatttcataaatgagcgctttattatgtgaaaacccagccctttaaccctacaggatccagcaagcaatcgcaacaagcaacttacctttatcacacctgttctttcaacaatcgccagccctatctttggtgcagtcattggtgcaaaccatcagggcagaacagttgcagcaactcgtgctaccagtgatcagccaagtagc

SEQ ID NO: 34233 - DNA, 1092 bp, Zea mays
  Clone ID: MRT4577_131223C.1
cctcgaggccggccgggccgggatggggtccgagcgccgagggaggagggcaaaccgggagagagagagagagacacctcctccttttcccccctttgcattgggttgccgcaacactacagacacaaacacagtctaggaggcttcttccgctcgctcaggtaggtgtactgtactgtagtaggttggttctccattcatcattcagctcacaggtccctccgcctccgccgtatcggagggagaggaagcggaaggcttggaaggagaagagaatggcggggcggcgcgcggaggaggagtacgactacctgttcaaggtggtgctgatcggggactcgggcgtcggcaagtccaacctcctctcccgcttcacccgcaacgagttctgcctcgagtccaagtccaccatcggcgtcgagttcgccacacggacactccatgttgagggcaagatcatcaaggcgcagatctgggacacggcaggccaggagcggtaccgggcgatcaccagcgcctactatcgcggggcgctgggcgcggtcctggtctatgacgtgagcaagcccaccaccttcgagaacatcagccggtggctcaaggagctacgcgaccacgccgactccaacaccaggatcatgctcgtcggcaacaagaccgacctgaggcacctccgggccgtcgccaccgacgacgctcggagcttcgctgaggcagaaggcctgtcctacatcgagacgtccgcgctggaggccaccaacgtggaggaggcgttccagctcatcctgggcgacatttaccgggccgtcagcaagaagcctgtggcgtccgacgaggttggcgccggccagggaggcgtcaaggaaggtaagaccatcgatgtggcgactggtgctgatgccgccgctcacaagaagcagtgctgctcggcttagaagttagaagaacccatgctggtggtctctcgttcagtggcgtatgtgttgttgtgatggttgtcgttgttgttttttttctcttcttccagtccaaaagtttgttgattcgttttgccagatagtacctttgttggagggataatcatgctcacat

SEQ ID NO: 34234 - DNA, 269 bp, Zea mays
  Clone ID: MRT4577_131224C.1
cccacgcgtccgaaaaaaaaaaaaaaaaaaaaaaaaaaaaaaaaaaaatgagaatagggaaaaaacataaattactataaaaaaaaaaaaaaaaaaaaaaaaaaaaaacataaaaaaaaggggcgggctgtctttcggatccgcgggtcttcacttatccaggccaggggataattttcgcttttctggtctccaaattaattttattcgcggcgccttacaataaattcaggttgcgaaacttttgctttcctcacctaaataatctt

SEQ ID NO: 34235 - DNA, 412 bp, Zea mays
  Clone ID: MRT4577_131225C.1
gccttcaccctcaagactgtttttgagaaggagtggtggtaagccacatacaccaaaatgcagaccggggcttggactgataggaaaccggccgtcatgaacccaaatgggccacagatcttaatggccaaacacacttgcggggaccgcgcccgcgaagctggcattgaaaaacggtgccaacatgacgacagagtgtcttaagaaagcaattcattacttgacaacaaacgaaggacacgtcaggaaagctttgtgattgaaaccagcccagtgagcgaacgcgcgggtgggagacttcgccaaggaacgggatccgttgcttgacaaggtgaacgacccagcggtcgcgaacagggcaggttaaaaaaaaaaaaaattcgctaccgagtctcggttgtatcaaggaatt

SEQ ID NO: 34236 - DNA, 1181 bp, Zea mays
  Clone ID: MRT4577_131226C.1
cattgggtacctcgaggccggccgggaatagagctggagcgccgagggaggagggcaaaccggaagagagacggagacacctcctccttttcccccactttgcattgggttgccgcaacagttcaacactacagacacaaacacagtctaggaggcttcttccgctcgctcgggtaggtgtactctactgtagtaggttggttctccattcatcattcagctcacaggtccctccgcctccgccgtatcggagggagaggaagcggaaggcttggaaggagaagagaatggcggggcggcgcgcggaggaggagtacgactacctgttcaaggtggtgctgatcggggactcgggcgtcggcaagtccaacctcctctcccgcttcacccgcaacgagttctgcctcgagtccaagtccaccatcggcgtcgagttcgccacacggacactccatgttgagggcaagatcatcaaggcgcagatctgggacacggcaggccaggagcggtaccgggcgatcaccagcgcctactatcgcggggcgctgggcgcggtcctggtctacgacgtgagcaagcccaccaccttcgagaacatcagacggtggctcaaggagctacgcgaccacgccgactccaacaccaggatcatgctcgtcggcaacaagaccgacctgaggcacctccgggctgtcgccaccgacgacgctcggagcttcgccgaggcggaaggcctgtcctacatcgagacgtccgcgctggaggccaccaacgtggaggaggcgttccagctcatcctgggtgacatttaccgggccgtcagcaagaagcctgtggcgtccgacgaggccggcgccggccagggaggcgtcaaggaaggtaagaccatcgatgtggcgactggtgctgatgccgccgctcacaagaagcagtgctgctcggcttagaagttagaagaacccatgctggtggtctctcgttcagtggcgtatctgttgttgtgatggttgtcgttgttttttttttctcttcttccagtccaaaagtttgttgattcgttttgccgatagtacctttgttggagggataatcatgttcacatatatattctctaaagcaagcagttatatatgattaccccatcacctagtcaaaaaaaaaaaattctaaagttaagtaca

SEQ ID NO: 34237 - DNA, 161 bp, Zea mays
  unsure (1)..(161): unsure at all n locations
  Clone ID: MRT4577_131227C.1
gntgtgtggagcaatncaggtcggtttctatctatttacaatttctcccagtacgaaaggacaagagaaatggagcctccttaccataagtgctcncaaccaatttatgnaaaanatctcaataaagtatatatgtacaatanatanacctagcccaggtt

SEQ ID NO: 34238 - DNA, 821 bp, Zea mays
  Clone ID: MRT4577_131228C.1
aacaaaacttctttctaccgttctcccacttgttcaatccattttcaccccccaaaatcttacacgaccattacatttcgggtgttttatccttctttcctctctctctcccttttcattttaccttgacatgaaagctatgggaaaacgcccgggagcctcgcaaactgttccactgacacgtgggcgccgacatttctaacggtgccgtttgtcagcggaacatgttgcaacgctgtagaaaggaagaagctccccgtacccagtgttttcgtgctcgaattcttgttgcgttctgagattctccgctcaagtagcaacaatgcccgtctttatccagtcccaccggcggcaagggcttgtggtccgaggtggagtcgacgagcgttgtacggcttcggatcgcgcgcgtactctggtttgcgcgtgagcgggctttctttgcgcgccaaattcaccgcgatcgacggtgcccaaaccgtcgtcgtgaaattcggcgccgtcgcctagccgccacttctgcttgagatgccaagccagacgatccggccggatgtggcatcgctggtgccggcggacatctacatcccgtcgagccactccctatctccgacatcgcggaggagctcgggctccggccagagcactgtcaccactactgcaaatacaaggccaagatatgtttctccatttttcttgagtaagctctcgcctctgcagaactccttaattgctgcatgatctgaaaacgtcagatcttgacgaacaaagaggagaagcagtcatcagacgtcaggtttttggatttcgatcagtgatga

SEQ ID NO: 34239 - DNA, 1026 bp, Zea mays
  Clone ID: MRT4577_131229C.1
gtgcggcgctcaggcggcgggtgcggaacactcggtccgcccgttcccaccctccagggtcgccaccgctagcagttgcagctagcagagccgactgagcttgacacgcagtcagcgagtccgacgacgccatggacgccgtctccagcgctggcgtggcgccgcagagcgcgttcctatcccactcctccttcgccgacgcggccatcgcgcgcgcgctccactcctccctctccgatcacgccccggagccgcccgccacggcggcggcggcggcgatgctgatgcacggcgccgtggcagggacggactgtccccccgcggcagcaccgtcgccatcgcagtcctcgtccgcgcggtgccgggtgggcccggcggccgggcgcgcggggaagcggcgtcggccgcggccgtccaagcgcgcgcccaccacgtacatcagcgccgacgccgccaccttccgcgccatggtgcagcgcgtcaccggcgccgacgaggacgacctgcagccgcagcagcaggacagggacagcctcggcctcctcctgccgcacctcggcgtcgagcagttcctacaggcggcgggacccgcgtcgcacgtcgctgttgctactgcaccgtacgcgacggcctcgccgcaccaggcggcgtaccagcaccagcagccgctgttcccgacgctggactcgtggaacgtcatgtacgggaagaaggatgaggtggtctcagtcctgactgctggccaatgagaacgtcatgtgcagctgaagctgatggatcccttctccctgttcgcgcagaagcagcacatcacatattacatttggggtggtcttgattggtctagggatggaggtagcagagttgtgttaatcacagaaccagggacagacagtcacgttttgtactgatttgcgatggccgtacctgtagttgcagctgcatgccttgcatacctgcagtctgccgttctcttttgattaaaagaccgcagtcctcttttgatttaaaaaaaaaaaaaaaaaa

SEQ ID NO: 34240 - DNA, 385 bp, Zea mays
  Clone ID: MRT4577_13122C.1
gggatgtttgggcgccagcaccaaccgtggatgcaaggctattgcccagtccggcggggcctacagcgtcctgcttaaggacggtatgactcgagctccgggcggtcggttcctatttgcacgccgcgccatcgagcataaagcctttttggaggacccagcgaactttgacaccctggctatggtgcataacaggtcaagctgatttcgaaggctgcaccgagtgaaatgttcgattgcagggacgaacctttacatgaggttcagctgccgcacaggtgatgccatggggatgaacatggtctccaaaggagtacacaacgtgctggactacctgcaggctgacttgcctgatatggatgtcatcaacatatcaagtaacttt

SEQ ID NO: 34241 - DNA, 282 bp, Zea mays
  Clone ID: MRT4577_131230C.1
atcctaatatacccttcaatttccatttttaacgctccacctcatctccctcaatgggggttataaccaatgccttaccacacttctgcctcacaaatataacacatctaaagccacctaccctctataccataagaacactctcaccactaatataagtaaacggtccatatcattaaataccttacacttttaatatgtatcccatggtttatcctactcagtagctatcatttatacttaatcttcgactctttgtactattttaacacaaatatttcc

SEQ ID NO: 34242 - DNA, 108 bp, Zea mays
  Clone ID: MRT4577_131231C.1
atcaaatacgcgtacacggccggtagccacagcgccggcacgcagctctcctctcggagaatcgatgccgaactgggcggcggtcgtaatggatctgctgaatcggga

SEQ ID NO: 34243 - DNA, 354 bp, Zea mays
  Clone ID: MRT4577_131232C.1
agggttccgtcccttccctccccccgggtgttttttttttttttttttgggggaaaacccctttttgggtcttttacagccctggcccaactttgggcgcccaaaaggggttagtttccaaaatgggaaacaatgttcaaggtcccaggtttttcaggacagggcccaaattttaacccggtcttttcaacccccgttttctttatttgaactatccctgggctgacgaggttttggaacttttgaatcaccccggggtttttggggggcccccgcccccccccggggttttcctggaaatcccgcaaaacccgttttattatcgggtcaaacaggatgttctggatcccaagg

SEQ ID NO: 34244 - DNA, 304 bp, Zea mays
  Clone ID: MRT4577_131233C.1
catacttaatatcatagatccacccggttcagttgcatacagcaccagagtccaggaggacaaacacagggtcccacaattcaagcctaagggctcaacatctgacaaatttattaccaaaaagacaataccacatttttcttgtggagtttgactccacattcacacaaccacatgcaacacactgtatccctcccggatacgttttataaaaagatcagcaaaccccaatatcgagagcatatggtgggccacttctgagacctcaaagaaaaccctctcatccacatcctatttttcgaca

SEQ ID NO: 34245 - DNA, 857 bp, Zea mays
  Clone ID: MRT4577_131234C.1
gccggccggttcgggattacctactccaccatcaatccccccaatcctgttcaaccacaccaccgcccttcttccgccaaacacccccaccccaccgacacaacacataccgctctcactccatccacccacccgaacaacatctccaaaatggccactgagcgcgagagcaagaccttcctcgcgaggctctgcgagcaggccgagcgctacgatgagatggtcacctacatgaaggaagtcgcaaagatcggtggcgagctcacagtcgacgagcgcaacctcctttccgttgcctacaagaacgtcgtcggcacccgccgtgcttcctggcgcatcatctccagcatcgagcagaaggaggaggccaagggcaccgacaagcacgtcggcatcatccgcgagtaccgccagaagatcgagctcgagctcgagaaggtctgcgaggatgttctctccgtcctcgacgagagcctcatccccaaggccgagactggcgagagcaaggtcttctaccacaagatgaagggtgactaccaccgttacctcgccgagttcgcctctggcgacaagcgcaagtctgccgccaccgccgcgcacgacgcctacaagaacgccaccgacgtcgcccagaccgagcttactcccactcaccccatccgtctcggcctcgccctcaacttctccgtcttctactacgagatcctcaactctcccgaccgtgcctgccacctcgccaagcaggccttcgacgacgccatcgccgagctcgacagcctcagcgaggagtcctaccgcgacagcaccctcatcatgcagctcctccgtgacacctcaccctctggacctcctctgac

SEQ ID NO: 34246 - DNA, 141 bp, Zea mays
  Clone ID: MRT4577_131235C.1
tttatgtgcctgttcctcgcccttggtcaaagatctcaggaactctaggggtacgcatattgtggagactcctacgtattgtccttcatcgctcagtgtgacttagatcccaaacttacaaaaagttgaccggcctcacat

SEQ ID NO: 34247 - DNA, 180 bp, Zea mays
  Clone ID: MRT4577_131236C.1
gccggccgtgccgggaattctgttagtccggtgctgattggttgctttctttctatgagatttgaaaagctaacgagacatgtttgtaaacctggcacaatgaataattgtcaccatgaacaaaatatggtcatgaataaggttgcacacttcaaaaaaaaaaaaaaaaaaaggccccta

SEQ ID NO: 34248 - DNA, 316 bp, Zea mays
  Clone ID: MRT4577_131237C.1
tggtcgatgaactcgcgtgatgcagctgctgacgcgtctaggactgagactggagacaatgtatcacccctgcagaagcaggatcacctcataagcagaacaacgggagaggatctctttgtgaccacacaatggcccatgccgaagcactacatgggctgcaagtagcagttacacatccggaccacagtggagatgcttaataaaagagagcatgaggaagatgaggaacccgaccaagtcaaggagaatcaggaccaggggatgaccacataccagttgccttacacgaaggggcaggagggcatacagttca

SEQ ID NO: 34249 - DNA, 222 bp, Zea mays
  Clone ID: MRT4577_131238C.1
atgcccaaaccggacaaaactttccccctccttatcctcccggtgctccccagccttcttaaccctggggtcggaccacacgagttcggattgagtgactgcccacacagtctcgagtggttgtacgacaaaggagtacagaagacctacttccggaagttcgggctctggtccctcttccggggctacgggttccggatcaacgatccccgcttcttctag

SEQ ID NO: 34250 - DNA, 199 bp, Zea mays
  Clone ID: MRT4577_131239C.1
cacgcgtaagtaaaacttggaatcctctaagacggcacgacccttttttttttttttataaaagaaaacttggccatgaacctatatatcaggatatcaagttgcatgcccggaaaatctaagaaattattgtactaaaacagcaaaaccaaacgaatttgctaaagtcgaacgaacagacggacactaataaccaaaa

SEQ ID NO: 34251 - DNA, 393 bp, Zea mays
  Clone ID: MRT4577_13123C.1
tagggactaccagctggataccctgctggtgcaagtctggagcctaattgcccactgcgagcgatcgtatatggaatcacaatgtacgcacaacagacgagctcaccatggtatagtggactgaccgctgcgtatactgagggagctagcgcacgattgctgtgatgcacgctcactggccacattacgtgggttgaatgcgagcagctgctggtgttagtgagccacacggctcaccactgataggtggctcgaggattgcacactatgccgcttgcgctgtcactgaatggctgtgctgggtagatgtgccgaggatagctgttgcaattgactcataggctgttgtacggcgctccacgcaagcgctagatgtcgcctataagatcgtgc

SEQ ID NO: 34252 - DNA, 197 bp, Zea mays
  Clone ID: MRT4577_131240C.1
ggaggaggaaaaggacaagatggcaagggatgacgggttcccggtgtggaaagcggccctgttcgctggcgtggctgccgcttcccttgcggggctggctggcgtttccatttccatgcctggttccgactccagtttcctcaagctcccccgcaacctccaggacctccaagtcctaactgtccatctggagggct

SEQ ID NO: 34253 - DNA, 189 bp, Zea mays
  Clone ID: MRT4577_131241C.1
aggggccgcccttttttttttttttttatgtgaagagagcaccggacattaaccatgaagcaagaagatgaccgtcaaaaccaccagaagagccgagataagccagtctggcccaaaaaacgcggaccctgagagtgcacctcagatcacattaatagagtgacagaatcctcccgtgccaatcagggt

SEQ ID NO: 34254 - DNA, 1694 bp, Zea mays
  Clone ID: MRT4577_131242C.1
ttttttttttttttttttaattaatcccaaacctccggaaagaagatcagatttcttccatacacgtctagttcgaaacatcaaaactgcatgaatattcatccacgatccaactttctaatataaaataaggatagcacaagaagtcacttagagcacagggtactatcaatgagcttgatcgtgaacctaattcatccttttgatgagctcattgatgtagttctcgcggttaccggcatcaccgccctccacatagtggttcctcttcttcttcaggcctcccagcggcgccttcaacttgaatggccacaggaagttgttggcctccttgaagtgtgcttgcccaagccctcctcgatgacttggttgttggacagagggatcctctgcttgttcagctttccatagcccctcttgtagatcaactccctgacactcttcaagtttgggtacccatatgcaacatatggctcaaccctgcgtagcatgttaatagtcgccttgttgactttgaggaacacaccattgaagatctgcctcaatcgcagaagctgcaagatcttcctggtcttagggtgcatggcgttaataccccggatgcggaccacaaagagcagctttgcttcaggactgacatagaaaccacccttcaaacgggcctcacgcttaagctgcaccagttccttctcctgggcatcgtatccctctcatacgcagctcgcccaggtaagatgtcgtccgtggcgtcgaaggtggcggtgccggagtctgtgctccgcaagcggaagcgcgaggaacagtgggccaccgagaagaaggagaaggccctagtcgagaagaagaagtccatcgagagccgcaagctcatcttcacccgcgcaaagcagtacgccgaggaatacgatgcccaggagaaggaactggtgcagcttaagcgtgaggcccgtttgaagggtggtttctatgtcagtcctgaagcaaagctgctctttgtggtccgcatccggggtattaacgccatgcaccctaagaccaggaagatcttgcagcttctgcgattgaggcagatcttcaatggtgtgttcctcaaagtcaacaaggcgactattaacatgctacgcagggttgagccatatgttgcatatgggtacccaaacttgaagagtgtcagggagttgatctacaagaggggctatggaaagctgaacaagcagaggatccctctgtccaacaaccaagtcatcgaggagggcttgggcaagcacaacatcatctgcattgaggatcttgttcacgagatcatgactgttggcccacacttcaaggaggccaacaacttcctgtggccattcaagttgaaggcgccgctgggaggcctgaagaagaagaggaaccactatgtggagggcggtgatgccggtaaccgcgagaactacatcaatgagctcatcaaaaggatgaattaggttcacgatcaagctcattgatagtaccctgtgctctaagtgacttcttgtgctatccttattttatattagaaagttggatcgtggatgaatattcatgcagttttgatgtttcgaactagacgtgtatggaagaaatctgatcttctttccggaggtttgggattaattatttaaagcgttttgttcaaaaaaaaaaaaaaaaaactcgagggggggcccggt

SEQ ID NO: 34255 - DNA, 524 bp, Zea mays
  Clone ID: MRT4577_131243C.1
agttcgtcgcggcggagacgagacgaccagccggcaggcgacgacgaggggcagcgtcagctcagatccgacgagatggcggccaaggcgatctccagccccgtgccggtggaatggtacccgacgctggccgtcgtcatggtctccgtcggcctcatgctcaccgcatccttcttcatttatgaagccacgacttcaaggcggaaccgtagtttagcaaaggagattgtcacagcgtccattgcttccgtcttcctgggctttggatctctcttcgtgctccttgcaagcggtgtttatgtctgacaaccggcctctccatgtgtagttctagctaggatgcgtcacatgcctgaaattgtgctgcttcctggagaatatggagtcccacatggacatgatttttataatagacgagtgacatcaaaatttaaccaatgttgttgaaccttttctggaatctcaatcttattatctgtccacaacttcatttccattattagttatgggacataagccgcagg

SEQ ID NO: 34256 - DNA, 1090 bp, Zea mays
  Clone ID: MRT4577_131244C.1
gggtacctcgaggccggccgggttgataatgcactgactgtggttagtgttgatatctgcatcataatacaatataaaaaaaacaaaaaaaaactcgttgtttacttcgcgtttggatctgtggctgaggagctgcgggttggttggcctgtggccatgcagatgtcgtccgaggcgtcgaaggtggcggtgccggagtcggtgctccgcaagcggaagcgcgaggaacagtgggccaccgagaagaaggagaaggctctagtcgagaagaagaagtccatcgagagccgcaagctcatcttcacccgcgcaaagcagtacgccgaggaatacgatgcccaggagaaggaactggtgcagcttaagcgcgaggcccgtttgaagggtggtttctatgtcagtcctgaggcaaagctgctctttgtggtccgcatccggggtattaatgccatgcaccctaagaccaggaagatcttgcagcttctgcgattgaggcagatcttcaatggcgtgtttctcaaagtcaacaaggctactattaacatgctacgcagggttgagccatatgttgcatatgggtacccaaacttgaagagtgtcagggagttgatctacaagaggggctatggaaagctgaacaagcagaggatccctctgtccaacaaccaagtcatcgaggagggcttgggcaagcacaacatcatctgcattgaggatcttgttcacgagatcatgactgttggcccacacttcaaggaggcgaacaacttcctgtggccattcaagttgaaggcgccgctgggaggcctgaagaagaagaggaaccactatgtggagggcggtgatgccggtaaccgcgagaactacatcaatgagctcatcaaaaggatgaattaggttcacgatcaagctcattgatagtaccctgtgctctaagtgacttcttgtgctatccttattttatattagaaagttggatcgtggatgaatatgcatgcagttttgatgttttgaactagatgtgtatggaagaaatctgatcttctttccggaggtttggtattattatttaaagcatttcgtaagcaac

SEQ ID NO: 34257 - DNA, 593 bp, Zea mays
  Clone ID: MRT4577_131245C.1
ccggccgggttgagtgcggaagttccacgaacgtgagcccaacatggagccggcgacccctccggcacccgccgccggcgtcactgctaccatcgacctctccctagtcgcagccgacctcggtggggcgcacctcctgccctgcggcatcaggcagaacggcggcgcccccgtatccgactacttcaagcctagggccacaggtccggatggctaccgaggttttgtattggagaagaggcacggacataattcaaatgctgaagtcaacaattttacatcccaagctgaattccagagcataacctactggaatcacgatacaacgtcatcaacagaggattccctcccgaggtgcttccattggctaaccgttgctaatgcggtgagcattatttcttcacctaatgttatagactcctttgtgggccggcaatatgtcaggcgccagggtccattaggccagccatttgttagatggcagctggttgttagaaaagttaaggaggcttatcctccatggggcttattccttaataatctcctgacttgttagggcccagagctataagggtgccttacattgtaatagg

SEQ ID NO: 34258 - DNA, 357 bp, Zea mays
  Clone ID: MRT4577_131246C.1
gggtgcgggggcatttggggtggggggaagatggaactttacatgcacccaagatttattttcacaaacattgcttttaatttacaaaggaaaatcctaaaaaatttggcaatagggtaaaaacagtatctaccccttttcaatacttaagcttaaatgggggccagcacttttggtcattttgcccggtcccttccaaggttcccaaccaacatagatacctggttatgtttccttgcacaagatatttaacgagggagaaaggaggcctattgaaatattttgtttcccatgtccagggaggccatggtttaataaaccccttttttgtcaccaactgggctgattaaaccctaa

SEQ ID NO: 34259 - DNA, 722 bp, Zea mays
  Clone ID: MRT4577_131247C.1
tccactcgtccggcaatttaatgtggacgggagtgtattgaaatgtattgggatagattttgacttgctattaatttaaaccgacccaatatcactcaatccatatggattaacagtgcgaacaaaccctaatggcctgttcgtttatgccggatttcactaaaaatcgttccagctgatcaaaccttatgcggctgattggttggactgctgcccgtggcctgcctcaggcgagcatgccccgtgggaaacagaagtttctagcgtacccgcgcatgcagctttaagagatatttttttgctagcgttgcatctgccagtacaacttgatctcgttttatgcacttaaccaaacaaaggctagtgttgggtcaacgcacgcgctcaaacgggacggacatgtgcagcataccaatcagaaggtatataaattagacaaacaatccagctagaaattatttcgggtgctcaatccactggaaccgaacatgccccaagatggtttaagactagaaaaagactttagcccaggtttccagctccgccgtaccaccagcgctagcttctagtttataacataatatatatttttcaagaaatacaaaagttgaatacaaaggtagaatgagtaagtgagttttaacttaacacgccaataaaaatcactaaagcaaataagatttatgatatcatatatagaaggaacgaataattgtaccgag

SEQ ID NO: 34260 - DNA, 861 bp, Zea mays
  Clone ID: MRT4577_131248C.1
ctcctaatttccttcccgtttttcttcctgtggtcgctcgttgagtgcggaaattccacgaacgtgagctcaacatggagccggcgacccctccggcacccgccgccggcgtcacggctaccgtcgacctctcctcagtcgcagccgacctcggtggggcgcacctcctgccctgcggcatcaggcagaacggcggcgcccccgtatccgactacttcaagcctagggacacaggtgtggaggtggagggggtgaagatggaagaggccttctttcgtgggaggaaactgcagggcactaccctagctctcccggatggctaccgaggttatgtattggagaagagtcgcggacagaattcagatgctgaagtcagcaattttacatcccgagctgaattccagagcataacctactggaatcacgatacagcgccatcagcagaggattccctcccgaggtgcttccattggcttaccgtcgctaatgcgatgcatagagcagtgactgctgaagacctgactaacatggcagcaatgcagaatcaggacaagtagattcgttctataacgaagccatgcaatttcgatttggtgaaccatctcgacaaaggatcttgtaacaaccaacatgttatttgaacgcatccagtaggtaatgtttaggctttggggtaagatgcttcaggagatccttgttcagtagcatctgaaaatgtctgggtaatttagattgggacctgtatcagactatcagttatctccaatattgtgaaagagtgccggtgttgcctttgtgttaaaaaaaaaaaaaaaaaaaaccatttctggtcttggtgagaaaaaaaactcgagggggggc

SEQ ID NO: 34261 - DNA, 491 bp, Zea mays
  Clone ID: MRT4577_131249C.1
gcgctgcggaggacgtggtcatggggcgcctcggcagcgacggaggggggccatgattacaggcgagagccggaaccagcggccgggccgtggaccacggctcaaccgcggcgtcgatattgacgacctgagcaacctccgacgcgggcgcgaaccaggtggtggggggcccgacgcgcatcaagggcgaagggcatatcagggagacggagctgtgcagaactagcatgcggagatcatggctctctcgtttgtctgaccgggcgcgcgagaaggccgatacagcatcttaccctgcaattggacgaggtggacggtgacagctgtagctcacagagactgtccttgagagaagaaaccgtgaggctgatatacatgatgcttaataaaaagcagacgcttgctgcatagcctggcggctagacgcaacacctacaagaggggtcatgcgagtacagacagcaggatgacactgcctgctatagaggcca

SEQ ID NO: 34262 - DNA, 375 bp, Zea mays
  Clone ID: MRT4577_13124C.1
ccttgttttttttttgggtttttttttacgttagaccggaaccctccaaaacattgacacaggacgcgcaacaaaataggtccacccataccaaaacggatataggtcataccatcatatgttctgggagtcacataagccaaacatttttgatcccttgtttccaaaacattcgccccttccaaattattgaaccaaatgctgtaataatggccaaagaggctgatccaccttgttccacttggtctcggacatacggaagccaacgaagtgccaggtacaaagttgtacggaccgaccttataggggccctggcggggagatccaaacaggcgggggaaaggagcttgaactccgatggcctggggtcggagt

SEQ ID NO: 34263 - DNA, 215 bp, Zea mays
  Clone ID: MRT4577_131250C.1
tcgctcacgcgttcgaaaaaaaaaaaatacattttttaatttttaaaaaaacaattataaatacgtaaatttgtataaatatcctagagataatttcaatattacaaaaaatcatttcacatactattccattatccaataagtctccctccttgaataaccctcattcctttaaccatgtttccaatttaaattactctatcactattaagctt

SEQ ID NO: 34264 - DNA, 2309 bp, Zea mays
  unsure (1)..(2309): unsure at all n locations
  Clone ID: MRT4577_131251C.1
cggccgcgtgggcggacgcgtgggcgcgcgcggtggtggcctattcttgtgctgtgaataactgcccctcctttgtttgtgatatgccaaaattttgaagtgagtacagtacaaccaaacatgttgatgatggaaaaacgaatggagaaaggggaaaaacanannaaaaaaaaaaaaaaaaaaaaaaaaaaaaaaaaaaaaaaaaaaaaaaaaaaaaaaaaaaaaaaaaaaaaaaaaaaaaaaaaaaggggggggccgtttttaaagaatcaaagtttacttccccttgcttgcaaggtataagtttttttttggggcacccaaaataaaataaattggccgggttttaaaaactccggaattggaaaaaccttgggtttcccaaattaaatggctttgaatagttaagttgggcgcctgccgtaccggaccggacctgccgggtcggcccaagccacgcgttttcacgcgcacggccgtgaagctatatctaagatgcacaatatgagtgctgctgtcttgacatcagtgcttacattgattgacgaatatgacctgtatggtcaagtggcataccccaagcatcataaacactcagaagttcctgacatttatcgtttagctgcaagaacaaagggggcttttgtaaatgtagcttacttcgaacaatttggagttactctgatagaggctgctatgaatggtttgcctataattgcgacaaaaaatggagcccctgttgaaattaatcaggtcctgaacaatggtctccttgttgatccgcacgatcagaatgccattgcggatgcactatataaacttctttctgataaacatctttggtcaaggtgcagagagaatggactgacaaatattcaccaattctcgtggcctgaacattgcaagaattacctgtcaaggatactaactcttggcccaaggtctcctgctattggtaacagagaggagcggagtaatacacctatttcaggaaggaagaatatcattgttatttctgtagactctgttaacaaggaaggtctagtcaggataatcagaaatgctattgaggtcatacataaagaaaacatgtcgggttcaactggttttgtgctgtcaacttccttaacgatatcagaaatacattcactgctactatctggaggcatgcttcccactgattttgatgctttcatctgcaatagtgggagtaacatttactatccttcacattccggagaaacgtcaaacaactccaagattacatttgcattagatcaaaatcaccagtcacatattgagtatcgttggggaggagaaggcctaaggaaatatcttgtgaagtgggccacttcagtggtagaaagaaagggaagaacagagagacaaattatttttgaagatccagagcactcttcggcgtattgtcttgcatttagagtggttaatcccaatcatcttcctcctttaaaggagttgaggaagttgatgagaatccaatctctccgttgcaatgcattatataaccacagcgctaccagattatctgtagtccctatccacgcatcacgctctcaggccctaaggtacctgtgtatacgattggggatagaagtgccaaatgttgcagtcctcgtgggtgaaagcggcgattcagattacgaggaactgctggggggtctccataggaccgttatcctaaagggcgagttcaacatcgccgcaaacaggatccacacggtgaggagataccccctgcaggatgtcgtcgccctcgatagctcaaacatcatcggtgtcgacggctacaccacggatgatctgaggtctgccctgcagcagatgggtatactggcacggtaacaccttccggagcttccgtttccactaccaggtcaacgaagagaaacgagaaaacagacagaatggtgacgaaacaagtgcgaccgtttccatgctcgatgggaatgccgattttgcattgtaggctgtagcggttgtgttcgtgtgtgtgtgcccgcgcgcggtggtggcctattcttgtgctgtgaataactgcccctcctttgtttgtgatatgccaaaattttgaagtgagtacagtacaaccaaacatgttgatgatggaaaaacgaatggagaaaggggaaaaacaaacaaaaatggtttgggacggcagtgttccatggtatggtacgctgttgttgaatgcctgggaaatgggtgattccgctgttcgtcactcgtcccatctggctagtttgttctatgccttctgaaacatgtatcatctggctagttacctgggg

SEQ ID NO: 34265 - DNA, 364 bp, Zea mays
  Clone ID: MRT4577_131252C.1
cttcggaaccacagtcttcgcttccactggcctcaaggacagctacgtcactcagctcattcttggctcagtcaactgtgcttgcacattcggcggtctctatgtcgtccagaagtgtggtcgcagaaagtctctgatgatcggtgccgcctggatgatgatgtgtttcttcgtctacgccttcgttggacacttcgctcttgaccgaaaggaccctctatccactcccgctgccggtgccgtccttgtcaccttctcttgcttggctatcgctgcctttgctaccacctggggtcctctcgtctgggccgtcgtcgccgagatgtatccttcccagtaccgcagtcgatgcatggccatcgcc

SEQ ID NO: 34266 - DNA, 510 bp, Zea mays
  Clone ID: MRT4577_131253C.1
aattatagtttattttgttttatttatgtatgtccgtttgtgcgacaccgatgaagtatttgtaaaacaaccttaatcaaccatctgcccagaatgacggggagttactaggtgaaagccgtgacatgaggtgacttagtagcagcaaaaatagagccgaatgccgacctagggcgttttcaggttgaagaatatcaccgaattttacactgtcagcaccccctagttgatctttacagattaacccatggctacgcgtaatctgactcaaattgggtctagaccacaaggctctaggcaggacttcgctaccgtgaccggagtccagaggtaaacgggaccatggagaactttggtctcctgcgcaaactaggagtgaactaacacgttaaccttctttatgaactcgaaggttaccttgacaaacttgggaagggtcttgtaggagccaacctacatggttaagatattgttaagtgccccatttccagtaccttattgggcaccccc

SEQ ID NO: 34267 - DNA, 138 bp, Zea mays
  Clone ID: MRT4577_131254C.1
ccagctttcactactatggaaagcttccctgcgcctccattcgcacactcgatcatatttctgcatacaattcttattacactccacgtcatgaccccagcacgacacatgtctcatataaagcaacttacacgtctg

SEQ ID NO: 34268 - DNA, 894 bp, Zea mays
  Clone ID: MRT4577_131255C.1
cgcggccgcgtcgacttttttttttttttttttttattttttttttttttctcatatatatatatatatatatatatatatatatatagcacacaaacaaacaaacaaacacatataccaatacagtagaaaaccgtactatagctaggttacaataccagcagacactacacacatgcattattcgattctcagcttggaaagggcagctagcaagcgcgcacaattagtaccatggatgatatatgaggtacacaacaagcaattaatacagaagcaagcgtacgcacgcagatggcaggacgtactcctagctagacatcttgagaaagatctgagagcctcctggtggactgcggtggcggcaggagggagcagatgaattgaagcgcgcagaggatgggagggagactggccgccggccggctagttgacgatgatggcgccgcgcccgctggggacctcatggtcatacgggatctgatggggaatacactccttacccgatatgaaggcatctatcgtgtatttggctacctgggcggggtcgtggagaacatggacgccctcccagtcgacgcggtgggtggtgtcggcgccgggacctgtgttggcatactccatgtatctcacgctcttcgtggtatcattgatgacgtgtgccctgtcccacgccacccagccggcggcgctcacgacgtcgctgagttggcactccatgaaaatgacgtgggagtacttcctgtacggccggcccagaaatgtttccacgccggtcaggttctggcccaccggccatggattcgggtcagcttcgacgctgcaccggtggaagacgaagccggagttctcgtacatattgttgtcgcagccctgcgccgtcaccacgttgtg

SEQ ID NO: 34269 - DNA, 669 bp, Zea mays
  Clone ID: MRT4577_131256C.1
ccggggtgactgtgaaggaattgggactttacgacatgctttccgtcggttgcgtgaggttgttggaaagaggtataattctgggaaagatgagctcacaataatcagtgaaaggtttgaacaccgggaagagaacagaaaagactgcttgaggacactgtatactctaataaaagacgcaatgaaagctgacaaacttgttgaggatgccaggaattcttatgttaaaggaagacttaaggctaatccacaatttatggagcgattgaagaggaagacagataagttgatggcagctgcataagggtcattcttagtcataaatatatgttgagcatctcgaataacaatgtcaacacacatccccagcctatgcctttttggaaatcttttgctgctttcctaaattgaagatgcttaatttccatagtttgctgaggaaagtagctactgaggtgtaaattttggagtcaatatgtcgcttcttctgaagtcacagaatcatgctggcaggactggaatctaatctcaaccttgtgatctgtacaattgattcatttaaagggtaatttctgccttgtttagataacttaaagtctgtacgttctctatggtaattatcatgccaagttagctaaaaaaaaaaaaaaaaaaaaaaaaaagcggccc

SEQ ID NO: 34270 - DNA, 435 bp, Zea mays
  Clone ID: MRT4577_131257C.1
cccccccacctcaatctccagggaatttttttgggagagctgtcccaaataaaagctaggccttgcacacaaccttacagttacagccttaaaacgaatgaccttgcttgccctaaaatgaacagcaaagcaatgttcgggtaggcctgaatctgtttttcccagttaaaggagctttggtggggggttcgtgtcggcctggtcaaaagctcaaactcgggcttaatttcatctcccaagcccaaattcatttttgggggacccaacaatttttgggcagcaaccaacccaaaccatttgttctgttgaacaggggtcgctcacccctcggaacattgtaaaaaaacttttgccctttaaaaaggcaaaaattccaggggttcatatggaactcccccatccaatccaccatcgcactaaggagtcaggatcctg

SEQ ID NO: 34271 - DNA, 620 bp, Zea mays
  unsure (1)..(620): unsure at all n locations
  Clone ID: MRT4577_131258C.1
ctagnacgcgggcggccgctcgcgatctagacccacgccgtccgggnaagacagataagttgatggcagctgcataaggtgttacagagctccttgttttaacagctcctctctttccctcatcaacatgggtcattcttagtcataaatatatgttgagcatctcgaataacaatgtcaacacacatccccagcctatgcctttttggaaatcttttgctgctttcctaaattgaagatgcttaatttccatagtttgctgaggaaagtagctactgaggtgtaaattttggagtcaatatgtcgcttcttctgaagtcacagaatcatgctggcaggactggaatctaatctcaaccttgtgatctgtacaattgattcatttaaaggtgtatgcgggagtatgtttgatgcaagaactatgagccatccatcaggcatgagcaggaccaccacggtcctcaccgtgtcctcctacagcggctcctacagcggcgtggcggcggcaaacaccgtggatgacttgtgcgacatgatccgtggcttcgtggacgtgtgcgtcgcggctactgtccgtgcctagcgcggcccgtctgtcggccagcacggtcacctcctaa

SEQ ID NO: 34272 - DNA, 1656 bp, Zea mays
  Clone ID: MRT4577_131259C.1
tgccgaacttctcgaggatgccagggattccacttttaaccgaaggcctaaaggctggttacagttccggccgccatcgaggccggaggaaaaaccctaaacccttttcctccaaattcacgcgagctccaatctgtgtgggtctccgtcgtcgtctctctcctcccggccgccggcgcgatgaggcggttgctcggccacctacacccccatgcccagagcctcttcgcttccctgcctcgcaaaccgtccatcgccaccaagctccccttcctcctctcccgccgcctcctttccgatgccgcctcgcctcctgccccctcgctgccgcctcctcccccgccctctgccgacgtcacgaacacagagttgaagaagaggttggagacttactatggggtggatgaagaggctgaattaccatctgtcgctaaggctgttcttgagcggaatctcacgggtgcccatagtgagactgatgatgaccttattgaggagctgcgtagtaagccactccctgaagtccatgaccgggactttgagtctgattttgaggagatgcatgatactgatgaggagctgaatgacctgtacaatacaagggagtatgttgagaagaagatcaagagtgatgagttctttaacatggatgacacaaagtgggatgccatgatcaaggaggccacagacaagggtcacttaactaacatgaaggagtgcgaggaaatcctcgaggacatgctctactgggacaagctacttcctgatgagatcaagcaaaaggtggagaccaaatttaatgagttgggagacatgtgtgagaggggagagatggaacctgagcaagcatatgagatgttcaaagaatttgaggataagatggtcgctgagtgcactgaattaattgaatcaaagatgccaactgacgctgatgaactgactgaatcaggaggtaagaaagttgagttagatgatctacctggcgagggacctgttctaaggtgggaatcacggattgtatttgttcctagtggagatgcatatcatcccaaaaacagaaaagtcaagctcagtgtgactgtgaaggaattgggactttcacgacatgctttccgtcggttgcgtgaggttgttggaaagaggtataattctgggaaagatgagctcacaataatcagtgaaaggtttgaacaccgggaagagaacagaaaagactgcttgaggacactgtatactctaataaaagacgcaatgaaagctgacaaacttgttgaggatgccaggaattcttatgttaaaggaagacttaaggctaatccacaatttatggagcgattgaagaggaagacagataagttgatggcagctgcataaggtgttacagagctccttgttttaacagctcctctctttccctcatcaacatggtgattattctgtattttcaattttattgttggctgtcgcacggggagaataatatgttgtatgcacttagctttgccttctttaatgtcttggcttcttttgtagggtcattcttagtcataaatatatgttgagcatctcgaataacaatgtcaacacacatccccagcctatgcctttttggaaatcttttgctgctttcctaaattgaagatgcttaatttccat

SEQ ID NO: 34273 - DNA, 423 bp, Zea mays
  Clone ID: MRT4577_131260C.1
acaggggaacctggtgccactttcccaggtgggtacaatttgtcttttgaaaattcaaaaagccagcttccaaacaagcttttgtttgtaaacaaaacccgtgtttttttgaccaccctaaaacaaaaaatggcccccctttgctaatttttatatccattaacagggcttccctcccaaacccaggggttatgggaagggccatccatacccccgccaaaaagcccccccggcctgggctggatttttgctcaaccaccaccaagttccatttttaatccccccccttggttccttcagggacttcccaaatgactgggaccccaattccttttttttcctgatccccacccccgggagagagttcttttttggaaaaccaaccggcgatttttcaaaacctctgatcatgggggggtccta

SEQ ID NO: 34274 - DNA, 542 bp, Zea mays
  Clone ID: MRT4577_131261C.1
aaataaattttttccccccccccgaccataggttgaatttaacattaatcccaccgtcagatagagcaataaaaagtctacccaataattcatttgtttgcaaggtgtgaggtaaacaaaaatagggtaacctattaggtccaatcaagtaaacctgagcatgtcatgaagattaacagtaacattattaggtaaagaagagtgatcagggcacaacttgtcttatacttgcgatgacctgttgtctaaatgccgacccaaaagttgggcggcggttcctcgtcacctcatttctactcgtagcaatacatacaatcaaacaaatagtggatatggtaacattacaccaaagtgtaagaacaaactgcataagaatattctacacgttgctatgagaacttaggttcaagaaccattagaatcggagttaaaacgaagaatttattgataaaacggtattttaggcgcaatacctctaatagatgtgatctaacagatattgcatttaaactaagtagctattaaattaaaatatttgagtt

SEQ ID NO: 34275 - DNA, 547 bp, Zea mays
  Clone ID: MRT4577_131262C.1
aatatctacactcacctctggttcatccgtctacacgcgagatcgacaggagttcaggtgcgtagagcagaggggcggaggagaaacagacgagactcgttgagcccagtgcgtgcatgctgtcatcgggtatcggtctacgtacgaggacgtcctcggcgcggccttcctcggccacgtacgtctacgacgccatccactaccgatcgtcgctcaagatcacggacgtacagtgctcgcgtccgcccgtggatgagacgacggattcgtatccatagtatagggcttgcgtgtgtggccagtgcttggtgctcccactgaatgatcgtcgcatcggtactaatgctgatgggaatatgagcggctagatacccgataacctgacattgatgatcttcttacagcgtgtgaaagcggtgccgacaaactcagatctgaaactccgtacatggaggtggccagaatccagaatcttttttcgttattatctgcaacgacttgctcgtttattcctattacacgtggattaaatgagatcgtgaagaat

SEQ ID NO: 34276 - DNA, 102 bp, Zea mays
  Clone ID: MRT4577_131263C.1
ttcctttccggccggatatctgcttcgcatctccgcgacatatccgtgcaaacgtgccgatgtagttcttcggcggcatgtcgctgacgtcgggcgcgctgt

SEQ ID NO: 34277 - DNA, 431 bp, Zea mays
  Clone ID: MRT4577_131264C.1
gccatccgcccgcgcgcccgcccaactatggcggcaacggctctgctcctccccagcctcgcggcgcccacggacacgccgcgccgcgcccacaggtggctgcatccgcagccgcagctccagctccagcgcggctcccttgtctctcggtccctccggcctccgcggcgtcggcggctcgcggactcggccgtgcaagagacgaaggagggggaggccaacacggccgacgagataagcgagaggcacggatttgagttcggtatccggaaggagctctcatcccccccgcacacgcacgacccgcactataataacccccccccccccatctccccctacttcaccaacttactcccccccaccccccccccccgcccccccccccaccaccccccacacacccccacactcacgccttttcccccccc

SEQ ID NO: 34278 - DNA, 167 bp, Zea mays
  unsure (1)..(167): unsure at all n locations
  Clone ID: MRT4577_131265C.1
tcgaagtttgttcctagccttccttnagcgttgaagatgatgagagatcaaagaagaaaacagtcagagccattttggtcttcaatggtgatgaaaaaatggctaaacatcaggccgaaattaaatgacttcagctaagacgagtttgatacactatactgaggata

SEQ ID NO: 34279 - DNA, 201 bp, Zea mays
  Clone ID: MRT4577_131266C.1
ggccgcttttttttttttttttttgcaagcacagaatctgtataaagtataggaggcgagaacaaacataggaaaacagacagaacaccgagcggaaacacaacagactaccaggcacaaccaccagggtagaaccacactcataagagcgggaaacgctgcgcaagggagcacgcactactagggtgccgagcagattta

SEQ ID NO: 34280 - DNA, 263 bp, Zea mays
  Clone ID: MRT4577_131267C.1
tccaaccgcgcgtcccgctgccggccgagctccctggccgccgcgccgcggactccagcgctcagtgcccagcttccagcaccgtggctttctagctccctctctcttctccatttccctcaagctcgccgtggccacagggcctctggattccatatcactggtgtcctcttctccggccggttcgagtcggccgccgtcgcttagcttcagctcgttcctggccagattccctgctcggcgtccctctctgctcgttgggt

SEQ ID NO: 34281 - DNA, 678 bp, Zea mays
  Clone ID: MRT4577_131268C.1
ggcaggtaccattcaaacttgaaaccagctttgatttccaacgagtctcttttaaggaggccaacgctgatctttgaaggccctgatgcattctaccgtggaccggatgctactcgacacgcccttccccagcttcggcagatcaactcctcctggaacctgagggctgtcctggaacctcggaagcttctgtcgagattctttcctcatagccgctacattgcccacgtagctgatggcgtcccataccagacctctgatgatggttagggcgtaggatctcgctgaatcaacagggacgctgctcgcaaaacctgtaggtgaaattcagaaggcagatctgtctgtcattcatgtgtcagatgtttgtccacaaaggtcgggaatagcaacaaataatcgggcctgcactgaggcggtgaggcctgctaattgtgcatcagtaatgataccatactgtcaggttgctaaatcatgtgcaccaactaacactggcaaggacaggtgaagcatggctgactgaatctcccctacagacatttgtttccaccaaatcaccaattgattgattactacttgcccaaatatttccattctatttctcacaacaatcaggtagagataataaaagcactactgccctacactaactgaaactcacactggatccaagaatta

SEQ ID NO: 34282 - DNA, 1714 bp, Zea mays
  Clone ID: MRT4577_131269C.1
aatcggttttttttttttttttttaatttaagaggggaattctattatatttcgtgctacaatccctgtttcacagtgcttgaataaggagggagcaaaagagcagcagtcatatttacagatgcatccacataacaaaaataatatctagaatgcagactaacatttccagctagaacaactaatttccccttccatatcaaaacaaaaacttgtatatcaccatgtttaagttcccatggcggtaccattcaacttgaaaccagctttgatttccaacgagtcttttaaggaggccaacgctgatctttgaaggccctgatgcattctaccgtggaccggatgctgctcgacacgcccttccccagcttcggcagatcaactccccctggaacctgagggctgtcctggaacctcggaagcttctgtcgagattctttcctcatagccgctacattgcccacgtagctgatggcgtcccataccagacctctgatgatggttagggcgtagaatctcgctgaatcaacagggacgctgctcgcaaaaccaccgtggtcgtggttcctgatgaggctgtgctgcggcaggccgatgccgacgccggcgagcgtgaacccaacgctgaaccccacgccgcacccggcgcctacgtacccaatcacctcaggcccgaagccggggccccagcagacgccgcagccgacgccgagccccacaccccagaaggtgccggccgtcgggtgcacggggttccagcgctggtaccgcccgagcacgcccttgatgatcatcctcagcttcacggcagtcagcttgggttgcgcatttgctgccgctggcgcggctggtgttgcgctggccggcggcggcgcgggagggggaggcggttggtggagctggggggagtctggcatcagcggaccttcggcgccaacaaggagggccgcgacgacaaggccgatgccggggcaaccggcaccggcacaggcgcgtgattttgtgcccttccgcagtgtacctgatcgtgtgtgtacgatagctttgtgtccgctgcttggctgctctgtatccgcgcgcgtggagtgtgtgaaacctttctgtaaaaaatgcacatgttagattgaaataaaacaaggaccgactggtctgaatcccacttggtactcccccaattgggtgtgaagaagccgctgggctcctcttaactcgtgtactccaccgtccgtgcagtctcctagatccagtcaccggtgtgcccaatcttaggtcaacacagggggacgccgtctcctaaccgtcgctcgtcctgttccaacccaatgcaatgcgccaagtcgtccgtaggtgtaattcacaagtcagatctgtctgtcattcatgtgtcagatgtttgtccacaaaggtcgggaatagcaacaaataatcgggcctgcactgaggcggtgaggcctgctaattgtgcatcagtaatgataccattctgtcaggttgctaaatcatgtgcaccaactaactctggcaaggccaggtgaagcatggctgactgaatgtcccctacagacttttgtttccaccaaatcaccaattgattgattactacttgcccaaatatttccattctatttctcacaacaatcaggtagagataataaaagcactactgccctacactaactgaatctcactctggatccaagaattagcccccccc

SEQ ID NO: 34283 - DNA, 164 bp, Zea mays
  Clone ID: MRT4577_13126C.1
gacacactgctttccgagctccgagttccccttttgcccgagcattcacatcgtttctcaactcagctcctcatcgcgccatgcgagccatgcatcaatcctttgtgttagttctagggcacggtgccgaagtcatccccaagacgctgacaatcgctgagcac

SEQ ID NO: 34284 - DNA, 532 bp, Zea mays
  Clone ID: MRT4577_131270C.1
cacaatgaagctatgcgtatttggtcactatttaattaagcaagataattgtcctttcgagaacatctcgagagcagtgcccgggttctgtgggtagtggactggagtcctttgatctctttcggctctaagcagcaattgaaccaaaagtacccatataatacagctgtaaccatctttccctactttatttgtgacatagtcagcttttataatatgcatttgagttttgtttttcaggttagctgtgcccattttacactgatatgaacgcaattatgcagtatattcgttgcttgttcaccatcagctccaatcttcacctcaatttgggagattgttaactattcccaagaatgtgtacctttgcttttcactgcatgtctatacctcagtctggagaaacatatatatagaatgtctcatcatgtggtggttctgaaactctcttacactgttcttgtgcaaaatcgaaggctctgctgttcttcaaggtatttctgaattttgacaacattaatgatcatgccct

SEQ ID NO: 34285 - DNA, 259 bp, Zea mays
  Clone ID: MRT4577_131271C.1
ccgggccgaaccgcccggaaataccggcgtacccaccccgcggggcccaacctgctacctaggccacccggagaccccgactttcctaaacgacatcaagccatggagtgtatctacactgcgggcaatggccacaacggctaccaaagcggcgccggcgcacaatcagtaggccaacggctacggaaagcaaaagactcgtgactccgaggtcggactcaggagcttgtacaacatggagctcctctaccactacatg

SEQ ID NO: 34286 - DNA, 205 bp, Zea mays
  Clone ID: MRT4577_131272C.1
gggggaaattgatacaaaaacaaggtttccaaaccttaaattaaacattttttttggccaaatttaaatcctaaaaatggaacacctttggtttttaccttacaaaacaggaaacataaaagggtttaaatccattcattaccataaacgatttaacgttgttaagttaaaattgttaaccactttttggaccccacccgtcccg

SEQ ID NO: 34287 - DNA, 306 bp, Zea mays
  Clone ID: MRT4577_131273C.1
tgcgcggagagggccaaagaaggtgccccgatagaggcactaggaagatagggagatgacacggtgtaacatcccaaaatctcaacccaaggtttggacccctaatctcctaacccccccccccttatttctattttctccctaaactccacccttaggtcacctcatcatatgcatacacttggattgttaggagcacctcacatagattattttcaacacttaagattatttagcaaattgttgattcaaaagaaaaggagataaaaagatcaacatctccatgccgtggaagccggggcgctc

SEQ ID NO: 34288 - DNA, 756 bp, Zea mays
  unsure (1)..(756): unsure at all n locations
  Clone ID: MRT4577_131274C.1
ctcgaggccggccgggatttgccggccggctagcatactagcggggggcagcggcagcagcacagagcacacgtacaccactgtccacttcaacttgccttctcctgccactattatatcttcgtagtcaaagaggtgtcgtccatggggacggcttcaacaagcccagacaccatggaggcggcaaggctccccagtctctccatcaccgtcgagaagaacccgccggaggcgcgcttgcttcaactcggcgtcaagtcctggcccaaaatacgttgcaacatatgaggctaaatatcgattcctccgtgattgagatgctgccaccgttgtgatggagtcctcctgcaccgatgtttctatctcacataatcacacctttaacaaatctacgtcaattatagtaaaaatggttaattgagcataattctataaaaaactgtaattaggttcttctccgcccatgcttcgacctcggttaatcaaatctttagcagctacagcgacatggctggagatggaaattttagctggccagtcggatgagagcatgtccctccggactaacaagctcaaatatgaatattcttttacaacgaacctaatctactacgaaacgaaggctagataaactgtgtgtacagatcaattttgatgtcagcgatggacatcagggaagattctacccgagcaatttanaatgtgccttcttaggttgtaaaaaaaaaaaaaaaaaagcggccctcgagctccagc

SEQ ID NO: 34289 - DNA, 863 bp, Zea mays
  Clone ID: MRT4577_131275C.1
aaacgttaaaatttatatactattgcgacatgatagtttttagatggttgataatattattttggttcagaatgctgcagtgctcttttcataatgttttaagtccaaagcacccagtctgaatccaaatattactgtgaaaatgacagaatatacagtcataatgaaagaaaagagggacttggttatgtgggctccaagtcggaagtcgccaaccaaactgatacgcctatattgttatcaatgctggtgattctggtattagcctttgcatagaaatttcagtgcttgaataatgcaaaacagaacatgaattccaaaaaatgtgaagttggaagggttagcatttcatgcaacatctagaagaacatgactgaaagatgctatttgcatttcagcatatcatcaatagtcctcctgaggtatataaaacatagacagattgagaaagatactcctgaaaatgcgctctgacctgccctttcctggtggtaagctgccgaaggatggtttccggctgtgtttttccaagtgttggttcaccagtcttcctgtctagaaagcgaatgctaatgttattaacctcagcttctgaaacctccagcctcagaatccctccagaaagtatctcagcatatgagaccaacccagttaggccacgctcatgataccatccattaacagacttgatcacttgatccagatgcctaatgttaataatttttccatggcgatcgcgaaatgcatcttccatgaacttggacggtagcatgttggcgccctcgcataccagcccatggaagtcttggttcggctccacctcaaagacgaggcgaatgccatcgcgggtgtcgacagcgacg

SEQ ID NO: 34290 - DNA, 400 bp, Zea mays
  Clone ID: MRT4577_131276C.1
ccgggccgacccacgcgtacggcccaaaacaccgactcttacgtcgcccgttttgcttactgcaccgccaaacgagggataggactcaaggagcgtgatggcggccatgccggcgcctcttctgcctatgattctgctgacggtggacgcggcgatgacgctctgccccgcctgacaacgcattccaggtgtgatcagccacgacgcgaccagctgcccaagccctcacgacaaggtctactgcggaagctacgcttcggacaccatgggcaacgcctgcgggtactgtaacctgtacagccaagggtactgcgtgaacaacgcggtgctgatcacggaactgttcaacgaggggctacgctgcggcgcgtgcttctagatcaggtgcgaggagcacccc

SEQ ID NO: 34291 - DNA, 271 bp, Zea mays
  Clone ID: MRT4577_131277C.1
tacacgcgtacgaccacgcgtacgcccacgcgtacggttgattctgctggctctgcggggaaggagagacagagagagcgagagagacatctaatagagaggctagttggtggtgctagcacgaagaagttgacggggctcagtgggcaggtggtggaggtgccaaactgctggtggccgaagtcaatcggacggcgtcacataagactatggcgtgctagctggtggggcactaggtggccacgtacgagcctgccgagtacgtgcagat

SEQ ID NO: 34292 - DNA, 131 bp, Zea mays
  Clone ID: MRT4577_131278C.1
tcgggcccacctgtaccgagcgggtggcggcggtaaaacctaccggtgtttttgtgaccatgttttcgacttacccctttgtgctttcaaggcggcggccggccaattctgtgccttttccttggctgggt

SEQ ID NO: 34293 - DNA, 2395 bp, Zea mays
  Clone ID: MRT4577_131279C.1
gccacgcgtcctcggtcccgcatcgcgttggtccacccacgcgtccgcgttcccgcatcaccttcctccaccaccgcctcccacattcttcgcatccccttacttttttgtccttctatcgtcgtcgatccgggctcctgttttgcccgcacccgcacgcaggctggttgccaagaaagacagggcgagtgcgcggcgcccagctccgaccgtgcttcatagctcatctggccggggacggggatattcgcgttgctcgcttgcccggcgggtagctgtagcctgtaggcgagaatcgggaacgggggtgtttacaggccatgaagtataacacgaggaaagacgcgagcggtggcggtggcggcgcgccgtttgccatcccatgcgtcgacatcaagtcgttcgtggcctcgctcgccttcctcacgctgttcgtcgtgttctggcagctccagccctacggctccgtgctcaccgcggctcgcacctccgcctcgcccccttgcaccctcctccccacaaccgctgccatcgacctcgcctctcctgataccaccagcagcactgccgcaaagacggaccaaccggcggcggcggcggctgtttcagctactgccgccggcgcaaatgctgccccggtgtggttggcaaaggcagcgaggccggcgcggccggaagatccgaacaagcgcgtgttccggccgtacggtagcgcggcggcgctgttcgtgcagatgggcgcgtaccggggcgggccgcggacgttcgccatcgtggggctggcgtccaagcccacccacgtgttcggcaccccctacttcaagtgcgagtggctgcccaaccccaccgccggcgacccctcgccgcgccccgtccggaccaaggcgtacaagatgctcccggactggggctacggccgcgtctacaccgtggtcgtcgtcaactgcacgttcccctccaaccccaacgccaggaacgccggcggcaagctgctcgtccacgcctactactccaccgcctcccgccggcacgagcgcttcgtcgcgctggaggaggcgccgggctcctacgacgagtcccgcttcagcccgccgttccagtacgactacctctactgcggctcgtcgctatacggcaacctcagcgccagccgagtgcgcgagtgggtggcataccacgcgcgcttcttggggcccaggtcgcacttcgtactccatgacgccggcggcatcagcccggaggtgaaggcggtgctggatccgtgggtcagggccggccgggtcaccgtgcaggacatccgggcgcaggcggagtacgacggatactactacaaccagttcttggtggtgaacgactgcttgcaccggtaccggcacgccgccaattggaccttcttcttcgacgtcgacgagtacctttacctgcccaacgggcagaagctcgccgaagtgatcggccagctctcgggttactctcagttcaccattgagcagaatcccatgtccagcaagctctgcctgcaggatccgagcaggaattactcaagagaatggggatttgagaaactcgtcttccggaactcgatcaccaaagttcgccgggatcgcaagtacgccatccaggcccggaacgtgtactcagccggtgtgcacatgtcgcagaacctctacgggaggacgacccacaagacggagggcctgatcagatactaccactaccacgactccatcaacgtcatgggagagccttgccgtgagttcgtgccaatgccagcgaacggcagcaagacgatgttcgaaggggttccctatgtatacgacgataacatgaagcgattggctggcgagatcaaacggtttgagaaggtaacccttggatcagctcggacatagtagcagcttggcaactgaaggctggtggtacagatagatttgatattctttgagtgcctggctcatgtcatgtgtaccatggagctcacttttctacagttctactgatactgattggtcggcactgcatctggctggcgatggaccttacggtggtccaaatggaaatggtgtaaagttttggtttagctttgaatctgtcatctgtgtggagggcaatgcctttatgctgtgttttccgttcttgtctctatgatgttgtatgtatctcattgtagatttgtctagactgactgttgggctttattagatttttctgaatgtcgtatagggcgcagtgtgaagcgtctgaatatttgacttgttaaccaccctctggagtctgtatttgttcctgcacaaactggagcgtcagttcccatgttttctgttatgtacacctaccagaatagtggacagctcaggcaatggttaagcagttttttagcaaaaaaaaaaaaaaa

SEQ ID NO: 34294 - DNA, 340 bp, Zea mays
  Clone ID: MRT4577_131280C.1
ctctaggtaatctgtggtacacactgacacacatgcttccaccaggcacattggtcatttcctagagctctcacactttcacatctgcctccttctctcgcgtgtccgtcctgtcgtaccgcttccctatgtcgacatatcaacgaccattcatgtcctgccaccctcttctccaatacgactgacccttctgccgctccttctcatgcgtgctgcgactctctgactttgtctaacctcaagttcctgttcggctacaataactctccctgtatgggcgtctacaacatcgacccctatcgctccatgtaactttctgccaagttctgccttatcactc

SEQ ID NO: 34295 - DNA, 294 bp, Zea mays
  unsure (1)..(294): unsure at all n locations
  Clone ID: MRT4577_131281C.1
accacccctcaataattccctcaacccaccactccnttcatatccanacacataccctcaactaggggggacttactaaaatcgccgcctgctacaaccgccccccgctattttgactcacttttctcaactctattacaacctcttcctccccactgggcgctaccttatgaccctccactcactaaccctaaacttctcctccctcaatattcgctgacgcaaaccatatcccaaatcaaccacaggttaccacccccaacctctttaataggcgccttacaactctaacaa

SEQ ID NO: 34296 - DNA, 1561 bp, Zea mays
  Clone ID: MRT4577_131282C.1
cgaggtccgtgccggaaaaaaaaaaaaaaaaaaaaaaaaaaaaaaaaaaaaaaaaaaaaggagcaccattgacgagagtggagtcagattggcaacatcgagagcggccgggggcgttggctccagcctcatgaacagtacagtcgccctgattgaagctagcttcgagctcgctgaacaagtgaagccatagcgggagtagctacaacgaagtgatcctccatgggcaacaccttcggcttccgtggtggcctccgcgccgacgtcgccgatctgatgcaggatgctgccgaacatctgaggaacagtggggtgttcgtcaagagagcggtggcttctcagtaccaaagcaaccgcaccgggaacgacgaaatcgacgagtcgtccgccgaggagctgcgcgacgcggcgagctacgtgcagcacaacgcgatgctgatccaagtgccggtggtagggacagcgaggacgttctggcggctatcggacgaagccacgaggatgatcaggaagctcgcgttgatcctgaggaaccaccactccgtctgcaagtgcctcgccgctcctctgcaggcgtccaacgtctgggtcgggagcgctgggaacgccaagctaaggggggccaggttcactgacaaaggcttcagcgtcgagcgcgtgagggaggactacaggaacctgtccagggtgctccagcagctgatcagtatctctggtggggataccagcaaactacccccggattacatacattttctctcgctcttgacggaggacaaccttacaaacaaggatgagttcttggttgtaaaccatgctgctctgctgcctctgaaaaaccgcaccgaggccttcctgatgctatacgacaggatcgtcaagtacctcggcaaaagaaaccgagcgaagatgaacaggatactctcctgcctcccctaccaggacgactggctggacaccgcgacggcgaatgccaagatcaaccagtggattgtgaatgtccagaatacaaaggagtacaggaagactacactcgatctcctgcggctcaacagaaacgtgagaagccacttgcacgagtacggccacgacgacgacgtcgaggagatcctgtactgtgagtggcccatgctgctcgtcgtcatggagaagatgttgcaccgggaaggcgagctccaagacacggacatcgagaacaagttcggctagccgctagccggtctacactgcaaaacagatgagatggaaggtgtgttctgcgtttcctggggttggaaatggtgagctactgttcttcgatcttctgtgagaatgttcatggtgatggagtgacacgctaccggtacctggtttgctttatgtaataggctacctgctttctcttgtcccttcaacttggaaaaggcaacgccagtcagcttcataaactgtggtctaaaacatcgccttaaaactttaaaatctttatgctgtaaagtcgtcttgtcattgagtttgcattcatcctttaatctaaaattcttgtaaaaaaactctattgcaccagttgggaacctccttc

SEQ ID NO: 34297 - DNA, 385 bp, Zea mays
  unsure (1)..(385): unsure at all n locations
  Clone ID: MRT4577_131283C.1
tcttggctccaggccacccctccggtnctgccctggacatgagcagcgccggccacatggtgctctactcgttcagcctcaagtggaggatgattgcccgctcacctcagtggatgagattgcaggtgcggctcatcagatcgtcgagaagatcaacgaagaacaaggcggcggcgggggggggtggtgctttcttgcggtgcatgttatcttttttctttagctcctgtagcaagtgaagtggttttctcccttccctgtgtctgtgtgcaagcgaataatgtactgatcagcttagccggtctctgaaacagtagtatgcatcagaacctatctttgttcatagataatgtccatggccaagcatgcatgcaaggtctccgaa

SEQ ID NO: 34298 - DNA, 420 bp, Zea mays
  unsure (1)..(420): unsure at all n locations
  Clone ID: MRT4577_131284C.1
tatgatcttgcgatagngagtcggagatcggctcgagagaatgccctgtgcagaagactatctatccgtggtcctgaaccagttatgtgtgttgcatgagaaaacgccagtaagtgacagagtcaccagatgctgcacagaatccttggtgaacaggcgaccatgcttttcagctctggaagtcgatgttacatacgttcccagagagtttaatgctgaaacattcaccttccatgcagatatatgcacactttctgagaaggagagacaaatcaagaaacaaactgcacttgttgagctcgtgaaacacaagcccaaggcaacaaaagagcaactgatagctgttatggatgattccgcagcttctgtagagaagtgctgcaaggctgacgataaggagacctgctttgccgaggagtt

SEQ ID NO: 34299 - DNA, 195 bp, Zea mays
  Clone ID: MRT4577_131285C.1
cttttactttttcctacgacgccggtgagggtacgtcgtgtgtccaaaaggggaaggagagggaggaggacgtcgcctacagcaggagccaaggagtcaacaacatgaggacggggtcgaggcggccgaccgaaaactggatttgggtgacctttacggcgcggcggtggggtggttagaggcgctaaccatttt

SEQ ID NO: 34300 - DNA, 317 bp, Zea mays
  unsure (1)..(317): unsure at all n locations
  Clone ID: MRT4577_131286C.1
cggaanacccgggctcgccgagaactccataaccccacaggccacaacttccaacaatccaatttctctcttccgccagcgcccccagctgccgggaccttaccctaccgggggaggacttctccctgccccttccacctcatcctcattccaccgcctctccgtccaccttcacgttctactccctcctctcctactactatttgctctccgttctcggccacaacaacttcggcaccgtttacaatgctctgcaccacctttcctctcaatctattcgtacttaatctattcgcattcttttacaccttttcttt

SEQ ID NO: 34301 - DNA, 281 bp, Zea mays
  Clone ID: MRT4577_131287C.1
atgagggacacacaacccctggatatgtttcattgtcagattttgtgcttgattttaagaatggaattgtgggtatctttcctttttttttaatgtatcttaactgttgcctgtcagtgtttacaaactagtgcgttgacggcaccgtgtccaagtttttagaacccttgttagccagaccgaggtgtcctggtcaccgtttcaccatcatgctttgatgttcccctgtctttccctcttctgctctcaagagcaaaggttaatttaaggacaaagatgaa

SEQ ID NO: 34302 - DNA, 652 bp, Zea mays
  Clone ID: MRT4577_131288C.1
aaccgacttcagttccctctcgtttcctttcttctctccctgccccgcaatggtggccgctcgtctccggctcgagctgctactctccgtgtgcctctagctccgcgtgggcgcggccacgctctctagcaggacatccgtctgccgtctcgaggaggcgcggatggccgacgaaacggacgtacggagacgccgggacctcgctgggctgagctcatcgcaggctccagcgtgtactacaactaccgccaccacgcgcgacatcctgccatgtgatacgcaagatcatgcagagaagaggcggacatctgtgatgagaacatcactctgacgtcatgcactatgacatctgcgcatagccccgagaatcccaaggctggtgtcatctgtcaaccatccccacggtggcacatgtctatgctggggtgccaaatgcattacacgatgcagagatgtctactgctacaattgtcttcactagttctgcttgccaacaaaactgctctcatgacgtgggatatggcaaggcttgaggacagcgtccacgatgatcatatctttgtttactacagtgaccatggaggtcctggagtcctaggaatgcctacctatccatgtctctatggtgatgacctcgcagatgtcctgaaga

SEQ ID NO: 34303 - DNA, 1364 bp, Zea mays
  Clone ID: MRT4577_131289C.1
gtgcggtgcagtgcaggtgcgggatctctgaatcgctcacgcccagcttcctctgtcatctccctcctcggacctcgccacctcacgcggaaggaggggaagaggaagcgcggagactggaaatcgggccccaaatccgcttcggtctctcgatcggcgaggcatgatttatacaaccggctaggatggcctcaaaagctataaaaagaaggcctatcagcgctgagactgataaaacagggggaaaacaaatggatacagcactgtcagatcctgtaacagaacctcttctaggaaacactcctcaggaagagaaatccaagacatatgagcctattacacggtcaggtttctgggatgggacggcacaggagtgtcttcgttggacacatcttttagcagcttttgttgctcaatctgcaagaaacatagtaaatgttctttctgaatttggatattttttagcaagactctttggttgctcttctgcttccaaaagttcacaaaatggacagacacttccagttaatctcagtccattacaggaagaaaggttaagattgttgagacaaaggatagatgtgccatatgactgctcctctgtcaagcatcaggtatgcccttgaaagaactttggaggttggcttaccctaacagacaacttcctcctctgaagtcagatctctggaaggagatgggctggcagaactctgatccatccacagattttagagcagctgggttcatgtccttggagaatctaatatattttgccagaaattacccagattcctttcacaggctactgcataaagcagatggaaaaatgagaacaaaagctggtgttcactttgttcaactactcgatgatgacggtgtggctttcgacaaccttttctgtgtagcatttcaggtgcttgattctcaatggcttgcaaggcgagcgagttatatggaattcaatgaggttctgaagtctacacggggtcagttagagcaagagcttactatcggaggtatttctcgcattcaagacatgccatcattcagaatgctgagaaggtagcgctgtttgtacttcacaggaaaagagatacattttagattccaatatattgtttaaatttgttgtccgttctttcactggattttgaagacgtgacattgtgtatgttattgagtatattgtttgtactgtcgcagcttaaagctacagatcataatatatgatatgatatcttgaaaagttgttgtccgttctttccctggattttgaagacgtgacattgtgtatgttattgagtatattgtttgtaatgtcgcagcttaaagctacagatcataatatatgatatgatatcttg

SEQ ID NO: 34304 - DNA, 221 bp, Zea mays
  Clone ID: MRT4577_13128C.1
caacaacaaacaaacaaacgaaacaactcaaaaccgaacttctgtttctttcagttatcgaaatggctaaggatccaatcagagtcctcgttaccggtgctgccggtcaaattgcatactccttggtcttcccaattgccaagggagagctcttcggaaaggaccaacctttgattcttcacttgttggatatcgcacaagctcaagaagctctcggtgga

SEQ ID NO: 34305 - DNA, 1509 bp, Zea mays
  Clone ID: MRT4577_131290C.1
ggccggccgggctcgtgcagtgctcgcctccctcgtcgaagccaagaacgtgtctcgcaacatatttgtactaacacccctgaagaaaaaaaaaaaaagccgtgagcgcagcagatgtcgtgcggtgcagtgcagtgcaggtgcgggatctctgaatcgctgacgcccagcctcctctgtcatctccctcctcggacctcgccacctcacgcggaaggaggggaagaggaagcgcggagactggaaatcgggccccaaatccgcttcggtctctcgatcggcgaggcatgattcatacaaccggctaggatggcctcaaaagctataaaaagaaggcctatcagcgctgagactgatacaacaggggaaaaacaaatggatacagcactgtcagatcctgtaacagaacctcttctaggaaacactcctcaggaagagaaatccaagacatatgagcctattacacggtcaggtttctgggatgggacggcacaggagtgtcttcgttggacacatcttttagcagcttttgttgctcaatctgcaagaaacatagtaaatgttctttctgaatttggatatttgctagcaagactctttggttgctcttctgcttccaaaagttcacaaaatggacagacacttccagttaatctcagtccattacaggaagaaaggttaagattgttgagacaaaggatagatgtgccatatgactgctcctctgtcaagcatcaggatgccctgaaagaactttggaagttggcttaccctaacagacaacttcctcctctgaagtcagatctctggaaggagatgggctggcagaactccgatccatccacagattttagagcagctgggttcatgtccttggagaatctaatatattttgccagaaattacccagattcctttcacaggctactgcataaagcagatggtaagagagctgaatgggagtatccttttgcagtaggcggcgtaaacatatcctatatgttagttcaaatgctggatttacagtcaggaaaaatgagaacaaaagctggtgttcactttgttcaactactcgatgatgacggtgtggctttcgataaccttttctgtgtagcatttcaggtgcttgattctcaatggcttgcaaggcgagcgagttatatggaattcaatgaggttctgaagtctacacggggtcagttagagcaagagcttactatcggaggtatttctcgcattcaagacatgccatcattcagaatgctgagaaggtagcgctgtttgtacttcacaggaaaagagatacattttagattccaatatattgtttaaatttgttgtccgttctttcactggattttgaagacgtgacattgtgtatgttattgagtatattgtttgtactgtcgcagcttaaagctacagatcataatatatgatatgatatctatattgtttgtaatgtcgcagcttaaagctacagatcataatatatgatatgatatcttg

SEQ ID NO: 34306 - DNA, 341 bp, Zea mays
  Clone ID: MRT4577_131291C.1
acaagctgtgttttttttcgaacaagcttttgttcattttccgttccttcccttgtggcgtatccgctgccattccgccctactactgatttatgatatttgggaaaactgctttatgcatctctctctatctatctttgtaatattgcagtagggcgacgcacattatcatgtgtggtctgaccaataatatatgcatgggcgtaataaagttctggtttccctgcgggggggggggcgggaaaagggaaacctggaccccggcccggctacgctctgagggtgctgtgggtgttttcttttggctttggcggcccattggttccttttttttggggccc

SEQ ID NO: 34307 - DNA, 515 bp, Zea mays
  Clone ID: MRT4577_131292C.1
ggccgcttttttttttttttttttggatgtaaggcaacaggaaataaaacaagataggacaagcacacactacaaacactgtccatcaagccagcatataccaaccaagtacatcacgattgaaagaaaaaagtgacggaacaggactaggatcgaacagaaggaccaaggatggtcataaacatgcacttgacaacaaaaaggaaacaatatataaatagttacaagactaacgagtgacaattaaaaccaataagggataacagaagcaaaaacgaaaagattagagtttgtcctcaaactaagaaagaggaggcatatgcactttaagacccttcttgttgcggatatacagcaccaactgggcaggctgaaatccaccctccaaaggatccgagcccatgatgtgccaccggtcaaacacacactggggaaacgcctgaccagaggtggaagacctgagctggatagaaaacccaaggaactggggacaaggaggaaagccttgaggttga

SEQ ID NO: 34308 - DNA, 169 bp, Zea mays
  Clone ID: MRT4577_131293C.1
attttcttttccctttccttttgcttgggaagtaacatatattgactgaattcatcaataacaactcactcttgcacacaacaacctgtactttaatttcactttatactacgctaccgcccaatttacatgacgtgctaaacacaccgcaaaagacatctttccaaat

SEQ ID NO: 34309 - DNA, 222 bp, Zea mays
  Clone ID: MRT4577_131294C.1
ggcgcataaccgtggcggcagcgttcctggcgctggccgtggtggctcccgccgcgctggcgcaggctcccgggcccgcggcgacgccgagcgggccgccgaacgtgacggcgatcctggagaagggcggtttgtgtggggggtgggatgcggttgatgaaggagacgcattaggtcacgcagctgaacagtctgcttaacagctcgtacgccagcagcggt

SEQ ID NO: 34310 - DNA, 785 bp, Zea mays
  Clone ID: MRT4577_131295C.1
acctcacctcacagcagccgccacgtccccggcgtggcggtagcctcgcgtcgcagtagggttttacctttgcttcccctttccccaagctgcagaggccgcggcgaccgaggcgggaagaggggagccatggagatcggggggcagcacccggcgagcagctgctccaaggagcaccagaagatctaccgcgactggttcgccctcgccgactcagatggcgacggccgcatcaccggccccgacgccatcaagttcttcgccatgtccagcctcccccgcgccgacctcaagcaggtctgggccatcgccgactccaagcggctggggtacctcggcttcggcgaattcatcaccgcgatgcagctcgtctctctggcgcaagcggggaacgagatatcccaggacagccttcagcgcgaagatctaatcagcttcaaccccccagtgatggagggtttggatgctcaacttgccaaatccaagcatctggcaaagagggtcgatcaggatatggatggatttcctcaggcacagggaccttctactaaccattggttcaactcgaagtcatccaagaagatacccctgactgctgttacttctgtcattgatggtttaaaaagactatacatcgaaaaattgaagcctttggaagttacatacaaattccatgattttgtgtcccctttactgacaaacagtgattttgatgcaaagccatgggtatgctcttagggcaatattccacagggaaaactactttcatcaagcatcctgctaaa

SEQ ID NO: 34311 - DNA, 332 bp, Zea mays
  Clone ID: MRT4577_131296C.1
gcgttcaaagctgtaccccagaggtcggatcctttgtcaatgacagtgaatggcatccagcgtgcctagaacattacgtcaggcgagatctgtctccaacccaccccatcaagcttgtgctcgctctcaacttctcagtgttctactaccaaatccttaacttccgtgatctctcctgcaaccctgcaaaacaggtcttcgattaggcaatctcttagctacacagcctgtgataggagttctacaaagacatgactttgatcatgcagttcctgcacgacaactcgaccctattgacttcctacacctactacgatggctgcaactagatc

SEQ ID NO: 34312 - DNA, 364 bp, Zea mays
  unsure (1)..(364): unsure at all n locations
  Clone ID: MRT4577_131297C.1
gctcatacacacccaacacacctcaacaagcagagcagggatcccgggattcgccggcgcggcagcgagagcgagagatggacgggaggatgttcggtctcgaggactcccctgcttgggggcagctgcagcactttttggacgtgcccgacggcgacgccggcgcggccggcgacaaggcgggcggtgggggtccgacgcgcacactacgtacgagacgcgcgcgccatggcagcccccccgcccgacggnaaggagctgccggccgcgtacgcgttcgtggggaacatgccggggctgggcacgggccacatcaacgtgcatgtgtgggacgagcgcgtgctgctgagcaagcggtaagcgg

SEQ ID NO: 34313 - DNA, 325 bp, Zea mays
  Clone ID: MRT4577_131298C.1
aaaaaaaaaaaaaaaaaaaaaaaaaaaaataaaaaaaaaaaaaaaaaaaaaaaaaaaaaagaaaaaaaaaaaaaaaaaaaaaaaaaaaaaaaaaaaaaaaaaaaaaaaaaaaaaaaaaaaaaaaaaaaaataaaaaaaaaaaaaaggggccccttttgcaatttatttttaaattgtaagcggccgttttaaagattcaaatttttggaacgcttttttgaaacgtaataatttttatattggggcccttaattaaaataaatgggccgtgttttaaaaacgtttttaactggaaaaaccttggcgtaaccaactttaatggttt

SEQ ID NO: 34314 - DNA, 2195 bp, Zea mays
  unsure (1)..(2195): unsure at all n locations
  Clone ID: MRT4577_131299C.1
ctcgaggtgggccggtcggggacgtcttcgttaggtttccacggctcccaccagcgtgagtgcgtgaccagccccaatgccctccaaaccctagtccacagctcctgtaccctggcggccatgccggatctgagcaccagctacctccctcccttccctgaactgtccctcgatgcgggggccctcgccgtcgaccacgcggggaatgctgcagccgccgcctcggccgatgcggcgtccgcgtacgcgtcttcgtctgcctctgtgggcagcggcgtagacgacctcgttattccagcggaatgccggtggaagggccatgtccgcaccttcgacatggcgggcgcgggcgctgtcaccacttgccccgccgcgcggcgtggcggcgggaagaagctgtcactgattccgtcactcgagccggcacggacgcaggcttcagcatcggctccgacgctcgaggaacgcgtgagcgagtgggcggctaagaaggcagcggccggcgttccgactcatcactgcgtgctgcctttcctcaccggggcgccaatggcggtcgaatgtcgtttgtgctccaagattatttatgttggagaagaaataaaatgttcagttaaaaagtgtccacaaatgttccatctcaaatgtgttgcggaagatacttcaaactttaccgttgaaagcttcaggtgccctcaacatgggtgtatggtttgtaagcaaaagatgttcttttggcgctgcggacgttgtacagttgcagcacatacgaaatgtgcaccatggccagtggttcacctaaaaaatgatcaaggaagtgcaatttgctggaggcatccttctgactggctgctgcaaaataagaatgctgactttaccaacagtgtagaggaagtattttgccggctacctcttccatatgttaatgaagacttaaatattgattcaatcatcagggattatgctgaggctgtttataagccacccccctatacatctatcaggcgcaatgtatatctgataaaaaagaagcgcactggtgttcgtgtggatattgggtgcacaaactgcagggctgattctacttgcaaagaagactgtgaatgcaggggtctttctatgagttgttccaagaattgtcgctgctcagatctatgtacaaacaggccattccgcaaggataagaaaattaaaattgtgaagacaaagcgatgtggatggggtgctgttgcgttggagccattggagagaggtgattttgtaatcgagtatgttggtgaagtcattgatgatgcgacatgtgaacaaaggctttgggatataagacggcgtggtgacaaaaacttctacatgtgtgaaatcagcaaagattttacaatagatgcgacatttaaaggcaatgtgtcacgttttctaaatcacagttgtgagcccaactgtaaactcgaaaaatggcaggttgatggtgagacaagagttggtgtctttgcctctcgttccatcgaagttggagagcccttaacttatgattacaggtttgtgcattttggagagaaagtgaagtgccattgcgaagcagtgaactgccagggatacctgggcagccaaataaagaacccaattcaaagcattcttgccactgtagcaccgcaagtgcagttgcgagagtattcgcccatgcaccacgaagctccaagattgaagccaataaatcacttgttaccctggaccaactgtatagaggtctcttttaacctgagaagcaaaaggaaaattgaccggctatgctgggcccgcaagaagaagagaacatccctcgtgccatcttcaacaagcatgccagcatcgccgagtgaagttcctgccgcggatttctaactgcccttcgttgaagagcaagcctgccctgtataataatttcatggtacattctttacatgcattggttggaaacgattctttcacattgctcatcaatggtgttgtaacctgcaacattctttatttggtttcatagggcattcagtcagtttacgggtggtagtttgtcggaacatgtacccaatttttctgatgaaacaaatgtttgagcttcaaaaaaaaaaaaaaaaaagcggccaaaaaaattnnnnnnnnnnnnnnnnnnnnnnnnnnnnnnnnnnnnnnnnnnnnnnnnnnnnnnnnnnnnnnnnnnn

SEQ ID NO: 34315 - DNA, 251 bp, Zea mays
  Clone ID: MRT4577_13129C.1
agctgatcaggtcgagcacctagtagcgacctgctcgatcatcagagtatagtgggggtaggtgactgtctatcttggcggctggttgcaacggtcatggcgacgccctctcatcggctgccctggctgctgctgtgcctgggcgttccggagctctgctccttctcggggatcagcttgtaccatgagctggacataaagtacgtcgacggtctaggcaaggctcatgacaactgtcgtcttctgacact

SEQ ID NO: 34316 - DNA, 1066 bp, Zea mays
  Clone ID: MRT4577_1312C.1
cccacgcgtccgcaagaagtcagtcacatctcacagctcagtgagatccagagccaaagggcggggcgtctccgactcccaatcccaagtccagccgccgccgccgtctcttgctcgctccaaaagccgttttccagagatctttttcagcgccagacgccagccgccgtctctcgcttgcctgcatttccgatcctgaggcagtcctcatctcattctcatgatctcatccaaccgggaggctgggaacgagatcacagctacagctacagctacctgagcaggatcctcctcagatcggcttcaaaaatcaaagggggcgggggacaacaaggcaggggatgagtgcaactgcaaccaaggtgaagagacgtgtgggcaagtacgagctcggccgaaccataggcgaaggcacattcgccaaggtcaggttcgccaagaacaccgagaccggggagccggtggccgtcaagatcctcgacaaggagaaggtcctcaggcacaagatggccgagcaggtcgcttttccagctctcaagtatcgtgccatgtttggtttggtgtattctcacgtcttctacattgtgcatggcccaatatgggctttggcatacttgttcagagttctgtcagtagatttggtggaactagtcatttcgctgacgatgacaaaaactactacatggttcgatgcagattaagagggagatttcgaccatgaagctgattaagcaccctaacgttgttcgcatatatgaggtaatgcaaaagttcgccacatattaattattccagtctgatcttatagaaaggcaatgtttccaataatgttcaggtgatgggaagtaaaacaaaggtctacattgtgctggagtatgttaccggcggcgaacttttcgacacaattgtaagtggcatgcacattatgcattcaggtgtccataaaatttcagcttgtcaccaaaaaaatccatcaacggtgatttttccccctttctttttgtgtgtgtgtgtgtgataaaggctaaccaaggtcgaatgagggaaggcgaggcgaggagttact

SEQ ID NO: 34317 - DNA, 256 bp, Zea mays
  Clone ID: MRT4577_131300C.1
tacggtaaaaccacaggccaccatcgtcgcgctcgagctccgtgtcctccggaaggcgaaccttcagcctcgatcggcggcgccggcagccaagttgaagacgccgcgcgcggttcgtgatcgtgagccagtccaacggcaaggggctgcagtgcagatactgcccagagctacttgtcttcagcactgcttatggactctgatgagccagcccgtctgctttcatcacgacatatgcatcatatatattttttca

SEQ ID NO: 34318 - DNA, 500 bp, Zea mays
  unsure (1)..(500): unsure at all n locations
  Clone ID: MRT4577_131302C.1
cccacgcaaccggctgatgcagnnaggncncgcttnatacagcnaaccaaacaaaggcagncnnnnagncaacgcaagagnagagacaggatagaagagcgcacganaccaancagaagganaaaggacacaaagggnggnnncaggttcctcgcgcnnaccgggagcaccgncaggccggcgncgacagggagcagaccaagggccncaacgcgggcacgcaggaccagacgaanaacggcaggggccacancgncggccccgncggcgagcagaagcagancnacaccganaagggcaagggcagcgncacaaggaagccagccgngaacgacaggccgcncaccaggnacaagaggcaccncgacaagccgncgggagaggacccgaccgngcngganangagcacaangggcaagggcnggangnncgncaacggccagggcancggccgccacaggancncccacaagcaccgccccggccggccancgcagcag

SEQ ID NO: 34319 - DNA, 488 bp, Zea mays
  Clone ID: MRT4577_131303C.1
cccatgcgtccgcatgtcgaaggctttcagggaaaaaatatatgttcccttccgagctcaaaagttgtgcaatagaaaaaaatgtcaactactgactgatgatctttaaggatacacaagaacatcacgtgtgggtgacataaattcttttttgcaaatttttttaggaatgtttatatccctactatatttaagtgggaatttcttccggcgtctccctcccatgcgcactgctagaaaaatacaaaaaataagcgcagaacctattgttgggcgatttgtttagtgtggcatagttgactactttgcaaaatacatgtggcatacagaatcttttgatcggctagctttaattaaagtagactttgcctacattttggttcagttatggccatccagggcttgttttacttcactaattagtatgtactcacactagacccttttctatagtggtcagcaagcaaggttgatgtctgagagtgaca

SEQ ID NO: 34320 - DNA, 229 bp, Zea mays
  Clone ID: MRT4577_131304C.1
gcacaattcaaggccatcttcagtatcctcgacttcaccgtgttcagcatcgtcaacaagatctcttgcgcccagctgatgctgtcgcgcatgagcgtgttcctcaatctcggctactcgtatgaggagttgctagccggctaccacaacgcgatcagcctcaacatgtgcatgtacttcccgcgcttcgccgccttcaacttcactaagggtgggcatgcgcacttta

SEQ ID NO: 34321 - DNA, 470 bp, Zea mays
  Clone ID: MRT4577_131305C.1
tttttttttttttttttttttttttttttttttttttttttttttttttttttttttttttttttttttttttttttttttttttttttcccggacccgggggccaacccggaaatcccggaccgggcccgggaaccaacccacctttcccaaaagggagtcaaataaaagccgggcgaaaccaaagccaaagccgggcccggaaaaaaaattggaccccctcacaattccacaaaaaaaacgaaccgaaaacaaaaaaagcaaagccgggggacccaaaaaaggaacccaacccaaattaatgggggtgcccccaccgccccctttccaaaaaaaaaacctgccggcccacctgaataaaaaaaccacccaccccccaaaaaaaagcggttagcgtatccccccccaaggtgttttttcttctccccaaggaaaaagacaaaagtggattgcccctaaacgcccggccc

SEQ ID NO: 34322 - DNA, 232 bp, Zea mays
  unsure (1)..(232): unsure at all n locations
  Clone ID: MRT4577_131306C.1
gggggcaccaagaagcacctttttttttttttgggtttaacttaaaataaaaccttacgggggggaaagttcgattaatccccaattcatggtggttaatacatgggttttctggagcccagggttaacacaggnctaacaactggaacagagggacttttaataaaaaaaacaggtggggaacaacaaaaccgggacgaacgaaaataaaccctttggactaggggaaaaa

SEQ ID NO: 34323 - DNA, 496 bp, Zea mays
  unsure (1)..(496): unsure at all n locations
  Clone ID: MRT4577_131307C.1
attcggctcgagcgccgccgccggctcctttctttctgttaaacgccctccccatgggagagtggccattgtccacatcgttcgcgccggcctccggcactgaggaaaccccatgcagtcatactgagtggctgcaggcgcaccgtgagtgcaatggctccacgaaccaccaggggaaggccctcaggtgagcgccaaggacgtgaccgacatcgaagccctcctcggatactgatggaacagaaatctctagcggagatgccgctaacctaatgctagttctactggcccaaccgcgcagggatacctatgagagccttgagtgcctgccatacacagttagtcacctgcctgatgtcccgcgaggtcttccgcctgtaccggacgctccacgatttcgntgacacatggcacctaaacttcaagatcaggttgtatatccaaactcctttgacagtttgtatactagatcaggttgatgtttgggcatcgctca

SEQ ID NO: 34324 - DNA, 494 bp, Zea mays
  Clone ID: MRT4577_131308C.1
gtgatggcggctacaccgcattttttacagtaatacactagttgatatgttgtcctagagattgcagaaagtctttgcatacgcctctctaaggtggatcagggggtaactccttctgagccttggggtgaacgagggctttggaggtatactcgagcatgaggaacatgagaaatacctttccctatcctacatatgctcctgcatggaggcccgggtcttggggatctccgggccccggaagccatggacgattatcggcggggcccccggggaattctgcggagagatttttaaactgtgcgccccggcaggatagaaccaggcggcctatcagctggggaacaggacaagtacaggcggagcgaagaattgcaatacacactgaaagaggatggctttgaacatccataattgagcataactaatgaagctacattcaagtcgggataaccttgcgcttctacatcggactaattaaaagcttgggaccc

SEQ ID NO: 34325 - DNA, 419 bp, Zea mays
  unsure (1)..(419): unsure at all n locations
  Clone ID: MRT4577_131309C.1
caggttgatatgaggccgcagctggcagctggcagcaacaaaaaggttccggtatcagttagacaggcacaatttcaccgaattgctgagcattatttgcagaaagcaaatttggatgtcattcgcagatgtgcagatactgaattggccattgctgatgctgtcaatgttgaaaagggtatttatgaaaggtcaaatagcanatcaatttatgtgaatctttgctctcaggctactcgccagcatgccaaggcaaaatctgataatgacacttcaactctaaccaaaaggactgaatcaggcagtgatcagatatcacaggaagctacatctgagggtaccaatgttagtggcagtgatatggaagaggatctanacagagcagctatctccaatcaaaagaatgaactagaggatga

SEQ ID NO: 34326 - DNA, 786 bp, Zea mays
  unsure (1)..(786): unsure at all n locations
  Clone ID: MRT4577_13130C.1
gctctggcgctccctccagtctgcaggaccacctccagcgacgctatcaccttccatccgttcaccagggcagcacacatcttgcaagctgctcgacgtcaagctcaccccgggacccctacgccgcgccgccgccgccgccaccaacagcgacaggcgatagggcgagccgcctgtcgcggggccgacaaccgggaccccctaagccgcaccgccgtggccaccaacagcgatagcagagaaggcgagccgcctgccgcggggacgcgacacgatccggcaaccggccgacgggcgaagcacaccgccgtcaccaccaacagcgatagcagagaaggcgagccgcctgccgcccgcggcacgatccggcaaccggccgacgggcgaagcacaccaccgtcgccaccaacagcgatagcagagaaggcgagccgcctgccgcggggcgaagcaacagacgagcgtggacgctgacagctgagcgtggacgccgatcgtgccaagcgcccagtcccgattccgccctgcgccgccgcccgccctgacatggcaaacagaacaatggtcatctactctgtcattctccatgaacaagctgcttcttgcatccctctatttggtttgcacgactgcaagagctgagcaacttggatttgaattacnagagattatgaagagaactattgtcaaatacttaaaacatagtctcacagatacatagatacgaaagcttggtctcaaaggaaaaaagtatgtacacctcaaagggaaaggtatgtacactct

SEQ ID NO: 34327 - DNA, 314 bp, Zea mays
  Clone ID: MRT4577_131310C.1
ggggcgggtttttcccaaggttttaaacaggataaaaaaacttaacaattttttaaggtttagggcccccccccatccccaacaggattttagcccttgggggaaccccttttatcaggggggggccctaaaaccggccttttgtttaaaacaaaaaaagggttttttaacccccgcttgaaaatgcccccccgggggggcaaattcagggcccaagaaaagcttcttagaccggccaacccatttagggggggcccggggggttttttacccccaaaagacttagggggcccaagtttagcccccctaaatgc

SEQ ID NO: 34328 - DNA, 658 bp, Zea mays
  Clone ID: MRT4577_131311C.1
gctggtacgcctgcaggtatccggtccggaattcccgggtcgacccacgcgtccggcgaccggcgcctcctctgcggccgtggagccggagccgcggcccgagcggtagaggcccccgtctttctccaagccccaagcctcctagcggacggtcgtccggcttcgcccgcccagccgcggcgctccaccggcccacgcggctcgccctcttccacgcgccaaccccgccgggttccgtgtgcagtgtcggcggccggccctgggcccgagccggagcagtagccggcgccatgtcggtggtgggcatagacctgggctttcagagctgctatgtcgctgtggcccgcgccggcggcatcgagacgatcgctaacgagtatagcgaccgctgcacgccggcatgtgtttcttttggtcctaagaatcgttcaattggagcagcagctaagagccaggtaatttctaatgccaagaacacagttcaaggctttaaaagattccatgggcgtgcattctccgatccatttgtggaagcagaaaaatctaatcttgcatatgatattgtgcagttgcccactggattaacgggcataaaggttacttatatggaagaagagaggaattttaccacggaacaagtgactgccatgcttttgtc

SEQ ID NO: 34329 - DNA, 257 bp, Zea mays
  Clone ID: MRT4577_131312C.1
ctggggacataaactgaactttgaaacactgcacagatattttggaggatggtttgggccgttaatggcataatgggggggaaaggttccatggcttgctttggggaaggcctttttctttacattgagcattggatttatagtttgctctctaaaaaaaggaaacttgaaaacacgccaggtttgtgcatttgttggattgcaagaaccggctatttttttgtaaaaaaaaaaaaaaaaagggcgggcggtttata

SEQ ID NO: 34330 - DNA, 1126 bp, Zea mays
  Clone ID: MRT4577_131313C.1
cgcgcatcagcggctccgacttccgagcgggttcgcgcctggaaacgaagctatacgtcgcgaggaggggagggcccaccgccccgcgtgggcgtcgcagcttccactcttcccccgtgaaacttttctcacgcgcacccattccacccaccacccaccttcctttcctctctctctgtctgactgtctccctccgtccctcgaagcttctctggtttcagacgcaaccccgcgggtcgcgggatcaaggagccagagagcgggacgcagcgagcgttccgccagagatcgagaccgtagctagggtttgaggcgccgggctgcggtggacgagatgtcgacgccggcgaggaagcggctgatgcgggacttcaggcgcctgcagcaggacccgcccgccgggatcagcggcgcgccgcacgacaacaacatcatgctctggaacgccgtcatattcgggccggatgatacgccgtgggacggtggcacgttcaagcttaccttgcagtttacagaagattacccaaacaagccaccaactgttcgatttgtctctaggatgtttcatccaaataaaccagtggagtcctatatatgatgttgctgcaattttaacttctatccagtccctgctgtgtgatccaaacccaaactccccctgcaaactcagaagcagcaagactgttcagcgagaacaagcgggagtacaaccgcaaagtccgtgagatcgtggagcagagctggacagccgactagtgcataaggatgctcgtcgtgcccgataggggcacaataagaaagcgtgaaaaaaaaaacacacccactccttgtgtttctggttcgccaggcttgtcgaaacattgaagaaccccagtgattggtttgtagtctgtcgtcgtcgttctgcccccatcaagagccccggttgctcatggtggtggctgtcgtaatgtagcggttgttgacctatcttctcatgaattgaaaggatcctgcccatgtacaaaaattatagcgtgggaatggttgtttgacggaccgtgttgctcttgctttgtgggttgagtttgacagggacagagcacactcaacttggaacagcaaggcagacaaggtcgatctcgaa

SEQ ID NO: 34331 - DNA, 588 bp, Zea mays
  Clone ID: MRT4577_131314C.1
ccatctcttgacgcggcagtggcgtgtggcggcgctccgctgaggtgtttggcggctacactggcctccgatatgggcggtgttcagcgctaacgcgccggtgggtgctggcgatgatgatgatggccggtctcgtgggttttgtatcattcaactgcctgagacgcagcaagattatgtaaagctcggactatcttgagattcaggatcttattatgagacgacgaaacactatttttttgcgtatcgaggaaagtgctaaatagagaatgcactaaatactaaatgagtttatttcggaatttcagcatgacgatggtgacaatgaactctctgattttacatcatttatctagattttggcttgtctgtgtgcgactaatctaaaggtctagtataagactgattcacggtgataactgtgataatggcgtttggagggtcttttagtactattttttaactgaacattggagtaagcagcacatcttataaagactttatatcaagacttaatctggctgtgtacatgacatgaatacatccctttgtgaattgtatctgaagtggaggattactagatatata

SEQ ID NO: 34332 - DNA, 262 bp, Zea mays
  Clone ID: MRT4577_131315C.1
taattttcctcggcggcgtctccatgtcaccggcggctgacctgcggggggggaccgaaggcaatggctagctcttctgtgtcgtcatacatggagctgaaccgccccaacctggaggacttccttccgtccgacttgttcccgcaggaggctcccaggaatctccatctgcgcgatctgtttgacatttttcctgtgctaacctaagcattgtttgccatatactatgatttatttactcgctgttttaattctaattttt

SEQ ID NO: 34333 - DNA, 862 bp, Zea mays
  Clone ID: MRT4577_131316C.1
cgcgcatcagcggctccgacttccgagcgggttcgcgcctggaaacgaagctatacgtcgcgaggaggggagggcccaccgccccgcgtgggcgtcgcagcttccactcttcccccgtgaaacttttctcacgcgcacccattccacccaccacccaccttcctttcctctctctctgtctgactgtctccctccgtccctcgaagcttctctggtttcagacgcaaccccgcgggtcgcgggatcaaggagccagagagcgggacgcagcgagcgttccgccagagatcgagaccgtagctagggtttgaggcgccgggctgcggtggacgagatgtcgacgccggcgaggaagcggctgatgcgggacttcaggcgcctgcagcaggacccgcccgccgggatcagcggcgcgccgcacgacaacaacatcatgctctggaacgccgtcatattcgggccggatgatacgccgtgggacggtgtccctgctgtgtgatccaaacccaaactcccctgcaaactcagaagcagcaagactgttcagcgagaacaagcgggagtacaaccgcaaagtccgtgagatcgtggagcagagctggacagccgactagtgcataaggatgctcgtcgtgcccgataggggcccaataagaaagcgtgaaaaaaaaaacacacccactccttgtgtttctggttcgccaggcttgtcgaaacattgaagaaccccagtgattggtttgtagtctgtcgtcgtcgttctgcccccatcaagagccccggttgctcatggtggtggctgtcgtaatgtagcggttgttgacctatcttctcatgaattgaaaggatcctgcccatgtac

SEQ ID NO: 34334 - DNA, 711 bp, Zea mays
  unsure (1)..(711): unsure at all n locations
  Clone ID: MRT4577_131317C.1
ngatttccccccacccatcaccccttccttcctttccattctgtgtcgccttcgcccctccaaggttctctgattccagacgcaaccccgcggggtcaaggagccagaggggggtgcacagcgatcgttctgccggagatcgaaaccctcagctagggtttgaggcgccgcacgacaacaacatcatgctctggaacgccgtcatattcgggccggatgatacgccttgggacggaggcacgttcaagcttaccttgcagtttacagaagattacccaaacaagccaccaactgttcggtttgtctctaggatgtttcatccaaacatatatgctgatggaagcatctgcttggatatcctacagaaccagtggagtcctatatatgatgttgctgcaatcttgacttctattcagtccctgctgtgtgatccaaacccgaactcccctgcaaactcagaagccgcaagactgttcagcgagaacaagcgggagtacaaccgcaaagtccgcgagattgtggagcagagctggacagccgactagtgcaggaggaggatgctcatcgtgcccgaaagggcacaataaggaaccatgaaaaaccatccttggtgtttgtggttcgccagacctgtcgaaacattgaagaactctagttctaggtctgtcgttggtcatgggttttggtctgatccagagcaccggttgctca

SEQ ID NO: 34335 - DNA, 921 bp, Zea mays
  Clone ID: MRT4577_131318C.1
cgggccgggcccacgcgctgacacattccacccacccatcaccccttccttcctttccattctctgtcgccttcgcccctccaaggttctctgattccagacgcaaccctgcggctgcggggtcaaggagccagagggggtgcacagcgatcgttctgccggagatcgaaaccctcagctagggtctgaggcgccgggctgcggccgccgagatgtcgacgccggcgaggaagcggctgatgcgggacttcaggcgcctgcagcaggacccgcccgccgggatcagcggcgcgccgcacgacaacaacatcatgctctggaacgccgtcatattcgggccggatgatacgccttgggacggaggcacgttcaagcttaccttgcagtttacagaagattacccaaacaagccaccaactgttcggttcgtctctaggatgtttcatccaaacatatatgctgatggaagcatctgcttggatatcctacagaaccagtggagtcctatatatgatgttgctgcaatcttgacttctattcagtccctgctgtgtgatccaaacccgaactcccctgcaaactcagaagccgcaagactgttcagcgagaacaagcgggagtacaaccgcaaagtccgcgagattgtggagcagagctggacagccgactagtgcaggaggatgctcatcgtgcccgaaagggcacaataaggaaccatgaaaaaacatccttgtgtttgtggttcgccagacctgtcgaaacattgaagaactctagttttttggtctgatccagagcaccggttgctcatggtggtggctgtcgtaatgtagcggttgttgttgacatatatcttcttaaaatgatcctgcttgtgtacaaaaaaaaaaaaaaaaaaaaaaaaaaaaaaaaaaaaaaaaa

SEQ ID NO: 34336 - DNA, 1179 bp, Zea mays
  Clone ID: MRT4577_131319C.1
ccacgcgtccggcatcagcggctccgacttccgagcgggttcgcgcctggaaacgaagctatacgtcgcgaggaggggagggcccaccgccccgcgtgggcgtcgcagcttccactcttcccccgtgaaacttttctcacgcccacccattccacccaccacccaccttcctttcctctctctctgtctgactgtctccctccgtccctcgaagcttctctggtttcagacgcaaccccgcgggtcgcgggatcaaggagccagagagcgggacgcagcgagcgttccgccagagatcgagaccgtagctagggtttgaggcgccgggctgcggtggacgagatgtcgacgccggcgaggaagcggctgatgcgggacttcaggcgcctgcagcaggacccgcccgccgggatcagcggcgcgccgcacgacaacaacatcatgctctggaacgccgtcatattcgggccggatgatacgccttgggacggaggcacgttcaagcttaccttgcagtttacagaagattacccaaacaagccaccaactgttcggttcgtctctaggatgtttcatccaaacatatatgctgatggaagcatctgcttggatatcctacagaaccagtggagtcctatatatgatgttgctgcaatcttgacttctatccagtccctgctgtgtgatccaaacccgaactcccctgcaaactcagaagccgcaagactgttcagcgagaacaagcgggagtacaaccgcaaagtccgcgagattgtggagcagagctggacagccgactagtgcataaggatgctcatcgtgcccgaaaggggcacaataagaaagcgtgaaaaaaaacacacccactccttgtgtttgtggttcgccagacctgtcgaaacattgaagaactctagtgattggtttgtcgttgtcgtcgtcgttctgccccgatccagagcaccggttgctcatggtggtggctgtcgtaatgtagcggttgttgttgacatatatcttcttaaaatgatcctgcttgtgtacaaaaattatagcgtgggaatggttgttcgatggaccgatggaaccatgttcttgcattgaggtttcacaaagtctaaaaaaaaaaaaaaaaaaaaactcgagactagttctctctctctctctctctcctcgtgc

SEQ ID NO: 34337 - DNA, 230 bp, Zea mays
  Clone ID: MRT4577_13131C.1
cccactcgtcctcgaagcttgccttcttgtttacaccctaaaactaaaactagagtggtcggctgcaacaagcggtacgtacgtataggatgaagagcaggagcagcactctgttggtgatcctagttctccaggcccttctgctctcttcggctgtggccaaaggacctgcatggccgaaaaaacattgtcttgtcggcgagtgcaccatcttgtcaggcgtgtggacc

SEQ ID NO: 34338 - DNA, 952 bp, Zea mays
  Clone ID: MRT4577_131320C.1
cctgtgcggcgctcgaggcggccggtcggggacacattccacccacccatcacccctccaaggctctgtgattccagacgcaaccccgcggggtcaaggagccagaggggggtgcacagcgatcgttctgccggagatcgaaaccctcagctagggtttgaggcgccgggctgcggccgccgagatgtcgacgccggcgaggaagcgactgatgcgggacttcaggcgcctgcagcaggacccgcccgccgggatcagcggcgcgccgcacgacaacaacatcatgctctggaacgccgtcatattcgggccggatgatacgccttgggacggaggcacgttcaagcttaccttgcagtttacagaagattacccaaacaagccgccaactgttcggttcgtctctaggatgtttcatccaaacatatatgctgatggaagcatctgcttggatatcctacagaaccagtggagtcctatatatgatgttgctgcaatcttgacttctattcagtccctgctgtgtgatccaaacccaaactcccctgcaaactcagaagccgcgagactgttcagcgagaacaagcgggagtacaaccgcaaagtccgcgagattgtggagcagagctggacagccgactagtgcaggaggaggatgctcatcgtgcccgaaagggcacaataatgaaccatgaaaaaaaacatccttgtgtttgtggttcgccagacctgtcgaaacattgaagaactctagtcctagtctgttgttgtcatggttttggtctgatccagagcaccggttgctcatggtggtggctgtcgtaatgtagcggttgttgttgacatatacttctcaagatttaaaatgatcctgcttgtgtacaaaaactatagcgtggcaatggttgttcgatggaccgagcattgaggtttcccaaagtctatccccgct

SEQ ID NO: 34339 - DNA, 174 bp, Zea mays
  unsure (1)..(174): unsure at all n locations
  Clone ID: MRT4577_131321C.1
tnntnnnnngngggnnnnngcgatgagtacctcgagccggncgggnacgttccatctgctttctctgttcgattctcacgcagccgcagtgtgagagaggcacgcgccccgttgtcctcaaattgtacggaatccttccgtcgctgatatgctgatccctcgtgcacgccatgg

SEQ ID NO: 34340 - DNA, 284 bp, Zea mays
  Clone ID: MRT4577_131322C.1
ctcgatagaatgcatgattaagcttggccagcgggatcccggccccaccatgcaggcaatcaatcagcctaagttgctgccccgagagtgcaaaacattaacaaacgcatttttcccgggaacggaacggcaggcacacgggggtgttattagaaaatacagtgtgtgcaatgctgccagggccacacccttggtggggtgcttccccccgaattcatctgctggccggggggttttccaccgacaccacaagcagcgcgtcaggtgttgggggtgaaccggaa

SEQ ID NO: 34341 - DNA, 894 bp, Zea mays
  Clone ID: MRT4577_131323C.1
tttcacgcgtccgaaacttttctcacgcccacccattccacccaccacccaccttcctttcctctctctctgtctgactgtctccctccgtccctcgaagcttctctggtttcagacgcaaccccgcgggtcgcgggatcaaggagccagagagcgggacgcagcgagcgttccgccggagatcgagaccgtagctagggtttgaggcgccgggctgcggtggacgagatgtcgacgccggcgaggaagcggctgatgcgggacttcaggcgcctgcagcaggacccgcccgccgggatcagcggcgcgccgcacgacaacaacatcatgctctggaacgccgtcatattcgggccggatgatacgccgtgggacggtggcacgttcaagcttaccttgcagtttacagaagattacccaaacaagccaccaactgttcgatttgtctctaggatgtttcatccaaatatatatgctgatggaagcatctgtttggatatcctacagaaccagtggagtcctatatatgatgttgctgcaatcttgacttctattcagtccctgctgtgtgatccaaacccgaactcccctgcaaactcagaagccgcaagactgttcagcgagaacaagcgggagtacaaccgcaaagtccgcgggattgtggagcagagctggacagccgactagtgcaggaggatgctcatcgtgcccgaaagggcacaataaggaaccatgaaaaaacatccttgtgtttgtggttcgccagacctgtcgaaacattgaagaactctagttttttggtctgatccagagcaccgattactcatggtggtggctgtcgtaatgtagcggttgttgttgacatatatcttcttaaaatgatcctgcttgtgt

SEQ ID NO: 34342 - DNA, 973 bp, Zea mays
  Clone ID: MRT4577_131324C.1
gccgggctggggacacattccacccacccatcaccccttccttcctttccattctgtgtcgccttcgcccctccaaggttctctgattccagacgcaaccccgcggggtcaaggagccagaggggggtgcacagcgatcgttctgccggagatcgaaaccctcagctagggtttgaggcgccggggctgcggccgccgagatgtcgacgccggctaggaagcgtctgatgcgggacttcaggcgcctgcagcaggacccgcccgccggcatcagcggcgcgccgcacgacaacaacatcatgctctggaacgccgtcatattcgggccggatgatacgccttgggacggaggcacgttcaagcttaccttgcagtttacagaagattacccaaacaagccaccaactgttcggttcgtctctaggatgtttcatccaaacatatatgctgatggaagcatctgcttggatatcctacagaaccagtggagtcctatatatgatgttgctgcaatcttgacttctattcagtccctgctgtgtgatccaaacccgaactcccctgcaaactcagaagccgcaagactgttcagcgagaacaagcgggagtacaaccgcaaagtccgcgagattgtggagcagagctggacagccgactagtgcaggaggatgctcatcgtgcccgaaagggcacaataaggaaccatgaaaaaacatccttgtgtttgtggttcgccagacctgtcgaaacattgaagaactctagttcaagtctgtcgttgtcatggttttagtctgatccagagcaccggttgctcatggtggtggctgtcgtaatgtagcggctgttgttgacctatatcttctcaagatttaaaatgatcctgcttgtgcaaaaaaaaaaaaaaaaaaaaaaaaagaaaaaaaaaaaaaaaaaaaaaaaaaaaaaagtactctgcgttgttaccactgct

SEQ ID NO: 34343 - DNA, 950 bp, Zea mays
  Clone ID: MRT4577_131325C.1
gggaccctcgaggccggccgggccgggactttccattctgtgtcgccttcgcccctccaaggttctctgattccagacgcaaccccgcggggtcaaggagccagaggggggtgcacagcgatcgttctgccggagatcgaaaccctcagctagggtttgaggcgccggggctgcggccgccgagatgtcgacgccggctaggaagcgtctgatgcgggacttcaggcgcctgcagcaggacccgcccgccggcatcagcggcgcgccgcacgacaacaacatcatgctctggaacgccgtcatattcgggccggatgatacgccttgggacggaggcacgttcaagcttaccttgcagtttacagaagattacccaaacaagccaccaactgttcggtttgtctctaggatgtttcatccaaacatatatgctgatggaagcatctgcttggatatcctacagaaccagtggagtcctatatatgatgttgctgcaatcttgacttctattcagtccctgctgtgtgatccaaacccgaactcccctgcaaactcagaagccgcaagactgttcagcgagaacaagcgggagtacaaccgcaaagtccgcgagattgtggagcagagctggacagccgactagtgcaggaggaggatgctcatcgtgcccgaaagggcacaataaggaaccatgaaaaaccatccttgtgtttgtggttcgccagacctgtcgaaacattgaagaactctagttctagtctgtcgttgtcatggttttggtctgatccagagcaccggttgctcatggtggtggctgtcgtaatgtagcggttgttgttgacctatatcttctcaagatttaaaatgatcctgcttgtgtacaaaaactatagcgtgggaatggttgttcgatggaccgatggaaccaaaaaaaaaaaaaataaaaaata

SEQ ID NO: 34344 - DNA, 2222 bp, Zea mays
  Clone ID: MRT4577_131326C.1
attcgtcagcccccgaatcgcgatcccctccgcacctcggccccgccatggaggtgttctactacctcgtcttcggcggcctcgccgccgtcgtggcggcgctggagctcggcaagtccggcaaggaccgcgtcgccaccccgacggccttcaactccttcaagaacggctacgtcctcgtctactccctcatgatgtctggggactggctgcaggggccctacgtgtactacctctacagccagtacgggttcgacaagggcgacattggccgcctcttcatcgccggcttcggttcctccatgctcttcggcaccatcgtcggatccctcgcggataagcaggggcggaagagggcgtgtgtcacgtactgcatcacctacatcctcagctgcatcaccaagcactctccccagtacaaagttcttatgattgggcgtgtccttggtggcattgccacttcgctgctcttctcagcgtttgagtcgtggctcgtggcagagcacaacaagaaaggatttgatccacaatggttgtcgataacattctccaaggctatatttcttggcaatggtctagtggccattgttgctggcctatttgcaaattttcttgctgataacatgggttttggtcctgtggctccatttgatgccgctgcttgcttcctagcaataggaatggcaattatcttatcatcatggggtgagaactacggagattcgtctgacagcaaggacttgataacccagttcaagggtgcagctaaagccattgcttcagacgagaagattgcattgcttggagccatacagtcattgtttgagggatcaatgtatactttcgttttcctgtggactcctgctctgagcccaaaggatgaggaaattcctcacggcttcatatttgctaccttcatgctttcctcgatgctgggtagctcaattgcttctcgtttgttagctaggaagctgaaggttgaaggttatatgcaaatcgtgttttcagtatcagcctttactcttttcctccccgttgtcaccaatttcctagtacctccctccggggagaaaggcggcagcatttcgttaggaggctgcttacagcttcttggtttctgtacctttgagtcatgtgttggtatattttggccatcaatcatgaagatgagatctcaatatattcccgaggaggcaagaagcacaatcatgaatttcttccgtataccgctcaacctgtttgtttgcgtggtactatacaatgtgaatgcattcccaataactgtcatgttcggcatgtgctccattttccttctcatggcagcagtcttgcagaggcgcttaatggctgtctctgatcttcacagatcgacaaaggctgtaatgatgactgcggaagatgagcctctaaacccttagagatcatcataaaaaggaatcggaagttaaaatggccccaatcctcgacttattcccatggggttgctgaataagattgatatctaaaagttgtaacgactgtaacagaacacggtttttactgtgttataggattggtgctagtgcagtttccggttgtcatggtagagaacatgatgtggctcctgactattgtgccacacacggcagagtatagctcggcatagcctccccacgttttccccatgtttttcttctcgtgttttctgataggattgatatttgtattcaagtgaagtatcatatggaaacccgcatcgtccattttggatgcaaacgctgagtaaagtgagaaagggctcattagagaccgactaaaattataaaaaaaaaaaaaaaagaaaaaaaaaaaaaaaaaagcggcccgcttttcttccgtagatcgctcagcctgtttgtgtgcgcccgtctgtccaatggggtcgctctcccatgagccctcttgtccggcgggtcctcctttttcctccgcatcgccgcagccttgcgctggcgcttaatggctgtctctgatcttcacagatcgacaaaggctgtaatgatgactgcggaagatgagcctctaaacccttagagaacatcataaaagtgaatcggaagtttaaatggccccaatcctcgacttattcccatggggttgctgaataagattgatatctaaaaggtaagtctgttgatcacatcatgcaatctctctctctctctcgacgctaacattgcttatttatgttttatacagttcct

SEQ ID NO: 34345 - DNA, 290 bp, Zea mays
  Clone ID: MRT4577_131327C.1
gggtgtctgggttttttttctttttttttttttttttttttttttttttttttttggggaagaaaacattttccttggcaaaaggggaaaacccaccggtgttcccccctggggtttttgccccttaccacataagtggtctaatacgcaaagggctaattcctttcaaggataattaccctaaaaatttccccaattttcccctttacaaaaattggcccccatccactgtgttttgggtacgccccccccggtggttctatgtccccaattcatttgggctggtgggg

SEQ ID NO: 34346 - DNA, 691 bp, Zea mays
  Clone ID: MRT4577_131329C.1
gacttccaaacctgaatcttcttggctctcttcttacccggaatcaaaccgtcctcctacgaacagcttcagctacctctcgacacaacacaagactactcagcaataccagatccctcaacatgtcaaacgacaacgattacatggctttcctgaacaaggccaaccaagacaccggcgctgatgccgcgactcaggaaaaggctaccttcaagaccaaggaccagggcgctcaagtccccaaacctatcagtgacgtgtgcaagaacgccgtatacacatccgatgcagacgagcccttccaagaggtttctctcaagtgggagggcaaaaatggcctccccagcgagtccgagttcgccaaactcatcaaccactcctcccccgactcagcggacatcaagatccttgatcctctcaactgggactctcacggcagatacaccgacgtcatcgaggctgttcgagaagcctcgcagggtaatgatgttcgtgatatatcaagtgacgagagatgctacgaggaccgagtattgggtggtttcgcacgccgacggcaagctgattggtgccaaggcactctctgttgagagctgagcgcgcaccggtggacatgtaatggcattttgagcgtttgctacgagagatttataatcaacgtatgagtacgtggtaaaaaaaaaaaaaaaaa

SEQ ID NO: 34347 - DNA, 435 bp, Zea mays
  unsure (1)..(435): unsure at all n locations
  Clone ID: MRT4577_13132C.1
gtcgagatgcatgtcattcaatatattgattatttctaggaaacacatgccggtgtgagggcacctttttcgcttccatctcatttgtcatctaaaggatggcccctccaacggtgggttgctgccccggcaaggccgggttcatcaaagagaactggctgtgtggttgcttttgttgctgctgtgggatggccgtgccctttgggttcggcactgctagtggnttaagtctctgttgtcgttgttgttggtccgcagcagagttcgacacagtctgttggttgtttggaagctgctgttgcttgtcggcagctgggtttgcctctgcttgctgagtctgcgctggtcccttctgttgctgcttttgttgttgctggtttgtcggtgccttcccctcatcgagagggctttcttgaaagcattttgttgctgctg

SEQ ID NO: 34348 - DNA, 528 bp, Zea mays
  unsure (1)..(528): unsure at all n locations
  Clone ID: MRT4577_131330C.1
ggacgcctgcggttccggtccggaattcccgggtcgaccacgcgtccggttaggacgaaggggaaggaggagaagcgcttaaagcggcggggcacgggtgcaggactgggttggccccggggctgaggtaggctgccgtccttcccgcctcggtggatcatgcccaggacggcagcggtcgcgggggggaagtgactgggcggtgccggcgccggagacgatgccgtttccagttacaacgcagggatcacaacaaacgcagccaccacagaggcactatggcattacctctcctatcagcttagcggcccccaaggagactgactgcctactcacacagaagctcatcgagacgctgaagccctttggngtttttgaagaagaagaggaactgcancgcaggattttaattttgggaaaattaggtaacctgcggaaagagtggattcgagaaatcagtgcgagcacgaatctcccacagtctgtacttgaggctgttggagggaagagtcgtacatttggatctta

SEQ ID NO: 34349 - DNA, 505 bp, Zea mays
  Clone ID: MRT4577_131331C.1
ccggccggagtgatttcttagaggtgtcttggcttctcctccccctccggctcgggtctgcttcgtgaggatctccggggctctttctcatgtttgagcggatcaagatggagcagtcggatggtgagcaccgctgcttcgtcagtgcgctcgcctgtgacacggacgactcactccctccacaatgccttcagcacctacggcgaggtcctcgagtacaagatcatcctccatcggtagaggcacaggtgccgcggcttcggcttcatcaccgtctccacggaggaggcgatgcgcaacgccatcgagggcatgaacggcaaggagctggacgggcgcaacatcatccgtcaacgaggcccactcccgcgaacggccgtgaaggcgtcgacgtcgagtacagtgacgaccgtgacatctgcgactacggcgtgggggagagccgtgatgggactgcgactacggcggtggcgacaggctacggtgccggcgtcctgctacacca

SEQ ID NO: 34350 - DNA, 309 bp, Zea mays
  Clone ID: MRT4577_131332C.1
gagagacacatgtggagaagatgattatcccagggagggaatgctgggtgccgctgagccgatcaccggcccctggaaaaagtgaacgactagggagaagccgggcatgagaagcaggggatcttgcccgggctgtttctaagataatgacgctcacgccgacgtcaccgaggagagggggctcaatagtttgccaactcttcacaatgtgcaggtccagctgcgcaagtcgatacccaaggagggctctgtctagcccttgattggtcgctggatagattaagcccaacagcgttatggagaaaagga

SEQ ID NO: 34351 - DNA, 111 bp, Zea mays
  Clone ID: MRT4577_131333C.1
tctttggaagcgcgtcaggcctcaggggtggtgatgttagaatgggggctagtcagggcaagccaccacatggatcctatggtcactcttttctgaagcgttcatgaaaag

SEQ ID NO: 34352 - DNA, 395 bp, Zea mays
  Clone ID: MRT4577_131334C.1
aggacgcgtggacggacgcgtgggttattttcattctcatttctattattggttgtgacaacgttcgcaataactttcacggcgatggtcaatacatcaaacacagtagacgggttcagtttcgagttacatacagaatgtcttcatactagtgttctattaccgtaacagtcgagacgcactctcggatatccttctgtccatacgaccacgaagccatgtttctacacctacgactacgccgaaatcgccagcagctatgtacaggcacatgtgcaggagataatagtatgccaaagtccttgtcttctacgacgaggtcacagtttctgaactcgccgtaagccgcgagtgatcaaatcaagctcctgcagacgaggcgggtgccgatctct

SEQ ID NO: 34353 - DNA, 813 bp, Zea mays
  Clone ID: MRT4577_131335C.1
ggcttacccttagcatcggagagttttatctagaattacgagcacaatcacatggcatacctcaaatcatttcaataatactaaacttatacacccgctaaaacacttctcacataaactacaattcaaacctacacttcatttacaaaacaaatacgacatatctacttcttattaacacaataaccacatcacaggcgaggagacacttcaacatccacctaatctacccacaattatcacaattaaaatacaaacaaggggattcttccctgcacgctgaggggcagcacacaggcacgtcaaaagacccagagatcaatacctcgcacacctcctttcgtcgagcacatggtgagcgtcgcactggcctcgcttcttctccatccaaaaacctgggatctttctatcatccactgaaagctccatgggagaggtcggctggggcttgaggactgaaaccaaggagtgtgccgagtgccagggagcagcagccggcgtggctggggaaggagagcagggacaagcgccaggggaggggcgacggctagagcagaccgagctggagacgggacgaccaggaaggagaggatggcgagcgctggggagccagggagatggcgcgcgccggcagccagagctccatgccaggccggtggagcataaggcgaaggaggatggaggagcagggagtgcggcgtgagggagctgtgggagggaggtcggctggtgtttgacgcaaggagcagaccaggcggcggtggaatactcaggaaacaggagaagtcccggccggcctcgaggtacccaatg

SEQ ID NO: 34354 - DNA, 528 bp, Zea mays
  Clone ID: MRT4577_131336C.1
gcgttcgccccgtccccgcatctcgccgccgcgccccggtcagtgtgcgcttgagacatcgcccacacgagacatcgtgtgtgatgcccgcccccaacccttccccggtgtgatgcccgccgttgacgtctcttttttcgcccccatcctcctcaacctcggcgccgtccctgcccctgtcctcgatggcaaggaaacttcccccgggcataaatctcactgctcacgcgccattagcgccatacccgctacctcctctggcatgccacacgccgccatccccctagcccatcgtgtgtcacgcgcccagatctcctatttttacgcccccacgcaacataggccatcccaccatggagcaagaaaccctagcgtagccaccaaccactgctgccccacatggcatcctgactgtggctgcatacatctcggcgcctcgcccaccacgttgcaccaccaccgccgttccttctccccaccgcgctgtcgccctgagtaccaccgccaccgtcaccgtgcatgtcgcta

SEQ ID NO: 34355 - DNA, 235 bp, Zea mays
  Clone ID: MRT4577_131337C.1
gggaggccatgggcaaggccgacgtggtccagagcggcgcgggcggcggggagttcgccgccaagtactacacggacccgccgccggcgccgctggtggacgcggcggagctgggttcgtggtcgctgtaccgcgcggtgatcgcggagttcatcgcgacgctgctgttcctgggcgtggggggggcgtcggtgattgggttcacgcccttacggtcgcgtttgtttctggggcc

SEQ ID NO: 34356 - DNA, 318 bp, Zea mays
  Clone ID: MRT4577_131338C.1
cgacatatctacttcttattaacacaataaccacatcacaggcgaggagacacttcaacatcacctaatctacccacaattatcacaattaaaatacaaacaaggggattcttccctgcacgctgaggggcagcacacaggcacgtcaaaagacccagagatcaatacctcgcacacctccactactaagttgactcggataaaagcaaaaacagcgacgatctaatgtttagacctttcgtcgagcacatggtgagcgtcgcactggcctcgcttcttctccatccaaaaacctgggatctttctatcatcccccaa

SEQ ID NO: 34357 - DNA, 313 bp, Zea mays
  Clone ID: MRT4577_131339C.1
aaaccgtgtagattttttgggggataacgcgcttatcaaaactgcggctataacgggagaaaaaaagcttatacaccagttcattaatacatacataaagccctgctagaactactaaaactgacctaaacaaacagcaaatggaccattcgatcatggctgacacaatcatgatgattatgtaagtgagaggaagaataagaaccccatcggctatggacttttggctctgattaacccgattcctaacattattagccctgaatacactggcttattacaaggagaaataccatgatatacacctgctttt

SEQ ID NO: 34358 - DNA, 703 bp, Zea mays
  Clone ID: MRT4577_13133C.1
cattgggtacctcgaggccggccgggatccctctttctcctgaaaccctagctagagccgccggcgctgcacactcctccttttcatcccttcacaaccgccgccggcgccccatcgaacatgcctccgacgaaggcataaggccccgcccccgttttcgaagcccgcctagtgcggcactggcaagcttaagaagatgaagtggtgcacagcatagctaaaggagatggtgaactatctggtgctgttgcaaccaggctacctacgacagagctgctctctgacgtggccttgtacaagcatatcaccccctccatcctatcctagtgactcaggatcactggctccctgtctcggaccggctatctatgtacctgatggctgcgtgggctcatccggttgatctccgatcactcattccaacctagctacaccaatgcaactaatatctaaggatggtattcccttgtttgacctctctgtaggaggtcatattcttattacagatcgccatctctgtcaagagcttgctaatgctatgctagatgagtatctcactctgctgatacagttcagatagtttgacttagaatggtttgcctattataccttatctggcctcaatagcttgtgtctatggagatctgccatgatacgtatcatacgtgattatgtcactctatgctcactactgttatgctgc

SEQ ID NO: 34359 - DNA, 677 bp, Zea mays
  Clone ID: MRT4577_131340C.1
ccagattatagcagctagctcaccgtcaccgacatacagtacaatagcagcttattagcttgtgtcagtccatccatccatccatggagaaactcgtctacttcgcgaccattatatccttatccatggcggcgctgctagtgccactccgcgtacagtgcgaagaagcagctagagctgctgctgccagaagctgccatgccggcaccggagcttctgcttctgcaccagccgcagcagcagcgtggaaaaggagctgcggcggcggcaaggcggggaagcagcagccgcaggtggagggcatgttcgtgttcgggagctcgctggtggacaacggcaacaacaactttctcaacggctccggcgtgcgcgcagactacctcccctacggcgtggacttccccctcggcccctccggccgtttctccaacggccgcaacgtcatcgacgcgctcggcgagctcctcggcctccccgggcgcgtcccacccttcgccgacccgcgcacccggcgggcccgcgccgcgctgcgcggcgtcaacttcgcctccggcggctccggcatcctggagcacaccgggcaggtcaccggcaaggtggtgagcctgcggcagcagatcaccaactttgagtcggtgacccttcctgacctgcgggcccagctgcgtggaccagct

SEQ ID NO: 34360 - DNA, 366 bp, Zea mays
  Clone ID: MRT4577_131341C.1
ttgattttccactttccaactcaaacacgactccgacagtgtcttacaactcttcgcagtcttgaagagtatcggattttcgactgctgagcccattcatcacatctgcgccccgtagtgggtctttttatctgacttttgtctttcacaagcatcatgaagttcgcttttggtacctggtggcgctgaaaaaagacaacaaacgactgatcatattccataaacacaactcctgagccttttcatttctggtgccttacagacaaaatgtatctggccttgagtttcttaagttcggttctctcgtttatcgagacggggactccagcttcactcccgaaaacaacgccacggccgagcgcaccc

SEQ ID NO: 34361 - DNA, 387 bp, Zea mays
  unsure (1)..(387): unsure at all n locations
  Clone ID: MRT4577_131342C.1
ggtaccctcggagtctcggccgggntcgtcccttcgcgatcttgttgttgttgttgcttggctgttattaaagtttctacctttgggccccagattggttttgcttgtggtgcgcaagcgcatctatacacactcctcgcttttcgacgccatcgacgcgcaactccgtttgaggactcttgggaagccctccctgtgcaagaattcgactgcagattttaatcgtgattgacggcttgacgcgattcctggtttgagggcatctgttggtgtttcgagctaacaggctcctttctccctgctcgaagtttcacttacttcaacatgtggtttctatggatccagacttccaaagttggaatctgatcactcgcgtcagtgcttctc

SEQ ID NO: 34362 - DNA, 309 bp, Zea mays
  Clone ID: MRT4577_131343C.1
ctcatgtttcaccaaactcgatatttattcaacaacaggcaaggaaagcaggacactttttacttagtcggtggggcagacataagactatgcagcagcaaatgcatatgcagactacgccctctgtcgtcgagcaaattgtgccacaagcggccagaattacataccgttcacatccagaagtttttaacacgaaaataaccaacttatttaggccatcctggaaaatacacacttacggaagttggctaaatgttctcagcataaagtctaactgcaaaagaaccatcttaacctggttacctattt

SEQ ID NO: 34363 - DNA, 290 bp, Zea mays
  Clone ID: MRT4577_131344C.1
aaaaggaaaaattttttgattccacgttgccaggatgcacggggacatttgggtccaagatgggctgggcaaacacatggagaattttctttgggccaggtaaaaacagacggtctttgtttcaggtttggaaaagcttcattaaacttgtggcttttatccccaccccgccggccgtttaaatccacaggttaaaaacaggcgaactttttttttgggcacatgcttttttgcctctttgggaggccctaaactattctttttttaggccgtttcttgaaagcctacct

SEQ ID NO: 34364 - DNA, 255 bp, Zea mays
  unsure (1)..(255): unsure at all n locations
  Clone ID: MRT4577_131345C.1
gtacgtaagctcggaattcggctcgagcccttccaaccaccgcgcgatctgccgcaaatcctctccatgctttcccagcggaaaaggagagagacactagacacattatcctgctgctatactataccgccaccgcaacagcccacccgccgccgccgccggtgcaagttcgtatttggaacttgcatgcccgcgtcgtcgtcgacatatttttccaacatcctgagctgnttctccgtggaagaggatccatga

SEQ ID NO: 34365 - DNA, 106 bp, Zea mays
  Clone ID: MRT4577_131346C.1
tcgacggttgcttctcgccactggcttttcaaccaagcgcgatgtccaattgcgtgtatcaacgggtcctatcgtactaggttgaatttctatcgcgggtcggtta

SEQ ID NO: 34366 - DNA, 321 bp, Zea mays
  Clone ID: MRT4577_131347C.1
ggacggggcaaaacttttctattcaagttccacaaaaaaaaccgagccaaaaggcttcgaaaaacaaaaaaaaacttttctattcaaggttcagggaacaaaccctggaccccatcttaagcatccatagcaaatatcaaagggccccccccccatcaggggggatgggcccccaaagctgaccagggaaacatttctactaaagaggaccccccaaggcgaagaaaattggggacacatcagggccgcttttgggaaaaagccccaaaacccgggttcttttttctcttctggagaagccaaactttccccttttttttt

SEQ ID NO: 34367 - DNA, 374 bp, Zea mays
  unsure (1)..(374): unsure at all n locations
  Clone ID: MRT4577_131348C.1
tcggttcccaccccgcccgcacagccacggggcgggacagagcggacccgggcgccccacacggaaacgcgcgcgaacaaccnaaccgggcgagggcgaccaccggaaggcagcagccggcaaccgcgacaggngacaccagcgggagagcaccacgagcaaaaggccaaccccgcngcacgaagggcgagccgacacccacccccggggcgacaacaaacggcggaagncgccacagaacangccccnccagagcccagaccgcaganccggggggaaaaaggcgaaagcaacagccgaccaggcgcccaagacacgcggggccagcgggcacacgcggagggagcggcaggagcaacgaaaagcacaacaca

SEQ ID NO: 34368 - DNA, 876 bp, Zea mays
  Clone ID: MRT4577_131349C.1
acaccaaacaaaggcctttcattaattagctaagacaacatataaatcaaacacaattattacaagtaattagaggaaagacatcattccctatggttacgatgaagcaagacaccaacaacagggaatcggagatcacaccacacctgctaaccacaagtacctatgctaatcacaaaagagtgatcgaccacctaactatttaacccatcattcaagctgacaattatagatagcgaaggaattcacccaaaattaaattcaactcggaaagtataagcacaacgtcaagctacactttagcccatacgtcgagcacctaatgaacgacacctcgggatttcgctttcattcaaccaaacctccaaagatttctctgctcacatccggggttcgacggtgtcgcatatggggctgcacacaacacaaaactcctcatggtcgtttcgtcgagcacaagagagatagctcagccaccagagcaggggaacgacacagccatggatgggggagacgccatgggggagctcagccaggggcgcctgggaagggggctggacgagcaggagcttggaccagggccaaacaccggagagccgcggctgggagggatccgagctgggaccggcgctacagcagggaggagcaccgatcggacctgggccagagccgaccgcggctaggagagagacagagagcagcgcggggaggaccgacggccatggaggagaaggaacggagggagggcgccgtgagggaggcgagttgaggcagggatccgagctgggagctgggcgcgctggagcagcaggaagatgagcgcggccaggaagatgagcgtggctgcctgcagagaagaaagaccggacgcgtggg

SEQ ID NO: 34369 - DNA, 231 bp, Zea mays
  unsure (1)..(231): unsure at all n locations
  Clone ID: MRT4577_13134C.1
gtggtgggtgggttttttaaacgtcaagcctgggggccctttacttaaactgggtcacgtttgggtccctgtccgtntcntgttncatgttggtttttnttgctnnaatctnctcagggcactccttgagtttttctgccggtcgctgtggacggggtgacaggacttgtgctgcccttaaatcacttgcttcccgcccgttttgtggggctccccttgtgctcgggcttt

SEQ ID NO: 34370 - DNA, 269 bp, Zea mays
  unsure (1)..(269): unsure at all n locations
  Clone ID: MRT4577_131350C.1
gtagattttagatgatcccttcccccggcgcgcgtcagggctntggcggcgctgcttggcggccggctctctagaaggcccgtgcgtcggccgtggcggcgctggccgtcttcttgcgcgcgttgtcctggtagccgncgtagccgtcgccgtcggcgtcgtcgccgccgtttctgcggcggctgtcgtcttggctgctcccgccgtcgtggtcggcgtcccgggcggcgcgtcgctcctcggccgtggtgctgtcgtcgccgtccgcg

SEQ ID NO: 34371 - DNA, 292 bp, Zea mays
  Clone ID: MRT4577_131351C.1
tcggcaaggatatcttccctctcgcatccatgaagaacgagagcacctaccagcaagcgcgcgcgcacaccaaacgcaaccgcaactgccactgcaagagcacgccacagcagaaaccaacagttccacaccaagcaaaaaaaaaagggggaccctccccctctgccgatttccatccgacggagcgtcgcctgtgaccgaccaaaacatggacaagatcctggccttctccatcctgagctcttcgccggcgaacatcacaacagtcggactctcctcctcctcgaccgcc

SEQ ID NO: 34372 - DNA, 494 bp, Zea mays
  Clone ID: MRT4577_131352C.1
agagaatactgcgacctctgctccccctgcacaatcctcaagtgggagttctacatctgcacaacccagcagtgctgcttctgctcgttctactaatggtccctctctgatatctcgtcctgctggccttggatcatcctcttccctatcgcagcctcctgcccgttctgttcaacaggtccgtgccagcaggccagccgctgtggataagggaacccaggaggctactgagtctgccgaggatgatagagatgagaatgatgatatccatgaaaaacttcaaatgatccgggttaagtttcttcgcctcgctggcaggttggggcaaacatctcataacatggtcgtttcacaggttctgtaccggcttgggctggcagaacaacttagaagaactgctaatgggacgtttagcattgaccgtgcgagagagatggcagaacgtcttgaagctgctggaaatgagccccttgatttttcatgcaccattttgg

SEQ ID NO: 34373 - DNA, 559 bp, Zea mays
  Clone ID: MRT4577_131353C.1
gggtaccctccgaggcggccgggggcttcgtatcagacttgatacgtagtccacccacgttcctctccttccgtagcttgagcaggtctatgcgtgatgttgggagagagggtatcgcgcatcgcaggggaacatgcctcgtcgtcgaatgatcccgggaacccaagttccagccgtcgatgcatgcaccgtctgggttgaaccaatggggatgacgtgcctgtactcctactcgcattggcactgatgacaactgccatgggaaatcaggttggtacgcgcgcaccgtggggagctccactgcgccccgatggcaccaaggaccccacctcagaccacgccatgtggctacacacggttgccgcgatgacctggggtgtggccgtgggtatggtcgctggccgccgtggtcgccctggggtggaaccttgacgcgtgtagcaccagttgccgtgcgtgcggcacatgttgccggctatggcgctgtgaaaaatcaaatcggttgctggcggactgcacagggaagaaagaacacttggatcatggatatgtggatggg

SEQ ID NO: 34374 - DNA, 858 bp, Zea mays
  Clone ID: MRT4577_131354C.1
agttcgggaaaacccgtaattcgttatacgtcggtcgacgcgggccggggccggaacccttcgaaaacccttctcccgtcctgctcactcccgtctccgagcgccgccgccgccagcgccgatacgcgataaacaagaggaagaagaggccaaccgatccagcagcgatggcgggcgggggcatgctggggggcgctttctgggcgacgcgggcgctggaggtggtcaagcggaacgattccccgggcctattgtggaagcgcatcaagctcaccaccacccgcaagaacaacgccaagaagcgcctcaagcggctctggcagaatgaggcggttataagagcttgtggtgcatcagcgtctgacgcggcttccacagctgacaaacaacagtagcttggagcacaactggagcaggtcctgtgacctacctatgcttgataagctgaagccttgactttgctgtccccccccagtgttttgattttgctgtcctcggattgaatactttctccatccagaggacaacatcattgcttgttaccagggggcaaccttgcccccccccccccctcctctctcctgcttacatcagttcctagcacctttgcgccctcctgaattccatcgattttcgttgtttccacgttacttctggaaggagagggaaaaaaacattttgagcctgcttgcttttcctcttttctgcatcatgcctaggtcagtctgcacatgctcatattgctattgtcttctgcatgtaatgtaatgtaatggaatgcattgcaccggttgctgtcgttgacatcagctcgccaaaccaaaaaaaaaaaaaaaaaagcggccctatctttttcgg

SEQ ID NO: 34375 - DNA, 332 bp, Zea mays
  Clone ID: MRT4577_131355C.1
cggacgtatctaatcgcacctgcttgtatgggccgcaagttcttcgtcggtgaggagctgttttatgcggtggaaccacagatcatgtcgagaagattgtcaaaaccctgaatgaacgacacgtttccccttcagatgtcgtcgaggtcgttgtcagccatgcttatgtcttccttgctgtggtcaagaaccatctgcaccaatacttccatgttgctgctcacaactgctgggtgaagaatggaggcgcttttactggtcaagtcattgctgatatgctcgttatcctttggtgttccctgtgtcattattgtacactatgaaatgagagc

SEQ ID NO: 34376 - DNA, 292 bp, Zea mays
  Clone ID: MRT4577_131356C.1
ggccgggatctgcatccctctcccgtcttcgtcacagctgccgcagtctctacgtccgatccggcgggacatggactacgtgcgactaacactaaaaaggaacaatcaagggcctctccatggggctcgccaccagcaccgcttccgtcgcgctttgcgaacgcgcctcactctctggccgtggcgcagcgggcatggctctcgtgccggcgatccagctccgcgtcgccatccacatggagcaccaccaacgagaacctcatcttcaacaatcaccctgatttcatggtaa

SEQ ID NO: 34377 - DNA, 403 bp, Zea mays
  Clone ID: MRT4577_131357C.1
gcgcggaccacagggctgtgccgattgatactactatgacggtcatcacctttatggcacgtgttgaccgagtgcataacaggacaggactggcagcgacgtgcggtaagaacgctcgcttgatgcagttagcaacactagtgactcgcagtcggcgacacatggctgggtagaactgtactggttagatccagcgcagctacgatgatgtccagtctctgctgcctacacacatcgatgggtcatattcaagcgattggcaggcatgtgatctgctgctgattcacagcactgtcaggttccatcattgatacaaatggctcatgcgagcactgtgggctttacgacacgtcagcactggctgtcatcgtacctgtgagctgcggctagcgatggatcgcta

SEQ ID NO: 34378 - DNA, 263 bp, Zea mays
  Clone ID: MRT4577_131358C.1
gcaatctatcatagattccgagcagatgaggcagaacatatctactaatgcaaatgctattggcaattttctagaggtgatgttttcagaagctgaacaagttctaaatgatgttctgaaatctacttcggatctcaaggaactattagccttttctgcagaactacaaaacactggattgagaaggaatcttgcttctgttcaagcaatgtcaaagcaatcaaatgatttctttgaagatataaggatacatgtgtctcagc

SEQ ID NO: 34379 - DNA, 930 bp, Zea mays
  Clone ID: MRT4577_131359C.1
atggatcctggcacacatatgatggttcgcactctccaaactacctgcatcaacaccagctacgcccctcagccccggcagatcccggtctacccagtggtagtcaaggaagttccagcggatctccctcccatccgagtggagaatgtagtcaacctggaggacagctcggaggaacagctgccggcgcccaccccgttggcagagtccctggccttcgcagctgggtcatcgacgtcagcactagccttccaagcacctgcacccggaggcgacgaccccgacgactccggagacgacgatgacgaggatgacgacgacgaagaaggtggagacgaacacgtccacgaggaagctgactacgcccagcaggacaacttcatggggtttggtcctgttgtcgaacattatacatcaatgttcgagacggggcacttccccaacctgctacaagaagtgttgcacgcgctaggcacctacgtccgccccctgtacgaaacaaggcgaatgaacgagcctccccgggcttgctactatatcactcgcatccacgtcagggtgatggatgcaggggacaggggattcaggactctgtctgctcacgagtccctgaaaccactgtccacctacgctgcctcgtgtctgcgtggaggaagtcagaccagcatcgtcccaggagaagccggtgaggatcgcctcaacaccctagctggtgtagtggccggtctcaacaccgacctggacagtgccaccctggatctctacagggtgcacttggagctagagaatgcccatgctaggattgcagccctggaagctcaactgcaaggactggatccgcccgaagctcaggtccccaccatggcgttgtctcctccccgcaagaggctgcgctatggagagcccggatccatcactaggctgctttag

SEQ ID NO: 34380 - DNA, 438 bp, Zea mays
  unsure (1)..(438): unsure at all n locations
  Clone ID: MRT4577_13135C.1
ccgccgaccagaaccggcccgcggtgacccnggcccgggaaccnacttccagacccgacgtccgcggctccgtgggcggacgcgtgggcggacgcgtgggagcatcatcactaccgatagatatttatgcgtctatcgtctacccgccccgaaaaccctagttatatatatatatatatatatatatagacatatgctgattgtaacctaattagcctgcagccagttaagcagggactgcctactctgctaggaggacgtgtgtaatcatgtggcctgcgcaaacagtaatttgtgctggctgctgtgtattcatgctgctctgataatcgtgtcgtggtaataatatatcctatttattctaaaaaaaaaaatcggaagcgaaggcggaaacgtgggagaaaaaaaaaaaaaggcacattaaaaaagaaattaaaa

SEQ ID NO: 34381 - DNA, 1218 bp, Zea mays
  Clone ID: MRT4577_131360C.1
gagtttaaaatttttatatgtcttatggccatcattccataagaccattgcactcaaacaaagatccaaatcaaacatttcaatcaatcaccatcacatggttgatatttattaatataaaaatttaaagatagtttcatcgtctaacgcgaagcgtaacttattacatcatgatcaacactcctaaagcagcctagtgactgatccgggctctccatagcgcagcctcttgcggggaggagacaacgccacggtggggacctgagcttctggcggatccagtccttgcagttgggcttccagggctgcaatcctggcgtgggcattctccagctccaagtgcacactgtagaggtccagagtggcactgtccaggtcggtgttgagaccggccactacaccagctagggtgttgaggcgatcctcaccaggttcacctgggacaatgttggtctggctctctccacgcaggcgctgaggaagatgcctgaaccttgtgttctgcagctgctgccggtaggtgtggctgagcgaccacagggtccgacgggcagcatcgctgaccgaggcagcgtaggtggacagcggtatcagggactcgtgagcagacagagtcctgaatcccctgtcacctgcatccattaccctaacatggatgcgagtgatgtaatagcaagcccggggaggctcgctcactcgcctcgtctcgtacagggggcgggcgtaggctcctagctcgtgcagcactgcctgcagcaggttggggaagtgccctgtctcgaacattgatgtgtaatgttcgacaactggaccaatccccatgaagtggtcctgctgggcgtagtcagcttcctcgtggacgtgtccgtcttctccatcgtcgtcgtcgtcgtcgtcatcctcgtcgtcgccgtctccggagtcgtcggggtcgttgcctccaggtgcaggtgcttggaaggctggtgccggcgatgctgacgtcgatgacgcagctgcgaaggccagggactcggccaacggggtgggggtcggcagctgctcctccgagctgtcctccaggttgatgacgttctccacttggacgggagggagatccgctggagcttcctcgactaccatgggtaggccgggatctgccggggctgaggggcgtagctggtgttgacgcgagtggtttgaagagtgcgaaccatcttcctcaggtactctagagca

SEQ ID NO: 34382 - DNA, 210 bp, Zea mays
  Clone ID: MRT4577_131361C.1
agagattcttattggaaaacctcagaacaagcgggtgtgctttttccatatgggcaggcttcaaaacaaataggcaaagactggactcttacaccaatatataccgtccacataaagaggattaattcatctgaggacgctatatacaacagaccctacttattcatgtgctatgagattttataaactaactcaaataactgcttgtgc

SEQ ID NO: 34383 - DNA, 371 bp, Zea mays
  Clone ID: MRT4577_131362C.1
ttttctttcttaaggagactattccaattccagtatatctttctcttcttccaaggattggggggtatgctctagcggggtggacatagcttaactttaatatgggtggatttatgggggccatgatatccaaccttgcatttgggttccggaacatcttcttgaagaggggcatggaggggaaggccgtcattggcatgaattactacgcttgcctggcaattatgtccctgggcatactggctccattgggtatagctatggaagggcctcaaatgtgggctgctgggttgcaaaaggctcttgcagagacttggacccaattgtgtctggggggttgctgcacagagcgtggtctaccacttatatat

SEQ ID NO: 34384 - DNA, 680 bp, Zea mays
  Clone ID: MRT4577_131363C.1
aattctccgcaggaggatggcttcttctactcacaccatggcgcgtgccatgccgattccagtcaagggacggaatgtaaagcccagagttcggttaccgctcgcaaggttcacaaggctgaccgtgagagaatgcgacgagacaaattgaatgagcagttcctggaattgggaaccacacttgacccagatcggcccaggcatgataaggctactattcttggtgatacagttcagatgctcaaggattagacttctcaagtaaacaagcttaaagctgaatactcttctctctttgaagaagaatgtgagttgactaaagaaaaaaatgagcttcggagtgaaaaagcttcgctgaagtctgatgtggataatttgaacaaccactatcagcaacgtattcaaatgttatacctgtgcactacaatggagccttctgtactcgttgggccacctccatcatatcccttctcgctccaagttcctatacccgctggtgctgtaactatgcatccacagcttcagccatgcccgttcttccaaaatcaaacttcaggagccatctcgaatccatgtactccttacatggcatacagtcaatcctgtcaggctcctagtgatcaaccatctagccagttcagtactccagttctgctttcagtagtaatcgatctcactct

SEQ ID NO: 34385 - DNA, 975 bp, Zea mays
  Clone ID: MRT4577_131364C.1
tcgaggccggccgggactctgtctcttcctcagtcccggcatcagcgctcaaaccctaacacgccacgcgatcccgatgcgcaggggtctgggcagcgaggcatcgttgcgccggcggcgcgggccggcgcggctttgggtggcagtggcggcgctggtggtcggcaccgtgtgcctcttctcctcctcttcggtcggcctgttgggcgcctcttacagggtccaggatgttgatgtaaataagttgtggagaactgcagattcaaatggttggagagcatcttctgcaccacgcacctactggcctcccccaccaactgaatctgagagcaatggctacttgcgcgtccggtgcaatggtggcttgaaccaacaacgtagtgcaatatgtaatgctgttgttgctgcacggatcatgaatgctacactggtgctgccagaattagacacaaattcattctggcatgatgaaagtggctttgtaggtatttatgatgttccccacttcatcaagacactgaaatatgacgtccgaattgttatgagcattcctgaaatcactacaaatggaaagaccaagaagctcaaaggccagcagcttcggccaccaagagatgcaccggtatcttggtatgcaactgatgctttggagacgatgaagaagtatggagctatatatttaagtccattttcacaccgtttggcagaagatattgataatccagagctccagagattgagatgcagagtgaattaccatgcactacgattcaagccaaatatcatgaaaacaagcagtgagatagtgaacaagctccgctcagaaggccatttcatgtcaattcatcttcgatttgagttggatatgcttgcatttgcagggtgctttgacatattcaaacctcaagagcaaaaaattctgtggaagtacagggaagaacattttgcagaaaaggaacttatccccatgaaaat

SEQ ID NO: 34386 - DNA, 1953 bp, Zea mays
  unsure (1)..(1953): unsure at all n locations
  Clone ID: MRT4577_131365C.1
tgcgtgtcctcctcctctccccctcactgcggcgcatccacatccgccaatttcgccacctcctcctcctcctcctcctcgcccctgtgcctcgacatctcgcatccgctccatctatggaaggccaccacgcgccatggatcgccgctctctaccgccacctcaattgaagggtcaccggtctctacgtggatccgccacctcctcctcggccgccgtcaatggaaggtcccagatctcctctcccattacttctctccccattaccgcgctcgaggtctgccatttttggaggtccgccacctccgcctctgctcgccgtcaatggaaggtcctagatctcctctccctattaccgcgctcgagtcagtgggaggtccgccatttttggaaggtccgccacctcctcctcgacccgcggcaaaaatggcccaggagatcgcccacctcctcctcggcccgctgcaaacccacggaacaccacatattaccgagtctactcccatgcgctcgcccgcgcctgatccggaagcttcttatggatgatcaagttctgtaagcatcatctgtgctagagttgcgattcctgagcgtatggagcagcgcccactaagcattgacaaagctgccattacaataatactcattttagggacttcatttcttgcattacacaatccaattgcaagatgctatgacgttcttaagatcagttctcatattctataagcatttatctcgagtcagcaattaggaactgtgatggtttttaggtcaccgggaaggttgttgagaagatcttggactgggagagaagtgcacagaagcaagttaaaatcctgttgaagcccgctcatgtcatcctgcaacgtctattcaattttttcttggtccattctctgagactatggttcgccttgcgcatctgcaggcgctgcccatgagctacaacgccttcactgaattccagtgatgcaattcccgaggccatggagcagcagacaatatcaattgccaaagcagccattacaatagtactcattttagggacttcatttcttgcagctgccaatccaattacaggatgctatgacgctcttaagtgatcatgaacttatacattgaaataatggtgggcctcgagaggccaggaggtggagaggagttcaacaagtactacatcttgtctgctctcctatccgtggattgggtgcctgaaatatcctatagatgtctttagtagaggatccaaataatggcctgcaaggtttattgaatcggatcgcacaaaactccatctgcttcagaattgagctaagcgcatcctaacatcttgactcctatatcgatcaattatttttgttacacatttgattctttagtttcgtagagggaggaacatcgtgggatgcaggccccacggaacaccagatattttgaggtagaccgcggcgaggtgcccaagggcagcgcctagatcttcttctggatggtcaagttctgtaacgacaatgtggcagaggagatgccctgatcttcgtacgtcagtttgcctactaagcatccacaaaatctcattataagttctgagaaggccaagtcaattgttcagtatattacaaaagtcaggttggagaactcccttgttcaggcttttgtctttcttctgcagaaggagagatgacgtgctgcatgacatgatggcatgtgaggcagcaacctcttctccgcaacccttgtcatggcctggagttggtgttctaggaaggagcacaattttattagggtagccaccagagttgaggtcccttttcaatgggacaacttggtgctgtggacgacatctgctattgtagctaggccatacatgttttcctataaatgctaagctctggcaatcaccaaaggaaaaccacaaaattctcttggaagaaatttaacatcnatttaaca

SEQ ID NO: 34387 - DNA, 744 bp, Zea mays
  Clone ID: MRT4577_131366C.1
atgacgaagcagcagagttgcaggctaccccatgccccatcatacaagccacctcatcttcctatgtatgatgggcacttagacccggagcagttcctaatgagctacgaggcaaccatatcttcatatgggggcaacactgcagtcatggcgaaatcttttgtcatggcagtcaaaagtgtcatacaaacttggtactcttctcttcggccagggacaatcacatcatggcagaagttcaaggatatgctaatcactagcttccaatgctttcagacgaagccagtcactgctcaggcttgtttcagtgcacgcaagaccatgcggagtaccttcaggcaagggaggaagcttacaggttttccgagatggccaggggcttcagaggaagacttcaccccaggcacgtcaggtcaatccataatgccaatccaagtgatgatagaggaaatcaaccccaaaggcaacaacacagctcccagtcatcagggccacaacaaagctccttcaggccaccagccccaagaggcagagggggtagaagcttcgcatgaagatacaaagatcaacctagaagattatattgcttattctgcggcgaagacaaaggccacaccacaagaacatgccaagtcacaattcagaaacaaaaagagattgccgaagctgaggcaaggcagaattagccgaagcaggtcatacatactgcttctttctattctccctacatcccagagtacgtag

SEQ ID NO: 34388 - DNA, 346 bp, Zea mays
  unsure (1)..(346): unsure at all n locations
  Clone ID: MRT4577_131367C.1
ccggttcttcccggggtcgcccccccgcgctccgcgtcntgctcgcccctcctgcgggngctggcctttcctctgttcgtccccggtgccccggccnggtgtccctggccngggtcgccccggcggcgttccccgcgctgtcccgcctcctctccgcctgccccttccntggccctttcctgtcgttctccgcgctgcttgcccgcctccgcctcggcgccccgggccgctccttcgggggcgcctggggggtttgcncgcccccngcnctcttcttttttttttgggggggttttttttttttnncccccnccctttnncttttttccncttttttttttttttt

SEQ ID NO: 34389 - DNA, 1096 bp, Zea mays
  unsure (1)..(1096): unsure at all n locations
  Clone ID: MRT4577_131368C.1
cggagcctgggcggacgcttgggcagcagattatatcaattgccaaagcagccattacaatggtactcattttagggacttcatttcttgcagctgccaatccaattacaggatgctatgacgctcttaagtgatcatgaacttatacattgaaataatggtgggcctcgagaggccagaaggtggagaggagttcaacaagtactacatcctgtctgctctcctatccgtggattgcaggtgagtgcaaacaacttcctgctaaaagttagcaaggaatcggttgatacttattgatggtgcctgaaatatcctatagatgtctttagtagaggatccaaataatggcctgcaaggtttattgaatcggatcgcacaaaactccatctgcttcagaattgagctaagcgcatcctaacatcttgactcctatatcgatcaattatttttgttacacatttgattctttagtttcgtagagggaggaacatcgtgggatgcaggccccacggaacaccagatattttgaggtaaatatttatgggtcatttgtatttacttatgaggtttagatcaaatgatagatgatgttccgcatgattttggaattgcatttgtattgtataaacctgaatataaatgtcattcttaaatttgtgaagtagtatgaatgtctgatagcatcaaaaattggtgaagtagtctgatagcaacagaatctataattaattgaggtcttattactcacactagatcttgtcccccacagcccaatctgagccgaattgagctgatttggtcgaaaaatttgtggcgatcatttgtaggtagaccgcggcgaggtgcccaagggcagcgcctagatcttcttctggatggtcaagttctgtaacgacaatgtggcagaggagatgccctgatcttcgtacgtatgttacttactcccactctcaacatagcagtagtaagtgcttgtttctgatgaatgtatcaatcaatgctatgcgtcactgtgaaatgttcttctcaaacattgtcatttgatctgatgtataatgtaatgtggcatgtccctcatatcagangtctccctgct

SEQ ID NO: 34390 - DNA, 696 bp, Zea mays
  Clone ID: MRT4577_131369C.1
gccggccgggccgggttgtcagctctctcctatccgtggattgatcactctgtcgaccaatccaaggaaggcacctgaagcttagggaggacacctcacaagtcacggctacccgtgctgcatctgtgtgattttgtaatttgaatgagcaaatctatctggcgtcagtgcggggttggggtagtttcctagagggaggaacatcgtgggatgcaggtcccaaggaacaccagatattttgaggcagaccgtggcgaggtgcccaagggcagcgcctagatcttcttctggatggtcaagttctggaacgataatgtggcagaggagatgccctggtcttcgtgttatgcaatgacatgtctttccctaatgcaccgaagcttggatgggtccgttgaaggttgtgttgtttaggttgaaggatgtatgcatggaatagaagtcagataaaacttttgtgcaacaggctgaagtcattcttgttgatgggaaattaatagaggctaatgctgaccaacttgctaaggtttaaatgcaggatattacaaaagtcaggttggagaactcccttgtttaggcttttgtcttgcttctgcagaaggagagatgacgtgtttcatctctgcatgacatgatggcatgtgaggcagcagtctctgctccgcaacccttgtcatggcttggagttggtattct

SEQ ID NO: 34391 - DNA, 203 bp, Zea mays
  unsure (1)..(203): unsure at all n locations
  Clone ID: MRT4577_13136C.1
acctcgagggcggncgggnatttcgttacacaagagagggtgctgcatccacctctttcccgcgggtgtgctcgcgctccacacgcggctgcgcttaccgcggcgacgcggtgcgatggtcatcttagacccatcccgggagggacaactctcttgagtccccagactgcttttgcgccagggtttccggtgggaggagcgag

SEQ ID NO: 34392 - DNA, 535 bp, Zea mays
  Clone ID: MRT4577_131370C.1
cattgggtacctcgaggccggccgggatgcacttactgcacgcccgtacgtcggaggaacggtgtaagaggagggaagagcagcaacagtcacatccagcgagggagtacagtaaattgaatcaggtttcgtgacgattcggaggcttgcgcttctgcttgcggagatgcggaggagatctgaggcctgcggacaagatgtacctgcggaatccggcgagaaggcgaccagcttcgccatggtctgcagcctgctcagccggtacggcacgacagaacggcgccgccgctgccgatctcgtgcctcgctatcacaactgaatccgatgcaaaaaggacctcgacgctcatggaatgggccgagacggagatggagaccatgcatctcttcccccagatcgctggattcaggttcggaggtctccactaaggaagcccctgatgcgatggatccagacaacctgcagctgactatcttctatggaggtaaggaccttgtgtcccatgacttccctgctgagaagggcatagacctg

SEQ ID NO: 34393 - DNA, 355 bp, Zea mays
  Clone ID: MRT4577_131371C.1
ttggacaaattagcagcctagcatgacaaaggtaagttaccttgcaaaatacgaatgttatataagagctggtttaattttcattacatgttaaaatatttctagctttcaagtgagcaacaatctgtgtttattaagtggcaaggaacaattctgtccacattagttgttactccaaattgtatattacacgatttttgtacttctgtggctctcctgtgttgtaatatttttatacttccaagcaatgcacgtcttccctagaattgttaaattcaaggaagccatggaagtggattatgccctttgttatgatgtagtgcatgatattgaattcagatcctgttttagagca

SEQ ID NO: 34394 - DNA, 854 bp, Zea mays
  unsure (1)..(854): unsure at all n locations
  Clone ID: MRT4577_131372C.1
ctttagtttcgtagagggaggaacatcgtgggaatgtgggatgcaggccccacggaacaccatattttgaggtagaccgcggcgaggtgcccaagggcagcgcctagatattcttctggatggtcaagttctgtaacgacaatgtggcagaggagatgccctgatcttcgtacgctgaaggatgtatgcatggaatagaagtcagataaatcttttgtgcaacaggctgaagtcattcttgttgatgggaaattaacagaggctaaggctaaccagcttgctaaggtttaaatgcaggtcagtttgcctactaagcatccacaaaatctcattataagttctgagaaggccaagtcaattgttcagtatattacaaaagtcaggttggagaactcccttgttcaggcttttgtcttgcttctgcagaaggagagatgacgtgctgcatgacatgatggcatgtgaggcagcggcctcttctccgcaacccttgtcatggcctggagttggtgttctaggaaggggcacaattttattagggtagccaccagagttgaggtcccttttcaatggacgaacttggtgctgtggacgacatctgctattgtagataggcgcatacatgttttcctataaatgctagctctgcaatcaccaaaggaaaacacaagagtactcttggaggaaagtttagcattcagtttaacaaaccttaccaactcatgccttgtttgaatgcaataatgcatgttctgttgccctgttgttgcttggacacatgcttggcatggctattttctggttatgtcacaactcacatctcnccatgtaaatttatggctatgatatgcatc

SEQ ID NO: 34395 - DNA, 1250 bp, Zea mays
  Clone ID: MRT4577_131373C.1
acccacgcgtccggtgcaacctccgtggacgaagcattcgcctcgccttgatctccaaccccttccttccttgcttaggagagagagggaggagaggagaggaggaagaagatggagagggcggccccagtgaggagttcccacacctccacggccggcctactcgcgtggcctcaacccgatggcgccgcgtcgcaggcaccacgtcggcctaaccagccgacggaggaattcaggaaggtggtgttcggggggcaggtcaccgaggaggccgacggtctcaacaagacgaagatgaggacgacggcctccgcacccaagtcgaaggagacaacagggatcggcatgtttaaggccgagagcgccgccgccgccgtcacaactgcatcccgtgatcgccaggctagccagatcaccttttctcaggacgggaccattcctcccaggaagccaacttcagttgctggggtggcgaggcagcgcgaacttagccataccgttgagagttcgggggacggtaagatgaagcggcaggtgtccaatgcgaaatccaaggagctcagtggtcacaacatctttgctgatcatgaagatccgagtcccaacaggtcaagcagctctgctgctgctctggcacatgtgaaaaatgcaaatgtgagctccttctcctttggaaaggccgacatggacagcacagtgaaaacagcaaagaagaaagggtccagcaacaagtctactgatctgatgaatggcaaggccatctccgagagggattcagcgcctgcagggaaacagcctctgaaccgcgcgaagccgaaaggattgagtggtagtagcatttttgcagacgggaaggcctcgacaactggtgatcatgcaggccgtcggacccggcagccacctggcggcgacagcagcatcttgctgggctagcgtgcatatggatattgtcctatgccgccacacgggtggttggtccgtccgtgtgcggccatgttttcctgatcaggcgatgagtcccatctcagatgatctggttcacttctggcgtgtgtatgggtttgtgtctgtgttggttgtgacatgtccaatggaacaaccctatcgctactgcgtgtggtgccgttttgttgtgtagtagtacaacggatgacatgtggtaccgtttcgttgtgtgtacgtggatatacatatgtgtgtttggttattaaatactccctccgtttttaaaaaaaaaaaaaaagcgcggc

SEQ ID NO: 34396 - DNA, 385 bp, Zea mays
  Clone ID: MRT4577_131374C.1
agtgcatctgatgctggagctgaagttagcgtgtgtggctaatttctaggtttctgtgtttcaatggcctcttgaaaattgaaaatggcctcttgtaggttgaaggatgtatgcatggaatagaagtcagataacacttttgtgcaacaggctgaagtcattcttgttgatgggaaattaatagaggctaatgctgaccaacttgctaaggtttaaatgcaggtcagtttgcctactaagcatccacaaaatctcattataagttctgagaaggccaagtcaattgttcacgatattacacaagtcaggttggagaactcccttgtttaggcttttgtcttgcttctgcagaaggagagatgacgtggtatgacactaaattctt

SEQ ID NO: 34397 - DNA, 195 bp, Zea mays
  Clone ID: MRT4577_131375C.1
cgcacgcgtgcgctggtttagaaacacgttatcattttttaccttgtacattgtaccttcgatggattcctgcatacaattgaggaatgtttctttctagttcaaggccactgcttgactacatcaacatcttgttggttgaggatcattgactaactggtttgggtaatcctttttattcctaagattttaagt

SEQ ID NO: 34398 - DNA, 879 bp, Zea mays
  unsure (1)..(879): unsure at all n locations
  Clone ID: MRT4577_131376C.1
gcatcactgcgtgtcctcctcctctccccctcactgcggcgcatccactccggccaatttcgtcacctcctcctcctcctcctcgcccctgtgcctcgacatctcgcatccgctccatctatggaaggccaccacgcgccatggatcgccgctctctaccgccacctcaattgaaggttcaccgctctctacgtggatccgccacctcctcctcggccgccgtcaatggaaggtcccagatctcctctcccattacttctctccccattaccgcgctcgaggtctgccatttttggaggtccgccacctccgcctctgctcgccgtcaatggaaggtcctagatctcctctccctattaccgcgctcgagtcagtgggaggtccgccatttttggaaggtccgccacctcctcctcgacccgcggcaaaaatggcgtgggagatccgccacctcctcctcggcccgcggcaaaaatggtgtgggagatccgccacctcacctcctcccattctcacgcccgcgcctgatatggaaggtccgccgaagggactcggacgtcgaggccatggctgagccgcaccccttctccccctgcctcgcgcgtggcggctgagatggtgttggctgggttgttcgggatggtggtcctacctgccctccctgctatcctcgccccaaatcgacgagaatcatgcagcccaaatctgaggtggaggcgcctgcactgtcgatggaggtgtcgagtctgtggtggtgtatgtagatgggaaggcatggtgtggccaggtggtgtcgctgagcctgtcctcctacgggctcactggcacgctctncacggccatcggggacctcacgttcctgcgtatgctgaacctgag

SEQ ID NO: 34399 - DNA, 713 bp, Zea mays
  Clone ID: MRT4577_131377C.1
cctcgaggccggccggggtctattccatcctgatctctcctcccttcttctatgaagaagaaggacagcagcacggcatccgccccactcctggcttcgatacgatgcttactcaccacccggagatgaacaccgacggcttcttctccgtctcctcgccgtggcgctgctccgtagcctcgcgatccaaggtgtttggacgactagttatccaccccagaactacaactgagtgccgcgtcgagatcacgcgaaaatacactttggccgtgacatgatggaccttgcagaggatgtttctcgttatgatacgagtcgccaataggctcctccatagcccaattcttgtaagtttctgaagcctttaaagcagataatacgcgagctgaagatcaatcttggtgttggtgtctataatacataatagctgcaaacatacccgttcaatggagtcgaagaaagctgaatatgctgtatgatggagaaaggagaataacaaatagtatcttcccatatgaatgattagccgcgctgtatcaaagctacagcagagctattgcttgcagctgataaacctgttattaatgccaggactggttgctacactccagtctctctcgattactggagcactgcgactcgctgcagaattcatacaaagatactttcctgaatctatagtggtgatatctgcgcctacctggggaaaccac

SEQ ID NO: 34400 - DNA, 646 bp, Zea mays
  Clone ID: MRT4577_131378C.1
cccgaggccatggagcagcagacaatatcaattgccaaagcagccattacaatggtactcattttagggacttcatttcttgcagctgccaatccaattacaggatgctatgacgctcttaagtgatcatgaacttatacatgtgaaataatggtgggcctcgagaggccagaaggtggagaggagttcaacaagtactacatcctgtctgctctcctatccgtggattggtgagttagtttggatgtttgcactgggtattgttatccatcaaccccaaaccaattgcagttccctttattcatgtcatgtttaatttccctataaattctgtactgcatttcatatatatgtatcaaatatggacccctgaaactgaagcagacgttccttttgaattcgtgttgcttcttcatttcctttatcagtaagggcatgtccagatccattagcactaaaatttagcagctaaaattagtacgagtgggtctaaacagacctgctaattatttgttgaaggacgtgaagagctgctattagcttcattagcagatttggagttactaatatgtgataataattcatatgcatcttaaactcactatctaattacctattagcaggtgagtgcaaacaactttctgct

SEQ ID NO: 34401 - DNA, 1135 bp, Zea mays
  Clone ID: MRT4577_131379C.1
cgcccctgcgcccctcactgcgcatccgcatcactgcgtgtcctcctcctctctccccacgagcggcgcatccacatctgccaatttctccacctcctcctcctcgcccctgtgcctcgacatctcgcatccgctccatctatggaaggccaccacgcgccatggatcgccgctctctaccgccacctcaattgaaggttcaccgctctctacgcggatccgccacctcctcctcggccgccgtcaatagaaggtcccagatctcctctcccattacttctctccccattaccgcgctcgaggtctgccatttttggaggtccgccacttccgcctctgctcgccgtcaatggaaggtcctagatctcctctccctattaccgcgctcgagtcagtgggaggtccgccatttttggaaggtccgccacctcctcctcgacccgcggcaaaaatggcgtgggagatccgccacctcctcctcggcccgcggcaaaaatggtgtgggagatccgccacctcacctcctcccattctcacgcccgcgcctgatatggaaggtccgccgaagggactcggacgtcgaccgccttgcatcgacattgctagagttgcgattcctgaggccatggagcagcagacaatatctattgccaaagctgccattacaataatactcattttagggacttcatttcttgcagctgccaatccaattgcaagatgctatgacgctcttaagatcagttctcatattctataagcatttatctcgagtcagcaattaggaactgtgatggtttttaggtcaccgggaaggttgttgagaagatcttggactgggagagaagtgcacagaagcaagttaaaatcctgttgaagcccgctcatgtcatcctgcaacgtctattcaattttttcttattccattttgtgacgttatgactaagcatgccaactggcatccttagcccacttcttatcgagcttgggtgcataccacatgtatttaggttgccttgatttcatgttattttttttcatattttgcagttcattttccaatgctatcgagcagaattgtatcgtttcaaacatctgtcatcttgatgctaatgtaatcacgaagcatttggct

SEQ ID NO: 34402 - DNA, 257 bp, Zea mays
  Clone ID: MRT4577_13137C.1
gaccacgtgaacgaccaaaccatatcatgatcgacgttgtgaatcacgcttggagagacggaagttgctacatacattaatggggcgggtactacactagcatgaagtgctgacatgccttcattgccgaacatagtccgaatctcatagactttctcaagccattcaaccaacaaccttttcaaaggcagatgtatcgcactcctcaagtcaagatctcttcgaagcgagctacagtatgtcatcaacggtctagc

SEQ ID NO: 34403 - DNA, 575 bp, Zea mays
  Clone ID: MRT4577_131380C.1
ggctcgagtttttttttttttttttttttttcatctaagattctagctataattgcagaaagccaacctaaaatattatgcatagtatatttttataacaaccactgctacgtatacctatgtgacttgtgactaacaaagtgacaatatcaaatagaggacactaccacttgtttctgtgggggaactatatgttgcttcaaatataggccaggaagatagaacaataagattgaaagagaacacatcaatactaccactggtttctatggggggactatatgtcgaggcgatggcgctcatgccggggatgttgtgggccacgaaacgctccaccgggtgtacgtgtgcccgagcccaactgcatgcaccactccatagcccgaagaggcagtattcattactgccaaacatacttccttagtagttggaccctcaaggcacaggccaagacctgcggccctcgcgagtaccgctgcgactgcggcacgctcttcaccatgtgcttgattacttgcttgttgctgaaagaatggtcataaagatatataaatctgattgttggtatccctaag

SEQ ID NO: 34404 - DNA, 318 bp, Zea mays
  Clone ID: MRT4577_131381C.1
tctaacacagaaaaaaaaaaaaaaaaaaaaaaaaaaaaaaaaaaaaaaaaaaaaaaaaaaaaaaaaaaaaaaaaaaaaaaaaaaaaaaaaaaatggcagttgtaagtttactgttgttttttaagtcgggttcagtcatccagggggtttagtttggggaacccccataaaaagggggaggggggaatcccatcccagggtcataattagggatgccttttttttgtaggcaaatgtttgatgtccaagggccggccggcagtttaaatgttacacctggcttttttgggggaaaaaaaaaaaaaaggggcggccgtt

SEQ ID NO: 34405 - DNA, 2386 bp, Zea mays
  Clone ID: MRT4577_131382C.1
cttcgtccgtcagtttgcctactaagatcgggcatctcctctgcccattgtcgttgcagaacttgaccatccagaagaggagatgccctgatcttcggacgtcactttgcctactaagcatgcacaaaatctcattatacgttctgagaaggccaagtcaattgttcaggatattacaaaagtcaggtcggagaactccctggggcaggcttttgtctttcttctggcgaaggagagatgacgtgctgtatgacctgatggcatgtgaggcagcaacctcttctccgcaacccttgccatggcctggagtgggtgttctcggaaggagcacaattttattctggtagccaccacagtcgaggtcccttttcactggacgaacttggtgctgtggacgacatctgctattgcagctaggcgcatacatcgtttgctagtaatgctcgggccccccgcgccaccgatcatttgtaggtagaccgcggcgaggtgcccaaggcagcgcctagatcttcttctggatggtcaagttctgtaacgacaatgtggcagaggagatgccctgatcttcgtacgtatgttacttactcccactctcaacatagcagtagtaagtgcttgtttctgatgaatgtatcaatcaatgctatgcgtcactgtgaaatgttcttctcaaacattgtcatttgatctgatgtataatataatgtggcatgtcctccatatcagagttctccctgcttatttttgatagttttgtgtcccagttataggtgttatgcaatgacctgtctttccctaatgcaccaaagcttggatgggtccgttgaaggttgtgtggtttatgtatgcttgtttgctccaaatataggtgttatgcatgaataaagttcccgtgggatctgaagctttgttggcttaaaatggttttttttgtatttttcacatgagataatttatgacgagctgagcaattgtcgattatcttagtgcaattgatgttggagcagaagttagtgtctgtttctattttctaggtttctgtgtttcaatggcctcttgaaaattgaaaatggcctcttgtaggctgaaggatgtatgcatggaatagaagtcagataaatcttttgtgcaacaggctgaagtcattcttgttgatgggaaattaacagaggctaaggctaaccagcttgctaaggtttaaatgcaggtcagtttgcctactaagcatccacaaaatctcattataagttctgagaaggccaagtcaattgttcagtatattacaaaagtcaggttggagaactcccttgttcaggcttttgtctttcttctgcagaaggagagatgacgtgctgcatgacatgatggcatgtgaggcagcaacctcttctccgcaacccttgtcatggcctggagttggtgttctaggaaggagcacaattttattagggtagccaccagagttgaggtcccttttcaatggacgaaactggtgctgtggacgacatctgctattgtagctaggcgcatacatgttttcctataaatgctagctctgcaatcaccaaaggaaaacacaagagtactcttggaggaaaagtttagcattcagtttaacaaaccttaccaactcatgccttgtttgaatgcaataatgcatgttatgttgccctgttgttgcttagcttaagttagcgtccaatgccaatttctaggctaatgcaccgcagcttggatgggtccgttgaaggttgtgttgtttaggttgaaggatgtatgcatggaatagaagtcagataacacttttgtgcaacaggctgaagtcattcttgttgatgggaaattaatagaggctaatgctgaccaacttgctaaggtttaaatgcaggatattacaaaagtcaggttggagaactcccttgtttaggcttttgtcttgcttctgcagaaggagagatgacgtgtttcatctctgcatgacatgatggcatgtgaggcagcagtttctgctccgcaacccttgtcatggcttggagttggtattctaggaaggggcacaattttattagggtagccaccagagttgaggtcccttttcaatggacgaacttggtgttgtggacgacatctgctattgtagctaggcgcatacatgttttcctataaatgctagctctgcaatcaccaaaggaaaacacaagagtactcttggaggaaagtttagcattcaatttaaaaaaccttaccaactcatgccttatttgaatgcaataatgcatgttctgttgccatgctgttgcttggacacatgcttggcatggctattttctggttatgtcacaactcatatctcccatgtaaatttatggctatgatatgcatc

SEQ ID NO: 34406 - DNA, 419 bp, Zea mays
  unsure (1)..(419): unsure at all n locations
  Clone ID: MRT4577_131383C.1
tcctcccagcggccgccctaatntttttattttggatataagaccttaaaccatctttacacaaaatccaccactattgtacagggggagtttataatagggcgcgaactccaacacaatcagtctacaactctgctctatgtcaatttcaacttaaaaacaaaagacacacatgcatctcgcagcatcaatcaatccacgtacgtacaccctttccgatccgaaagacaatgaagttgcatagcatatccgttgagcttatttgccggtgacgaagttggttgcataagcccatgcgttgttgttgactgggtcagcaatgtggtcatcgaggttctcgagcgggcccttgccggtgactatggcctggactaagaagcctaacatggaaaacatggctaggctgccgtacttgcctc

SEQ ID NO: 34407 - DNA, 581 bp, Zea mays
  Clone ID: MRT4577_131384C.1
ctctgttgcctgtgctccatccctgcacagctgcgctccattccgcgcgagccgagagcggaacgggttgagcagcttctccgagactctagacacgccacgccaccgcaccgtccgcggcgagagtcaatcattcattccttccgtgcggcgagaatgtccatctcgatgcgcctcgcgatcccggctcccgccgccgcgccgccgcggctgagggtgcgagcggcggcggcggcggcggcaggggacgggggctgtctccccgtcgcgcgcgccgccgtgcggacggagacggccgcgctcaggggatgtgcgtcgctgccactgaagccgctgggcgccggccagccgtgccggcacaggggggccgccgccgtgtgtcactcgtcggcgtacctcagcgcgcagaccatgcagtggatctccgccggagccagcgcagtgctattacttgctaaaggcactgccatccacaaatctttccttgtgccattttttgctcttcaagcaccttgcagcataatctcatggatcaagggtgactatggccagtggactgcttttcttgctctgttggtgcg

SEQ ID NO: 34408 - DNA, 885 bp, Zea mays
  Clone ID: MRT4577_131385C.1
ataaacatgaacttgtccgtcctttatgacaagacaaattgcttatttgattacatcaatgctctaatccaatatttgatacaaatatcaacattgttctcctgctttaaatagaaaagacatcaatgctctaatccacagtactcagcacataaaagttccaggttgaaaccaactgtatcattgttctgaatgatatactatactaattaataagcataacaaaagatatcgctttctctcttcctacgtactcagaaacatacaagcaaagatctggaatcactgcctttaaagctactgcgagtgtagagaaacaagcccttatttcgccatcgcatgttaatgtccttctcgtggatgcacatctgctacacagggagcgctgccactatccgatgcattagtggatgcctgtacaataatttggataaaagagctttcgtgcaatttaaatcgatggaacaaaggttagagcactttggtccgtgctgtatacagtatatacgcaagaattatatttaaaatcaaacaattgcattagtttttcgtaccgtgattacgttcaaaagatcaatttacaaaaaaaaacaaggtatgaaatgtgttgcgttaggttcaaaagatctcctgcaaaacatttaaaagttagcaaagcatgacatttgatgagataacacgtggtaatacttcaaaattaaattttttccattactaagaatgataaaaaattctgtatagtttataatgctaggctcttcagatagaacgccttatttactttctattaactcttaggtttttacatatataacaaattgaaatatcttgttcccaggttaccaacaaattcagcaacacaaagatccaagccggccggcctga

SEQ ID NO: 34409 - DNA, 807 bp, Zea mays
  unsure (1)..(807): unsure at all n locations
  Clone ID: MRT4577_131386C.1
attgggaccctcgaggccggccggggaaccacacaacatgcacgccttcattcccatcgtcgccctcctgggccttgctgccgcccagagcgactccgcctccagcaccagctctgcaccagctcccggctcgactgcagcctgtctcgccgactgcgccgtcggcgacgtcaactgccaggccgtctgcgtcaacgtcccagccccgaacgcgtcccagatcgacgcgaccaaccagtgctcgaggaatgagtgcacccagggcgactctggccccgaggacaccaagaagtacggcgagtgccttgcgtcttgcgcccaggacttctactacactagcggcaccactcccactggcgttgcgactgccggtgcttctgctaccgattcgtcgaccccggctgataccactgctggaagcaccactggtactggaagcgcggcggagtctactgagtcttcatcgcagagcggctcctcgcgcgcgagcagcgcggcttccgctgcgtctagcgctggtgcatctgctgcctcatccgcatcctccagcgccaacgcccaggccactggcgcggctgctgctctttctctcagcaccgagatgctcactctctccggtgggtgccgtcggtctgctcgtcgccgcccttgccttgtaaactgggaatgttagtgtgatggattgaggcgatacccgcgacggctgcacgttaatttcgnnaatttattctttcttctcggngcnntcgatggcnntgtctgacgggaagatgctccttgtgatcaggaaaaagtacgatagtaatg

SEQ ID NO: 34410 - DNA, 429 bp, Zea mays
  Clone ID: MRT4577_131387C.1
cggactcgtgggctgcgatctcttctgtgcagtataaataatgcagcatgaggactgaagatctgcattgattggtgtaagaaaaagaagttttctagagattcacatagttgactagccgatgagaggcggagattgttggcgagatgtacaagcagaaatatcatcagcaaacaaaaggtactacagtaggtaaattacctactgtagtaccaggtaaaggacaagagacgattccctggtaagagatccacttgtcccgttccacccttactttccctctctctgctgctcgcaaatatccatctttgaaaccatatatcatcctgcaacatgaatccatccttgagtcctaaaccggtgttcctatcatttgctactgcaaagggcttctctttgcatgcttcagtcacatgaatgatgagctcg

SEQ ID NO: 34411 - DNA, 472 bp, Zea mays
  Clone ID: MRT4577_131388C.1
catgtcgtgctaggtcatgggtggtgtgcctatgtacccaccaccgtcatgacgaccacttttactgcttgcctggcccatcgtagttctggtctggcaggtatagatgcctctgcgcgcccttgcctgtgagcaccaccatgcgaatcacaccgcccgagctgccgtcccacttgatggcttctgagagcgcgcccttgacaaacttgatgccttcctcctcgctcatgttctccctccagtttgcgtcgcagtatccatagatgtacgttgagcctgagccgccaattgcgtatgactgcttgtgcagggagcctccgaggggaatcgagtatacctgtccgccgtggcggtggtcccatccggcaataatgagtccagctgagagttggtccttgttggagtagcagagctcttggaagatggctgctgcagtctgtgtggtcggtggctcgtcgttggtggtaccgta

SEQ ID NO: 34412 - DNA, 675 bp, Zea mays
  unsure (1)..(675): unsure at all n locations
  Clone ID: MRT4577_131389C.1
aattcggcacgagggacgcagcacgctctccgccccaaattcgcctgcaaccccgagcgacgaggatgggggaggggtccaaggcgatgctggccaagcccatccagctcgcggaccaggtagcgcagcaggcggggtggcagtgcctcagggcggactgcacggagctacggtcccgcgccatgaagctcgccgagctcctgcggcaggcggcgcgggtcgagctgtacgagcgtcccgccgcgcgcgtcatggccgacacggagcgggcgctccacaaggccgcgggcatggccgcgcgctgcttccagagccactcccgcctccgccgcttcttcacgctcaacccggtgtccgggctcccgcgcaccctcgccctgctcgacaccgcgctcgaggacatcgcctggctcatccgcgtctcgtccccgcaggacgacgacggcgacggcgacggcgacctgcgggggctccccaacatcgcgcagaacgagcccgtgctcggcatggtctgggacaacatcgcgcgcctccacaccggcggcctcgccgcgcgggccgacgcggncgncaccctcgcctccctcgcccggngcaactcctacttcgccaagtacatcgtcgaggaagacggcgtcgcgcccctcgtcaagctgctcaaggaagcaccgacac

SEQ ID NO: 34413 - DNA, 653 bp, Zea mays
  Clone ID: MRT4577_13138C.1
attgggacctcgaggcggcgggaacttttctgtgggtggagatgaccgagcatccggaactgtttggtggcgtaccaaggagcgctgaacagagcatctaggtgacctatgtgttgatctcattacggattgcaagaaagacagaagaaggcgatgctagacccgacagatccacaacgttcttaccaaccctatcatgcaacgggatctaatagatgtccaggatacctctctgcgaagccaggagcacgctgaagaaccccgcagctatgctcacgattccaacgttcggaagagctgtgatagctcacatgacatgatcgagcgaggcgatgattggatttgcctcgttcacgtgccccctgatgcatacatatgttctagcaacctgcagcggaaatttaatgactctgctcctttgccaaccatataccctcggatggctgcgctattgctcggtacccgcttgatttgagtgcttgaggacttgtgtaacgccaacctccctccagctgaactgggcgacgggctcctccagcctgactgtgaaaaactgttcctttgcggaccagacctggtacttctccatgcgacagttttgcaagctcccggagattacattatatgtgtccccgccgctcgcaatgcatctg

SEQ ID NO: 34414 - DNA, 254 bp, Zea mays
  Clone ID: MRT4577_131390C.1
gtggtcaacagtactgatgaggcatctggttacaaaagcctgcgatgcctgggctatgtaccaatatatttaagtgttacttgggccaaacccttggcccgcaaccgaaattgtttactaacacgtaccttccttatcaaggcacatcactgcatggaatgggtttccaaaagtagtatctgctacaagaatttgatgggtttgggcatctcggatattatacaatgtgcctctatacttgatatcccaactat

SEQ ID NO: 34415 - DNA, 116 bp, Zea mays
  Clone ID: MRT4577_131391C.1
atttggaaaatgttcggccagagaaagtgcttagacggggcagaagtatagcttgaatgcgcacccgcatttgggaacttgtgcacacatgaaaatcgtgctgttttttttgcaca

SEQ ID NO: 34416 - DNA, 719 bp, Zea mays
  unsure (1)..(719): unsure at all n locations
  Clone ID: MRT4577_131392C.1
tccggaattcccgggtcgacccacgcgtccgctaaagggatatacatggcaaattctctttggtggatctggcagggaatgaacgaggggccgacacatctagtgctgaccggcagactcgcatggagggagcagaaataacaagtctctcctggctctgaaggagtgcatccgggcgctgggacagaacaaggctcacaccccgttccgtgagagcaagctgacccaggtgctgagggactcgttcattggggagaactcgaggacctgcatgatcgccatgatctcaccaggcataagctcctgtgaatacaccttaaacacgctgagatacgcagacagagtcaaggagctaagcccccacagcggacccagtggagagcagccggttcagatggaaacagaagtgatggaagccagctctaatgggacgtctctgactggcaatgaagaggaggggctgtcttcccagatgtccagctttaatgaagccatgactcagatcagggagctggaagagagggccctggaagagctcagagagatcatacagcaaggaccaaactggcttgagctctccgagatgacagatcagccagactatgacttggagacctttgtgaacaaagcagaatctgccctgacacagcaggctaagcaggcgaagcacttctcagcccttcgagaagtcatcaaggccctgcgcctnagccatgcac

SEQ ID NO: 34417 - DNA, 432 bp, Zea mays
  Clone ID: MRT4577_131393C.1
aaaacagccccacaaataaggggcggggggcaaaaacggggggacaaaattttttcgaacaacgggggggaaaagggcccccccggaaagccaaattacatattgggccttttttcgaaaagggaagggaaaacaggcccaatttttgaaacaaggaatcccacccccccatggttacagggcccaaaaacgggggaaagcgaaagggtttggttgaaaaacccccctaaaaaacaaggaaacctttaccccaaattggaaaaattttaaaatgggaagggggtctaacttttttggaaacaagggttttaaaaatgaaaaacatctatgacccatgacttaaaatttaaaccggggggggtaaatagggggcaagcctttttacaaacacaaaaaccgggttggtatagctggggagaaccgactttaaaa

SEQ ID NO: 34418 - DNA, 534 bp, Zea mays
  Clone ID: MRT4577_131394C.1
ttcttaaaaaaacggttaaaaaaaaactgaccaccctacatctcttcgccgccatcgtgaggccaggccacacgcaacgcaagtgacgaccgcgcgcgtcccctgcatgcatggctcagctctcactactcccggccctgtgctgataaccgtctctctttattacgtgtttacgcattttacaagatcaccttggacgaacgaacttatctcgacctgatcatatgccgggggcaatgcaagttcatttcctatgggtcacgacaactagaccagataacgcctataactccttattggctaataaggctgtatatgatcggcacaccataagtgaatatagcagtgcaaaaaatttttttatactatatgtataaattatattggttatagagtagagtttaaaataagaaatgagatgcaacgtaactgaccttcccattcatgtactgtatatagagcgaaggccgcctacctaaagtacgtacctgctgggatgtacacaccaacttgctgtgctgtgcaatctctcac

SEQ ID NO: 34419 - DNA, 295 bp, Zea mays
  Clone ID: MRT4577_131395C.1
agtttctttgacgggaccggcagtcgaatatatccccacagcagtttgtgcacgattcgaacggaacagagactctccgacctttgctgccgattttgccgagaaaatttcgcttggagaaaatctagctcaatgtgtgcgcagcactcatatgtgcacaacaccttacacttatggatcggaggagaaacgcgagtccggtgtacgcccggcagtggaacggcggatccagcaacaccggttcctcgtcgccggcgatggcgccggctcatgctcagagacgcctgggacctac

SEQ ID NO: 34420 - DNA, 766 bp, Zea mays
  Clone ID: MRT4577_131396C.1
ggcccgctcgaaaggccggcccgttcccgcggaaatgacacaccatctggcgatcagttacttaatgctagtaaagacttgcatggccttcatagtcaaatagatgcttcaactagtctacagtcagaccagaatgcaactgctgtgctgtatggtgtagacaacgagacaagcgcaacaataaagaccgagtcttgctactcgagtaatgctgattttgccttctgtgggaacactttcctggaatcatgccagtcgataggtgatgcatctggtggtggatccttcagcagctcagagttgaatgggcaaccactaaacgattcaattttggatatggagtcatcatcatttagcttcttgaaccaaatgccccaaagcttcatgttttcagacctggcagatgatttcaaccaaaatgcaggttgagcgggtcatgcacagcgtaccaaccatttgtacataggcacatgggcagtcgaatctgcattggtgaagaacttgaggaccttttgatctagcttgtttatttctctagtttttgcgtcttgatattgtggtagtttggggcttcgggtctggtgggttgtctagcccatcagaacgcgtaatgggtattggtcttccagtatgttttcagcgttaatttggctaatttcccccgcttggcttgtacaacaaattttatcagtactgactaccatgagttgtactgctgttatgctgcttcaaaaaaaagctatgctctatatgctgctttccactc

SEQ ID NO: 34421 - DNA, 696 bp, Zea mays
  Clone ID: MRT4577_131397C.1
cgggaacacctatcacctcccctcctctcctctaggacgcctccggtgcttgccgccccgatggccagcttgccctgtcccggtctgctaggtctccccgttacgcactgctccttggccttgcgtgctccggctttcgctcacgagacatcgaaaggatctactgaagctgcctagggtccgtgtgattaaactgctgcgccacctgacaaaatgcccgacttcccctgtgtcgtgcgcttggcttcctattcctcaccttcaactcacgcctggtttcctatcggccctgactcgactaccgtactgcgatcactttccccacgccatattatcccgacctgcagggcctgtccatctgctctggcgactacatccagttgcatcacctgaactctcaaaagcgcgcgagcatccaccttgacgcttcaacgctctctaccctccttactatcatgtgcattgacggggatgatagagatcatacacctcgtggcactattgacttgctagtctgttgcgatgaacagccgctaccatcctagagagagacctctacgctctcctcatacacggtgacaagcctggcatgccgcctatgcacccacagaccgacgccgccattgatgcagcctccaactaggtctgcttgccaccacagagcgcatacggccaacacttggttcggcaccgagc

SEQ ID NO: 34422 - DNA, 2106 bp, Zea mays
  unsure (1)..(2106): unsure at all n locations
  Clone ID: MRT4577_131398C.1
ctcgtcacttcgctaccagctcgagtccatccacgcggatctgattgctccggttcgttcctttgcgatcttgctctgctctgctctgctcccgagctctgctgattgctggtacttcttgtgtaagaaccccgctttggaaagaaccatgctgtatgtccatgtccaccaaactgaccaccagcttccgtatcggtatgcatcttcagtgcttatctgcataagcaacggcgaatcctgtactgtaatagccccgcgctgcttgcatagtgtccgtcttgtgttttttgatggattggtagataattcatttggctcgagcggcggctcctccttttccttccttttttctttttttcccagcccacctcgctcgctcccttcccttcccagtggaagtggattggttgattgatcgcacagagctcgcctcacatccacacagcccgagctgctgcccgcccacccgcctgtagctcccctcctcacggagcaggcaggcaggcaggctgggattcccgtcgaagcagggcaggagctagggcgggtggaggagcctttgcccgggaacgaggagaggaggtggcagtggcaccccgcggctagggcagcgagagaggggcgaagaggaaggcggcgggcgcgtccgccatggctagcgaggaagtactccacaaggtccagaatcttatagagcgctgccttcagatgtacatgaacaagaaagaagtggttgatgccctctcccaccactccaggatagagccttgtatcactgaacttgtttggcaacaacttgagcaacagaatcctctgtttttcaaagcatacgatatgaggctaatgcttaagaatcaaataatggtcttcaacaggcttctccaggatcagttcgagattatgaataaagagttttcttcagggatcccttctatgtctcttcctaatgactctaattccaacctattgaagcaagattcatgctttttgccagagactgctcctggaaatgcaatgccagatggtataatgcacaatggaagttcaagtggtataataaatgacacaccatctggcgatcagttacttaatgctagtaaagacttgcatggccttcatagtcaaatagatgcttcaactagtctacagtcagaccagaatgcaactgctgtgctgtatggtgtagacaacgagacaagcgcaacaataaagaccgagtcttgctactcgagtaatgctgattttgccttctgtgggaacactttcctggaatcatgccagtcgataggtgatgcatctggtggtggatccttcagcagctcagagttgaatgggcaaccactaaacgattcaattttggatatggagtcatcatcatttagcttcttgaaccaaatgccccaaagcttcatgttttcagacctggcagatgatttcaaccaaaatgcagaaataacaccatttctcactcctgagacaaatttctccgattcaacagggggagaccatacaggttgagcgggtcatgcacagcgtaccaaccatttgtacataggcacatgggcagtcgaatctgcattggtgaagaacttgaggaccttttgatctagcttgtttatttctctagtttttgcgtcttgatattgtggtagtttggggcttcgggtctggtgggttgtctagcccatcagaacgcgtaatgggtacggagtattggtcttccagtatgttttcagcgttaatttggctaatttcccccgcttggcttgtacaacaaattttatcagtactgagtaccatgagttgtactgctgtatatgctgcttcccactctctgaattggcagaatgattgatgagaagacactgcttggaggagttgcaaactttagttacatgggcagctcatattctggctgctgtaaaaaaaaaaaaaaaaaaaaaaaaaaaaaaaaaaaaaaaaaaaaaaaaaaaaaaaaaaaaaaaaaaaaataaaaaaaaaaaaaaaaaaaaaagggggaggggggtggaaaagaataaaattaaaaanactcttgtaataggaaaaaaaaaggtcttttttatgtggcgcctaaattaaaattaa

SEQ ID NO: 34423 - DNA, 306 bp, Zea mays
  Clone ID: MRT4577_131399C.1
ttttggtgggtttaaataatcgctggggggacaaacacaaggaaaaaaggaaccacaggaccacgcataccaacaaggcacctagtgcaatgcgctaagggatacggcatctataaaaatgaatgcaatggatacgctaatttaagcggaggagacaacagcacaacaggaacaacaatagacgagcccactgttatacctagtggcaactacgtaccaagggccaagcaaacgaccaagattactgcaaggaccagcaaacatggccatttcattgaccatccaaatgtcccgatctagagctag

SEQ ID NO: 34424 - DNA, 1084 bp, Zea mays
  Clone ID: MRT4577_13139C.1
gagaaatgtgaagatctctctgtagattctcgtatgtatatgtgctggccatctccagcagagaactgttttgcacagagtagagtttgaaataaacggtgagataggagtacggagtctgctggagatagtcttaggtgcgtcttattcttcaacattttgttccatgactagatgccgttggagtgttacaaagaatgactgatgcagacctgaacttggtgcgttaaggtgccatggctaattttgcgataaatacccatctttagtatgctctgaatgtggcctggactacaagaacatgtagttaatctacactagttggggtttacccagcggtggagtgcctgatatggctcacgccataccttcccttcacccgcacgccgaaccccactcttgtttctccgcagcctgtgctcaccaccattctagctctcctctccagctccatccgcagcctgtgctcgcggctcgccagctctgacactgagctccgccttctccaatctcctgctcctgtatggcgtgcgccactgcggttgtggcccttctcggtgtggtcgcccctttgcgctcatgtggcaactctctccgctcctccctctccaactccaacatgcagcatctcagtgtggcagcatccaacttcctcccccagccataccttgtttctggggtgtgcttcgccacatttgaaaatgcccaggttctctgttggatcttcatgtcatgcttttcattttgacgaaatgtgtttcatcaagtttcaccagaatgattacgtcgctgcaggttgtcaacgactcaacggggaagatttttgtcacatgaatgacctaattcaactatacatgacagcttttctggaaggaaacaatgaggttcttggtgtaattgagaaggcaatcgctgctctggttgatagttttgagaaaacgaatttagagaacaccccagggactgagaaggagcaaatggtcagcacaagccttcgtcacctgtttgattctcattgactgggtctctctccctaggtttttatggcctgtttcatactcatgggatcaagcttagctttcac

SEQ ID NO: 34425 - DNA, 657 bp, Zea mays
  Clone ID: MRT4577_1313C.1
attcggctcgaggcaaagcataggatgctcctactgccgctgccggacaagaatccctgagctccatttattcctccttgcagcagcaaagcaagcatcctcacccgcccgcgcgtctcgtcgaccatccaaatccactcccttctctagtccaaggagctcaggaggtcgaggaagaaggaatggcgccgtcgtaccggccctaccacgtcgccggcgaggatcagcagcgtaaggtgaaggcgggtgggaagtggttggccgcgtggagcgtgctgggtgttggcggcgacccggcggagatgaagcggcggaggcgggtggccagctacaaggcgtacgcggtggaaggcaaggtgaaggcgtccatccgccggggcatccgatgggtcaaggccaagtgcgaccgcatcgccgccattcacaactagctagtagagcagagctgagctgagcatgtcgtcggttcctttccttgtgcgcttgcattgcattgcattgtgtttttacctgttcaggatccatttccatttaccagcttcttgttgttgttgttgttgttgttgtcacatgtatgtgcatgatccattctgaacccggttttaatccgaaacaaaaaagccactagagcaaaaactcgagggaaagaaaaaaaaa

SEQ ID NO: 34426 - DNA, 309 bp, Zea mays
  Clone ID: MRT4577_131400C.1
caaacgcatacattactacacaatgctcactttctcctactgccattattacacagttacgctcgccagttactctaatggtcttagaacacccagctttacaagcctacattctacaacaatgcgctactctgctgatgctgtcttacatacaaccatattgcccaattactacaacattccttggcacatctaaccatacataccatatcatctcatcagcaacaacaatttctaccatcactgatccaactagctctgatgaaccatgaaccctacttccaacagcacttgctcgcattaaacgta

SEQ ID NO: 34427 - DNA, 2631 bp, Zea mays
  Clone ID: MRT4577_131401C.1
atggacctgctctccaccctcctccgccgcctctgcctctgcccaccactggcggggataacgccagcgcggcgacgctcgctgtccgacgacgacgacgacagcgcccacgcccacgcccacacccacccgcaccaccaccacctccgcggccgcctgcaccgtcgaccccgccgccgccacgagccccagccgcacgggcacctgctgctcccgacctccgacccctacgcggcggtggtggtggcggggccccacgagacgacggtggcgcgcacctacgtgttccgcaactcggaggcgccgcggtgggaggccagcttcctgctgccgctggcgcacgccgccaccggcctcgagttccacgtcaaggacgccgaccccttcggctccgacctcatcggcgtcgcctggctcccggccgccgccgtcctcgcctccgccgccgcgcccatcgagtcccagtggctcgacctcgcccgccccgacgcccgcggcccgcccgcgcccggcggcgggagcgccatccgcgtttcggccgcgttcgtccccgcggcggcgtcccgggggcgctccggcgttggcgtgccggcctacttcccgctgcggcgcgggtgcgacgtcaggctgtaccaggacgcgcacgtggcggccggcgagctggagggcgtgggcgtcgtccccgggttcctgccggggcggtgctgggaggacctgtgcatggcggtgctgggcgcgcagcgcctcgtgtacgtggccgggtggtcggtgcacaccacggtccggctcacccgggaggccatgtcgccagagatggcggccaaggtggccgagctggaggagctgggcggcgagcccgtggagcacatgagcctcggcgagctgctcaagtacaagtcgcaggagggcgtccgggtgctcctcctcgtctgggacgacaggacctcgcacaacaacttcttcgtgaagatgttgttcggaaggagtatagttttgcaattatgcatggcatgggtcgaaaaactgagtgcgacgtctgcagccgcggccgtgcaggtggtggggacgctgtacacgcaccaccagaagtgcgtgctcgtcgacacgccggcgtccgagtcgacccgcaggatcacggctttcctcggcggcctcgacctctgcgccggccgctacgacacgcccagccacaggctcttccgcgacctccaaaccgtcttccacggcgacgtctacaatccgacattcggtggcgacgtcaatggtccccggcagccatggcacgacctgcactgccggctggacgggccggcggcgtacgacatcctcaagaacttcgagcagcggtggcggaaggcgaccaagctgcgggagatgttcggcgggaaggcggcgcaccggaaggacgacgcgctgctgaagctggagcgcatcccctggatcctcagccccaccaagcccaagcagcagccaccctccgccgccgcagacaccggcgctgcagaccacgacgacgacgagcgggaccagccagccctgcacgtgctgccggacggcgaccccgagcggtggcacgcgcaggtgttccggtcggtggacgccgggtcggtgaagcggttcccgcggccgtgggagcgcgccgagatggcccggcgccacctggtcggcgacaagaacctggccgtggagcggagcatccacgcggcgtacgtggcggcgatccggtcggcggagcgcttcgtgtacgtggagaaccagtactttatcggcggctcctacgcctggccgtcgtaccggaacggcggcgcctgcaacctggtccccatggagatcgcgctcaaggtggccagcaaggtccgcgccggcgagccgttcgccgcgtacgtcgtcctgcccatgtggcccgagggcaaccccgggtccggccctgcgcaggagatcctcttctggcagaaccagaccatggagatgatgtacagcgttgtcgcggccgcgttggagggaaagggtggccacccgcaggagcacctcaacttctactgcctcggcaaccgggagccggcggaggacgcgggcgacggcaataaatgggcgccggcggatccgctcgacgacgccacgacgagctccgccgcggcgcatgcgcggcggcaccggcggttcatggtgtacgtgcactcgaaggggatgatcgtggacgacgagtacgtcatcatcggctccgccaacatcaaccagcggtcgctggcggggtcgcgcgacacggagatcgccgtcggcgcgtaccagccggaccacacgggcgcatgcccgcgcgggaaggtgcacgggtacaggatgtcgctgtgggaggagcacctggggaaggaggcggtccggcggccggaggtgctgcggccggagtcgccccggtgcgtcaaactggtgaaccggatagcaagggacaactggaggaggtacgcggccgacgacgacaagctggggccgctgcaggggcacctgttgaggtacccggtgcacgtccgagccgacggaagggtggagccgctgccggggaacgagttgttcccggacgtcggcggccgggtcgtcggcgcgcccaacaacctgccggattacctgacaatgtag

SEQ ID NO: 34428 - DNA, 463 bp, Zea mays
  Clone ID: MRT4577_131402C.1
tttttttttttttttttttttttttttttttttttttttttttttttttttttttttttttttttttttttttttttttttttggaaagaaatcgggaaaaaaaaaaatggccggccccgcccaaggaaccctggtgggagcctagcggggtgaagttttattcagggaaggggtttaacggggttaccatggtggggaaggggcaacaagaactttttgaggacaaacgggggggaccgagggcctcctaaaacttgggggggatcactccctggggggggcaaaaaggggggaaaaagggggggcacaacggcttttttttaaatcttaatttagggcccaggaaattttggtttcccaaaaccgggggatttttggccccagatgccccataccgggaaaacccgggccccaagggtgcaccagcccagggggaaggtggcacccccccttatttttgtt

SEQ ID NO: 34429 - DNA, 155 bp, Zea mays
  Clone ID: MRT4577_131403C.1
gctgaacgttgtcgggctcgccaacgacttttgtgtgtacgccgtcgtgtgcgtcctagcgctcgcgttcaagaacgacaaggtgcccgatactaatggcatgcctctagaggtcatcaccgatttcttcttcgttggggcaaagcaagccaacg

SEQ ID NO: 34430 - DNA, 281 bp, Zea mays
  Clone ID: MRT4577_131404C.1
aatcttcatcattttttacttagtttgcagaaacacaaaaacagatctgttccctaaaaaaaccacttccccacaccatggaacaacgcgcctatcacacgggggtgggggaccttcccaaaccaacccgactgtgagtctctgacgctcaacccaacatagggatggagagaacccccacaatcctctgctgaccaatactctgacgaaatgccacggaagaaacacgcgcgacaggttttttttttttcgcgtttagccatccctccgacgacccgttt

SEQ ID NO: 34431 - DNA, 479 bp, Zea mays
  Clone ID: MRT4577_131405C.1
gaatccacaacacagcctacatagcgtgtttttcgttggttccgggcgggtacaaaagatgacggtggtcggcatttatacaactactcagcaaacgatgactggtagctcctaaaataatgcgagatggaaattatttaaacttttttaggaaagatgtctgatagcatgcgtgcggcccatcatcaaaccgatacaaatgtgctctttgtatatgggattttttttttaaaaaaagccgatccagacatctcttgtttggacgctaacgaattctcggacgtatcgttgtatgagctcgtaggcgcgcagcagctggccgcagttggggagccgctccttccccaggaacgcgatagaataggcttaccggacgcctgtctgctcgatgccgctcctgcgggtgaacacgacgctgcagcccttactgtagtgcgttatgtctttgcagtccgcctcggcgctcttgagcaagtgca

SEQ ID NO: 34432 - DNA, 2072 bp, Zea mays
  Clone ID: MRT4577_131406C.1
cactcaaaggccggaccaggagccgtagaaaaaccagcccaagaggagagagagagacctccgtgccagccccgccccacctcgccgcctctccacgcgacctgctcgccgctgccgccggcgccgcatcacaaatgcccacccagaagcgcccgcctccgcctccgccaccctctccctccccctccgcggcccctggcgccggctcgccccctccctcgtctccgccgctgccgacggccgagcccgcggagaagaagcccaagctggaggtgaacggcagcgccggcgccgaagccaacggcaacgccaacgatttcggcgcgaaggaggggacggaggtggaggcgtcggagtctgagtcggaggatgcggacgccgcaaaacaggagtttgtaccagtaaaattatctgatgtacgcaaagaagtgcagtgtcccatatgcttaggcatcatccggaagactagaacagttatggaatgcctgcaccggttctgtagggaatgcattgacaaatccatgcgacttgggaacaacgagtgtccagcgtgccgcgcacactgtgcgagccggcgttctttgagagatgatccgaattatgatgccttgattgcagctctatatccagatattgacaaatatgaagaagaggagctagcgttcaacgaagaggagaatgaccgcaacaagcagattcaagcatccattgctgaggcttttcggaaacaatcagaagttattgggcggaagtctactgccaaagctactgctgctgcatttgtaagaagatcacgccgtaacattcggcctaatgggcagaatacctatttccgtggccgaggaaaagccagttctgatgacgttgctctggcctgttctgaagatgaagaggatggaaacggtgaaagctgtagcaaagaggcctcatctgcggaggagagttccccagagaaaaagcagaaacgactgccaaaatggccaacaccgcgttcttcacctgcccgagcatgcaatgatgaggttgcttctgatgaaaaggatgatgtaggaatatccagggaaaatttcagcacatctcctctacgagcatggggaaagaatggcactcgcagtcagactcgccacagtagcttcagtggttcaaatggcaggatggtcaagggtgggcgcatgatcaagttggttgagtgcttgcgaaattctgacgacaatgaaggcgagcgtgatgtacatctttgtctgcttccacttgatggacaaacggcaccaaatctggagaagtcatatctgtgttgcggcccaactctgtccatcaaacaactttgtcagtttgtcgccagtcagacatctcacaaagatgaagaagttgagatgtatgcgctgaagccttcttgtagcaagcctgtcagcactaatacatgcggtcctgacaaagcaaggctcgcaggggaggaacgcctttcagacttgcgctcctcgttcacatttcctaatggggttctggtgagatcaaacacttagattatctgattagacccgttcacgtttattctaaatgttatactcttcatttcaggagctggtgtatgccataaaagtggctaactagatgctgagtgaaggcccattagttcaaatggaagtgttttttgtttatacatatcttcatcgtgatcccttgacgaaatgacaggtttgggctcttgaatacaacttggaaggaaaaaaaacgttgggggagactagttgttgtataattagcttgtgagatgtgagataaatgtgcgtacgttgtcaacgaatagtttcagaagagtcagattggcttccacagttcacctcgctgcaacccaaaatctggtctccactgccggcatttgggggaatttctcggttgggtgaaggctgagttatttcctcgagtggtcaagttgttttacttccacagttcaccagtttcagcttttgtaattcatcggttcatattcttcaggcggcagccagtccgtgctgcgaacgacttcccagatacatgtaacataaatcttataaaaaatatatatgtaacag

SEQ ID NO: 34433 - DNA, 325 bp, Zea mays
  Clone ID: MRT4577_131407C.1
atgaggaaagttgcgcgcgctccgcagagctccgatcctgtatagcgggcgcgactccgggcgtccggcaacatataaagtggaatacagtagcaacaatagagcaacaatggcggccaagatatcttccatgcttatgctacttgctctttctgcatgtgtggctaacgcgaccattcctcctcaatactcacaagctcctatagctgcccttcttcccccatacctttcataaatgaccgcttcagtatgtgaaaaccctgcccttcaaccctacaggctccaacaagcaatacgaacagggccctcacctttatcacccctg

SEQ ID NO: 34434 - DNA, 875 bp, Zea mays
  Clone ID: MRT4577_131408C.1
ctgaagatgaagaggatggaaacggtgaaagctgtagcaaagaggcctcatctgcggaggagagttccccagagaaaaagcagaaacgacttccaaaatggccaacaccgcgttcttcacctgcccgagcatgcaatgatgaggttgcttctgatgaaaaggatgatgtaggaatatccagggaaaatttcagcacatctcctctacgagcatggggaaagaatggcactcgcagtcagactcgccacagtagcttcagtggttcaaatggcaggatggtcaagggtgggcgcatgatcaagttggttgagtgcttgcgaaattctgacgacaatgaaggcgaggtgaacacaaaagtgcacgtgatatgtttccttgtttattggagtgttgcattgcttagttactaactttatttgacagcgtgatgtacatctttgtctgcttccacttgatggacaaacggcaccaaatctggagaagtcatatctgtgttgcggcccaactctgtccatcaaacaactttgtcagtttgtcgccagtcagacatctcacaaagatgaagaagttgagatgtatgcgctgaagccttcttgtagcaagcctgtcagcactaatacatgcggtcctgacaaagcaaggctcgcaggggaggaacgcctttcagacttgcgctcctcgttcacatttcctaatggggttctggagctggtgtatgccataaaagtggctaactagatgctgagtgaaggcccattagttcaaatggaagtgttttttgtttatacatatcttcatcgtgatcccttgacgaaatgacaggtttgggctcttgaatacaacttggaaggaaaaaaaaacgttgggggagacta

SEQ ID NO: 34435 - DNA, 614 bp, Zea mays
  Clone ID: MRT4577_131409C.1
gtctactgccaaagctctgctgctgcatttgtaagaagacacgccgtaacattcggcctaatgggcagaatacctatttccgtggccgaggaaaagccagttctgatgacgttgctctggcctgttctgaagatgaagaggatggaaacggtgaaagctgtagcaaagaggcctcatctgcggaggagagttcccctagagaaaaagcagaaacgactgccaaaatggccaacaccgcgttcttcacctgcccgagcatgcaatgatgaggttgcttctgatgaaaaggatgatgtaggaatatccagggaaaatttcagcacatctcctctacgagcatggggaaagaatggcactcgcagtcagactcgccacagtagcttcagtggttcaaatggcaggatggtcaagggtgggcgcatgatcaagttggttgagtgcttgcgaaattctgacgacaatgaaggcgaggcaccaaatctggagaagtcatatctgtgttgcggcccaactctgtccatcaaacaactttgtcagtttgtcgccagtcagacatctcacaaagatgaagaagttgagatgtatgcgctgaagccttcttgtagcaagcctgt

SEQ ID NO: 34436 - DNA, 747 bp, Zea mays
  Clone ID: MRT4577_13140C.1
gtttcccacccattctgcgtgtcaagctagggtttctcctccctcccgcccccatagatccccacaccaaggcacgcgctagagcctagaggagctgcacgatccgatggcgccgctctcatggcggcaccatacgctgctgcaggcgctgctctcccgtggaccgctctcggagcgagacttccacgccctcttcaccgccatctccggcggcaagaaccccgccactcaccagcaactattcagtgatacacttatgaagatcaacaatgagctagggtatttacaatttgatctgcgagcatgtataaaccagtatgatggaacagtttattatggagtggtcaacaacatttctgatgaagaatcgaagcttggctccaagtattccgtaccacagattgcattctacaagggactgttagaagcaatagttcatgaagctggaaatgatgggagcataactagtattgaagctctccacgtccggattgacaaccaggtcgtgattgcggatggtacacaagacactcaatctcgtcttccttcttctatcacaaatttcttgttctctcaaaaggaaaagactcttactgaactgatacaagatcgttggctggcgtacacctcggagggcaagattggtcttggtatcagatcatttcttgatctccggagctggtttcgcagcaatgatatcccatcatgcgaggtttgcaatgaagctggtataaaggcatcaacttg

SEQ ID NO: 34437 - DNA, 560 bp, Zea mays
  Clone ID: MRT4577_131410C.1
gcccatcctccttgacatgcatatggttactcatgtgtctactggtttggccttaggtcattcccattctgaggaagatgctacgaaagctgttgcaagctgcaaacgggattacactcgagaaaaacttcaggaaaaagcgtgtggcatatgctaaaagttcacatggaacactgcataagggggttcttaatcaaacagtcttgctgacactgtcattgaagctgccttatttgctcagtaatatgatgccataggttgggctccaaaagagtacaatacctgatgacaaacataacaacaactatgactctcacaatgatggcaacacagcacactcggcattagattgggatgaaaaatctgattactactatgattacgactatggattctattatgaaggaactactgacctttactatgacagcaactatgacgtctgctattcatatgatcaacaaactcaacaatatgatcatcagtatgaccatagcaacactcaggcaaccactgaggcagccagcgaggccaccaaaacctccactagtaattgtggc

SEQ ID NO: 34438 - DNA, 443 bp, Zea mays
  Clone ID: MRT4577_131411C.1
cgcctggctgagctctcccactcccacgccgtttccacgctctctcctcagctcctgctcgagaacgcacgcagctcgagctgccggcgctataaaccttcgctcccttcgctgtactacggccggctgctgctactgctgcttgtcggggttgagttgtttcttggtgctgggatggagctggggctgagcctgggcgacgcggcagtgccggacgccggcagggcggctccggagctgggcctggggcttggggtcgggattggatccaacgccgccggaaccggcaggggaagcaaggcggcggggacgacgggaactactgggtggtgggcggcgccggccacaccggagtcggcagtgcggctcaacctcgtgtccagcctcggccttcagtggccacctacggacggcggcatctgtcatgtatggcgcgacgaggc

SEQ ID NO: 34439 - DNA, 1053 bp, Zea mays
  Clone ID: MRT4577_131412C.1
cgtccattttttttttttttttttaagttctaaacccatacacagtttggttataagatcgagaccgccatccatggaccagtacacgattagcgagcaatataatcacacacttcatcaaacccatacacacgaaccgtaagtacactacacactccctgtccctgggagtcagagagacatggcgcggcagcatattgcaccgtcgcggcaacggctgcacggtgctccggcccctacctacgccgtcgtccgttcagttccccggcgccggcttgccgccgaatcccttcttgcgctcctcgatgaagctggaggagcgctcgttgatgttggacggcacccttggcgcctgcggcatccgcggccggagcccgctccgcctcggcacccgggcgccgctctgctcctccgctccggcgaccgacgacgcctgccgcttccggaacagcgacttcttcctctccaacgaggcgccgccgctgccctcctgcgcaggacggtcctccttgatcgtcaccgtcctcctcgtcaccttcgtctcctccgccttcgccaccgctggcgccgcggcctccgcttccaccgggccgtcggccgcagcagctccgtcctgcttccgctcaggatcaggaacgcccctcgccgtcgtcgcggcgctctcttccaagacggtcgtcgcgacgccgctggggcccccatcgccatggccgccgagctgctggaagtcgaactcggccctctcgatgggtatggcgaactcgtcttcttctatgccaccgtcgcctcctcctccctccgtcggcggcggagggtggccgccggcgccgttgctccttggcccctcggcgatgctcttcatcctgctcaccgacaggttcttggccaggaacgtcaggaaccggtcgcacatgccgccggccgccctcgtcgctggctccacgtcgccgccgccgctgcctttctccgccattaccgcgcgcttgttgtacttgtacctggcagcgtagtggcgcgaagcagcaaagaatccatccgagccgaattcgagct

SEQ ID NO: 34440 - DNA, 1486 bp, Zea mays
  Clone ID: MRT4577_131413C.1
aggacgcgtccggacgcgtgggaaaatattcacattgaattaaattgtggaggcttcttggaagaagatttccgcagcatccttcgaactccatcttctcttggccggtctttctcccaccgccgcattaatagtttaccttccttcgatcggtcattctttcaagaccgtactggtagtttcacggagtgttctatagcagattcagagccacagttcgaaaacttgcagcttgaggacgaggactggttagtcaagccaccactgtccgcaggagcatatgctgccaatttcaatgatgaagaatggctggtcacaccactgaagcgctcccgtgtcatgaatggtattgaccatgaggatgaagagtggttagttaaggcgacgaaactgtctggtgccaaggatgctgatcttgaagctgaagagtggttagtcaagtcagggcagcctaacgatgctttggattcggacttccgcttcatacacgaattttctgaacaaggtgctgcagaacccttgcacatctatgtcagtgacaagaacgaggctgatttccagtatgtcaaggacatcctcaagaaatcagggttcagctgcggcgatgtcgactggtacgcgtccaatcagccagtgagccctgtggtctttgacgaggcagaatgctcgtgtcaggaggtcagcatggcaagcgatgaacctcacagcatcgtcaggcgcatgctcctgtttgatctcatcaacgaggtcctgctggacatctatgactcctcactcgtcatcggcccatggcactcacgcttcgacctgcgaaccagacccattcccatggggtaccatgtccttgaggaggtgtgggcgaaggtgagctgctacctgagcctgcattggaaggaaggccagacggtggaggacattgtggcacatgaccttatgagaaaggacggctggatgaacctggtatatgacgcggagtgcaccgcgttggacatggaggatctgatggtggaggaccttcttgatgacgttgtcattcagatagtgttagaatccattgatgaatgactatccggagcctctttttttaaccagcggcttgagcttcgcagtaatctgttcataaggctgaacagtgaagtgatatccgaaggaatgtactagatagatggatcgcttgtctgtctcgcattgtgcaacagtaactgtgtagatcattttaaaagattggcgattctatgaattgtcaaatgtggcagatgttggccatgcatacaaagttggaaacagaaggtaaacaatagataagaaatagcgaaacagatagcattatatacctgttaaattcaaccaaactgtcgtgagtttttattagtcaatactggtatatctaggttgtgtctcccctacaaatcctggtgttttgtactctattcatgagtctgtggaaggcacaattctgagtgtgaaaaacactactctgttatat

SEQ ID NO: 34441 - DNA, 502 bp, Zea mays
  Clone ID: MRT4577_131414C.1
cgaggttaaataagtacaacctcgtgccacaccctagggtgcatatattaaccttcaatccaagagcttctgcttggacgaccctatatgaggcacggcctctactattcgataatagtggaggaggcactattacgatccgggctctttaagtattgcttgataaatagatgagaacccaggtgatgaaactttgattctaagttggcaggccattcaacaggaaccagcatggcaaaggtgcccgtcccatcaggccgatatagtatatgtcaccctaaaagaattactggaaacaaaggatgcgacgtagctcttgggaaaacccttaagggacccaactccattttcctaagtgtcattgaaaacaaccgccgaagagctgctagagaaagaatcgcctctgaagctcgttacgacgatgaggaacaaggcaagcttgaacgtcacaatcgcaaggcaatggcatatagtcaggcccagctaggtattacatcacatg

SEQ ID NO: 34442 - DNA, 350 bp, Zea mays
  unsure (1)..(350): unsure at all n locations
  Clone ID: MRT4577_131415C.1
agggccatccaaatacgccagctgcttgtttgtgtcccagggcgtggcctagggcattgtctgcattcgggacatgcaagctctcaccggatgctactgcgcatagcccaatggtcattatgatctggcgggggcttaggagccagcaatgcctaacattgtggatgttgttgctgcacactagtggaacgcatgaaccagatgaaccagacagatacttgcacacatgcagtgcagntncctttatcgatgagatgcctactattagagatgactgtggatggttgtacatcttctactacacatgaacaaagaagacattattgatggatcgcctggtcttatgagag

SEQ ID NO: 34443 - DNA, 364 bp, Zea mays
  Clone ID: MRT4577_131416C.1
agggaccggaccggaaaacccggcacgacccacgcgaccgcgattcctaaaagcagaacacgacaccaagaagggggggaacgaagaaaaagaacggggggcgcacgaagcgagcgccgccaccagaacaagcggcggaggaggccgccagacaccacacggggagacaccgccaacgaacaaaaggccgacccacgacaaacggccgccgaagcagcagccgcagccacggcaaaaccccacacaaccaccgcagacaagcccgggccagcagaccggaaccagcgggagaggacagagacggaagcccgagacagggccagcgagaagagagccagaggcaccagtgcagcccggcggagac

SEQ ID NO: 34444 - DNA, 337 bp, Zea mays
  Clone ID: MRT4577_131417C.1
ttgcttattgacttctggcagtggtggacgcaggatgaaattctaggtggggccaatccgtaatggagaaatcacaagaaaaaaatgctaaactataaatggtttcttggtaatagcatgaaattaagttgtaatatcatgactattataaaaaaatgtggatatcaaaaatccttttagcgacaccaaatcatcgatagaaaattcaatctacaattagaagaaaaaagtattagtaagcttcaatataagtaaataaacaatactatatagataaaacatcgaaaacaccatttaaccatcaatcttgtggttgtggcagcttgcactctatttt

SEQ ID NO: 34445 - DNA, 285 bp, Zea mays
  Clone ID: MRT4577_131418C.1
ggggaggcaaatgccggcccaaaaaaaatagatgtttataacaaaaaaaactgttttttatggtcgaagcaattattccccaaacaaagggcgccagggggttatccacaaaaaaatcctttcaaatacaaaggatcaaaagggttcccacatatttctttggtggcaatcccattttgaacccccaaacgattgggaaaataatatgcccgaaatattttttgcgccggtcaaaataaccttcaaaagaaaaaaatttcataaaaaaaaaaagggccaccgggc

SEQ ID NO: 34446 - DNA, 551 bp, Zea mays
  Clone ID: MRT4577_131419C.1
gaccagcataggtcccccctgttacacatggcacacatggagaaggagctaacaacttgtaccgaacaacaaataggcatacatccgtgatagggtcttatgaacagaactacgactcgacactaaccccagataatgagatgcacccccacacgaggaaggtggcctagtaccactttacccccatgcacacaatcttggctgtaaatgatgccagggcgattatccatcaaagtcatcctttgtccattcccgtcggacaccatggcggcgatctgcccataaacgagtgaccccatcgcaatgttggggatcatgatgcaggggatcacacccaagctgtttggttcaaatagctccgatgccactgacactgctgtggagaatatgaatcctgagctcaggccaaccatcgctgatgctgctaccagagcgcctacgtgctgttgtttacacatcaggaagaatgccattggcatgggcaccaatgctgcagcaagccaccctgtccgagctagcgataccatcctgtgaggcaagttggggagcgc

SEQ ID NO: 34447 - DNA, 1737 bp, Zea mays
  Clone ID: MRT4577_13141C.1
gtgctctgttctgctgcgcctgcggggcttcagtgcagcgcgtgcgccgtgcggtgccgcccgccagccaccctcgccgtcgggtcgccttgccacgtcgccgcccgcgcccccggcccaccacctgaggccggtcgcccatccataacgcccgcagtccagtccccaccaggcaccagcccacatctcttctcccacagaacagactcccacgccgtctccgccccctccccttcacggctttgcgcgcgtagatcggaggaatggtgagcgcgtcgagcctgctgctcccgtcgtcggtgcgggacctggcctcctgcgtctccgacggcgccgtccgcgtcgcctgcaccaccccggcgtccacgttcacggtctcctcctcctcgccgtcgccgccgtccacgctctccgtcgccgtctcctaccgcgccacgccgcaggtcgcgtcgtcgccgccgctcctcctgcgcctcacctggtcgcactccccgcgcgggcagccgacgctctccttcgcggggcccacggcgtcgtcgcccgccgtcctcctccggcgccgcaggggcacctactgcctcccctcctcctcctccgcacacgccccgccgctcgcgatcttctgggacctcacaggcgccaggtacgacggggcgggctcgtcgtccccggagccggtctccgggttctacgtggtggccgtcgccagcgccgaggtggtgctggccgtgggcgacctggcggcggggttcgtgaaggcgaagctggagggccagatcccgcgggcgcgctccatcctggccgtgtcccgcgtggtcgtcgtcgcggcggcgggtccgggcgccgcggcgcacacggcgcgggtgcggttcgcggagggcgcgccggagcacgaggtggccgtgggctgctgccgcgggctgggcggccggcccggggaggaggacgagctgtgggtcagcgtggacggcaagcgcgccgtgcacgcgcgccgcctgcgctggaacttccggggcaaccagacggtgttcgtggacggcgcgcccgtcgacgtgctctgggacctgcacggctggtggttccgccgcgacccgccgggctgcgccgtcgtgatgctccgcaccaggagcgcgctcgagagcaggctctggctcgaggaggaggccagggcgcccgggttcgcgctcctcgtgcaggccttcaggacgccgccttgatcttttttttggccttggtgcttggtggtggtggtggatgccatggataagttcgtttgcactttgcagccccctgattgtcgatgaagttgagcagatgctctgctgccagtgcctgctgcttcatgtttttcctctgccttttgacctggggatctggtgcctggtgtttagcaatccaaattcgaatccaacagggcaacggtttgcgttgacaatttagatgtttgggacgacaccatggatttcttcatgtggtttatggtatacaacaaaaaagaggagagattggtttgtgctgtttaggtcttgatcaagcactaactgcttgctttcgagtacacctagagaaattgatgctccgtatccgactgtatcttgttgctcttcactattttgtctattgatggttgcagcctgtcataatgaagggccattttggttccagcatgttgttgtcatttgatcatgtaatttctgcagggggacacagtggatgtccctgtaataaattatggcc

SEQ ID NO: 34448 - DNA, 419 bp, Zea mays
  Clone ID: MRT4577_131420C.1
tttgaaccggattgctgatgtaatttatctgaacaggaaacgatttcggccgctgtccatcgcataccgacaggacctattttagaacgtttcactgtaacttgcacataccgtgctaccaggtcccagatcgaccacgccggtcatgtcgatctcaggttagcctttcatgcctggacgcgcagaggatccgtgtctgatcgtagaactgctggtgggcattcatctatctcatccacacttcgttgcttatttttcatcgtcagacccaaacttgtagtatgaatccctggcacggttcatcggtgttggaatatgaatctctaatatactaacatagaccaaacatactttcgtcaatacgctcataaacagtattgcagagccgacgatctgatcgaagcctacacttgtggctt

SEQ ID NO: 34449 - DNA, 495 bp, Zea mays
  unsure (1)..(495): unsure at all n locations
  Clone ID: MRT4577_131421C.1
aacacccggtccgaccacacccttccggggccttttccgcttccctggccccatatttttccaccccaaattttcccntcctcaacccgccacttttcaaagtttcccagcacctaataatccctaatccccccttgtaactttttcactaaccaattacccccctcatgcccctcccacccttttgatttaccttttcctcttttttttaaactctaacaaaccttttcctattctttaatttccctccccccttcccaattaatcacaatttttttcttaaactctttaccacaaaaaatctcttttccataaatcttaattctcaaaaatattttttttttcttccactatttctttccaaataattattattttttacactctaaatttttttaactaaaaattattttttattttctttaaattataatctttcttatatacactaattttttatttttatatattaccctacatattttttttaacata

SEQ ID NO: 34450 - DNA, 721 bp, Zea mays
  unsure (1)..(721): unsure at all n locations
  Clone ID: MRT4577_131422C.1
aattcggcacgaggagaaaatggagacgtcggcagtggcagctccaatgacgtggctccttttgacacttctgctttctctctcagcggccgccgccgccgccgcggagacggtgagagtgatcaccacccccgtcttcccccacatccctcgacttcaggcaagcaaggacttccaggtgctggtgcgcatagaggcgccaccggcggcgcagctgcagaagcgcgtccccgtcgacatcgccgtggtgctcgacgtgggcggcggcacaggcacgaggctggacgcagtgaagaaagcggtcaagtttatcattaggcagatccacgacgacgaccgtctcgccgtcgtcgggccgtataactatcggctagtcaccgggttcctgaacacccgcgatgcccgacgaaatgccgagaaatccgtcgaccagctggagccccgtggtgagttcacgtctgggtctggcgccggcttggaggaggccatcaagatcctgaacgggctaccgacgtcggcaagccggagcagccgcgcgcgcttcgtcatcttggtgacggacacggcagtggcagagagtagcagcagattcgtcagccagatgccgcgcgagttcctcccaccggtgcacacgttcgggctcggcgcggcggcgcacgaaccccagggcgctgttctacatcgccagtgaatnccagggcacctactccttcgtggacga

SEQ ID NO: 34451 - DNA, 402 bp, Zea mays
  Clone ID: MRT4577_131423C.1
ccggcaaaaggggggaccaaataatttgaaggaactgtcatacaaaactttttaacaaaaaagttgatggataccggcggatcatttggttctccccaccccgtttccccaaatttttttttccacaagattttggccgccatgggcttaaaattaaaaaatcccccccgtggggcaagattttgcttcctttggggaattccccaacagggaaaaacccaactgccgggccctttgcagttgaaactattttttccaaagacccaactttgaacccctcgtggggtatcaaataaaagctgggggcaaattttattggtgcaaaaaagctttcttaatgtgttccccaaaccggggattccgggaggccccttccttatttgccccaccttcctcagggcc

SEQ ID NO: 34452 - DNA, 389 bp, Zea mays
  Clone ID: MRT4577_131424C.1
aaaaagcacggggatcttatcaatctgcaagtccagggttcaactggggggggcccccgaagtaaaacatcaactccccaatcgcatgaaaaaagccaacgtttgcattggtcccccacatgaagctccactgcagcaaaaaatattcatgggggatgagaaaaaggagcttctcaaaatattgcctaccaaaagcaaaaactcctggtgccccaatttatcaacttgaaagcccaacaaaaagcattccttttatttaacaatggtgcccggccacaaaaaccgggataaccccatctcccccacctatgcctggggggaagccccctcaaacttggcttccttttttccactaaaaagcttggaaccaccctaaaaaataacccccc

SEQ ID NO: 34453 - DNA, 282 bp, Zea mays
  Clone ID: MRT4577_131425C.1
ttttctgatgctaccagccaagccctaataagtccatgttcgagcgaccatggtgctgcctctccagggcggaatggttctggccaaaggcgccgccaagcgtggccaccaaggttcgtaacatgacagcagtcccgggatgaccaagcctgggatgctgaggctgacgagggggggcggcgtgaagcgcatctcggggctcatctacgaggagacccgcggcgtgcttaagatctttctcgagaactttattcgtgacgccgtcacctacacgttgcacgc

SEQ ID NO: 34454 - DNA, 419 bp, Zea mays
  Clone ID: MRT4577_131426C.1
ccggccccttcagcatgaatcgatgaacgtcatcaaggtctacttcaagcgcatcatagcagagtggagactggagaggattaggaacactttcaagggaatcaagggatcccacacgtggccctttcagattatgtagcatatctcctgagatagtacttcttcaacaacttgcactatcgattgagtacatgccctttctatagtcagattgcaaagaaatggcttgactctcagtttgccagatctaaagcatcagttgaacggtcataatggcgaataaacaaagatctcggccaagcatctctaaaaggttcagcttggttgtaatcaataaactggaggaatgtagataccaatgtcgtcttactccatcagaagctactagcttctaatgaagaaccaaatttctggaaaaa

SEQ ID NO: 34455 - DNA, 500 bp, Zea mays
  Clone ID: MRT4577_131427C.1
ggagggtctttttggcctgtgggctggagcattaccaaccgtcatgcgtaatggcacaaaccaagccgcaatgttcactgacaagaatacatttgatattgttctctggcagaagcatgaaggagatgggaaggttctccagccatggcagacaatgattgcaggttatcttgcaggaactgcaggaccgatctgcactggacccttcgatgtagcgaagactagactgatggcccaggggagaactggtggacggaagtgcacagggatgagatcattgattcttgacaactgcgatagtctgagcactgttgaactgaatagtagttccatggtcaatctctctcttgctggttgccgctccatgacattactaaaactttcatgcccaaatctgcaaaatgtgaatcttgatggctgtgaacacctcgaaagggcgtcattttgtccagttggtcttgaatccctaaaccttggattatgtccaaaactaagtgatc

SEQ ID NO: 34456 - DNA, 407 bp, Zea mays
  Clone ID: MRT4577_131428C.1
aagacggcaaatagtcttgcggtggaaggccagcgtgcctacccacacggtgcaaaatgcgaggccccatcctacatgcacacgggtccctaccaatactctagtacacctaacagttagggatcggaattttttgcatgccactagcaaagtatcatgagcatcgcagactcgcagtcttgcacatgccgctccacagacactatacatgattcccaaataatacaacaccagaatatagaacgcacgcgatatatgggcaaagagaacgccggccccttcataaccaccactaaaaatcatcataagatcagccgttgaacatgagccccttcacgctatctctgagcttagggagcggggcagtctgcaatggcgccgccctgtacagagtcctccggacggtc

SEQ ID NO: 34457 - DNA, 496 bp, Zea mays
  Clone ID: MRT4577_131429C.1
tccttccccccaccaacaacaaccttcaggcgtcatgacaagcataacaaccacaacagttctttattatttttttttttttctattattttttttttttttttttttttttttttttttattttttttttattttttgttgcagccaaaaaaaaaatagcattagagaaaaacaaaaaaaaagacaagaaaaaagagggcccccccgcaggcctttgggaaggaaagggccccgggcccccaaaaagcaggcgagaaaagggcaaaaattgggggaacaaaaaagggggggggggaggcacacccacccgcgggaaaaaaaccaaacattctgcgcatggaaaaaaaaaaaaagccgggaggagcaacaacagcaaaaaggggagttatgtggcccccaacaaaaaaaacagggggcggtggcggccctgacaggaaaacaggagctaccatctgtgtgcggaaagaacctgcccaggcgggcgataaaaaggaa

SEQ ID NO: 34458 - DNA, 536 bp, Zea mays
  Clone ID: MRT4577_13142C.1
ccggccggaacttcttgcttgcatcaatccatctgacttgtttatttcagccctgtggcgtttatctcgaagtttactttgactcaccaatctaacatcgcctactccgtagagctacacagcatctatctaaataccacatcccgcccaaagctactatcgacatgtctaccatcgctgccgatgacaccagagtcctcggacaggatcccttgatccctcctgctctcctcacctccgaaatccctcttcccgagaaggccacaaacaccgttgtcaagggccgtcaagatgctgccgacattgtccttggccagagcgacagacttctcgtcgtcgtcggcccctgttccattcacgaccctgctaccgcccaggaatacgctgcccgactcaaggaggtctctgacagactcgacaaggatctctgcatcgtgatgcgcgcctacctcgagaagccccgaacaaccgttgggctggaagggtcttatcaacgaccccgatatcgacaactccttcaagatcaacaaggggtc

SEQ ID NO: 34459 - DNA, 1566 bp, Zea mays
  Clone ID: MRT4577_131430C.1
gacccacgcgtaacgccccgcatacccgcttccttctctccaatctccggtgctcgcatcccgctctgcctccatgcgccgcggcagttccatgacgccagtcctctcacctctgtccggacccaacacccgggcggctggaacccgcaggtgcgcttagtgccgctcgaggaggctcgccgtttgctggattcgttctgtcctttgccggccggcattgtgccctccgcggcggcgacaggggcgtgcgcggtgctgctgtaggggagggtgacggccatctcccaggtcggccgcggcccgggctggtggcgtgcagttgcgtgctcgactctgctttttaccgttgcttgctactctatctaccgtctgtacaggtctactgaaattccactattctgccgttgtatgctttgtgctgttggtgtgcagaggaagacggattcacaaagcatggtgctccccaagtctagcagggtgtgttgtatggcttccacgctccagctgttgttttccattgccatcacagctttggcctttttcctccacccatgcgcatcgactgatgagttccaccgtgaactctacggttggtccaatggcatcgctacatggtatggcgcagctgatggcgctggaactgacggtggtgcgtgtggataccagaatgctgtggaccagccacctttctcatccatgattgccgctggctgctcttccatctacgactctggcaagggctgtggctcttgctatcaggctgtgtgcacaggcaatgacgcttgctccggtaacccggtgactgtcgtcatcaccgacgagtgccccgattgcccgtgtcccgatgagcaggtccacttcgacatgagcgggacagccttcggtgccttggcgaagccggggcaggagagccagctgcgtggcgccggcgccatccaaatccagtatacccgggtgcagtgcgagtggcctggcgtcgacgtgaccttctcggtggagccgggctccaacccgaactacctggccgtgctgatcgagtacgaggacagcgacagcgacctcgactccgtggacatgatgcagacgcagggcgggacgtcggggcagtgggtgccgatgcagcagtcgtggggcgccgtgtggaagatcaactcgggctccgtcctccagggccccttcaacatccgcctcaccttcagctctggcagggcgctcgtcgccagcaacgccatacctgcggggtggaacgccggcgtcgcgtaccggtctggcggcgtggctgtgacgagggccaggcccaggagcggtgcctgccggggctacgaggctgccgggacactggatggtttggtgcatcgtcacctcgtcgtgttgttgttactggtgttattgacgctgtgagccgagatgcgatgcaattttgctggttctgggagcgtgcgagtttgggctacatggactgagtagctctgtgtatttttcttgcatcgcatcgtagtggatggattactgcgtcgtattgggaaaaaaaaaaaacgcgagaagtgcccgtccatataatactcc

SEQ ID NO: 34460 - DNA, 1420 bp, Zea mays
  Clone ID: MRT4577_131431C.1
aagagcgatataaaccccgctatacccgcttccttccgggaatctccggtgctcgcatcccgctccgcctccatgcgccgcggcagttccacgacgccagtcctctcacctctgtcctgacccaacacccgggcggctggaacccgcaggtgcgcttagtgccgctcgaggaggctcgccgtttgctggattcgttctgtcctttgccggccggcattgtgccctccgcggcggcgacaggggcgtgcgcggtgctgctgtaggggagggtgacggccatctccctggtcggccgcggcccgggctggtggcgtgcgaggaagacggattcacaaagcacggtgctccccaagtctagcagggtgtgttgtatggcttccacgctccagctgttgttttccattgccatcacagctttggcctttttcctccacccatgcgcatcgactgatgagttccaccgtgagctctacggttggtccaatggcatcgctacatggtatggcgcagctgatggcgctggaactgacggtggtgcgtgtggataccagaatgctgtggaccagccacctttctcatccatgattgccgctggctgctcttccatctacgactctggcaagggctgtggctcttgctatcaggctgtatgcaccggcaatgacgcttgctccggtaacccggtgactgtcgtcatcaccgacgagtgccccgattgcccgtgtcccgatgagcaggtccacttcgacatgagcgggacagccttcggtgccttggcgaagccggggcaggagagccagctgcgtggcgccggcgccatccaaatccagtatacccgggtgcagtgcgagtggcctggcgtcgacgtgaccttctcggtggagccgggctccaacccgaactacctggccgtgctgatcgagtacgaggacagcgacagcgacctcgactccgtggacatgatgcagacgcagggcgggacgtcggggcagtgggtgccgatgcagcagtcgtggggcgccgtgtggaagatcaactcgggctccgtcctccagggccccttcaacatccgcctcaccttcagctctggcagggcgctcgtcgccagcaacgccatacctgcggggtggaacgccggcgtcgcgtaccggtctggcggcgtggctgtgacgagggccaggcccaggagcggtgcctgtcggggctacgaggctgccgggacactggatggtttggtgcatcgtcacgtcgtcgtgttgttatttttgtttctggtgttattgacgctgggagccgagatgcgatgcaatttttttctggttctgggagcgtgcgagtttgggctacatggactgagtagctctgtgtatttttcttgcatcgcagcttagtggatggattactgcgtcgtattgtggac

SEQ ID NO: 34461 - DNA, 326 bp, Zea mays
  Clone ID: MRT4577_131432C.1
cccacgcgttcgcccacgcgtccgagatcgcgagcggccgttctttttttttttttttttgtttttttgtggcaaagaaataacaagcatatttataagaatatccattttggcactggaatttggccctacttcagtttactaaattatgatctgccacttcatgtcactcctgtcctgtgtacattcatcaagaacaagatgcagaagaacgaaccttaatctatctatgtatgtaaagcctaaactcccacccaaattaacaatggatcgatcaattggagtccaaggcaatcaatggtaacagcaacagttctatatatact

SEQ ID NO: 34462 - DNA, 212 bp, Zea mays
  Clone ID: MRT4577_131433C.1
ccaaccatacttgtacgacactaaacctaccggagcccaaatggggccctttggtcctgtggttcttgcgccacttactggcaagggcacttgaacgggagcagcgcccaccaaggacgaccgtcctcctgctccgtcgtcagcatccccacgggtgccggagacgacgccgccttgggcggaccaggtccacgcggttttggtcactatac

SEQ ID NO: 34463 - DNA, 232 bp, Zea mays
  Clone ID: MRT4577_131434C.1
gccgccgccgccttttctctgctgacgtcgccatgaggagaaagcctgtgtagatgctatcgacagatcgagaacaaggcataccccaagtgcgggtactgcggtggtgtccctgaccccaagatcgggacatacgatgttgggataaagagagagtgtggtgatgacttccactactgtgtgcaccttgtcgcttgagataaagagaaggtctccttggaccctctggacg

SEQ ID NO: 34464 - DNA, 290 bp, Zea mays
  Clone ID: MRT4577_131435C.1
ccaacatccccaacggcatcctgcagagcgaggccgccggcctctggtgggtgctcatcgagaccaaccagctggtgcgcaagaacttcgcccgcgtctcgctgcagtccaccatcgccatctcgcgcctggcctcgagcgacaccaccgactacgcccagctgctcaccagcctcgggcacatccagaagcaggccacgctcgtcttcgcccggcagagcgccgagatcaaggtgctcatgagccgcctgcacaaggtgatcgaggactcgctgcgcatcatcgagttc

SEQ ID NO: 34465 - DNA, 439 bp, Zea mays
  unsure (1)..(439): unsure at all n locations
  Clone ID: MRT4577_131436C.1
gttcgagcgtgaaacactacttgtgctcagtagccatgaatagtgccgtaacaggattacacgactgtgctaaaatcttttaaacagttgagggcccccatccagtctcctgcgttcttatatgttggatgggtgagaatacaactaacacatttgaacataaacagagagaatgcctaactgtatcacaccttgcngttgtacttttagctggtgcattgtnaccgncgagttcacgcctggctgccttcctcccttcctccttgtcgactattttgattacaaaggnctgaggcctcactaccaatcttagcccaatntccttgatgcctttgtaacaagatctactgcttcctctacgttcatgtttctggtggtacaactttgttcgtnagtagacaaacaggagccttcatcccgtccctcaaaagcacctttc

SEQ ID NO: 34466 - DNA, 603 bp, Zea mays
  unsure (1)..(603): unsure at all n locations
  Clone ID: MRT4577_131437C.1
ggattaattagaatagattccatcttgtgaatttgctatggtttatacaattatttttatataattatattatctttattgtcttgcgtgaaacgggacatacactatgtaagtaggttcaccgaacatggacatcactttgctcccttgtgaactccagtctccaatggggcagtgaccctgctggaaggagcaaccaagaaatatattgcactaatagcagtcgctgtctagctgacaaggcggttggatttctcctctggacaggctcacttcatgattccagctagtagctcactttcatcacggctcttgtgaacatttcacgttgtattggtcccctgcctccctcgccaatgccatccattcatcaccacaaatttctttctcttgaataaaatatgctacgcccataaagatattttccactctattgtgggtagctttcactcttttggttttatagctatgtgctgttactcggctgccttttttaattgatatgcgggatttaacaatgatactgatggtttattgacattgaaatctgatctctntcagggagctngttggctttctcaaaatagcagctgtggaaggcat

SEQ ID NO: 34467 - DNA, 1891 bp, Zea mays
  Clone ID: MRT4577_131438C.1
ggccgggaacttatgtacagtaacgttatctctcttcctcctttctctctctacctatctgttcccaagtatagaatataggaggagtatatttttttagagatcgttaacctctcacagtaatccctccttttgcccaaaacctaaaggaagccaaagtgggagcaccaaaatattcgcggcgggtgcatagttgtttgtttaggagaagacgaggttaagaggagatgaccgagccggcacctgcggcagcagcggaggagaagagggccgtcgcggacacggctgcggctgtggtggcgaagggaaaagagaaggaggaggcggcgccaactctggcggccggcgccagggggaggttcgtggcctacccggcgcgggtgacggagcacacggacgtggtggcggacgccgcgcgcttcagggcggcgctcgaggggctgcacgcgcacatgaacacgaggctcaaggtgccacccacgcgtccgaaagatttggatcttcatcagctatataaggaggtcacatcacggggtggtattgacaagttgaaggcagagaatagatggagggaagtgaccgcatcatttattttccccgccactgcaacaaatgcttcttttatgttgaagaaatactatatgtcactcttatatcattttgagcagctatacttttttagagtgcaaggctggtaccaacaagaaatagattccagaacgaattcctccattgaagttaaaaccgaagcccaagcttaccacaaaagaaaaaggggtatcaatgcatctctttcaggtccagcttcgtcttcagataatgttgacgtagatgtgatagttgatggcaaatttgaacatggctacataataactgttattatgggatcaaaatccactaaagcaatcctctataactgcactgaagaacctgctctaccaacttcggagctagctgttgcaagtaacaacaatgatttgaagggtggacgtcgccgaagacgacgtaagaagaagctaagtacaacagaccccaggcaccccaaaccaaacaggagtggctataatttcttcttccaggatcaacatagaatgcttaagccacaatgtcctggacaagacagattgatcagtaaaatgattggtgaacgatggaacaatctaagtcctgaagataaagctgtatatcaagaaagaggtgtacaggacaaggagcgataccggacccagctggctgcttatagaaagctgacaggccaacctatcagcaatgctgtgcctatcgagcagagactccctctgacagatgtgacgattgatgaggtagactccaaggtgagtgaaggtgatatgctgctgtcgaaccaagcgtacagcagcagtgatgaaagtgaccactcaggagaaaaaactgttgaagacgagctcaacactgaaacatctcctgaggtgagcatggaaacgactggttctcttcgacaccctgatccttgtgccgatgaggaccactttgagttgcggcggagagaaaaccccaaggcagatgagaaatataatgcaccacctgattcatgactttccgatttgaatgctatatctgtgaacgtatgaaagaagaatttccaaggggtgccgagctagacatacctgattgacttgcatagctctattagcagttagaatacctttcgttttgacagttctgaatttgtgttgctaaatttctttcgaacttaacaggtggctactggataaaattcccattatccagggatatgactggatggacacttgattgacttgcataggaagttggaagtatattctttcattcaatatgtgtcattaaagtacgttgttctccccccaaaaaattaaaataaacccataat

SEQ ID NO: 34468 - DNA, 433 bp, Zea mays
  Clone ID: MRT4577_131439C.1
cctccatgtacttaaaaaaggtcatttctgtttatgtagggcaaacatggctctcgaacccatcgccctcctgctcacggtgctcatcgtcgagccgctcacggtcctcctcctcttcctcgtcgccggcaacaagaaggccgctcggctgcttctcccacgccgcctcgccgccgtgatcgcttaaggctcccgctgccgccgtcgccgcggggcctcccgctggtgggccacctgcacctgctgggcgcgttgccgcaccgcgcgctgatgtccctggcgcgcgcgcacggcccggtgctgctgctccgcctgggacgcgcgcccactgtgatcgtgtcctacgcagccgccctcgaggaggtgatgcgggcgcgggacctgacgttcgctaaccggcccgcgagcgccatggccgagcgccttctctacg

SEQ ID NO: 34469 - DNA, 596 bp, Zea mays
  Clone ID: MRT4577_13143C.1
aaaaaaaaaaaaaaaaaaaaaaaaaaaaaaaaaaaaaaaaaaaaaaaaaaaaaaaaaaaaaaaaaaaaaaaaaaaaaaaaaaaaaaaaaaaaaaaaaaaaaaaaaaaaaaaaaaaaaaaaaaaaaaagggggggccggttttaaagaacccaactttacgaccccggcctggcaaaggtaaaacctttttttaaagggcccccaaaattaaattaacgggccggggtttaaaaacgcgggaacgggaaaaacccgggggtacccaaattaaatccctttgaaaaaaatccccttttccccagtgggggaaaaaccaaaaaggcccccaccaatcgcctttccaaaaagttgcccaccctaaagggcaaagggaaccccccctgaaccggcccataaaccccggggggggggggggttacccccaggggaaccgttacattggccaggccctaaacccccgttcttttcgtttttttcctttcttttttcgccaggttccccggttttcccggcaaagtttaaaatggggggctccttttagggttccaattaagggcttatacggccctcacccccaaaaaattggattaggggga

SEQ ID NO: 34470 - DNA, 748 bp, Zea mays
  unsure (1)..(748): unsure at all n locations
  Clone ID: MRT4577_131440C.1
ggccgcttttttttttttttttttgtgcttcatcaagttctgtgcttgctatcattgtttcctatgaacaaaaaaaaagtgctgtagaattacaacttgtctaatgccaaaggaagagaaaagcagtaaaaaaaaacgccataccatgccttctcatccaacaattctattgtttccttatgcctttttccgactatacagttcacaagttcagtcttacagtaacaaaacttcagctagctcacagggccaaaacggccgcaaaagcagcagctacgaggccaaagtacacaggttgcagctgcgcatctgctgcagatgtagtaccacagcactcgcggttatacgtgacattattagcacgagccgcgacttcgaatacggagccattagtcgagccctcgttgtaaaagtcgacgagtaggaaattcggtgggcggccccaatcactagtgcaagtgttggccatgagacccaaactaccaaatccctccaccccgttcgtctgattgatctgcgctacatttggtacgaggagattgaagccggcgaaagaaatctcggcgttcaggttatgattcgccatgtacaggatgtctctcattttgttctcggacatgccttcgggtctgccgagattgaaggggaagnttttggtccgtgggggaaaaaggtggtctcccacatgttgtagaattcccagaggagataggggacggcgtcggtggtcgntagttgtagtcgatga

SEQ ID NO: 34471 - DNA, 309 bp, Zea mays
  unsure (1)..(309): unsure at all n locations
  Clone ID: MRT4577_131441C.1
ttttnttttacaaagaaaatatatcaaccctaatatagttatatnagtaacatnaataatttatgcaanttccgcctttactctctgttgacccctttttttcattggtgtgtgttggatagtatttcttggttttatctttctntntgtgtgtgtgggtgtgttttgtaggacaagtgaacatacatgtaacaatttaaaagaaggcctgtaataaccagatcaattggagatgaataaacgtgaaattgtataagttgttttttgtttttttgatttttttgggtgtggtgtttttttttttgtttt

SEQ ID NO: 34472 - DNA, 495 bp, Zea mays
  unsure (1)..(495): unsure at all n locations
  Clone ID: MRT4577_131442C.1
aaaaaaaaaaaaaaaaaagggttagaataggggggggaaaaaaaaaaaaaaaaaaagagagaaaaaaaaaaaaaaaaaaaaaaaaaaaaaaaaaaaaaaaaaggataaaaataaaaaaaaaaaaaaatataataaaccatttaaaaaagaaaaaaaaaaaaaaaccttcccacacctttggggttttgcangtggggcaacataactccattcanancccttttctggggggaaaaaaaaaataattaacaaatacatacctgttctaaggacctatttggccaaaatattgtgaccagtacttcttgtgtttggttaaaaaattggccataaataaagccaatggttgggctgagtgacctacacaaattttacacagagcatgcgttaactgatgctaaaatgttatctccctaattactcagaataaaagatgttggagctgttgtacattcaatggagtgagccgatttagaggatcccaatttacttacg

SEQ ID NO: 34473 - DNA, 366 bp, Zea mays
  Clone ID: MRT4577_131443C.1
tcggagaagtattcggtcttgaagcgacctccttgattctaatatttgagatgccatcaagaagctgttgcagtggtctatatgtcattgacctgtcaaatgtttgtttgagttaacttgcaaatggaattgtgggatcctacattggctaaaggaattaagattttcttagcaacatcaactccactctttggacacgtagctactaattacaccgtgaactaccagaaggccgctattcagttgagctgcagtggcaatggatatggaatgcatgcaggcccttcgccaccacgcagagcagaagccagcaaatttgatgatgatgttaatccacgttacactcatggatatcaagggggtggt

SEQ ID NO: 34474 - DNA, 2124 bp, Zea mays
  Clone ID: MRT4577_131444C.1
ctgcacaagccaagtcatcaggtatattttagacgtaggattatgccattttgtttgccagtctttgaacaacttgttagatgcttcagaggctgggacaatgacgttgggagaagaatgtaactagctgttctagaggcttatttgcaagtgaattgctgggcatattcacatcttcatgatttgaagcctcaaggatgttcatatagcatcgatattggagctgtctcctgtgcaatgtgagacattccaactactacttggtatacttgtaagctgaagttgcttttacagtcgagaaacagaaccaaggtgattggtgtggaacaccactttgtagcattcacagtaacatagcattcctggtgttttaccttttcccagttcaggttggaagttggaactcttcgagtaggtcccagtggggattagcttcgtggcacttggtgctttcttaatcttgtgcagtcatgtggagggagaagtattcggtcttgaagcgacctccttgattctaatatttgagatgccatcaagaagctgttgcagtggtctatatgtcattgacctgtcaaatgtttgtttgagttaacttgcaaatggaattgtgggatcctacattggctaaaggaattaagattttcttagcaacatcaactccactctttggacacgtagctactaattacaccgtgaactaccagaaggccgctagtttcattcagttgagctgcagtggcaatggtatttccttctcagaaatgtggaccttgcaattataacttcgttcagcatatgaagagtagctcttctgaaagtagttctcatgaagtggttgcctgtttcagttccatgtgactggtgtaagcatttcttgctgaatgttagttggctttatcttttagtgcttatttggaatttttatacttgtttttcaggatatggaatgcatgcaggcccttcgccaccacgcagagcagaagccagcaaatttgatgatgatgttaatccacgttacactcatggatatcaagggggtggtagaggaggtgcaaggttccgagagggtcctccaccatatggaagaggtagatcatatgggagaggttatggtgctccacatggaaaggatttgattaatattgatggagaatatgttcaccgaaatgacccaaatctgtcgccaagagaaggtgattggatatgccagaaccctaattgtggaaatctcaattttgctcggcgaactcactgtaacaactgcaacaagttccgctattcagcacgtgaagcatatgaacctaggcgcagccctcccttcaggagttaccccagccctccacgagggcctccaaggatggttggtccacctggtgatcgagcccctgcaagagagatggccaggtacagatccccacctcatggttggggagcaagtgatcccagggcatatgcaggtcgatcccctccagaacgtgcaggacggtttacagatccatcaactaagggaagaatgggcttccgtggtgagcgtgacccaagggaccgtgtgaaatatgagtggtctgccactgatgactacgttcagagggagcgcccatatgatggttatcttgacaggagtcggcgtcgctcaggatctcctcgtggtaactggggaaatgatctgcgtgacagaagccgctctcctgcacggaacaggcctatgaagagttccttcaccggaagaggtcgacctgacgactatgctgctgatccatatggcagccgagggagacccaatggtatggaggccggccgtgggcgtgggcatgcttacagagcaggcagtggtccgtaccctggtgagactcgaggtgaccaacgcgctgctccacgcgctaggaacgaggatggctattagatcttcatgaagctgagtgacgtcattttgtctttgttggtcaggaaaggagaaccttagtcaagctggagcttgagaatatctgcagcttgtaatattaaagatcgtgcacacatcctgttcctgcatgttgtggagttatggttggcttctcttgaaaaaaaaaaaaaaaaaaaaaaaaaaaaaaaaaaaaaaaaaaaaaaaaaaaaaaaaaaaaaaaa

SEQ ID NO: 34475 - DNA, 417 bp, Zea mays
  Clone ID: MRT4577_131445C.1
gtatgtgaatgaattgatgtttggtttttttttttttttttttttttttttttttttttttttttttgaccaagcagaaaaaacatttttttgatttgacaaaaaactaaaatagtttgggaaaaaaaaatttggtcgtggaacttcttttttttaaaaaaaaaaatttaaggggcggaaaaacttatattaaaaaacaagccttttaaaatttttgggattctttaaaaaatttaaaatagggctttcttgaaaacccccttttgaaaaaataacaagaagggggttgctaactaaattttttcctacccaacccccacttgggggggggggaaaaagaaaacttttggcaactgttggaacaggttttggccatttttttaaaaacattaaaagggggtgttcccagggggaaaa

SEQ ID NO: 34476 - DNA, 178 bp, Zea mays
  Clone ID: MRT4577_131446C.1
acccaacactatcttcaactgttctcaacttcaagatctttccctctcaaacaatgttatctcaggcaaactacctgagctaattggctgaatgacataccttaaacatgctaacctgtatgacaatgcctttgcccgtttgaaccccgaaaacctcctctactctaccaaaccttaa

SEQ ID NO: 34477 - DNA, 326 bp, Zea mays
  Clone ID: MRT4577_131447C.1
ttcacacattcgtacccagtctactcgacacccgtccgagatgggccccacgttcttggttggtcgcaactggaaatgcaatggaaccacagatcacgttgagaacattcgtaaaaccctgaatgaacgaaatgttccttacttaaatgtcgataaggtccctagcattccttattatggagatctatctatagtcaagagacatgtacgtccagagttgcatgttgatgcttataactactatgtgaagaaactacgtgcattcgccaatgaaaatagtgcttacatgctcatcaaacttgtcgttgaatgcatagttcttgtac

SEQ ID NO: 34478 - DNA, 290 bp, Zea mays
  Clone ID: MRT4577_131448C.1
ctaattaaccaaaacttgggaacaattccacgaatttccatttttccgttcaaacacatgtccccactctacatatccaatccaattctacgaatttttcattacacatcagctaatcgcaaggggggggtcacgaagaagagaatggcggaacatggtcagactcagacgcacaaaccaaaaatcgaccggggaagaagaagaaagatggcaatctcacacacaagccggccggcagatccgtcggagttcaggtcaggtcagctttcacgcgatgacgaacaccctga

SEQ ID NO: 34479 - DNA, 315 bp, Zea mays
  unsure (1)..(315): unsure at all n locations
  Clone ID: MRT4577_131449C.1
cttgggttttttttttattataatttataaacctgcgccagattaaaagcgggggggaccactacacagacccgggggtgcaccccgaaataccgggacgggcccctcaggtagaccacgttcccctatagggagccgaaaggacgccatgattnacaaggggtataaacggctggccgcgagaaaaagtgaccactaacaggtgcacgagccacctgagccggaagtaccaagcggatgcccggcgcgccctaaggagggacataactgccactaataggactgcgctcactggccggtttccaacggggaaac

SEQ ID NO: 34480 - DNA, 700 bp, Zea mays
  unsure (1)..(700): unsure at all n locations
  Clone ID: MRT4577_13144C.1
atacagcactgttcccattccgcagccgtacgtaagaaacagcgtcaattcacgctaggtcgatggcccgcaggaaaagagcgcggatgccaagatgccgatgttcaggaacacactgacgaggtaggagcataacgctggacgcgaggctgtccctgacaatggagaacgtgaaaggccccatcgattacgaccagggaatgccgccgtaccagagatgcctcagcatcaccagagaacagatctggtgaggccgaagccgccgctactacgacagccggaaggaatcgaggatgactccgagactcagccacacttgaggagctccgatgtctccgaacagcacgaacgccaatgacgactacattgagcaccacttcaagaacgcgaacctctgcgtgatccacgtctagaacgttgacaacatgaccgaggacgtccaccttgtccgccaggagcgcgccaacgagcgactgagcatcgtatatcctgatgtccaagcactaccacagcaagtacagatgtgatggtggcctgcactagggctactgtcgaacgtgcagtagccgctgctctctgtctgtactgataatcatgatgcatgttaggtgacaatgcactatgctatgagttgtcgtgntgcaatggtagtagtttcttggaacagaacacctgtatctcttttggcgacngcttaatt

SEQ ID NO: 34481 - DNA, 406 bp, Zea mays
  Clone ID: MRT4577_131450C.1
cttgggtctacttcttgccatcaagaaacttaccaaggaccaagtacaaacgattattgagaaaattgccaaccaactatcggggtggaaatctgatttgatgactaaggctggatggaaggtccatgtgcagtttgtcctcacagggatggtcatatatctcgcaatggctgtggatttacctccttgggctctcaaagctattgacaagatccgccgaggctttctttggcgatggcgcaaagaagcgagggggggacactgtcttgttgcttggggaaaagtttgtcggccgcttgagcttggtgggctagggatttccaatctcattgatcttgcttgggcacttcgtatgcgttggttttggttagcaaaaactgatccgggacggccatggggcctcctt

SEQ ID NO: 34482 - DNA, 395 bp, Zea mays
  Clone ID: MRT4577_131451C.1
tcgccttttcttcagccccgagcagccgcgccgccagagctcgcgaaccttgccgccacctcgacttctccgtgtccgggacatcgggatgtcgccggcatgcggaacgaagccgccccaagtggatccacgccctccgccatcgcccgctctcccgccgtccttcctcacctcgaattggtcgcgccggtagccgtcgttgccagatcctagcttggtcgcccgctggaagatccagcaccctatgccttgccacctcgctcctctcaccgtcgagggcggcaggaacgacggagtcatgcatgtgtcggctcctatgtggcgcgtgcggagccaccggctcgcggaacggctgcaggcctggagcgcgccctgcctcgagcgaacgcatgcat

SEQ ID NO: 34483 - DNA, 126 bp, Zea mays
  Clone ID: MRT4577_131452C.1
atgacacttataatcaagcgcttcaagaccgccttgaagggacacaaggagtatcccaagaagaaaaaatcgaggggaaagcgctcctgcttcaagtgcgccttagaactgaaaatgctactttaa

SEQ ID NO: 34484 - DNA, 558 bp, Zea mays
  Clone ID: MRT4577_131453C.1
ccccctttcgagtttttttttttttttttttttttttttttttttttttttttttttgccccaccctcggatgctgcattcagttccaaacaaaaaaaattcctttacatatatcaaaccaaaaggtttggtccaaaaacgggggggggggggggggacaacagttgatgctggacacaaccccagggcggggaaaatcacaacacaaaacaaaaattcacagcaactgtaaggatgattaaaaaacaggcctcctcaataagtagggtaataatacccagtgttcccggggtaacccattggcatggggttcgcgttttatgccatgggcatcccctaaggcatggccggtttgggggcccggtcaaacctgttcaagctcaattgcccttgcatgccgtccctttgatactggtgccacataatttgctcctgcgtaaaaaactgttgttttttttccaaatctgccatttgcacataaaacggcggtggcacggcaagggaccccccgaagggatcaccaccaacagtttgcattgaaccatccggtgcgggcaa

SEQ ID NO: 34485 - DNA, 645 bp, Zea mays
  unsure (1)..(645): unsure at all n locations
  Clone ID: MRT4577_131454C.1
gtggacttttttttttttttttttgtcagagaccacgtacgtacgtggaaatgtcttacaatttcaaactctttgcgccctttgtgggcttttttttttttaactttgatgacatatgcaatttatttaataacttccatgattccatccagttggagtatcctctgtttaaaggagagaatgaaaaaaaattgatgaactaaaactaaatccaatgtgcctactctctcgtttctgtatttgtatctacattgcttcttctgcctcttgcatcaagaagcgtaaattctctatcctgatatgtcaatctatccatgcatatgcagcaggctatcttgaagaaggcattgccagcccgaccagcctcactggcgacagcatcctcctcctcttgtcggcctcggatatcgtctcaagccctggcgaccacggcctctccgcccgcgccccgacaagctgcatgtagtgcttcctcagctccggcgtgctgcacaggtgctccgtcgccgccgtgccgcccttgccgccgccgcatgacgtgatcaccttctcgatgaactcgggcaggatcctgatgagcggcgcgccgtcggagccagtgacgtactcgaaaggggacgctgcgccngccggcgaggggcacct

SEQ ID NO: 34486 - DNA, 1897 bp, Zea mays
  Clone ID: MRT4577_131455C.1
cccacgcgtccgcccacgcgtccgcccacgcgtccgcccacgcgtccgcccacgcgtccggacccacgcgtccgcccacgcgtccggtcagaggctctaagagttagggatgagatggttggctttggatgtctgccagatgtggtaacatacaataccctgttgaatgggctctgtaagcagcacaggttgcttgacgcggagaaacttttgaatgagatggaggagagaggggttacaccagatttatgcactttcacaactttgattcatgggtactgtaggcaaggtaacttcgagaatgcattgcaattgtttgacacactgttgcgccagcgtttgaggccagatgtcgtgacatacaatagtttgattgatgggatgtgcagaaaaggtgatctggccaaagctaatgagctatgggatgatatgcatgctcgagaaatcttacccaatcacattacctacagtatcctaatagacagccactgtgagaagggacaagttgaggatgcattcggttttctggatgaaatggtcaagaagggaaatttgcctaatatcaggacctataattccatcatcaagggttattgccgatcaggtaatgtaaaaaaggggcagcagtttttgcaaaagatgaggcaagataacgtattcccagatctgattactttcaacaccctgatccatggttatataaaagaagaaaacatgcatggagctttcaatgtgtttaatataatggagaaggaaatggtacggccagatgctgtcacgtataatatgatcataaatgggttttctgaacaaggcaatatgcaagatgctggtcgtgttttcaagggaatgggtgacagtggaattgaaccggatagatatacatacatgtcattgataaatggtcatgttacagctggcaactcgaagcaggcgttccaacttcatgacgagatgatccatagagggtttgctcccgatgacaaattttgaggcttgtcagttctgacctattggacataagcaagagaaatgcatgtgttgtgtgtttgacagtgtctttgaaaatcacacctccagaaatttgtgatttcgaagcgtcgaagggacaggtccagaaaaaaggggagattgttaaaattccattacttgggagtgaccgcacgaactatggtaatgttggcatgttgctccaactatgttctaaagattccatggcgtggctaagcaaaactgctgcacaaaaaggaaacagaatttgactggacgtctgaatatcttcccttcagtctgagctccagaccagagtgcaaaaagaaacattgaaccaatggaaaaatgaataaaagaacaatcagtaactacagtgcatgtctgaagattctcatgggcgtgggcatcttcctccaggattgttgggatcaaatgtgcagccagacgctccaggcatcgaggatgtcagggacaccgagcttcctcgttgtggctgtgatttctctctcaggacacggaatgcagcgatggtagtggcttgtgccgccagggccaggcagataatgagaaccagaggtagaacttggtttctttggaacatcgtggtatcttgtgaacttcagtatcgagtgagatgcgaagctaggatttgaggctattatatattaagtttatggtctgcgtgtttgtttccttggcgatcacggtttttacgcgttctcccatgtggacgagtattcacaaggttgaccgcatgtatacagagtcgctcaactcgtcgtgaacaagttcacagaaggatctctgttgcacaagcaaaatgtatttcagaagtagaaataagatcattggttactgtgtcgcaatttcttccttaggaaaaaataatccacagcaataccac

SEQ ID NO: 34487 - DNA, 641 bp, Zea mays
  unsure (1)..(641): unsure at all n locations
  Clone ID: MRT4577_131456C.1
tcgaaaaaggcggaccatttgctgcatcttttcgcacgcgcagacgcacatggtctgcccctccgccggctccgcgggctgctgcccatccatgtcgcagcaagaatgacgcctgggtatgttgctgcgtcactggccacagcctttgcgcattgcatacctgcgtgacagattaatctctgacaagaacggatttggaggtagcagccgcaagactgtttctgaaaatgaccgccggcaaggcacagacaacaagctgccaggtcatgccctcgcactgagtgcaacaccggtctggaatgaaccccaataactcgacagaaattcatccccaagtccatctgaaaatactcgccctacagaacctgcgtctgcgacttgacgccaccatgaagacagacaaccttctctaacgacaaatatcaattagtaataaaatgatgtacagtcacgatcttctggcgaacctcacttgatctgtgaaccaacactgctgctttcaccttgtcatcccatgggctgctgcttcctcgacgaaatctcccaccatccaggaaacaactgngatgtacctcataatacatgattgttgctacacagcctctgctgatggagagaatcgtataggtatcagtatatca

SEQ ID NO: 34488 - DNA, 624 bp, Zea mays
  Clone ID: MRT4577_131457C.1
ccggccgggagacgcccacccacacaaatcccagatcctcagcaccacaccatcccgcccaattatacgtctctctgtcactgccatcgcacgccaccgagacaacagcaacccccaacagcgccactgtgccagtcgcagcgcgtcaagcttgcttagctagccgcacatgggctccctcagccaccgactccctgaaggccgtgggcatcaagggtctcggcggcagatccatctccggaaggaagctctccggcgccagggcgtcaggccgatccatgcgcaagacccgcgcagccgtcgcggcggaccaagaacgccacaatagcggctactttgaactccaagacatcccgaacaccaccggaacagtggagaactctacggctcatgaagcgccgagcggcctacaacccgctacagagcaaatgtcctccatacggtccccccttcgttcacccagagaaggctgctggtccaagtcctgctgctgggaggaggttcacttctggtctaccttcaagcagcaggtgaacggacctcccgtgcgatctagaagggacctcacgaaacgccgcaatcggggccgggcggcaagaactaaactcagcttctccatttgca

SEQ ID NO: 34489 - DNA, 365 bp, Zea mays
  Clone ID: MRT4577_131458C.1
cgtctagcgggcctcttttatgcacctttttttcaattgaggactcagcggggccaacggagctgactactaccatggcccctttccccagaggaacacatacctggaatggacctaagcaccgactgagataacttcgttcgacactgcaggacactgatagtctggatcttatgtatccacactgacgacagaaaggtatccccatgctggtctgtatgtctagctggattcagcctgaaacctgaagctatacatgaagaatcatatacgtggtctctgccaaaactggttcggtggacgtgaagagataacaccctgtgccccaaaaaaaaacttacgtatttgggtcgaccagattaggc

SEQ ID NO: 34490 - DNA, 225 bp, Zea mays
  Clone ID: MRT4577_131459C.1
acggcaatcacaaccatcaaaagctctcgatcttacctactccgatgaagaatagatcaatggggtgggaccaagcagtggtgatcgccttccacactaaggctgaatttgactcccacatgaccaaagcccatgaagccagcaagctggtggccattgacttcactgccgactggtgcggtccatgccgcgccattcacccactgttattctaacacgccaaaa

SEQ ID NO: 34491 - DNA, 912 bp, Zea mays
  Clone ID: MRT4577_13145C.1
ccaagtccaaaaaggccaaccaaaatggagccgaagaactcccggttagacagcgcggccaccagcccgtacgccacggcgccgtccagcccgcgcggccggcgccttgtcccctccgagggagcggcgggcagcctattcctgacggcgccgccgtcgcccaacccgctcgacctcctgccgccggccaccccgcgcctcaccggcaccggcaccggcgccgtcaacccgttcgatctcttccagcacttcaccagcgcgcccggcagcccccgccgcgccgcggccatatacgcgcgcttcgccgaggggaacgagagcggcggtgacgacgacggcgacggcgacggcgacgaggagtttcagccgcgccggacgtacgccgcgggcgggtcgtccgtgccgttcgactgggaggaaaggcctgggacgccgaagaggggacttggcggggccggggccggggccggggccgtggctgcggacgaggcggcgtgggccacagaattcgagttcggcaaggccgcaccggccgagacgcttacgacggccgacgagctcttcgagaagggcaagatcagggcttcgaagccgacgcccaagacggccgacgaacccaaggtccgtccgctgaagccgccgcccgggctgctcgacggcgggagcgtcccgccgtcgcctatgggtcgaggcggcatgcggcggaggagcagagcgagctccggtgtcgacttcgacccgttcaccgccgcgctgctggaggcaaccaaggcgccagcgccgtccccgctcggcgagcccaggaaaccggccacgcgtgcgcgtcccgtgccgaggagcgcgagcgccgggtggagaaggtggcggcggctcagcctcagcgacctcctcctgttccgaagctcatccgac

SEQ ID NO: 34492 - DNA, 345 bp, Zea mays
  Clone ID: MRT4577_131460C.1
aaaataaaaaaaaaaaaaaaaaaaaaaaaaaaaaatagaaaaaaaaaaaaaaaaacaaaaggaaaaaaaagggtgggggggaaaaaatgatcgagctgccactctttcatacgaaaagaccgatctctggtacatagtattgcgacctcactctggttgtctgggggcactctggtgcttgcgctctgcgtcaccactgctgcacaactctaaactaccccctgcaatgcaaagttatactgtttcctgaacctgcctcttgcagctgctgagacgaaatgcctgcgggccccccctttagacgtccccaacagtggccccccctggcgggcgtttgggacgctc

SEQ ID NO: 34493 - DNA, 458 bp, Zea mays
  Clone ID: MRT4577_131461C.1
gaacgagcagcctccagtacgagccagccagtgaaactaataaagctctcgtcgtcgccatcggagctaacacgccaaccgaccccgtgcccaaggcaatccgccgacgacgtaccaccaccaccgcaggagcgagatggagatgaagaggatgctcttcgccgtcctcgtcgtcatcgacgcctcggtcaccgcagtgctgtcctccaccgaggtcgtcgccgcggacaccccaactgcctccgagtcgtccgacgaggctgccgctagcgctggcgctggcgctgccgctggcgccgccgtctcgatgccctccgtcagcagcggcacgaccgccctagacgccgagctcgacgcgctactcttatacctactcgcctactagctccactaagcgtgtgcgtgcgtacgtacgcacgcatggacgacgatggatccggacaacgttgacattgcag

SEQ ID NO: 34494 - DNA, 462 bp, Zea mays
  Clone ID: MRT4577_131462C.1
aaaaaaaaacacaggacctgaacaaaaaaaacaggcgccggccaaaaaacaggggaggaacaaatagacaacagccaaaaaaacaccgcctaagcggccacagccaaggctcggagttaaggaccaagagtatggtacccaaaaaaagaccagcctccaggaaaaaaggacccctaacctagattgtttcgtccaaggaaattggcggggccttggaaagaggcgcccaaatataacaagcccctgccaaaagaacggtaggcggcatatctaaaggaaaggccgatttatcaaaaaaaacacaattgacaacgcccaatacaagggcttaggccggacccaaaggattaacgcagggctaccccattaaaaaaagccctgaaataccaaaacacgtttgattgatataaacggaatgccgcggtctttttgaaacgcccccccacccttagcgcggccggt

SEQ ID NO: 34495 - DNA, 389 bp, Zea mays
  Clone ID: MRT4577_131463C.1
ggctacctgacaagcacggatcctctgctggtgtcctgttccgacctgtgccagggataggaccagcactaagcggtcagggccgcgaggtacaccccgatgcgccagcacttggtcctcaagatgatcagctaggtcaagttcgcgcaggagaaggacgcgcgtcgattcatcacctaccccatgttggccatcacggagcttgaccggaatcacgttctccatcacaggatacatgtacttatacagcgggacgatcaccctcttaagctggtcatacatcctaatgtgtttcacctgtatgaggtttttgctcgcaaaatgaacatatattaggttcttatatttgttggtgtttatgagctttttcggtacgtatctttaatttt

SEQ ID NO: 34496 - DNA, 404 bp, Zea mays
  Clone ID: MRT4577_131464C.1
ccggccgggaactcaacttctcgcgctgatccccctcctgtggctgtttcctgactctctgcatggtgtgcgactctaggcaatggattcaatagtcgaaaaaggggaggatgaactccggcgtagcggtcgaagcacgtgggtttcgtccggcaggtagattacgcatgcgttccggctcttggccatcgtagcccggcttcatcctcgtatccctgaccgttcggcgttatctcacaacgccgagtccatcctgtccaggctcgacgcgaaggtgccgcagcaccaggagctcacgtacatcctgatccagcacaaggctaactccacccccgtgacactactggagaccaccaccgacatactgcagcttacacagtaaagtgaacgataccaagcgcgat

SEQ ID NO: 34497 - DNA, 623 bp, Zea mays
  unsure (1)..(623): unsure at all n locations
  Clone ID: MRT4577_131465C.1
gtgcggcgctcgaggcggccgttcgggnnnnnnaaaannnnngtgctcggctcggctgtgccacgttcccccgcggaatggcctcgtccccgcccttcacctcgctccggctgcccgtgcccaccatcataccgcgctgtgcttctccgccgcacggcgtgccctcggcggacgacgccgtccctcggccggcgcctctcgtggcggccgctagccacaggagggagctggtgggtaggggcggttgctgaccgctgngctgntgccgagggcgccgctgccggcccaggcgcgcgaggtcgcggncggcacgtacctgccaccggcgccgnccaacccgggcttcgtntttttccgcgccacccccaaggacacccccgcgctccgcgccggcaatgtggagccgtacgaggtcatcctgccgccgaccttggaagcagacgcgcgttgccaacatcctgtccgggaactactggcagcccaagtgcgcccagccgtgggtggagggggaggttcgaggccaaaagcagggcaaggggcagggggggggcttgnccgttattccgctcaccaacagcccaacgcgccgatgcgaggacattcgggagccccgagaggggtga

SEQ ID NO: 34498 - DNA, 467 bp, Zea mays
  Clone ID: MRT4577_131466C.1
ggaatttttggttcgacccacgcgtacgcggacgcatgaggaggagctccccaacggttactacttctacttgctacaccaatgtggtcaccaccaccgacgaaggcgagtacgaaaggtacaagaaggaagataaggatccctagcacaagcagtatctcggcgaggccggctccatgagaagcgggacctttactctctacgagaagcactaggcgaagaactatccccagcacgcgcactggaacaatatctccgcagaggtcactggcgcctcggccgttggggccctgagctacctattgaacgagctcctcgagaagaacattgaccaccacgtcgccggggaggcttgcccccagaagtagctccaccacctcttcagctgaccgtagtacctggcggagcgcgaccgatataggtagctcctgtgcacacaagcactcacctgtttaattctgtactgc

SEQ ID NO: 34499 - DNA, 468 bp, Zea mays
  Clone ID: MRT4577_131467C.1
cacaggctgccgaatttaattttgcaatggccggagccggatcgaaggccctcgccggggccgccgttctggcggacgtgtccctctcattggccgccgcgaacgaggctcccgcgcccagccccgaatccaccgccgtggccgagtcgtcgcccttcgccgcggccctcgtcgcctacgccgccgccttcctcttcgccgacgtccgccactgagccgatggggcctcgtgcctgcaagctacctagcagtacttcccccgccgccgccgtcgccgactagatctataaataggagagctatccactattactaagaaaaaggagattagcacggtgctgccgagtcgtcgacgcaattaggacggaactggtttccttgacgcaaggagggttactataccaaagtcccggcgccggatgggagatctcatcccccccatgaaaatagtactctgctatctcgtcg

SEQ ID NO: 34500 - DNA, 146 bp, Zea mays
  Clone ID: MRT4577_131468C.1
caaccactttttaagtccctgcagtcacttgtgcatatcatatacacaagtgactgcagggacttgtgtatatgatatgcacagtttagctaccctcggtggctctgttaacaatcgactttatatgctggatatgcctagtagtt

SEQ ID NO: 34501 - DNA, 346 bp, Zea mays
  Clone ID: MRT4577_131469C.1
gtatgtagacttactttagagtgtaattcactcatttcgctccgtatgtagtcacttgttgaaatctctagaaatacaaatatttgggaacggagggagtagccatctattagtagggttgtgtttcatgaagtgggagcagatccctctaccagaatctgtgctgccactcatctcccatccgatggcccaggtttctttcttctatttttcgcacctgaagctcacattttatactggccgcgctactcggtgagcttggtgctacctcaccaactgtgtttagactctcgagcttgtcccttgtcagtgctaacaaggagctgtcccacgttctggctttata

SEQ ID NO: 34502 - DNA, 532 bp, Zea mays
  Clone ID: MRT4577_13146C.1
cagcgatgcgtgatcaaaaacacccggtgtgggctttctctgaaaaaaaatccagcgggcaaacaggcgcgcaagtgaacagaacagcgacctgagctcatgacacgagagcgagatcgaaatcgcccccactgaaaccagaactgcggagccgagcggggatccaacgctgacgacgtggcgggagaggtgggcttgctcttgctcacggacacacccacagctccaacattgggtgtgtgaggtgaaataaaatggagggggttaaccgtgtgcctttttaggcttttactagtttaaaatgcaagtggcgcgatggccggatggcggcatggggccagcgtggccatcgtgcttttgcggtgggggggccggagactaaagggagaagacgcctcaagccagcgatgaaaggagcctaagccccctcgtctttactcgtagccaacgataaaaatctgaggccccgtgcttatccggaatttataccattgtgtctgaaataagcatatgccccgtgccattgattccc

SEQ ID NO: 34503 - DNA, 256 bp, Zea mays
  Clone ID: MRT4577_131470C.1
accggcgaagagcggtgttggatcgcgatggtaggcgagctcgaggtagccgtgatgtgactgttgtggaatcccggagtcagccttctagctcgaagggaagggaggagtcctcgagttcgtcgagaggcgggtcaaggagaagcggcagatggtcatcgtggtgggcgagggtgctggggcaggagctgatcgggagaagtaggaatttcgtggagagccaagacgcttgtggaaacaagtggttctggatgtc

SEQ ID NO: 34504 - DNA, 565 bp, Zea mays
  Clone ID: MRT4577_131471C.1
ccaacgattctgtccgttttcatcaccaatgtctttgtctatttcctgaagtataaatattttggtacgctacgtgctttcctactgcacgaataatagtgtaacatggagtattccaggcaaaattttgggacatgcgtaatcactgaaaatgtgactgtccacctgtgccgacaatactgaataatctcaactactcaacagctgtgatgatggcatcatgcgtaatctggcatgaacttcctaaggaatttgattggttgggattcctgaggcgcgagctcatcgaacggaacatagtatctctccttgtcgtacacatggcatctcgtcagtatcgtcttcatcaatcgccaattccagttggcttcattgacatacattgaggatagttacaatgaactgtgccgtttaattgagcttgtgcagcattccattcttcaaatgacttgaatggtatatgaggagccaaaatgataaaccatccatggcatgaaccagaacttaaaccttccagcttgtcctgatttgagaatgatcaagggccaaccaatcgccttgaatg

SEQ ID NO: 34505 - DNA, 1791 bp, Zea mays
  Clone ID: MRT4577_131472C.1
cattggcggctcctgtccacaagttcatgaccctcccccccacccccagtggcggtggcggcagacccgccgggcagctggaccgagccgatcggtccggtcccatctcagcagcccgcggcgcctgcccaccctctcagccaaaagccccctgcacccagtccatccaaacctgtgtccgcagctctcgccagccagtcgccgccacgagaggggatgtcgacggcgagcggcgtatccgctggctccgtgctccagctgccctcctttcgggtgccggccaagagatttctgcctcggagaacagccgctggtgctccggctggtaacttttttgtgaagagagatattatatataatagaagctaccaccaattcttaccattgaagcatataggaggcttgcaagcagcagtacttccagttactccaccactattagatggtgaggggaaaaagaaacaaatggctgaagagtatgggttcacacaaattggagatgaactaccagatgatattactcttaaagatgtcatggatactttacctaaagaggtatttgaaatcaatgatgtgaaggcttggacatcagttttgatatcagttacttcttatgcgctgggtttatatttcattgctaagtctccatggtatcttcttcccttggcttgggcttggacaggcacagcagtgactgggttttttgtgataggtcatgattgtgctcacaaatcattttcaaggaataagttggttgaagatgttgttggaaccttggctttcatgccattgatatatccttatgaaccgtggagatttaagcatgaccgacatcatgccaagacaaacatgttgatagaagatactgcatggcaacctgtttggcaaaaggaaattgaatcatcaccttttctaaggaaggcaattatttttggctatggccctatcaggccatggatgtctattgctcactggttgatttggcactttgatctaaaaaaattcagaccaaatgaagttccaagggttaagataagcttagcatgtgtgtttgcattcatggcgattggatggcccttgatcattctcaaatcaggactagctggatggtttaagttctggttcatgccatggatggtttatcatttttggatgagcacttttacaatggtacatcacacagctcctcatataccattcaagtcatctgaagaatggaatgctgcacaagctcaattaaacggcacagttcattgtaactatcctcaatggatagagatcctttgccatgacataaatgtgcatgtcccacaccatatttctccaagaattccaagctataaccttcgtgctgcttatgattccatcaaacagaactggggcaagtatgtcaatgaagccaactggaattggcgattgatgaagacgatactgacgagatgccatgtgtacgacaaggagagatactatgttccgttcgatgagctcgcgcctcaggagtcccaaccaatcaaattccttaggaagttcatgccagattacgcatgatgccatcatcacagctgttgactagttgagattattcagtattgtcggcacaggtggacagtcacattttcagtgattacgcatgtcccaaaattttgactggaatactccatgttacactattattcgtgcagtaggaaagcacgtagcgtaccaaaatatttatacttcaggaaatagacaaagacattggtgatgaaaacggacagaatcgtgtggaaaataaaaaaaaaaaaaaaaaaa

SEQ ID NO: 34506 - DNA, 795 bp, Zea mays
  unsure (1)..(795): unsure at all n locations
  Clone ID: MRT4577_131473C.1
ttgggtacctcgaggccggccgggagagttagtcagaggacaatatttcattgaagtttcagcaacaaatatggaatgctttttttttggatatttntgggataaaggattcatgttggcttaagtgtcaatcttctactagcaaatcaatttctagtgaaattaccgtgggaacatgttggcctcttcaattgaattttcaaatgagtaatggatttctattacaggatagagatcctttgccatgacataaatgtgcatgtcccacaccatatttctccaagaattccaagctataaccttcgtgctgcttatgattccatcaaacagaactggggcaaggtgatttgaaattctcctactctggtgcatttctccggatctttacatactgacttattttctcatgctgcagtatgtcaatgaagccaactggaattggcgattgatgaagacgatactgacgagatgccatgtgtacgacaaggagagatactatgttccgttcgatgagctcgcgcctcaggaccggccgggaatcaaattccttaggaagttcatgccagattacgcatgatgccatcatcacagctgttgactagttgagattattcagtattgtcggcacaggtggacaatcacattttcagtgattacgcatgtcccaaaattttgactggaatactccatgttatactattattcgtgcagtaggaaagcacgtagcgtaccaaaatatttatacttcaggaaatagacaaagacattggtgacgaaaaaaaaaaaaaaaaaagg

SEQ ID NO: 34507 - DNA, 1559 bp, Zea mays
  unsure (1)..(1559): unsure at all n locations
  Clone ID: MRT4577_131474C.1
aatacaaaaactcccgccgccgccacccgtgcctcctcttcctcctcgctctctcgcgcacggggctcgcgtccgaaaccctaacctcccggacgcgtggggaaggcctgaaaagcaaaaccgtagaagatcactacttcactagctagggttttcatccgtgacgaagtggtctatataaaagggcagaacccgagcccggccgggattcggcgactatggcggcggcaccggcaggcggcggccctcgggcattgtcccagcgggagcaggacatccagatgatgctcgccgccgatgtccacctcggcaccaagaactgcgacttccaggtggagcgctacgtgtacaagcgccgcactgatggtatctacattattaaccttggaaagacctgggacaagcttcagttggccgccagggtcatcgttgccattgagaatccgcaggacattatcgtgcagtctgctaggccctatggccagagggctgtcctcaagtttgcgcagtacactggtgcccatgccattgctggcaggcacactcctggtacattcaccaaccagttgcaaacctccttcagtgagccacgccttcttatcctgactgacccgaggactgatcatcagcccattaaggagtctgcgcttggaaacattcccaccatcgccttctgtgatactgattcccctatgcgctatgttgatatcggcattcccgccaataacaaggggaaacagagcattggttgtctgttctggctgctcgcccgaatggtcctccagatgcgcggtacaattcttccaggacacaagtgggacatcatggtagatcttttcttctacagagacccagaggaagcgaagcagctggaggaagaagaggctctggttgcactggactatggcgcggttgcagaatacactgcaccaggcgctgacaactggggcggtgaatggggtgctggcgaagctgcagctccagctgctagcattccagctgctggcgcagactgggctgctgctccagctcctcctgctgacggtgtctgggacgcagctgtggctccacctccagcagcagcccccggatgggaacaaggcgcggcccccgttgcggcgtcgacccctacctgggagtaattaataaagagtaaatgagcatggtggatggtttatactagtcatcagcggagcttgttggtaggcacttgctggagtagttgcttcgaacttctttttttcgtgttagatgaggtaaaaaaacaattttgtgttattgactctgctgtgagcgagtgaaccttgcacattttcgttatctcaaatggatagatctgttctacgctaaaaaaaaaaaaaaaaaaaaaagaaaataacgacaaaggaagcctcgagacctcgtgcgttttgtgaaaaaacaaaancntncttattttttatttttttatttttacatctatccctattttttttnttttatatttgtttttcaaattaattaatatcaaaactaaaccaaagtgtgttttttaaaaaaaaaaaaaagggggggctttt

SEQ ID NO: 34508 - DNA, 736 bp, Zea mays
  Clone ID: MRT4577_131475C.1
agccggccgggctcagccaaaagccccctgcacccagtccatccaaacctgtgtccgcagctctcgccagccagtcgccgccacgagaggggatgtcgacggcgagcggcgtatccgctggctccgtgctccagctgccctcctttcgggtgccggccaagagatttctgcctcggagaacagccgctggtgctccggctggtaacttttttgtgaagagagatattatatataatagaagctaccaccaattcttaccattgaagcatataggaggcttgcaagcagcagtacttccagttactccaccactattagatggtgaggggaaaaagaaacaaatggctgaagagtatgggttcacacaaattggagatgaactaccagatgatattactcttaaagatgtcatggatactttacctaaagaggtatttgaaatcaatgatgtgaaggcttggacatcagttttgatatcagttacttcttatgcgctgggtgtccatctcgccgcctacgaacaccaacatgatcccgagcatgtcccggcggccattgcagcaggaagcggcaagaagccaaggacgatcagggtggcgtcgcctggcgttgccattgagggatagacgacgatgcatatataagcttcctacttttgtttcgatgcatgcatgcatgcatgctgtgtatctgtgtccatcggctgtctagcattatcatcatcactgtctgcaac

SEQ ID NO: 34509 - DNA, 417 bp, Zea mays
  Clone ID: MRT4577_131476C.1
ggatccctctcgcgcttctgcgcagactccaattcttcaccacgctctcgcctgtctcctccgctccgaattcgacacacagcgctgtgatcttcgggtagatctagtggggccccggagctgcccccgcggctctagaagcatagcggcggcggcggcggcgggagaggtagctgcgacagtggggttggtgtgttgctggggggcgcgcgatggcgtaccgggcgtacccgccgcctcagggggccttcccgccgcaggctcggactgtctcgtcgtacgggccgccgtcgccgcggcgggcatggaccccatcgatgccgccgtccgaggtaagcgggtcattggacggaggctcactgattcgactggcgagagggatattaagcggcgaggcgtcaaggttgtcgctggacc

SEQ ID NO: 34510 - DNA, 151 bp, Zea mays
  Clone ID: MRT4577_131477C.1
gcgttctcttggaacgcgccgcagaacgaggttctggtgaccctagccgcgttccctccttagtcctttcgcctacccacccgcgtacccgacagacccaccccgtcctgtgccaggaaagcgctgccaccggcaccatgccccacccata

SEQ ID NO: 34511 - DNA, 328 bp, Zea mays
  Clone ID: MRT4577_131478C.1
ccggattcccggtcgaccacgcgtcggagcggtttgactctgagtctggcacgcccccacccacacacacacatgggttttaatcaatgccagcggagaactactttgctcggaggaagaccaccaagaagctagacgcgtgcaatggcgaggcatgcgaaaggcggagcggagctgcacccgcgccgctcggcgccgcgtgcgaccggtcaaaacggcggagcagacgtgcgttccacgagctgtcgttccggcccctggactgctgtcatggctgcggagccggcgcctgtcacgcccctatgccgcttttctctttcgcagctct

SEQ ID NO: 34512 - DNA, 338 bp, Zea mays
  unsure (1)..(338): unsure at all n locations
  Clone ID: MRT4577_131479C.1
agttgctagtgaaacaagaaaaggaaggaaaaccgcggccgccgcgccttccattccagtactcgcggaggaaaagaacacaagccagncgcaaaggtcacgtcgacgaccngncgccgccgtgctgtccccgccgtccgtggccgggcttcgcctggcgccgtctccccgggcgcgcgtggngttttgngnggngttctggtttttttcttgttctttttcttccctctgccccgttgttttttgattattccggcgcccctcctcatttttccgtacgtttaatgaataataaaaaaaataaataagggtaatcacgcattattaatactttaatt

SEQ ID NO: 34513 - DNA, 553 bp, Zea mays
  unsure (1)..(553): unsure at all n locations
  Clone ID: MRT4577_13147C.1
gtagcatgcanaccttcagcagttgcattaagcaaaagcagtcacaggcatcaaaggtacaaacgataagtgaatatgcaagatatcttctgagccatggtgtttagtgttcttgttccttggagaaaccatggtgtttagtgtaagtagaagccagcctatgtactgagatcttagttatggaccatgtgtcgaatttgctaaacttctgttgcctgcctcatctggggaggcaattaatcttagctttagtgtggatacagtagttccatatttttcagcccctctgtgatatatagatgtttggcgggtgggcgcttttattttgctattatggactcattgacattgtgctttggtaaagaaatttgggcttaccgttgaaaaaaaaaacacactggtgttatctgattactatgctgagtatgacaaaaaatataagttaattttattttggcctcattggcatggtattcttgcttagcttcacatgtctattttttatcatatagtttgctctcaaatgcaaataataaaactatggattacactc

SEQ ID NO: 34514 - DNA, 319 bp, Zea mays
  Clone ID: MRT4577_131480C.1
gccgcatgcactgcctgccaccacagaataatggagcggcagactcgattcgtcctgctcggcttcgccatcggggctctcctcgccagctgcgccgcctcggtctttgcttgtcgctggctgcttcggtgccaccgccgccagggccagccacgcccgccacaccgacgccgacgacgcgattcgtctccccagcagctttggcgctggtggtcgtacgtggaattgctgcgactccgctatcaaggacgcctccctgccggcgtgcagctgcaacgacgcggtgtacaagtgttccaccaactgtaattactgatag

SEQ ID NO: 34515 - DNA, 633 bp, Zea mays
  unsure (1)..(633): unsure at all n locations
  Clone ID: MRT4577_131481C.1
ggtacctcgaggccggccgggatgctggcagcttcaccaactcgtggtgcaccactatacataccctctcgtctgatccaaacggaggaaggaggaagaagagctagctatccgagagagagggagagggtagagagatggagagagcgaggaatgaattgaagaaccgagggatagctatagctatatatatatgggatggggaggccaacgtctcgctcactcgcagcgtattttgatgcccttttttatttgttgcatttcgatccattttcttttgtcctgcgcctttttcgtacgatgtttgttgcaaggataagcctttcggagctggaggtgacgctgttgctggactggagtggactggagccgtgcggctgacggattgcactagtacgtacaaggaaacaagatgaggagtggcacgctaacgcatccgatgaactagtagtgcagtccgccgcccgtgcgtagagcgtagaattatcaactgtgtctcctatttcaaatttcggagttttgcacaaccacatatataatatttgcacgaccatatacacgatttgctatctgctctctcgtcccatactnttaaactccactatatataanaaaaaaaaaaaaaaagcggcc

SEQ ID NO: 34516 - DNA, 375 bp, Zea mays
  Clone ID: MRT4577_131482C.1
taaaaaaaaaaaaaaaaaaaaaaaaaaaaaaaaaaaaaaaaaaaacaaacacggagccagggtaaaaaatccaagataactaaccctaccatacaaaccacataccctcttttattacaaacaccaagggggggtggactgagggggtctcacacaactttcgcgttggtaaacctcttacttttttcatctggccccctaaataaaaaataccgcccctctttttcccccctccgacctggaaaacccctggcgttccccaatttaactgtttgtaaacacttacccctttctgcggctggcgttataacaaaaaggcccccccccatgctcttttccaaacattcgccaccttcaatggattatggaaccccc

SEQ ID NO: 34517 - DNA, 534 bp, Zea mays
  Clone ID: MRT4577_131483C.1
agcagtggtacaacggggagggcttggttttttttttttttttttttttttttggaaaataaaccacttaggtaaaaaagggcaaggggtaccttccagattcttccccacaaaggtcctattacttattccccataatagcttgttcaattccaacacccaaccttaagttcgggggggaaaaaaacccagtcccaaaaccggtccattttccacaagggcccaaaatcaccttattcgtaatggccctcctcctcgccctcgttttcctcctaatttgcaggggcttcctggacctgttggtcctcaacccccaaatcgttctttttgttttcagtttcagggaactccttttattccttcccttaaccagtgtcccaatgcagaaaagctttcttcctgaacttaccagggacctgttccttcacccggggaaccttttcttggttgaggggggaattcgccattgagggtggagcccttggaaaggccttttgccggtttttcccaaccattggctttccctttgttccc

SEQ ID NO: 34518 - DNA, 829 bp, Zea mays
  Clone ID: MRT4577_131484C.1
cattgggtacctcgaggccggccggggtagccaccagcaacatagacaccggccggcggaccgttgcttccactactaatgcttcttttttttatctcctgaattcaggttcgtctccctcctccgcctcctgccctgcctcgtccctcccttccctgtccactccgcgtttcctgcagacatgtgcgatccttgaaacggtccacgctgccatcggattggtgccgaccgcgccacttcttgctttcttgcaatggggagggaggatccacttcatcctggctgttgtccggcaaattcccgaggttcagagcagtccatctgtgttcataacatttatagcttggagcatatctgaggtgcaagttgtgtccgaaagacatttcatttcattttgtatctgtattgtactattgtgttctcattctcaccaacaactgcaaataatgtctaatctatatggtgtgatgtccttactcccgagctagcactagcagtacacagtataatttgtctaatcatgttaaggaaaaggtaaaaaatgcctttgttagtgaatagtgattgattactcttgtacctattcattgtcatttaaatatatgaagttttatggagcttgctcatataacagtataacaactctttcagcaatatcagagtagatagtctgttgaaaacgaattgagttgatcagacagcaaactgttctcaaatctcaatgcattggcacgcggatattcagatgaaaagcgtactaacatccattgatacacattgaagaaaacatcattaaggctagtattgacgtctaagcactagttgtaaa

SEQ ID NO: 34519 - DNA, 295 bp, Zea mays
  Clone ID: MRT4577_131485C.1
ccaggggcgggagaggtacaaaagggggggcagcgcggggggcgtcacgcaagggcagatgccgaacgccgacgggaaggaccgcgcggcggactcctacacctcagacggacacccggcgagggcgccgccggaccaccagcacgggaccggaggagcgccacacggagcccccgagaaggcaccgcagccagcgggctgaggaccccagacgagggcgccagcagggatggaagcactacacgcagcctccacctgcagggtaggccggttaccgacccccgcagcagcgcta

SEQ ID NO: 34520 - DNA, 507 bp, Zea mays
  Clone ID: MRT4577_131486C.1
ggaagggcaaaatgtttcttcttccccaaaggggaaaaagtaaaaaaggaaacatttctgaatgtgggtttaaacacagggcgcaattaatgccacaagcccccccaaagctaaaatcaaaattaaaggctctaaaacaaagtatagcagctaccaaaggggggtttttcatacggaaggactaaaacctaattttttcacttctgggaaatctaaaaagaaattagcagcagatggcctattataaacggccactacaaattatggctacttctactggaatctaaataacaaaacaaggggttttcatgggggggggaggccaatatcactgtttttcgccggctcaatgctgttgttgccaccatggtaccttttccagggcttgaagtcctccctttccagaatccgctccacttccttaaactgaaggcctttattctccggcccggggaggaaaacaatgacaagcgcccgcaaggggaacccccaaaaaatgaaaaaggg

SEQ ID NO: 34521 - DNA, 415 bp, Zea mays
  Clone ID: MRT4577_131487C.1
tctctctctcctcactcgcttcctatcccgagcagagccccgccggccgccaggacgccgctcgccctccccgaccgagctcctgtgccccgagcccctgcttccccggccccgcgcagccgctaggagccaccgcgacagcgccttgtgcgccccttgcttccctgttctctccccaagtagcgccaccgcctggccttctgcatcacgcgcgccaggagcagccaaacgccgcgcaccgagcaacaggcgccgacaccgcgtgaccccgctaggaccgacccgagcaatccgatgctgtccgcaagaaccgacgcccccgtcagtttcttcttcgcgagtaatggagtttactatcgtccgttttctttccctcccccattactccctctccccattgatgaacgtcattcat

SEQ ID NO: 34522 - DNA, 1778 bp, Zea mays
  Clone ID: MRT4577_131488C.1
cattgggtacctcgaggccggatgggggtagtcgagtccggccgggactagacgcgcagcctcgctccgtcgccgcaattcgacgattccaccgcttcgtccgtcggcatagcaatcatactcttttctcttcccctccctcccctcctcaccagtcacctcgacgagatctcccccacctcttccacttccaccccgcccgtcgtctctcgcgaagcacccctatcgtacgttttccgtagctcgacggggacggcgagccgctcctgctgctgccgccgccggaggaggaggaacaggattagcgggaggaggagcagggcaccggtcgcttggggctgtgccacatgccgctctgggggaccgccgcgtccgcgcagccggcagccgagggcgacgccgcccgcgcgccctcagggtccggcggcggcggcgtcaaggtgatccggtcgctgctccccacccggcgccgcctccgcctcgacccgcccgctaagctttattttccatatgaacccggtaagcaagtccggagcgctgtcaggatcaagaacatcagcaagtctcatgtggctttcaagttccaaacgacagcaccaaagagttgcttcatgaggcctcccggcggcgtacttgctccaggggaaagtatcatagcaacagttttcaagtttgttgagcatccggagaacaacgagaagcccttggacaagtgcaaggttaagttcaagattgtcagcctgaaagtcaaagggccggtggagtatgtccctgaattgtttgatgagcagaaggaccaggttgcagtcgagcaaattttgcgggtggtattcttggacgctgagcgcccgagcccacaaatggacaaactcaagcgccagctcgctgaagcagaagccgcgctggaggcacgcaagaagcctccggaggacaatggcacccgtattgtcggcgaaggccttgtgatcgatgaatggaaggaacgaagagagagatacctcgctcgccagcaggaagaaggcgttgattcagtgtagacacagaggaagccctgcagaccacactgggcgcgcgcgcattcctgatcaaaatggatttggagcagccaagcaacgatgaggccttgtgtaattaggatttgagcttcacgctggatgtagatgatccagccactgcctgataataataataataataatacgccctttcctaagccatgtactcgggtgttgttgtggagtgtgtggatgtgatacattccctagctgtattaaaagtgtaactgtaatatcgaaaggcacactccatcatgccacggggggcaattcttccgtccacttgctcatacgactcaccataataaatttatgtgtgattcagttgtcaaagagctaaatgaagagctacataaggttctcgtccggcatgacgcgttgctttcagttcatccgacaacagcagctcgtgtagcggcagcactgattacggcgactgaaaggggaggggtgagcagcagcagcagtacatatagggttccccttcttggggctggtctcacacttggtcaggccaggcaggcgatacattggtgttgtgccggagtttggatcgtcggcgtctccttcatgctgacctgtgtacacttgtcttggtagcattttgttcatttttcatattttccctttggctgatatgacattactgggaggccgttgtgttggtgtggcgttgtgggttctttccctttgaggtctctatagatgattgtgatctactgc

SEQ ID NO: 34523 - DNA, 286 bp, Zea mays
  Clone ID: MRT4577_131489C.1
aggccagcatgatctccatggtcgcgaatccgaagttcatcccggggcagacgcttcgccggaaggagaagcttctccttgttccaaggattgcttcctgataatcctacatctgtaaaacttgtgtcttgctagctgtaccgggaacaagattaaataatgcaaggaataaagtgactctgttcttcgtcagtaaaaaaaaaaaaaaaaaaaaaaaaaaaaaaaaaaaaaaaagaaagaaaaaaaatgaaaaaaaaagtaaatcaaaataaaaactgccaatgaa

SEQ ID NO: 34524 - DNA, 336 bp, Zea mays
  Clone ID: MRT4577_13148C.1
aacaaaacagcaggctggtacccctcctcaattcccccgattccactttttttttttgacacaccctacacaaccagtcacaccgacatatataaatggcgttcggctaaaacaacaaccatttatccatgattatctttactatctacaaaactataatacaaacctaattcacttccattgtaaattatttcactacacttttaatcatcccaatcctcacgatatactcttaaaccaactattacacatacttcaatataaacaaaaattcaatccatatcttcaactacatcttaaccctcattttcaacccctatacatttcaacaatata

SEQ ID NO: 34525 - DNA, 554 bp, Zea mays
  unsure (1)..(554): unsure at all n locations
  Clone ID: MRT4577_131490C.1
gcccaagtaaatcaaatgtcattngaataaattttaaatcccaaatctaagattgaaaaaaacaaaggataaaactccatggtctacagccattggcttcaggcaagtgccatgtaccacctatagtatagattcccacatgtatgttgatgatgggaaaggtgtaacatactttgctagtcatgggagggtgtggttagatggcaaccacttgccctgccgctaccggctttttcctaaggaaaaaggcagccatgtttttaggtgtccagtgctgttttcttgcagattgggcacaggttttttataaccagccattgtttgatacatgcggtgtggaagtcatgaccacaatccagcctgcccaggtcctcgccttccacatagtcttcctgcaatgttcaaggtcaacaatgttcagtaatgccaatgagctacagctgatctctggaagtaaatgagtaataatgctgagccagaacaataagcccgttctaagcaagagcagtaaataaaacaagagatgctccccaaaacaattattatattaacgc

SEQ ID NO: 34526 - DNA, 358 bp, Zea mays
  Clone ID: MRT4577_131491C.1
tgtttttgcgcccaaagaccagcaatagacgtggcgggtttctaccaggattgggcgaacccgcgtgagtagcaaaactgtaataacgaaaaaaaaagcatgcaccgggagggcccactcgggcacccaaatgaaacgtgacacgaagacaggtaacatgaaggccctggccatcacacataatttgcaatgagggggtctaaggaggatacagccttatcgtccaggctgtggacgtacacatgagcacggggcactgtggttatcacactctgttgaggggcatttataaatagccacactcgtgcccggtgccgtcacctgcaccattctaaagacttgctgttcaaaccgttca

SEQ ID NO: 34527 - DNA, 344 bp, Zea mays
  Clone ID: MRT4577_131492C.1
tactggcccgaaaccagatgcggttcggatcgtgggtgaaggcagacagccatgggcgtctccgccgccgccccggcgctgcttcgacacctctgatgcagctctatcacagcctcctactccgtactgtgcactaccattagcttctccgccggcttaggctcgacatgcgcagactccatattcagctacgccaccgaagtagccaacgtgccaccgttcaccacgcccaacctcttagccagtggccaatcaaggttaacaacacacgaaaagctccaaggtgcatttgctcctttcgtgaggcttcttgaatcataagtagcgactgatagagtttctgg

SEQ ID NO: 34528 - DNA, 675 bp, Zea mays
  Clone ID: MRT4577_131493C.1
ttgagctagtgttgatccaccgcgatgatcgggtgtaggtatcggtaggttagaaaaacgagcagtgctgctaagtgttgctaattgctttatctctcgatggacttctctttttttttcttgctatcacttctcctttttcccccttttgagttgcatgcttaaaaggggaaaaagtcaaggtagtaagcttttttttattcttcctgtttttcgtttgtgttggtgaagactgaagggtaggggtgtgtgttcattcatggtgtgacagttgcctacttccctggaaaccagagtcggttaaagattctcggttagacttgctcactcggttgcctaattaatgtttggaagtttcttcttggcgatagaacatggcttgtgttgcgtgcaaatcaaactcttcattgtagggtggcgaaagagtttgcgagtttttaaatggtttcatctccataagatttggctggtttttacgttggtttgccggacctaacacgaccctcctcctttaccgggcttgggaccggctatgttgaaacgacttaaggaagccttccaatcaacataggcggagtttttaaataactttaatcaattactttgcacacactaactcattacattgtttgagagtgtggacccatcaaccatgcacaattgctaattgtttgt

SEQ ID NO: 34529 - DNA, 509 bp, Zea mays
  Clone ID: MRT4577_131494C.1
ctcgaggccggccgggatgagtgctccggatttcctcctaaagattgatcgctgactttacttaggccgtccaaggagaccctcctcaggtagtacctaccactagatcgtcgtcgtctgcatgcagatcgtgagttatgccggtaggatccaatgccgtgcgctgtgtaagtgtgttgtgtgttgttgtctggtggagatgcggcacagcattactactcccatgttcgaggcgtcgtgtgtgaattatgcagcctctgtctgtggactcttaagccagaggggacctgtcaggggcatgctgggtctcacgtaggcggcacccggttttgcgagcgatggcatccagcccgaagaaggcatcgtaacaggtcggtgaagcacttcgtctacaaccccttcgtcctgagtctgaagacggcggttacctcgaggccgctcgcggcgaggtacctctccgacgtatcgtactacctcaccgaccatgagccgtctgttgcggagcgttg

SEQ ID NO: 34530 - DNA, 270 bp, Zea mays
  Clone ID: MRT4577_131495C.1
atgggcgtgtgcgacatgcgcgtgaatggtccggcgatttcttgcttcctaccttacgggtgcgcagcttccttttgccacttaatattttgcattcatggagaaaattacactgacaactccactgtgagaatgtctacactttctctttcgttcattctcgtattccttcagtcactagctttagattatgaactgccatgttttgttgcacatagaattgagatttggaatcaaagacccaattctctggaattggactataactag

SEQ ID NO: 34531 - DNA, 273 bp, Zea mays
  unsure (1)..(273): unsure at all n locations
  Clone ID: MRT4577_131496C.1
gcagtggtaacaacgcagagtactctttttttttttttgagatcttgttgtatactaaatagacctgcgtgctgtgcagtgtggactgtgctctttcaattttgtcaattaatgttccatcacacaatttgtatggtatcaactcggaactactgggtgaggattatcattttgcaatgataccaaacatggctttacttggtaaaaaannnnnnnaaaaaaaaaaaaaaaaaaaaaaaaaaaaaaaaagcactctgcgttgttaccactgct

SEQ ID NO: 34532 - DNA, 449 bp, Zea mays
  Clone ID: MRT4577_131497C.1
ggcgggcctgtttgcgtttgacacggaggaggaggtggtgaggctggcgaacgcgacggaggttgggctggcggggtatttcttctcgagggacttgcaccgggtgtaccgcgtggcggagcatctcgaggttgggatggtgggcgtcaatacggggctgatttcggacccggcggcgccgtttggcggcgtcaaggagagcgggtttggcagggaggggtcgttgtatggtatttccgagtatcagatcaccaagatggtgacgtatggggggatggggaagccgctgcaggggaaggagtccgagtgagacatgggggtggtggtgatggggaagatgtgttgacgatgacggatggagttgagaaccaggatatgttgtttgtcctgctgggaaaaaccgtcacggagcaggagtcggcgcatgaatgatgatatttcaagtctag

SEQ ID NO: 34533 - DNA, 505 bp, Zea mays
  Clone ID: MRT4577_131499C.1
gacccacgcgtccgcttgcgcatccttcctcctctctcgtctatacctctttcttctcctcttctctctatctatccttaatcaaaaatgccatacacaaagggcgacgccagcaagggtgcttcattgttcaagacccgatgcgctcaatgccacactcttggtgctggcgagcctcacaaagtcggccccaacctgcacggtattttcggccgccaatctggtcaggctgagggctacgcctacaccgctgccaacatcaacaagggtgtgcactgggacgagaacaccctgttcgagtacctcgagaacccgaagaagtacattcctggtaccaagatggctttcgctggcttgaagaaggagaaggaccgcagcgaccttatcgctcacctcaaggaagcaactgcatgatgatgtttagacctcttagatcactgttacccgcatatacactggcatctctaatacatccattgcatcgcttcttaaaaaaaaaaaaaga

SEQ ID NO: 34534 - DNA, 307 bp, Zea mays
  Clone ID: MRT4577_13149C.1
aaatagagaaagaaacgtggcgctatgtcaccataacgacggaaacaaccaatgggcacctcaacagtacgagacacgttcaaaaaaaatttcgaagcacacaacccaaaaattgaagtccacaaaccacagtcttgatttggtacatttaacgcatagcccgtatataaacaaagtatgggttggcatactttcaccgacactttttcgagactatggcttaccctccgctgccatgtttttaatttgatgttgactttattggacctgaaatttatttggccccatgcttggcctttcagtgagc

SEQ ID NO: 34535 - DNA, 609 bp, Zea mays
  Clone ID: MRT4577_1314C.1
ttttttttttttttttttttttttttttttttttttttgaagataaaacagacttcgaactgtgtggtgtggagactgcatgctgcagagagttgtatactgacttttgtagggcgatagcatgaagtacttttaaagcttagcaatacaacatcaaggcgagccaccagcgatagcatgaagcaatcttggcatgggaggcatatcaggctcaaacaagccctcgagaaactgcactacctcaaccattgtagggcgatcatactcattatcctggacgcaccaacaagcaactctgcagactctttcaacgtcgtctaggttgacatcgccgcccaagcttgcatccacaacgctttcaacacctccattgagaagcttgtccacgacctgcacagggaagcaacacttggcatggcaacagtcatcgtcggtggaagcttttctgccggcgttcctccttcccgatacgatttccagcaaaaccatcccgtagctgtacacattgaccttcgatgtgatggctgttccgctgatccattcaggggcgaggtacccaacagttcctctcatcgtagtcaggacgcggctgaaatccctcccgagaaa

SEQ ID NO: 34536 - DNA, 456 bp, Zea mays
  Clone ID: MRT4577_131500C.1
tcatcctaaataaaaataatatataaaaaaaacaatataaaaaataaaaaacaaaacatgggcgtagagtccaacataagaactcatactttcaaaacccccatcattccaatttcactccctcttctattttcaacccataaatctatttctctccctcgcgtttctacaactttcttccctttcaaaacacttccctttttcccaacttaatctactatcaaaacatcccccttccttcacccttcctatcacctaaaaaacccccactttataacccttcccacctcttacccccccttatattcccattttctctccctttttcactcatcattatcccctcccttttttatattcatacaccctctcacttttattttttacatacccctttcaccccattttttttatttcccccctcttttttttttcccattctccccttttcccttt

SEQ ID NO: 34537 - DNA, 372 bp, Zea mays
  Clone ID: MRT4577_131501C.1
aaaaaccaacggaaagccggagtgggccgagtcgttaaaacaaaacatgccttttaaacaaaaaaaaaagggaatttgttttagtcgcataaaacatccaaatattaagttttataagggggtaatcaagggaatcacaattaagctagaaaagggtttaaacccgaactgaagtcatgcagttgacaacaggtccaaatttgttcctggcagccaaaccaagggctaagtttttaaaccaaaaaatataaggcacgggcttaaggcctagtttctggtaaaccagaacctggcaccattacttggtggaggtgtactatggggacctgttttagctgcccccgccagctgggaaaggactacgggcccttg

SEQ ID NO: 34538 - DNA, 1179 bp, Zea mays
  Clone ID: MRT4577_131502C.1
atgtcccttgcgacatcatccatcaccaagacaaaaagaaagaaacttcatagaatttctatttacgctgaagatgtggccctcttcctgctcccaactcagaatgacatttccactactctggacattctcaacatttttgggaacgcctctggtctccgcaacaatgttcagaaatccagtatttaccctatcagatgttcggagcagaccatcctggaggttcaaagcttgttaccttgcggggtggcgtccctaccttgcaaatatctgggtctccctctttccctccacaaactgaccaaacaacagtttctgccctttattgagaaaattgcagatcttctcccaagctggaaggcagagctgttgaacaaagctggcagaagaattctagtgcagcatgtcctcactagtatggcaatttatactgcaatggctattgatttccctaagtgggctttggatgcaattgacaaaattagaaggggtttcttatggcgaggcagaaaggatgctaaagggggccactgtatggtggcctgggaaaaggtcccaagcattgccaggtccttttctgcagtgttggtgtcggaggttggtaatggtgtgaatactcttttctgggttgataaatggattaatggaaaaaaggtagctggcattgcaccaaggctgttctgcaccatatcaaaaagaattatcaacaaaagaacagtgcaagaggctatggtcaataggagatggattagtgatattaggggcattctttcagcaggggccttgattgattttctgcacctctgggaagctctaacgaattcacggttgcatcctgatattgaagacatgcacattttctccatagcgccagatgttttctggtacaggcttttgagaaagtttgggttgcacagtttatcccctcagcaagtggagacttccttctttggttggtgggagaaatcctcggctcaggtcctcagtatgagaaagaaaggactggactttcttattgccttaggggcctggatgatctggaaacataggaacaaggtggtgtttgatggaaggaccccttctatctccttccttcttcaggctgctggtgatgaaagggagatgtggcagctggctggtgccaaggggctttcctttttggccggccaaacttcctag

SEQ ID NO: 34539 - DNA, 663 bp, Zea mays
  Clone ID: MRT4577_131503C.1
gtttgaggagcggttgggagcacacgccaccaccaaacgcctctctctctctctctctctctctctctctctctctaagagaaggacggaaaggagtatggagcaggctatcgacatcgatatgatgccgacggactcttgcgtaggagtgtggcaggaccaccgagatgagatgattgccgacgaacagggtaaccgaaccacgccctcgtaggtaggctgcaaggacgtggagcgccgcatcggagacgtggggaagaaccagcccgccatgaaccccatcaataccgtctttgatgccaagcgactgatcgatagagagatcatggatgtgtttgtgcagagagatatcaagatgtggaccgtgaaggtcatttctgggcctggggacaaaccaaagatcgttggccagcacaacagcgaggagaggtagttcgtagatgaatagatctcctctatggtacttatcaagatgcgggagattgctgaagcttaacttgggagcacgaccgagaatggtgtgggcacagtgcctgcctacttcaatgaatccgagagggaggccacaaaggatgctgcagtgattgctggcattaaggggctgcgaataatcagcgagccaacagctggagctatagcctatggtgttgacaagaaggatac

SEQ ID NO: 34540 - DNA, 123 bp, Zea mays
  Clone ID: MRT4577_131504C.1
cgtggttctccaccaactttaaattcttcgagttcttagccacccattccgatggagacaatggaaacaatccagttgttggagggggtggctaagaactggattgtttccgatggagacaat

SEQ ID NO: 34541 - DNA, 306 bp, Zea mays
  unsure (1)..(306): unsure at all n locations
  Clone ID: MRT4577_131505C.1
gaantcccgggccgacgagcctgcgctgctcgacgcgctcgagcgcggcgcgatcgctttggttttgctcgacgtgttctggaacgaagcgcgcgatcgacgagcgttttctcgcgttgccgaacgtgctgctgcagccgcatcatgcgagcggcacgatcgagacgcgtcaggcgatgggctggctcgtgcgcgacaacctggccgcgcacttcgccggcgagccgctgctcacgccggtcgtttgaggagggtgtcatgcgtatgcgctgcatgtgtgtcgtgattcacgggccgaacgacctg

SEQ ID NO: 34542 - DNA, 1108 bp, Zea mays
  Clone ID: MRT4577_131506C.1
ccggccggggagtccaaggaaagtgggcatgcaaacgacgatggggacaagtgtttcgcaacggagagagcgggcgctggtgcttgctctcgccctcctcgcgttcgcgttcgcgttcgtgcagggcgcggcgggcgtcgacggggataaggagggcggcgggccggcggaggcagaggcagtgcccgcggcggggcagtcgcagtcgctgccgcccgggtggagcggcgactcggggtccgcgcatgggtccagccctggcggcggttcgtgggagtacggctggagctgggctgcggggcctgacggcaagggcggtgggttcgggtttggttacggaggcagcggaggcgaaggcgaggacggtggatgctactagatggaagggaaagaggaggaggagggagtgaaaaggcatttggttttggcatcggcgggtataaaggccaccatggcggcttcagcggtggtggcggttctggcggtggtgttggcttcggcgctggcggctacggtggtggcttcggcggcgccttagggaacggaggcgccgctggtggttttgatggagaagctggcaacggcggcggtggaggaggatacggtggcggtgacggcgctggtggtggttacggcagctccggtgctggcgatgagcttcatggcgtatctggtagtggcgacggaggcgaggctgggtataagggcaagggaccctccagcggtggactctggagcaagcgtggccatttccgcggctggaggtcggcgcacagagacggtggcggcaacaactaactgaagctatttgcgatgtaatatagtgcatccatggcttggtgttaacaagcgcgcgacttgtcgattgccatggctcacaagtgtccagtttgagctgtatgatggccctggtatacacgtatagtatagcaaattagcaactgatgcttaccctttccctgactgacgccagtcagtgcaatctacgtacttcggtggcggctgtgatttgtacgataaaccagcaaaaggtactgtagtgtctgctaccagtttgctacagtataccttaaaaacacttgtatactggcacatgcatcatttcatt

SEQ ID NO: 34543 - DNA, 275 bp, Zea mays
  Clone ID: MRT4577_131507C.1
tccgggtcgacccacgcatccaccgactcttccgcccacgcgtcctcggacgcgtgggcgcaaccaaacgcgcacgatatgagtccaaatcgacgaactcgatatgtcaccaatactggtcagcatgaagtcgagcgtcctcaggctcaagcactccgcagaagttccgcatgccaccgcctcctcatggacggagaatcgtgtgcatctgggaggtcgtgaaggttgcccctccgctctgctcagcatgccggccgtcttcgacttcacggcca

SEQ ID NO: 34544 - DNA, 173 bp, Zea mays
  Clone ID: MRT4577_131508C.1
cccacgcgtccgcgtaaacagcagtacagcacacattgatagaccttcgaattgttttcttctggtgttgtaagatggatcaactgtatcattatcgagattttagctgtagtggtagcaatgtgaaacactgttggccgatcattcatctgcagtttttgtgtttttttttt

SEQ ID NO: 34545 - DNA, 149 bp, Zea mays
  Clone ID: MRT4577_131509C.1
aaaagaaaaaactgggggggttgcgggttagtcaaatagaagcaaagctgcatggatctggggcataacataaaccctgttactttgtcttgcaaagcttttaaaaaaaggttggggtacggagtatgtttgaaccgggggggggaaaa

SEQ ID NO: 34546 - DNA, 423 bp, Zea mays
  Clone ID: MRT4577_13150C.1
cattgggacctcgaggcggccgggaaccgatcattccttcccatcccccgcttccccacctctcccccacccgcgcgtccggccgggtgccccaatccgatggcttgactggtcccacaacgcaccggcggcgctcgtcgcgctggctgctacggcggcagcatggacaccgcgctctgcgacgacctgctgcaggtggtgttcggccttctaccgccctccgctgcaccggccgtgtccctcgtctcccgccgctggctcgcactcctcagggccgcgacgtcgtccctcagcctccgcctgcctgcctcctcggcggcgaccctcgccgccctgctgtctcactaccccttcctcgccgccctgaccgtggtctccgctggtacgccggtccacgacgccgacgccgtgctgctcgctgtc

SEQ ID NO: 34547 - DNA, 769 bp, Zea mays
  Clone ID: MRT4577_131510C.1
tcggccgggaatctgaagaagtatttgcgactggtggtaagtttgagtcctgggacttgagcactatgcaagagctgggaataagcgtttacgtcgcgcccggcaaagggaggacggacggcaagggcagcgttaagtcaccacgatcgctgcccatcaagcaaggaggtgggcatcctactacgcaacacgtttgggcactcatcctcggacttgcacgtaacattgctgccgatgacgcagttgtaaagggaaaaggcgggcctgcgggctggcagacggaactggcggtcggcctacaaggcaaaactctcggactcgttgggctgggtagaatcggcgctcacgtcgctagagtgggtgttctcgcctttggaatacgcatcatttgctggagtgcgaacttgacacaagacaaagccgatgcaatggcgcaggaatacgggttaccaacaacaggcgcaggcatgcttgccgaggatgaaaagacctttcaagtagtcagcaaggaagagctgttccaaacagcagacatagtatcactccactacgtactcagcgaccgctcaagaggtatcgtagctgcgcacgaactagcgtctatgaaatctactgccttcctagtcaatacatcccgggcaccccttatcgacgaagctgcattgctggatacattgcggaatggacggattcgcggtgcggccctcgatgtattcgatatcgagccactcccagtggacagtccttggcgtaatgagaattgggatag

SEQ ID NO: 34548 - DNA, 305 bp, Zea mays
  Clone ID: MRT4577_131511C.1
aacacaaaaacttaccccaaacattcaaagagagatagcaaacttaaaaactttgttttttttttttttacacacacaccacacaatacctattttttgcacccaactcggcctttcttattatttttcaaccaccaccacaagctaaatagataataatcatatccatgggcctcaatccatttaatcaacaattgcaggggtcgcactttcaacccctaccccaatttcaaccgtgggcggcctctccggacttccccccggccttaacaaactgggcccggccttttttttcggggccaccc

SEQ ID NO: 34549 - DNA, 537 bp, Zea mays
  Clone ID: MRT4577_131512C.1
ccccaaaccggggaaaaaaaacccccgggaacccaaatggggcagaaataagggacaacggttccaaacaaaaaacggaacaaaaccttgccaaacaaaaggtttttaaagggggagttaaaacaaaaccgaggggggggggggtttaaaaagccccttaaggaccccccaagccccaaaaaagggaaacggccccccttcctcaatgttggcaacgggaaccgggaggcccccgccaaaaaaagcaaaccttttggagcgcccccccaaacctttgcccggaaaaacaaccccaaggccaaccccctgggggaccccccaaaacccggggggaagaaacttaacgggcttgttctgggggaaggtcttccccccccccttaaaaacaaaggggccgtaaacgctaaaaaaaagaaccccgccaaccccctgggttttgacctgcccacccgggggaaaaaacccggccacatcctggttgctgaaggccggggaaaaggccccgggaaccccaaaaaggataacctttttgccggg

SEQ ID NO: 34550 - DNA, 405 bp, Zea mays
  Clone ID: MRT4577_131513C.1
atggtgtgcgcagtgggcgtaagatttatatcggttcgtgcaaaacgtccctacttccagtctttggttgctcgctcttctagcaccttgttgttgatcgctcgtagttggggttacaagcaggcgagagagggaaggatcccaggtctctatgtgacgctggttctaagggactatgtatcagttgggatggtgtgtatgcgtagcaaggggctcaagtttcatcattacacctcctgctccacaccgacccatgcccttcgtagcctgagccttggtgctcctcgtcatgttgcgggctccgtacaccgtcaagggactcaagccaagggctcgataggttatgagatatccacaggtctacgtcccataggtaatgagtggggccctagctcgaatgcatag

SEQ ID NO: 34551 - DNA, 224 bp, Zea mays
  Clone ID: MRT4577_131514C.1
tttttgtgtgctttaccaagaagcaccattagtgcccttaggccctatctgataaggaaacctgacaggggttacagcacccatggaagccaactgcacgcttgtagatgcatgggggggatggagcctagaatgaaaacagctttaaaagggggctcattacgcgcggatctcatgcacataaaggggcgacagcacatacgagagaaacgaagttgagcact

SEQ ID NO: 34552 - DNA, 499 bp, Zea mays
  Clone ID: MRT4577_131515C.1
cacgacacgtggatggaaatctgtagcaaccgcctcttcctaatacgatgcactatagagcagcgttgcttctgctcgaggacattttggtgagccacctggattcgttgattgttcgatgctgcaaactgactcagtaggctatattaacacagatgtctcctgtgacatatttggaagggggcgtatacacatctattgttgacgtgaggtgctgggataaaactagaccacatctggttgctgatatgcacgtccaatggcgcatataggtggggcgaatcctagcctctactgttgcaagtaggtgattgcgttcaccacagttggtatggcaaacgggaattgttacacactggcactatgggcacggtgtctacctgcgcttagtaaagtatgcattgcgaaccctgtcgggtacctaggacagaggcaactgcttatcatctggccctcttgctgtgggtcatgcgcctacatacctgccataacaggtgct

SEQ ID NO: 34553 - DNA, 342 bp, Zea mays
  Clone ID: MRT4577_131517C.1
ccgcacggacgcgcggtccggttttttccaacagaaaagaagctgaattctggcaagcggggcgacaaccacacccagaagaggggactgacaaagcctccatcggcaacacgagcgggccagctccgcgtcagaacagccgaccacaggcaaatactgcaagacgggcccaggcgtgaacggcgcaaccaagtcggggatgcagcgcgccgccaccagggagaagcgcatgggggcccacatacgcctccgattgaccacgagtgcatagcccaggggggcgacgcgaggctgctggtggacgacacagccagaaaacagggagagaagacggccagccca

SEQ ID NO: 34554 - DNA, 618 bp, Zea mays
  unsure (1)..(618): unsure at all n locations
  Clone ID: MRT4577_131518C.1
ccggccgggttgtgaaggaagcatttcctcaaaagattcatgaaattctcgatccttctatattcccggttacaagagatggtgataatcacacaacggatgaaataaccagaagcatcatgaaccttcttaagatcggtatctcgtgctctgcagatgcaccaacagaccgaccaacaatagatgatgtttatgctaaagtcatcacaatcaaagaaacatttttagatctatgccactaaggaatggaacaatcatttttactatttaaatcaggggggcattatgttttatttactctgtttgcttgggaagcttaggaatcaaataaattgtgggtcttgtcctttattttgtcattactcttatgtaatttgacgagtagagagctgacaagtctgtttgctaggtgtgaccgcagctccactgtggggcatacttgtaatattcttataactcaatgactctttagcaaacatccaaaccacaaagaccagttgtgccctgagtgaactcactgtattgttgggagatagatacanaggattaagagtgatccaccaataaaaagagatttccgatcgaaaaaaaaaaaaaaaaacccgcggccctcgagct

SEQ ID NO: 34555 - DNA, 456 bp, Zea mays
  Clone ID: MRT4577_131519C.1
acgaggaactgcaagatctgatacccaaaatacaggtaatggcgagatcttcgccgctcgacaaggacactttggtgaagcaggtacgagcaacatttgatgaagttgttgcggtcaccggcgatggcacaaacgatgctcctgcgctacacgaagccgacattgggcttgcgatgggcattgctggcactgaggtggcgaaagagagcgccgacgtgatcattctcgacgacaacttctccaccatagtgactgtcgccaaatggggccggtcggtgtacatcaacatccagaaatttgtgcagttccagctgacagtcaacgtcgttgcgctcatcgtcaacttctcttcagcttgcctgatagggagcgcgcccctgactgcggtgcagctgctctgggtgaacatgatcatggacacgctgggagctctggcgttggccacggagcccccca

SEQ ID NO: 34556 - DNA, 223 bp, Zea mays
  Clone ID: MRT4577_13151C.1
gttaaacaatcgccagctgtctacagatatgaatagcctgccaattttttttaacttgggctaaatgtattctgaaaacgtttatacatagcatagtagcacactggactttttttttgtttgataacattagtgtgtgcgcgttactttgccatttctcatgaaagccatggcaaaataagaaactttggacgtgttactagctccggtatatcacctttgc

SEQ ID NO: 34557 - DNA, 239 bp, Zea mays
  Clone ID: MRT4577_131520C.1
ctttgaaccacgggatatgaaaattgtacatctgccctcaactgattctttcagatttccaaatgtgtctcctacactaagaaatgctttggaaagagaagctgagggcagggaagtttgttcccaatttactccatcacagtaatagcgacttgacttccatttttctgatttctaatcccattttctttccatgaactctggtaacgcgacctccataaatcctttcggatatgcca

SEQ ID NO: 34558 - DNA, 726 bp, Zea mays
  Clone ID: MRT4577_131521C.1
gccggccgttccggctcctataagttgcgcttggcaagccattggcatagcatctatatccaccagcatgcacgcgtctcctatccatgttcgtcgacgacacgcgagcatggacagcatggtctgcgtcattcatctggtgctcgctgtttcgctcgcactggccggccccatcatcgccggcggcagcacggaggaggttgggctagcccgcaagcaggccgacgaggcgtatgccgcacggcagatgacggctcaagcgacgacgacggcgtcgacgatgggaaaggaggtgcaccgccgcgtcctcggcagcatcaatccgtccacactcgatcctgacaagccagcctgcctcggatcgtgcccagctgccggtagaccgtacaccggccgcggctgccagaaggcgtaccagtgctctggctgaacacccacggacacatgcgtcgttcgtccctactccaatcaggcatcctgtccagtgcattcgattttttattttgtcattgtttttaattaccatccttatagagccaacgcatgatgtgtaccgttgctgtaaactggaccagcgctacttgtccaaaacctaaacaccattggttattgacattgttctgttgcaaatgggcttcctaagctccttgaaatgtacggtgtcgaatcatcaaaccaaacagattaggacagcaaatgaaaaaaaaaaaaaaaaaaggcccccta

SEQ ID NO: 34559 - DNA, 264 bp, Zea mays
  Clone ID: MRT4577_131522C.1
gacgacagagtttaggattagcaagagcaagaggcagtcgagcgtggacgccaacaagtgcaggtgaagctggaatccaagctgcaagaaccggtgataagagggacaacccaagaggcggacgccagcgacgaggagtgcaactggtccaggggaaggtggatgtacaacaacgtgtaccacccattgtacagcgggctgaagagctcctcatgtgccccgaggtggcctgtgacaagtatggcaggaaggatggcatgtacc

SEQ ID NO: 34560 - DNA, 599 bp, Zea mays
  Clone ID: MRT4577_131523C.1
agccaagttcatatattattatagcccatatatataaataatacatggcagtcatgtatatatactccaagtccaacatacataaatttcttgcatgaatatatatgcatcacgaaaggctttattggacgtcacctttcgattgtcatgcataaccatatttattagtccagctgcatcaatcaataaataagaatgacgataatctatagtaatatactctctacatcgtctcttcctcgaagatctcggtggtcgtcttcttgatgagctcccacgcgcttcgcacgtgcctctcttcctgcagcgacgaccccaccgcgaaccgcagcacgaacttgccgccgatcgccgtatgcgccaggtacgccttgcccgtcctgttcaggcgctccattagctcacggttgaccacgtcggcgtcctcctccgtcatggcggtgccctgtggcctgatcctgaagcacacgagcgcgaagttcctcggcaccacgatctcgaagcggtggtcggcacgcacggcgtcctcgaacatcttggccatggcgacgtcgctccggatgtgctcctggagcttggcggagcccgtagtgcgcatg

SEQ ID NO: 34561 - DNA, 433 bp, Zea mays
  Clone ID: MRT4577_131524C.1
gaatagcattttttacatttcgttttggttctacccgccagctaaatttgacgaggcgacaaaagcctgacaagggggaagacgaaaagcattgccgggtgaaggcaccaacggaaacaggcttagttattttaaaaaacccggcagcaatgcaggggaaataaaaactcttaaacaatgggggggggaaaaccacacaatatttttaaaacagccccccacaacccggtgcggggggcaacttttggaagatcacgggaaaagggcagcacactggccaaaggctgggaaaaaacaaaactttttaaagactaggaaccctgggagacgtacttgccctcattgaacaaaacaccgacctcccagaagcccttttagaggcccgcaaagacctcacgggccaaaaaaaaccaacctttttccataccctgac

SEQ ID NO: 34562 - DNA, 103 bp, Zea mays
  Clone ID: MRT4577_131525C.1
cacaaataatgcatcttgatttgtgcattcgcgatcacctgtctaatagtcatatgagatgagtaacttttgcatttgtggagagtggtttgtgatcagtgga

SEQ ID NO: 34563 - DNA, 1410 bp, Zea mays
  Clone ID: MRT4577_131526C.1
gtcagccctgctctccatcgcacgccgcgcgccatggagaactccctgtgcgcactgcttcttctctgctcctccagtcgcgccctgcatttctctctccctcgcggcttctctttcccgctagctcctccctacgcgcccagtgccgtgcgcctgcgtcctgcgccgcgactcccgccgtggagcttcctcgccgccccagctcggatctcctctgccggcgcgccccaagcttctttccgcgcgccctggccttcctctgccggtgccctgtcccagtgtcgcggcgccctgctcgttcttcttggcgctcggccttgaagctcccatggctgcctgcgtcgcgccctgctccctctgtctgtttgccgcacgaagcttgctcctctgcgcccgtcttctccctcgccgtgctcctctgctgaacttggtgcccagcgcgtccctctgccccggcgtgtcgtgctctcttccatggatgccgcgccgctgcttgctctgctcggttcttcccatggcgctcggccctattcggatttcgccctcctcctctctacgtgctggagatcctcccatggagcccttgacgctagccatttctccttggtggccgagcccattttcttgctcgtgccccctctcttttcacctctacgcgcatcggctcgcccaaaccccatggtgttccttccctctcagctcccttgctgtggatttttcccagcgcgcttctctgttggccatcactgctccctgatgcccggactcgccggtcaccggtctttagctcccacgcgcgtcgctggctcactgccgtgcgctcgccccgctcggatttcgccaaccgtcattctctaacccgtgtgccggtcagcatcgtggaattttggtttgatcggctcgttattgaccttgccggtgtcgtcgaaccccttcctcagtcgcgtcgggtctccctgcctgttgtcgtcattccgcgcgttatcaagaaatctcaagagtcggatgaagacggagccagcagcgtggtgttcaccaagtgcacgacaaaaagctcgaacgtcctgcgcgactcaagttcgattcgtcaaaattattcagtcgaagaaaagatcttcagcaattgattaccgaagaaaagaaggcccctggatgacgtcaaccggaaaccgtcatcgtacttctgactattgcgtcgaagtagtcagggtaagcaaatttgttattcgtgtcagcggatggatggatggtttgactacgtataatatttattagattgcctgagtcgttttggtaatttggtcgatgtcgtaggatgaaagaggtctcaataggtctcagtgtttgcgggacagtaggtgttaaaaatgtgatgttttattaatatatgtgatacacaggttaatcggg

SEQ ID NO: 34564 - DNA, 212 bp, Zea mays
  Clone ID: MRT4577_131527C.1
gcacgcgcacgcaagccactagcctagctctttttggctggacacccaatttcaactcgggagaagccgaccacggcggtgagcactccaaagagagatctgttctgacaggagattctcttcacgtggacagaagtccacaacgcgcgcgcgagcatgtggctaccctacgactggtgctactccacggaactggaggccttggcgcacag

SEQ ID NO: 34565 - DNA, 463 bp, Zea mays
  Clone ID: MRT4577_131528C.1
cgtccgggctttggtcttaggcgtaaaagaaggtcaaaagatggcaagagaaggggaagaaagaaaggaacaaagaataagggcagtgctgaagttattaaaaagttgggtgatgctactctacttttcgctgaagaaaaatttaacgaggcaatacctatactacatgagattgtgcgaattgcaccaaatttgtcagattcatattatctacttggtagcatttatagtgagattggtgaactagataaagctataaacttcttgatgctagctgcatatgtttccccaaaggatgcatctctgtggaagaaacttattcccttggcaaagatgcggacaaacatgtatggatgcacactacttctggacaattatcttcaaagtcttccaacagagccttattcttgggatccatctggtttgagctatggaaacctttgtgaatgacttgggcctgcag

SEQ ID NO: 34566 - DNA, 603 bp, Zea mays
  Clone ID: MRT4577_131529C.1
tatattaagcaacaactttacatagctgattgttttgattaggataatcgcccactgtgcagtgagcatttaaaccacctaccacaaagctgtaatataaaacatagaattttctacgaaacttgccaaggcatcaccgatgtatcctccttcaaataatcaagactctgcagtatttgaaacagtttcaggacgagactggtcggccgttacaaaaacatgaacgccatcacacagctcaacccagctacacccaggctctttcttcacacactctctgctcatgctctccctgattggccaggtctcgggccagtcattccctgatgcatgcacacttgacagagcaacccagttgctggggttctcagggtcaagcttgagcaaacaggaagctgcgaattgacttagcctggcattcccgggtattcgagatgagttgagcagggcactccaggcagcgacgctcgagtcaaacggcatggtcttgatgaactcaagagcttcttctaggtaacctctcctgcataggagatccgccatgcatccgtagggctcagctcgcatctcaaccgagctcgaaccatcagaaatcgaactgaa

SEQ ID NO: 34567 - DNA, 341 bp, Zea mays
  Clone ID: MRT4577_13152C.1
gatggttgtagatctgaagcaagtcagcacgagttggagcgatctcgacgttaccagaccggacatggtagaggcctagatccggcagatgtttgtgggagttgcttcaacagccttaactcttccatgcccctctaggtgagagacatactattctccggtcgagggcaaccttctgttcctgttgcaaatcctaatgctgatgacctattaataactagtgatgcctccatcttctttatgacaagaaccagtacctcagactcctttccttgcattataattaccgtctactgatggcacctctcatctcatgagccccggttggagcagcaagaaca

SEQ ID NO: 34568 - DNA, 357 bp, Zea mays
  Clone ID: MRT4577_131530C.1
aaaaaaaatggtgtgaatggagaacatgtgtctcatgccgcacatttcatggtgtggcttggtttcttgtagggggaggggcgggctcccaatccccccagaaaacatcacgccacctatgcaagactgttgacctaaacacatgtatggcaacccacggtggcgtcctacacaacgtggcgctgcggtacaggactgaacaacccccttcatagcatgggcgcatgcgcaactcccctcttcagatggtctgggtgggggcctgccttcaatcagtgcaaagcctgtgaggctccgcaagccgtgtggtgccatcacgactgaactatgagcctatccggctacacttcgatttag

SEQ ID NO: 34569 - DNA, 365 bp, Zea mays
  Clone ID: MRT4577_131531C.1
gttcaattgtttcatgatacacatgtgttggttattggaggggaacggtggggttctgtgttaggtttcacgacatatctctgtggagcagattggcatatgtgaaattgataagacggtggtagatgtaagatctcgcttcctgtatgtgcataatactgtgcagtgaccactgatattatgttttattgacttttagatgtttgagagcatttgctttctgttagatttctctgaacaccaataatttggtctatgtgtctttatctacattcagttgaggaatgcaattgattttactgatgtcacttgatttttcgacactgatgttagctgctcctactatgccttcttcaatttttaaa

SEQ ID NO: 34570 - DNA, 286 bp, Zea mays
  Clone ID: MRT4577_131532C.1
catcagcatagacaagatcagggccatgaacaagtacagcaagggcagtaggaggcagccgcagcttcttcctactctctcactctacttctacctggccgtcgccacctttgtcctctgcctgttgctcactagccctgcctggttccccgggctgtgctcggcccgcgcctcctccttcctcaccaccctccctggcttgttcacggccttcctgctcagccccaggtgcctcttcgtcgtcggcaacctcaatatcgccttgctcgtcggggagtctaggctg

SEQ ID NO: 34571 - DNA, 235 bp, Zea mays
  unsure (1)..(235): unsure at all n locations
  Clone ID: MRT4577_131533C.1
cggccggcggccccgaacgagcngctcgaacccgacntacaaccgccacgnnnaggactaatccgagacctgggcgagggcgcgggttttttttacccgancacgacgccgacgccgaggagggggccgacggcgccgcaggccagcgtgtcggcgaggatgaacccggcggggtcacccgtctgcaggacggagtcgcgccgcctccccagctttcgagcccacgccgtacgcc

SEQ ID NO: 34572 - DNA, 1240 bp, Zea mays
  Clone ID: MRT4577_131534C.1
gttgtattctctgccaaggagaagtttattcatgcggagtatgtaaacaaagaattcttacggaaccgtagcatggatgagaatcagctagctcagcagatgtggaatagtgtagctgcaaatgacaagaaaacagcatacagtctcattgtgagatcacgtgccaatgtaaatttagtttacggagagataccttctagcccatttttgactctcggaaaggcacttcagcaagagcaaccggtttcaccgcctgttggaagccctagatttttcgattgcaattcacatgacaagatttctcctcgggagcccctttcccctgctagcacgagttcacgcacagatgacatggaggacggttgcgaaggtctctccttgctccatcttgcatgccgtgttgcagacgttgggatggttgaattacttttgcagtatggtgctagtgtaaatatgaatgattctaggggtcggacacccccatcactgcattttgaaaggaagacatcggcatgcaaagcttctcctctccagaggggctgattcacaagccatggatcgagatggtaggacagcattacagtatgcaatcgatggtggaacaagcgacgaagacattcttgcattgttagaggatcatagtagatgatcttgcaaccgcaccttcagtaaattgaggctctcttggtgtggtcgactcaactaagttagctcggaattcggattgagtgtgattgggtgggttcaaatctcaaacaagtcaaagttcttctaaattttttccaatcctatccaatccatgtataatgggaataaccgaacaagacctaacagggatccagccccgctcggtcctagcttgtcgtgcagacaatccgaattcatggcatgaaagcaacctatgtacatgtcgttctagggcttcagtatcatgatgcgcatgttgtttctttccccgccgtttgcttgtttagcatcagtggtccttatttagtcatctggcaaacggtttggttttgtttgctgcaggtgatgcatagtaagcttgtaaatggagttgcttctctttattttctagtcatcttttatcatgaagtagatgtggcattctgatgaaagatggttgtacatattgagatgtgctgttgtggcatatatgaaatattggcatggtgtggatggtatatacgaaagttgtgcttgcttaatcaggaacgaggcaacataaaatgttccatgt

SEQ ID NO: 34573 - DNA, 502 bp, Zea mays
  Clone ID: MRT4577_131535C.1
ggaaagcttggcacgcccgctaggctccgggatccggaatagcgggcgcgctccacgcgttcggtggcagtgcaaaccagaggttcgtcgtgcagaactatcatgaatgatgcgtactcagacctggtagtgtgccgtggctctgacagctgacagcgcctctgcatacagatgccctgcccctgcacagtgcctgaggtcttgacggagctggcgccgggctgacgacgataatcgccgcacggggtggctgcacccatacgcgcagttcctgctgcacccgcagtacaccacgctggcgggggctccctactaccccgattagtggccagacgagcgccacgttccactcgctgcagctactgtgctggctgcatcagatcaggatgatgcacgctcatgccgtcgcgcaggacccgctcatgatgatgcatcttgagcgggtcgttgccgacagaatgaacctgcataatcctgctctgatgcagcagcaactgcagct

SEQ ID NO: 34574 - DNA, 724 bp, Zea mays
  Clone ID: MRT4577_131536C.1
ctgacctgtgattcccctctgccctgccccctccttcccatggagctcgacgccgcccaaaaccctaaccccgaaccccccatctccgcctactaccagacgcgggcggagcaccatgccgtcgtctccagcgactggctcgaccacgccgccgctgccgcctctctccccgatgcgcacgccgacgcccacgccgccccacccccctcccccgggagcaacggcggcggcgtcatcgaggagttcaacttctggcgccgcaagccggaggccgccgaggcggttgccgccatcatggcgctcgccgccgtcatccgctccagcagggccaccaccatgatggagctcgagatcgagctcaagaaggcttccgacaagctgaagtcctgggatgctacttccatttctctgcctgctgcttgtgatttgttcatgcgctttgtaacaagaacatcacatttggagcatgagaaatttgatgcagcaaaatcacgcctaattgagcgaggggaaaagtttggagagatatcattaaaggcccgtaagacaattgcaatgctcagccaagatttcatctcagatgggtgcactatgctggtacatggttattccagagtagtgttggaaatcctgaagctagctgcctcaaatcgcaaacttttccgtgtattatgcacagagggcagacctcctggtactggcctacgaatgtcaaatgaacttg

SEQ ID NO: 34575 - DNA, 762 bp, Zea mays
  Clone ID: MRT4577_131537C.1
ccggatcccatcagaactccgaagttaagcgtgcttgggcgagagtagtactaggatgggtgacctcctgggaagtcctcgtgttgcattcacgacctcgaggccggccgggcggtgccggccggcggtccctgcgctcaacgccgcaccgaacctgactcaggcactcaccgctatgggcggcgaccatggcggtgggcacgccggcggtgacttccgccagaaggtatggagcatgacgggcggaccctactgccgcccggtccactggcgccgtaacaccgccatcgccatgttcggcgtcttcctcatctgcattcccatagccatgaagtccgccgagctcgagcaacgcccgcatcacccagtccggccaatcccatctcaactgtggtgcaaaaactttggcaaggaatactgaaggaccttccaagtagcatgaagcgcggacaccttgcttttgccttcttttgattctctttctcttttggctcaatcatgttatatgagaaataaaataaatattggactcaaataagaaaccggtgattcaaaagcctctgatgaatttacttgtccacgaattttggttatatttctctgctattttctttcttatttgattctctgctattttctctcttatttgaaacaaccaatgacaatgttataagttttggttatatttctagtaaattatgtttcaaaaaaaaaaaaaaaaaagccgcctagcccgcgggcggtctaaaaacaatggattcc

SEQ ID NO: 34576 - DNA, 548 bp, Zea mays
  Clone ID: MRT4577_131538C.1
acactccattctgtctcaataacgttatagaaacactggaagtaaacatgtcgaaacacttaaaacaccagtagaaacacttaaaacaccatatctgactcttatgttcataactcttgatcagataaagcaaatccttacattacataagcaagccagaacatcctcgggactactgcttcaaccaacttaatgatctggcttcgttgaaatgtcttatttgaaatcattgcctcacttgggtgcttgggatttcttttccagatctgtagggcttaaatcaaggagctccacaaaatgcagggcctacaccaacgtcctataatgccaaatctgttccacaaagacgaggtgatgccaaatctgtgtaattagagttttatggttctggacttcccgcatcttacacaaaggggaaacatttctcatccccaacaatagcaccatgatgtgtgcatgtgtgatagaggtgagggacggtgcaaataatttaagcacagtgaaacaagcttggtgaaagacagaagagatttgcctcggcaccttaa

SEQ ID NO: 34577 - DNA, 347 bp, Zea mays
  Clone ID: MRT4577_131539C.1
ttttgggtgaccgccgctcctccgtccagccgggcagttccaggcgcggccggagcaatcccgctgctgcgtccgcctcagtttgccgtcgccctgttgcacgtacggctagggtttggagatagatccgcccgcagcgcccgccagctcgtgtggaggcgcgccgtggcgcgggggaggaatagaggaagcgcggctttggttccttgctcctgaagcttcagggcgtgcgaaccggttctgtcgcaatgtcagactcgccggcgggagacgaggacactgtgcatgacctgtagttcaattctaacccgtgttgggtgaaacttgataagccagaggcaggcatg

SEQ ID NO: 34578 - DNA, 466 bp, Zea mays
  Clone ID: MRT4577_13153C.1
aaaaaaggcggcctagttgggctgccttatccagaagactcataatccatttttaatttgcgggcatggggcccaattttggctggcttacagggaaataaaccctagcgccttagcgcaactggttaagcattctacaaagaagccttgccccccgaaaaaacatttgacccttgctagaatacaaaaggggttaaaaaacccgggggggctacagctttgttttttgaaacgacccacattcaggccggagggaattccgggctgcccccaaaaagaaccccagaccttctggcataaaaaaacagtttttttttttttacccaaaatcgttaaatgcccaaaactgtactttaaatttcggacccctaaacgtaatggagtccctaagtttcaggccccacccagtttgcacaaaaacgtatcagttttgactaatacaccgaagggcccacccccaattggt

SEQ ID NO: 34579 - DNA, 787 bp, Zea mays
  Clone ID: MRT4577_131540C.1
gattgcttatcatcgcctatcgcgtaccatctctccgttctcccttgcttcctccgcgctcctctcttgatccatccaaaccacttcctcgccctggcggactacaaggagcaccacttccaatcgaaagctcacgacccaccgtacaaaacctacccgcactgacctggcatccaacaaaagaactgtttcatctgcatgaaaaaccccccctgctgggttgtgccatgtcctacctcttggactggaaaacatggccatggcagacgccacttccatctcctatatatattcaagggctcaaggcttgattatattgaaccttcatcacactgctgccatattccccatgggcaccggactgaactacatttgattgatatatcagagcatgaatgttggatccttcttacttcagatggctgcgctaaagatgatcgtagactccctacatgatcagactcttgtgcgccgtatctctgattgcccttttcgcggaaaagatcttgaatgcgactgtccagactgctcttgctaacgagaacatctagcgcgctgaatgatgttggacccaagtaaattacctgccttgaaatactgtatctctgaacctagagcgttcaagcaagtgtatcacgtgatagctacagggacatccatctgtcttgtgctggcttttgctatggcaaacacccgtgcagggatcgctgccagttgcaccggctctgcattatctgtgattacattctggaccctgtatttttctatggttttatgcccccctact

SEQ ID NO: 34580 - DNA, 450 bp, Zea mays
  Clone ID: MRT4577_131541C.1
aaaaaaattaaaaaaaaaaaaaaaaaaaaaaaaaaaaaaaaaaagaagaaaaaaaaaaataaaagaaaaaaaaaaaaaaggccggccgggtctggggggtccaatcttccggtacccggccttcgctacgcttccgtgctcctttctgttgccctcgtatggacgtgcctgaccttagtttttccgccggttatttctgaagaaccccgtttggtctctcccctggctggccttatctgaattgcgtcgtttcccatctccctttctagcggtggcggcctcgcgatggggcccttcccgctttcccttccgattgattggccagtggtgactggccattggccccccgcctctggaccgttacattatgcggggtccttgcggcggttccttctcactgtgccccctccctttgcccgctcctttgcgctctttcctttccttttttcc

SEQ ID NO: 34581 - DNA, 319 bp, Zea mays
  Clone ID: MRT4577_131542C.1
tcgagccggccgggagaagtttcccaccgtgtcgtttatctctcctcccattgccagtcttcgctcgtgtgtgagttctgctcacggtctctcccacccccacgagaggctccgggggtaggaagaaataattttctgggagagctgggggggggcctatggatgtggataggtgcccgccgtcctccgcggtgggggactccgggccccctgcttgctccatatgcccggatccggtgcttgccctggcctcggacccgtcagccgccaaagttgcatgcggcgacgactgccacctaaattgcattgggcccgcatt

SEQ ID NO: 34582 - DNA, 273 bp, Zea mays
  Clone ID: MRT4577_131543C.1
ctgacgcgtggtctccgtgacaagcacaccgacgctcgctccgaatgagaggacaggaggaggagcctgcgagcagaggaagcatctgctatggaggcgcggaggacggacagagatctatctggagagcttaacgctcgcggaatgggccgctcacgcattcgaggccggcgtctaatccagggacagcctctcggctaaggctagtcatggcgactacgtgaagaagccggactgcgtgccagggatggacccacgctcgttcccgatgat

SEQ ID NO: 34583 - DNA, 619 bp, Zea mays
  Clone ID: MRT4577_131544C.1
gcggggatgacccataaaatggggagcatacagaagcacaccaagcgaagctacctatcagcgacttaacagcaatggctagcaagatactatccctccttgagctggttgccctcatagtgagcgcatcaaaggcggtcattatggcacaaagcggactggcttctcttctcttatccacagggactacaccaggtacttaacaggggctgaaacacctagctgcgcaagcctacaaagctacaacaagcgcttgggggatgcgttgtacatcatccaattaaccaatctgcaacaacaagccttggcacatctaaccatacaaaccatcgtaactcaacagcaacaacagctactaccatcactgagccaactagatggggagaaccctgtagactacttgcaacagcagctgcttgcatccaacccactagctctgacaaacgtatctgcataccaacaacaccaacaattgcagcagcgttctgccaccgctcagacaactaaacatggtgaaccctgacgtctacctacaacagaaacaactgcttttatctagccctctcactgtgggtaatgcacctacatacctgcatcaacaatagctgcaacagattgt

SEQ ID NO: 34584 - DNA, 674 bp, Zea mays
  Clone ID: MRT4577_131545C.1
cccacgcgtccgcggccgcgtgggctggaactctaaaatgttgttcaactggcttcttaccagcagtgcacttttatacttagattctttatggccgtgggctggtgttatccttaacaatatggtgtaaactttgtcgtctttgtgcttgtcaatgctcctttttcttgcttggtggttactagagttgtggtttagacttactgagaatcttctcaatgatgtatggttcaaaaaacttactaaagaaagaccatgtttctgtcaagctggtatgcccagcagatctgtttgtacaaaaaagccaggccaagcctttggcctgaagcactaaaaatatctcacatattttcttagcatacacaaagctgctgttaagaaccaatatatctgcagctaatattccctatttgggattatcgggtttcaatcattgatgtccacttgtcgtcaattaacatgaaaatattcaactcataaaatcacccttcacaatgaagtcacacgaggagattacaacaaatggaaaatctgccagctttattcagcaagttttccttggtatacatgctttaataagcatccattcagcatatgcaatgccagtgaaatagcaatgcattcagtgtggtataagctgtaactaagataaaagtgccatggttttttaagtt

SEQ ID NO: 34585 - DNA, 208 bp, Zea mays
  Clone ID: MRT4577_131546C.1
aagtactttaattgctgcaaagaagtgtttaatctcaaattaccatgcaacattttaagtccggatttaatagtattatcgctggtttggagaagaaaaatagggtcattagcatactgcatcgccttactgtaacttaccatgaatctttacatgcattttctgtattttactaggaacatgctgtgcctcttctaaaaattacaaa

SEQ ID NO: 34586 - DNA, 429 bp, Zea mays
  Clone ID: MRT4577_131547C.1
gagcgaaaagactgcattagactagaataaatgacaaggcggtcctagagtaaaagccctaaacataaccggaaaggtatttttcacttttaaaaacaacaaaacgattttggggcatagcctcactcttatcgtccgaccgatacaaggtcttgaaacaactaactatccaccaaaagaaaatctgcctagaaaaaagcatgaagctaagccccttgagctccctaaatcaatatgacttgtacaacatgaacctgccgtctgattggttgtcaagctaactaagcgctcatatctggtggaaaaatccttgagtaaatgacaaaaaatcatatattttaacatattgacatgggagagttgaataggcaccacctgcaatgtcctggttagataacacctggacgccgggccccatttactgataca

SEQ ID NO: 34587 - DNA, 618 bp, Zea mays
  Clone ID: MRT4577_131548C.1
attccgggtcgacgaagcgtccggccacgcgtcccagaacgcgtccgatgaagttctacttcttggatgtagtcaacctagcattgcagtttaaaattacagctacaaattttggagctctagggccatccttgatttgctacctgcggcataatgcctttcctcaaagagatctgcatgactattcaggtgatatcagccatgatcctttggttgtcaagttgccgaatattgggcgttggtatattgcaattgaaactgtcaacaaaacacagacgaatgttacagcatcaacacctgttctagacacaacatgtatctcattgaaatggcaattaactggatgcttgaatggaaaaactggaaccaattgctcttgggaggcatatgggctccatagggttcccaagagaagtccttctgtcccttttgagtcatattatgttcctactgatggaacagcatcactggaagatagccacttctacttggaacaatttttaagcaattcatcccatgaacagtttgcatggacttatttctttttggatgttcctcaaggttcagccggtgcccttatccatgtccagcttaagtcagataaagactatcactact

SEQ ID NO: 34588 - DNA, 280 bp, Zea mays
  Clone ID: MRT4577_131549C.1
gtgacccctggtttcttcagccttagaatctatcggtacgaggccatgattatcacggacttaaacgtttgcgatcacggggactgctccaaacgtgacgacaggatccagggccacacactttgcatggagcttagcacttgtgtcgatgatctcagcgatgatccgtccgacacgcagcacgatacctccgatgtgttctaggagctgcctgaagtggagctatgctcacagaatcgtcatcagcagtatacggcggtccatggtccagtctgacatc

SEQ ID NO: 34589 - DNA, 378 bp, Zea mays
  Clone ID: MRT4577_13154C.1
gcgctcggtcgagcactcgaggctcgatcccctgtgaagagctattgcactcacgacgcgctcaccacgatgcaccgtgaagacatccagccgctagaacgttttctaccatgtgatgcactgcatcgacgaagatacggacatcatgatcctgtagactcccggcacctccataccacacgagtggagcgacttctccaacatccagagccacctttccagcgtgagccctgttgtgatgctgctacgagcctgtgctctggcacttttacctccacaaagatggacttaggactgacttaacagtttcaactcaattcactacaggaacgggtcgtctaggtcgtttatctcgctactacttatgcttgcagcgtc

SEQ ID NO: 34590 - DNA, 342 bp, Zea mays
  Clone ID: MRT4577_131550C.1
atgacgcggtgggggtccggcggccacggcatctgcaaacgggcgatgcggtctcctattatcctagtactagtatctcgcgcggatcgggacggtttaagggtcagcgtccggctcccgcggcgcgtcacgcaggacgttcgcgctcgcttggaaatccacatggcccgcgggacccagcgagcggtgtctcgtaccgcgtgcgcgcgtgaatggtgtgggcgcggcgttgggttgggcaccgtgtggggctcacccgtcacgggatacgcgcggcgtaggtgttccgacctcaagcggactggatttagactggcgtactgtactttaaattgtagataa

SEQ ID NO: 34591 - DNA, 408 bp, Zea mays
  Clone ID: MRT4577_131551C.1
accctaaagactgtatttttttaagagggtagtttgaaaaacaagttggaattgggaatttggggggaaagtcttagggcaaacttaacaaaaatcccgctttttcgaaatttcaaatggggggtgaaaaatctgaaggggccctggggttcccaaaccttagaaatcccagggggggcaaaaattcccccttcccaaactgaagggggaaaaaaaaatggggggaaaacccggggaaaatttgctgttaaaccggggggccccccacattttgcaaatggggggcccccaaaagggggggtattcccgaaaaatcccggggttttccccccccggaaaagggaatccgttttcagggggcttacccccggaatgggggaaaaccccctttaaaaaggggtttccccc

SEQ ID NO: 34592 - DNA, 605 bp, Zea mays
  Clone ID: MRT4577_131552C.1
ggtacacgcggccctccctcgagtttttttttttttttttttttttttttttttttttttttttttttttttttttttttttttttttttttttgggaacccccatatattattctataggacccactttaattaacaaggcccaaccctgttttcaaaaggggaaagggggcctttttggttgacaaacttttccaagggctcaaaaaaacaggcccagctaaatttgaaaggaaaaaccccggatccaatctactaggaaaaaccatccccttcccacccaaaaggaaaaaacttcggccgccttacaaaaacggacccaaggggctttatagtgggggtttcccacagggggggaaaaggaagggggttcccccctttgggattcctggcccaccgaccgaccgaaacccgcttaagggtttcccccccatttgggcgggggaggcccccggcccctaacgcctttccaaagggggcaacttatttgggaaacccattatcggcgattttaacactttatcaccaactacgggcctaagttcttttaatagttcgcatgggctaatttttttactctaaaacttttcatagcacccaaaaac

SEQ ID NO: 34593 - DNA, 954 bp, Zea mays
  unsure (1)..(954): unsure at all n locations
  Clone ID: MRT4577_131553C.1
acataagaactatgtttttggataaactgctgcataatgtcttactgcaattttgtcgtacgaccggcaacagcgcaagctacacggtttgttggcaattctcggacaagaccccagcacgaggagagaacactcctacctttttttttttttttttactagcaaataacaatataacatgaaagtatgccatgtttgccggcacaagcgccagcatgcaacgcacgctttgaaagttccacaactcaaactcaacaaaaggactcgttccattatttagacatcagacacctatcatgttaacagaaaacactaccgaatacatatggcctagaatccacacggcctcgcatggtggtggtggacacaaattagctcctcttgttggcgtagctgtcaggctcatcgtccttgaagagatcatccatgatttcatcattcttgttaccgtcaccaggtgtgccggcagagaacccatcagcgccactggaaccacccattgcgccaaagctaccagcagggttttcaccaaaaccactgtcagcaaagttactgctgccaaagctgtcgctacctccagcagcaaaactgccttcagccccacctgcaactccataatcaccaccaccaccatagccaccaccagccctgtcgccgtagttgccaccatatccaccgctgccgccaccatagtcaccactgccgccgccgccatagccaccgctaccaccaccatagccgccaccatagccaccgccaccatagccaccaccaccaccaccatagccgccaccaccataaccaccgctgctgcggaagccacctggactctcgggcggacgcgtggcccggaccctccgtctccccagngtctttccntccntggcagtgttggcngccaaaaactcataaaaaaacagtgtaagttataaagccaaaaacctctggacctcc

SEQ ID NO: 34594 - DNA, 241 bp, Zea mays
  Clone ID: MRT4577_131554C.1
gggggtttttgtacatttttgggggtttttttttatgccaacaaaagcctcgttgattcttagctgaggctcattcaatagatcataccaaccaaagtggactgatggggtcccgccgcctaccccaagggcagtacggagactttggcttagaccatcgcgatgggcaacccgtttcaataaattgctctgttagcgcagggccagggaggatggggccacgaatgtgcccttacagccc

SEQ ID NO: 34595 - DNA, 206 bp, Zea mays
  Clone ID: MRT4577_131555C.1
gaattccactatcgaccgacgggtcccctcacttcatataccactccctatgaggactcaatttcacacacagccgacctttgtttaggctggattaacaggaaggcaggagactcatactgcatgtcatgccatcacctcaacttcatccgtcgatacatatgccagctctctaccgatccacgttgaattccttatctttgcat

SEQ ID NO: 34596 - DNA, 140 bp, Zea mays
  unsure (1)..(140): unsure at all n locations
  Clone ID: MRT4577_131556C.1
aacccttgcctccggccacganagccccagcaggacccaggcaacggcccgggggggccgaaggcccagcaaggaaggcaacaacaggctttggggcncggctttcctggatgaacgtggcagcttcctcctaagccgtc

SEQ ID NO: 34597 - DNA, 299 bp, Zea mays
  Clone ID: MRT4577_131557C.1
gtctgtgctgcggggcagctacaggccaagccagttgtgactgaaacagttgcagataaaaggattgaacacaaagccagaagcgcctagattaggccagtgcaagaaaagggagtctgaagaaaacttaatcatccaaaggaaagtgtgagaaaaaaaccaaataaaaacaaaggctttaaagcctgagagaattaatgagtgcagtaaatactgtaataaaacagtgcagaggttatggactggtaccaccttgtaatgacatatgctgtttgcggagtttctcagtactgaataac

SEQ ID NO: 34598 - DNA, 269 bp, Zea mays
  unsure (1)..(269): unsure at all n locations
  Clone ID: MRT4577_131558C.1
gcagaaagacaaattgacttacaaaggtaaaaatgcatttgcaaagggagaaaatgaaggccaaacagaagcaggctccagcttctgcaaaaacttggattcacaaatgtccctgaacagaaaatgaagctcacttcagaacacacactctctgccttgaaaactaaagagactattacttcaatttcacatgaccacaagtcctctgatggaaatgtacagcagaaactcttgagagagaggctanaagcaactctgttctccccttc

SEQ ID NO: 34599 - DNA, 443 bp, Zea mays
  unsure (1)..(443): unsure at all n locations
  Clone ID: MRT4577_131559C.1
ccggccgggaaccttcctgcccgccgggccctgctcgcagccgacgttggcattaggcacgcctgcgaccgaccggcatggcgcgatccatcgattgcgccaccgacagctcggtcaagaacgtggcgctggacacactgttcctcatcgtcctccaggcggccgtcgtcatcgcgctcggcaagttcatacacctcggcctccgccgccacaacctgcccagcgccacctcccagatcatcgcggggatcgtcgtggggagcctgggtctgcacgacgtgatcgtgcacgtcgacgtggagaacgcggaggacacctacttgtcgctacgtgtcggaggcgagaatcttctacatgttctacgtcggcctggaggcggacgccgccgcgctgtgnaacgacatgcgccaagccaccatctccccatacgcgagcgttaccac

SEQ ID NO: 34600 - DNA, 1175 bp, Zea mays
  Clone ID: MRT4577_13155C.1
ggaacaatctcagagcgctatgtgcgtcctgatactgtaattgtcagctgttaatcaggtggcccagggccacgaatgcatttttggcaaggcatttacaagagctgtcgtgtaaaaaaaatcttaaagctgttgcagaacggcagcttatttgcaggccatgataactcacactgccatgggccgttttttttttttttttagtcaaaaataatagtcacgccacaacgccaacagcaaaaacaatgaagttgcaaatgaaagaataattaaaaaacacaggaattgatcacatgaacaatctcagagcgctatgtgcgtcctgatactgtaattgtcagctgttaatcaggtggcccagggccacgaatgcatctttggcaaggcatttacaagagctgtcgtgtaaaaaaaatcttaaagctgttgcagaacggcagcttagttgcaggccatgataatcaacactgactacggccatggccgagtcataagaactgcttcaagaattcagtggccactagccggccacgagtgtttactgacagcttcagctcactgatctccttgtcaatatcctccataaattgcacgatgaaatctatgagcttgtgcttatgcatgtcctcacaatggtagtttgttatcaggaaactgatatcatagccctgaaccggttttctcctcaacacttggaatgcctctgccctcattgacaaaaacctaaggaacttcttggcaagaatgttctccaattcatctgcctgcttaaccttcatgcttatacgtatggagttgattgaagtctctatcaagcatttttctgcttcgttgcggcatatcagtaccggattcagcagaagttcagggcttgtcttgagctccacctccggtttgttgtgcctctcgacttcttggcaagggaaattctggaggcacatcgccgcctccagagtgttccggatgcaggtgaggtacaaccgcagcgtattggcctggtgggtgctcatcgccggcgaagagccggacgagaacctgggcacctggcgtagggcggccgcggcggtggcccaggcgtcgccggaagggaggaagggagagagatcacgcaggagtgaacgagacaagcagcaggcctgatgcgtgaccacggggcctctcctgggccggttatt

SEQ ID NO: 34601 - DNA, 1084 bp, Zea mays
  unsure (1)..(1084): unsure at all n locations
  Clone ID: MRT4577_131560C.1
gtggccgcctcgaggccggccgggactaactgactgactgtagggagtagagacaaacaaaaagacggccgcgtcactgattcaagctagcccgccatggacgacgcacctgcagccatcgtcaaggccaagggcggcaggggggcgttcctcgcccacttcttcatcgtgctccccgtcgtcaccctgtgcgtcgtcgtctacgccccacgctacttctccggtcccccaccgtactacggcggcggcgccaacgacgtcggcggcatctccgcgcccaggcccagctcgatgacccgtacgtcgtcctcgtcgtcagcgcatctcggcgggttgggctacgtcgctggccgccgcgatgcagacgaagacgaccagcagctgggtgtgggtgacggcggcgcgctgccgcagcaggtggttcttgacaaccaggtgggctccccgtgctcgtccctgcccaaccacaccatctgctgcgaccgctccgactaccactccgacgtctgcttcatggccggcgacgtgcgcacggacgccgcgtccctggccctcctgctgttcgcgccgcgcgcagcgtcgtcagcgccggagccacccgccgcggaggagcggatacggccctacacgcgcaagtgggacgcctacatcaccaagaccatccacgaggtcacgctccgggtggcccggccggaggaggccgccgccgcgcaccggtgcgacgtccggcacgacgcgccggtcctcgtcgtcacggcgggcgggtacagccacaacatgttccacgtcttcaacgacggattcctgccgctgtggctgacggcgcagcacctccgccgccgcgccgtgctcgcggtgctctcgtacagcccgcgctgggccggcacctacggcgagatactcgcaggcctctcgcggtaccacgccatcgacctgctcagggacaagaggacgcactgcttcccgggcgccgtcgtgggcacccgctaccacgactacctcgccgtcaactccacgcggctccgggacaaacagaccatcgcggactttcacgacttcctcgncgncgtgtacagcgacgacg

SEQ ID NO: 34602 - DNA, 262 bp, Zea mays
  unsure (1)..(262): unsure at all n locations
  Clone ID: MRT4577_131561C.1
aaaaccaaacctttattatgagccaaacaaaattggccaaaccacacataaaaatgggggggggcctactgcattattccatatatngatagagggggatggctagaggaaattccccaaatttcctcaaccactnntngggcgaaacgccacagtttcccccccctgctcttttccctcctcccccccttatcccccccttttctctaccccccccccccctcctctcctctcccccccccccccttctccccctttccct

SEQ ID NO: 34603 - DNA, 307 bp, Zea mays
  unsure (1)..(307): unsure at all n locations
  Clone ID: MRT4577_131562C.1
aaaaacacacaggggcgggacacacanggggaggcccagcgacgcgggacggggaaaaaaaacaacgagcggagaaaaggccagannaagaggaggacagcacacagcnccgggcgggggggagggnnaccgcangcgnggccagccggcgacgacggacgnagagacncgcgcagggccggagcngaacgccncggcaccccggcgcaggcanaccggcaggcnggcagggnccacncacnncaaggggccnggccccaggacggaggaggggggcaggaccncnggcagnncccgcngnggcgcg

SEQ ID NO: 34604 - DNA, 486 bp, Zea mays
  Clone ID: MRT4577_131563C.1
aattcgatctacgtgctactctcactcgtgtctcagtcagacaccgcagatccgatgagcaaagagtgaaagcatgacgaacccatggtctaccccgaggttgcgtggagatgatgccgatctgtttctcggtgcagatgaactccctctcaccgatccagaagatacatcgccatcaagcaccaggtccgcatgcaggacaccatctagtgcgcggagatctacctcgagctcctggagatgcagctgctcaaggatgtcatcatcgcggacgaattcgtcggagcggctgtgcccgaggatgatgtcgcgcctgcctgagggcagctgtcaagagactgcttccacgtacttctccgcagagctgagaagagatgcatcgaggagctcagatgacttggtggaattcaaaatggtcagatggagtcgatatttcagctgcaccttaggatgcattactgtgcgatgtaagagttatacaagtgt

SEQ ID NO: 34605 - DNA, 287 bp, Zea mays
  Clone ID: MRT4577_131564C.1
aagttcacaacccagaacacatttgattacttctcgggcgggatcttttccagttattgcttcgggcgtaattgacattcaccggttcaggaaataggaaaaacgggaccttatttgggcttcacaagactcatcgccttcattagtgggtgtttaaacaccattggtggtgtggactgaacaaccatttaaagcgtggctaaccttgcggggcggacatcagcatttggttttcaaaaataaacggctcaaaagaaggttcccctttatcggcggtgccctttttt

SEQ ID NO: 34606 - DNA, 537 bp, Zea mays
  Clone ID: MRT4577_131565C.1
tccggcggccggcccggacgggcacactttactgggggtgatgcgtggtgccgaattgcatacggctgaggctggaccatgagtagtgcacacagaaacgaagcctgcaggcctgtgctcaagggcaggacatttcaattggtgaggtgatcagactcacaagcagctgctagcagcacccaacggccttttgtagggcacggatcaccgggaacagaggaacacggggctgtatgccccatgagctggggcctcacggcccgcgcagccgtggccttccaccgtacgtacagctcgaggcacagcaccgctgcatctggcccccctgccaatggcgcatcatgcccatgctgagatgacacagctgaaccctgccctacaagagccgctggggctgctacccgcatgaggtctgtcaccacacctttcgtaatgcctgccggggcacatgctgcgcgattacttctagcgctcacatggccagtcctatccatatagaactcaggatcctgctcactcccagtatagtccagcccg

SEQ ID NO: 34607 - DNA, 285 bp, Zea mays
  Clone ID: MRT4577_131566C.1
gggctcccccctcgagagttttttttttttttttttttttttttttttttttttttttttttttttttttttttttaaaaaagggcatacatccgccctaaagaaagatctttttccggacccacatggacaagaacttgtaaaccccaagggtgctattttaaagcccggtggctttgtttaaattaacacccccaaaactaggatcaggaagagattaccctttttacaaaaaataatttctatgtgggttggtccggggccatcctaaatgcttatgaaaaa

SEQ ID NO: 34608 - DNA, 511 bp, Zea mays
  Clone ID: MRT4577_131567C.1
gggggccaaagctttttttttttgggccagcttattacacgaacccctgaaacctgggggagactacacagcctgaaacctgggggcgcgaacgtaaacaaaaaaacaaatgcaacgtttagtttaataaccccggggggcgggttgattttttttttacaaaccccgtccggggaatcatccctccctttaattaaaatgggggcccaaactaactagcttgctagtttcggaagttggggttgatttcaatggccccgttaaatataaactgcttaatttgggcttccccaaaaacctgttgttcaaaatcaaacaaaaacgggtccctgcaaatgggcttttcgggaaccttttttaccccttccaggtacgggtgctccaaccccttttccactgggatcctttgcaacgggttaaaggggaacatcccctcgatgagggccaacgcgacgggtttgtttccgggaaacagggttacaaacggccggggcgggaactgggggagggg

SEQ ID NO: 34609 - DNA, 310 bp, Zea mays
  unsure (1)..(310): unsure at all n locations
  Clone ID: MRT4577_131568C.1
ttgaccacactgatgatgggtggccctgcgagcgctgcacatttattaaccattcctgagtgggtgcgtgcagggtctgcaaaaagagtatggttctaggatgatggaattggtaaaagggaggcactccaagaaaagcttaaagttgatggagaaggaggggcgctttagatccagtatgagatgctgagcttgcagcagctgctatggtggtcagagtggtatttaagggcctgaaatgggttggaacggaatgagggctgatgtgtttacgttaatttggnggtgtgtggttgagtatttgttttgt

SEQ ID NO: 34610 - DNA, 469 bp, Zea mays
  unsure (1)..(469): unsure at all n locations
  Clone ID: MRT4577_131569C.1
cccggggcacggtcactctgttgtagcgggttcagctaaaattactatggcgatggaagtgaggtaggtttttgcccagtcttgctgatgtgcttcccaaatgacatatcagctaatcatccaggatatgcgtgtgtccttgcaaatgttcttgaagctgcaacctggattttgtctgatgctaagtttgcttctgattcagggggggagagtgattgttgtttctaccttgttgttggataccttgccagcagtcacaacacctactgaaagggcagatgatgatgatgagacacccatggatgttgatattaaaattaatcttgatgttgatttggaaagacagataactgcagtaattgatccaaagctacttgaacatttggtgaatgctatgttgagaggtacattaagcataaatgattntgatatgaatgaaccatgaaatgctgaagtggatgctgcagga

SEQ ID NO: 34611 - DNA, 325 bp, Zea mays
  unsure (1)..(325): unsure at all n locations
  Clone ID: MRT4577_13156C.1
cacattcgagaaacaacgatcgaagcacaacaagccacttgaagactctnngtttaggaggaaaaccanncaaaccacgcaagcgcnngtgcaagtctatcatggaggtacgnnngtcagcaggggcccagcgcggcccacgnngcgccacgggctcaaatgtcgaccagtnnacggcaacccaagtcggcnnggcgtcgagcaacggcnnaccggcggcatgagggcacggcacgggaaccaaccggcggcatgggccagctgggtgagcacggcggcgctggcatgggtggcgggcagttccagcctgcgagggaggagcaca

SEQ ID NO: 34612 - DNA, 588 bp, Zea mays
  unsure (1)..(588): unsure at all n locations
  Clone ID: MRT4577_131570C.1
tgcagatggcatncaagttcgtgggagtgaactcggtggggatcgccggcgacgccaaggaccggctggaggtggtgggggagagcgtcgacatcacctgcatgatcaacctgctgcgcaagaaggtctgccgcgccgacatcgtcgtggtggaggaggtcaaggacaagaagaaggaggaggaggagaagaagaagaaggaggaggaagagaaaaagaagaaggcggaggaggaagccaagaagaagaaggaggaggaagagctcaagaagaagctctgtccgtacctgtacccgccgccgccgtgctccggtgcctgttgccgcgggccgtcgccgccgatgtttctgtgcgagccggaacagccagcgggatgccacatcatgtgacgatgaagtgaagctccgtgaataatcgtcccgtccgaacttgtgcacatgcgtggttgtggttttgctttggcatctgaattacaatcctaagtgatcatggaatttagatcactacttatatataaagtattgttttgtgagtttgtttttaagttaagatgttctaaatgcgaccaacanngagaccactacactt

SEQ ID NO: 34613 - DNA, 144 bp, Zea mays
  unsure (1)..(144): unsure at all n locations
  Clone ID: MRT4577_131571C.1
ggggctgggaccgagacgccccgaggaaggacgggggcccctgacnaggaccgggggagaagctgcggtcccgggcagaacgcgcagacgcagnccctcgcctccccgcgctcgnccncgggngggcccgcctccgcgctgctg

SEQ ID NO: 34614 - DNA, 366 bp, Zea mays
  Clone ID: MRT4577_131572C.1
ctggaagcctcggtgtctccccaggatgcttggcgaggttcttgggttgggcgcagggtcttcgcgggcgaagaagcgatcggaggcgccatcaatttctcgccgttagtctgacgccgccgctaatccgctccccaccgttgatagccccagcgttgctacaatcggagcgcgaggacacgtatcatctgaaaagcaagttggtacctggattctcaagtgccagggcctgattttaagtaaggcgctaaagaacatgaaaaaaattgagggcgaagctacctagaaggaaattgtaaagcttaggtccgaagcatcagaggtgttgcaatgagttggagaggaccttctcccctgttggggcaa

SEQ ID NO: 34615 - DNA, 797 bp, Zea mays
  Clone ID: MRT4577_131573C.1
attggtagtaggctgctcttgttgcgccggcagcgggcaggcggcagcgcaaaacattaaaaccatcatttgcagcggcggctgctgccggcgacgcgatgtccaagcaaaagtccgtgatcaggctgggcgtaccgaacgacaagaaccggtctaaggccatgcagatggcatccaagtttgtgggagtgaactcggtggggatcgccggcgacgccaaggaccggctggaggtggtgggggagagcgtcgacatcacctgcatgatcaacctgctgcgcaagaaggtctgccgcgccgacatcgtcgtggtggaggaggtcaaggacaagaagaaggaggaggaggagaagaagaagaaggaggaggaagagaaaaagaagaaggcggaggaggaagccaagaagaagaaggaggaggaagagctcaagaagaagctctgcccgtacccgtacccgccgccgccgtgctccggtgcctgttgccgcgggccgtcgccgccgatgtttctgtgcgagccggaacagccagcgggctgccacatcatgtgacgatgaagtgaagctccttagtgctcaagatggatcctgcctgcctgggctcaacaatatgcatgcttgtgattttggtttgccacacatcatcgaccggtcagtttcactccgtgaataatcgtcccgtccgaacttgtgcacatgcgtggttgtggttttgctttggcatctgaattacaatcctaagtgatcatggaatttagatcactactatatatatatatatataagtatttttttgtg

SEQ ID NO: 34616 - DNA, 675 bp, Zea mays
  Clone ID: MRT4577_131574C.1
gccggggaccacgtcccctctcttagagcgaatattagattcggtctctttggggcaatagtggtccaaaccacggtccaaaccacacccgctattccactcctttgttgcccgccgcaatggacaccaccttcatcaccatccatgacctctccgacgatgcccacatcctgtactcgtctgattccattgtcgacatcctcggccacactcccgacgaggtcgtcaacaggtccgtgtggcagttttttcatccagacgaacttcccctcgccaaagcacagcacagtcgcggtgtgaggctcgacaaggctgccgtcttgtcttactgccgcctgaagaatcgccagggcgagtgggtcggctgtgaatgctgcttctcggtcgtctacgatgtgctcgtatgctgcaccagcgtctaccggcacggcatgcggagtcagaagcgtgcagttgaggcgcccatagtccgcaagttattcgcttcctccccaaaagaccctcgctatcatatgctgtctcacttatcaaccaagtttgaccttggccacgaggatcagacccatgagccccgcgctgccctggttctcaacagattcacccgcaccctgactggcatgtacgcgacaagcggcatagagcagatcattggcatttcgagcgaagccatgaagg

SEQ ID NO: 34617 - DNA, 546 bp, Zea mays
  Clone ID: MRT4577_131575C.1
atggcgattcaccagaccggcggctgggacccccaccacgggattcggatctccgatgcgccggctggaggcccccagtctaccggcgtggctcccatcgcccccaccgtggctcctagcgcccccgccatgaccccccgccccttggacaagggcaaggggtctataagcactttctccgccccaggcggcacttgggggtcggaggaagagaggcgacgccgacttcgccgtgctgacgggtcattcatctcggacccccccagaagcgtcagaggaccgctggtgggaccgaggaggccggctccgaggctcagggtgtgcagaggcgcgtcagtcctccgccactaccaccatcgggtccgccgccaccacaaccaccaccaccgtcgggtccgccgccaccaccaccacctgggggtaatctcccctaggagcaccagcagcagcaacaacaacaacagcagcagcagcaaaagcagcggtcgccccgcttttagaatcgctggaaggtccaggggcccaagctgcgacctgtgcctataa

SEQ ID NO: 34618 - DNA, 758 bp, Zea mays
  Clone ID: MRT4577_131576C.1
acccgattggatcatggggtggaaagtaaaacaacttgggcaaaatattttctctcagacaataacttcagtgggccgattccatagtccattaattagttggtaatagagagtgagctctaggcctaccgatgcttgttttctagtacactgcaagtagcactttcttgcacacgtgaaatttctggtgaatgaacgaccattgaagaagcaactatctagcagtagaattggttcaaatcaagacccagtatagcagaggattggaattgaaaacacaagcaaacattgaattgaaaccatctctgtgttagcacatgtttagcctcaccacatgcatcttctttctactagcatgcgcacaagcaccggtctatgtttgcctcaccacatataggcctggcaagattcgcttatattatgcatgcctgagctaaaacagaggccaagctacaccaggtgaagacggaggccaagccgaggaagatgcaactagtgcgatggagcaaggcgccagggcacggccacgtcgacacagacagagtaacgtgcgtatgtgtgggccggagtgggccatgtaagagccattgggctgggctgtaataggtgaggtataagtagcctcatcaccagagaacgaaccatcgatgaacaaaacactaaaattaccaagtgttttgacaatttggtatcagaaccagattacgaagtgggccggagtgggtcgtcgttgtttttcccgaaccccctttcttccc

SEQ ID NO: 34619 - DNA, 365 bp, Zea mays
  unsure (1)..(365): unsure at all n locations
  Clone ID: MRT4577_131577C.1
ttctcatttttttaacaacaaccgaaaatttttcatatatcagttatctcacacctaaagaataccaagaattgggtactataatcagatgaaaccagggggccacacatatgcctaaacccatgcagtcattttggcgtggatgtgtggacaacaagaactccacaagcttggagggtcagccagctgacctccaacttacatacggtgttcatccaccacgactgtaccagtagtggcaatacccgaacatgcaggcctcacagtgtgaaggcgcctgtgacagcaccacacgtgttgctactgacctggtgcaacatctancgagtcagatccggaggtaagatgaccaggcttgacaccat

SEQ ID NO: 34620 - DNA, 855 bp, Zea mays
  Clone ID: MRT4577_131578C.1
gattggatcatgggttggaaagtccaacaacttgacaaaattattctctcagacaataacttcagtgggccgattccatagtccattagttggtaatagagagtgagctctaggcctaccgatgcttgttttctagtacactgcaagtagcactttcttgcacacgtgaaatttctggtgaatgaacgaccatggaagaagcaactatttagcagtagaattggttcaaatcaagaccccgtatagcagaggattggaattgaaaacacaagcaaacattgaattgaaaccatctctgtgttatcacatgtttagcctcaccacatgcatcttctttctactagcatgcgcacaagcaccggtctatgtttgcctcaccacatataggcctggcaagattcgcttatattacgcatgcctgagctaaaaaaatgcatgacgtgagaagctctccaagcggacatggggatgaacaacatgtcagcacagctacaccaggtgaagacgcaggccaagccgaggaagatgcaacaagtgcgatggagcaaggcgccagggcacgacaacgtcgacacagacagagtaacgtgcgtgtgtgtgggccggagtgggccatgtaagagccattgggctgggctgtaataggtgaggtataagtagcctcatcaccagagaacgaaccatcgagtgaacaaaacactaatagtgtgtttggtttgaggaatgaagtgatccattttcttctcacttctcacttttttatttggtttgtggaatagaatgggttgatccatcatcacctcatttctcataagctaataattagtatataaaaaaaaaaaaaaaaaagcggcc

SEQ ID NO: 34621 - DNA, 1961 bp, Zea mays
  Clone ID: MRT4577_131579C.1
gctttaacctttcacttctcagctatctttctaacaaggcaagttatcaaatctgtacgaatcgttgttagggcataatagtctatcaggtagcatcccagcaaccattctgaagcaacgtaaccttacaattctgtacctgggtaagaattctctacgtatggtgttgccatctgatattggccatacccttcctcacctcggtgcgctttccctgtacaataacatgttctacggtccaatcccagcatcgctaggaaacgcttcaattctcatgatattagacttgacagctaacagtttcactggacatgtacctagttctttgggaaatctaacctacctatccctcctacaactagaacagaacaacctcaaagcaaatgataatgagggatgggaattcatagatgcattgcgcaaatgtcagttcctggaaaaactcttattatcttacaatcagctaggaggagccataccaaattcagttgggaagttatccaacaacagccttcagtacctacgattcggcagaaacaacttgtcgggagctgttccggagagcatggggaaccttattgccttaaatacgttagatctagaacaaaacaatttgaacggtctgattggatcatgggttggaaagttgaacaacttggtaagattatctctttcagacaataacttcagtgggcccattccatagtccattagttggtaatagagatcgagtgagctaggcctaccgatgcttgttttctagtacactgcaagtagcactttcttgcacacgtgcgtgaaattcctggtgaatgaacgaccatggaagaagcagctatctagcagtagaattggttcaaatcaagaccccgtatagcagaggattggaattgaaaacacaagcaaacattgaattgaaaccatctctgtgttagcacaagcaccggtctatgtttgcctcaccaagcggacatggggatgaacaacatgtcagcacagctacaccaggtgaagacggaggccaagccgaggaagatgcagcaagtgcgatggagcaaggcgccagggcacgaccacgtcgacaccgtgcgtgtgtgtgggccggagtgggccgtgtaagagccattgggctgggctgtaataggtgaggtataagtagcctcatcaccagagaacgaaccgtcgatgaacaaaacagtaaaactacgagcggcagcgccgtcgctgtttttcccgaaacccctttcttcctgctcatcaattccctcccgagtgctaacaatctggtatcagaatcagacacactcgattcgagcggcatctgtccatggcgtactcgtgcaaccacgtctgctatggagcacgccgaccaaccgccagatatgcttgatggaagcacgcctccggcctctccgagaagttcaccggacgctgcgacagcgtcgagcggcgcgtggaggtgcggtgcgactccctgcactcttcacagtgcggtgcgagaagatccaggagcaggtcgatgtcgctgcactctgcagtgacgaacatggcattgcgttggaggggaagcgcaccgacctcgagcaatggcggcccgatctcgtcaagcgggtcgaggaggtggcgtgtgtcaacaaactcctcgagcgggaacgtcgagcggaatccgtcgtcaagcccaccatcttcggcacttacacggcggcgcccctgcgaccactgtttgaataaatcctagctgctaactatagaaagcagaggggcccctagcgccattagaagaatatctgcccagattgcggcatacccccaggtgattgggatggcaatcatcgagcacgattatgccgggattgggtaaccatgtataactgcgtgtatttcctttatatagcaatagctaaacaacacaagcaagtaagtggctttgcagcaccaaaaaaaaaaaaaaaacggcggcc

SEQ ID NO: 34622 - DNA, 438 bp, Zea mays
  Clone ID: MRT4577_13157C.1
gccgcccggcccgccccccacaaggccactcaccttaaaatctcgactcctcgaccggaccgagcagaggatcacgtggcttcactccgtttagctggtcgtctcgcccccgcgcctgatctaccgcgacggcacatgccgccttctcaggatcccgcaccggcgggtcctcctcgtcgttcgcaacagacgcgacgcgctcggtaggctggctcgacctcccgtgcacgcggcgccatgcaacaacaacgacagcaggggcgccgtggaggcgcccgaccgcctcgtggccgcggccgcctacctatacccgtgggtctacagagcgcaccactgtcgctggcttgtaacgcactcgcccttctgcggcggcgctcctccgcacattgacccccgcggctcggatcttctaatcgtggtggatgagaccctttatcc

SEQ ID NO: 34623 - DNA, 425 bp, Zea mays
  Clone ID: MRT4577_131580C.1
atacgccaccggggacgcgaggcgattaggggggctttagcgcctgccgcggcgaagctcatgccatccgcgacgccaggcactgatgcgatgaacgccaggcggttgctacgcaagaacacagtcacaccataaccacgtgacgagaacggagaactcgggaagaacagagccgccactgaggaaccctagcaacagaggcaagctaccaaagacattggccccataggtacctcatccatccccgacggagcggggccagcccgcacgaagcctattcgagacaagggacgatctttgctgacttggagagcatcagccgaatgaaggtcgagcaaggcggaaggccagtaaatagagcaacacacaaccattgaaatcaaaggagacctatgcacaaccccgacccgggcggcacaccaggc

SEQ ID NO: 34624 - DNA, 279 bp, Zea mays
  Clone ID: MRT4577_131581C.1
taaaaaagccgatcaatatgatcgccctgtggagccaccagaaggtgtaccacccgtgcgccatcaatgcggcgttcgctgagttcatctccaccctcatcttcgtcttcgccggccagagctccggcatggacatcagcatgctgactcgtagctgcacgacgaccccagcgggtctgatttcagtggctgtcgctcaaacgttcgcactgtgcgaagcgctatctgttagcgcaattatctgcattggacaaattcaccctttcatcagcttccgta

SEQ ID NO: 34625 - DNA, 235 bp, Zea mays
  Clone ID: MRT4577_131582C.1
gtcccgctttcattttgaaagctggccctgcagccggccggattcgtacactcgacaacgctgcgtcgcactgctcttcatggccaaccttccgcgcggcgggcacgtggggacagtcggggcgacccggggagtcgggaatcgaccgcgagccctgggtgactcaaccgcagccggccctcagcgcgctcatcggccagcaacctccgtggtgcgctcgcgcgcgcgcaagcgc

SEQ ID NO: 34626 - DNA, 304 bp, Zea mays
  Clone ID: MRT4577_131583C.1
tcgtctttggcgtaccttggactatgcaaggatgcacttcatgtgtttgagagaatgctccaacaaggcatacaacctgacagcgtcgccttccttggggttctttctgcctgcagccatgctgggctcgttgaagaaggcctgcactatttccttatgatggcgaggggctacaacatcgatccaaattcacagcaccttgcttgtctgggtgatctcttggggagagctggtaggattcaagatgcttacaacattggtatcaagctttcttgcgagaacaatgctgatatcggtggagctt

SEQ ID NO: 34627 - DNA, 229 bp, Zea mays
  Clone ID: MRT4577_131584C.1
cagggagaaaaaacggccaccgaccggagaaggccccgcgcgccgaggcgacaccacacgcccgccgcgccgcgccagcgcccacaagcgaggccaagacccgcggcggcggcgccagcagcacgcagcgcgcacaggccaccaacaacgggaagaacaacacgccggacgcacaggcggagaagcacgagcccaacgacgaccacagcccggaccacaacgaggagga

SEQ ID NO: 34628 - DNA, 487 bp, Zea mays
  Clone ID: MRT4577_131585C.1
ccgcgggccccgattccgggttcgcgccacgcgccccgctttgctttttcaggggttcaactagcgggcgtgggggtccaccttttcaaggagggttacgacgagaaagaagccactgactgaagaggctagtgatgagctatttgatgagcgtgagacggaaccgctttgactatgagcaacggaggacgccactgatattggcatacactgggacaagtgctgcatgtgctacatttctctggatgatggtaaacatcaagcgaactcacattcgacgggctactaccaatgcatgcgcgacgaagaggagataggcgtcgtggaatatgctcgtgaagctgctacgcatagattctatggtgctcccgagggcattcagcagcaactagtggacgctgcgacagcgatgggcggatacataaattgtggggccctacggactacatcattgatacatgtggagttttgacgaggtactttggga

SEQ ID NO: 34629 - DNA, 379 bp, Zea mays
  unsure (1)..(379): unsure at all n locations
  Clone ID: MRT4577_131586C.1
cttatttttaatttttttatnatttaaaatgggggctangtattgatttattcagaatggtgagaaaataagaacatttagttctatatctattcgtaattttttttgtaaacacatggatagatttgggatgctacaggaccgttatggcatgtacagtgagtgttttaagttgtggggtagggtatgtctagggggtaaatgttaaaagactcaagacatgtatcttgacgaagacacagtgtcttagctctatgttcgagacagtagattatttgattgatcactttaatttattgaatgctctgatttgtataatgaatatgataagacatatgttttagacatgaccattatattatgttgtgttttagttatg

SEQ ID NO: 34630 - DNA, 709 bp, Zea mays
  Clone ID: MRT4577_131587C.1
gggaccctcgaggccggccggtataccattccctaccaccatgtacacctatccgctgatgactgttgaatagccgactgactgtctcaccgcgaggctacaacaggacattgatgcgcatatgtatgcacacctagttatgaattatagcgcgctcgactctgactacaaccgtactagtccggtacaacacctgtagacatacccatgtccaacacttctctaatgctacatcatatgtcattgcataggaagtacgatatcacgtcttagcatgcatgaaggcaggagactagagatgcattagtgcctacacatccgctcgcatcaagccagataatatgctcgccgatcgcttctgaaataacgtatcgtacaaagaaacgtatggtgatctgaagaacttcctccatcacaatccccaccgattggcacagaactgcatacactcctcctgcgcctcatagacccaattctgaagtgccattgatctctgatgatatcttcttattaccgatcagccgactctacagatacggaatatatccccatgacctgcaattcatgtcgatggcattgattatcgaccgatgataacctccactagactccaacttccagaacgatatcactcctctgacttgatgacatagctctgtacagatacactagctctgctcttctcctgaaaatatgatcatcgatcttc

SEQ ID NO: 34631 - DNA, 634 bp, Zea mays
  unsure (1)..(634): unsure at all n locations
  Clone ID: MRT4577_131588C.1
ggacggcgcaggaagacaagctgctggtcgagtatgtcaggcatcatggagaagggaggtggaattctgtcgccaagttaactggtctgaagcgaagcggcaagagctgccggctccggtgggtgaactacctgaggcccgacctgaagcgaggcaagatcacgccgcaggaggagagcgtcatactccagctccacgccctgtgggggaacagatggtcgacgatcgcgcgcagcctgccggggcggacggacaacgagatcaagaactactggcggacgcacttcaagaaggccaagccgtccaagaacgtcgagcgcgccagggcgcggttcctcaagcagcgacgcgagatgcagagccagctgctgctgctgcaggggcaagatcagcatcggcaggaggaggaacagcccgatcatgacgacgacggcgccagtgaggcaacgccgggtgttccactggaggaggaggaggagcagcagcagcagcagcatgaggacctgcggatgatgctgcagcaggacatggacgacctgctgttccagttctgcccgatggcctcctgcacttnctcctcctgcctnctncccggcggcggcagctgcgccttcgtcgtcagcgcgtcggcgag

SEQ ID NO: 34632 - DNA, 310 bp, Zea mays
  Clone ID: MRT4577_131589C.1
cccaacgtaccattcaactgatgaggtgatccttgtgaaccaacacgttagcccaccagcacttagcggtgatccgagaactttcatggcctgagttgatcatgttgcaaagcttacggtgctgcatgattcctataccgctcattatacagagactgatccaagcaatggcgatcaatgaagctgatattgccgtgacacacacatgtgtctaagtgtagacaaaaatgatgaatgcttgtaggcagatcattatagatcctacgctatgaactgacgcattatgcgctaagccgtgtataggcgtatc

SEQ ID NO: 34633 - DNA, 467 bp, Zea mays
  Clone ID: MRT4577_13158C.1
ggggaaaagcctagttcgggccccggttttcggaaacaagggttcacccccaactttgggcccaaacaaaaaaaagggaggggggttcccccctttccttataaggaaggtttctccctttaccaaaaaaaaggggttaaatcaaggggaagggacccccccaaaacaggggcaaggccccttcagctttttttgggcccaaatttctggcattggttaaaaagctaaacccttagcttccagggggtaaaccataaaaacattttccccggggcttttttggcctggggaggcattggccctaacaaaggccaaaacggggcttttttgaaaaaaggcaggccccaatggctgggatgggatgggcccccgggacaacgacggaacaaaggacccccccttaatggggggggaggggggggggccaaaaaaaaaaaaggctggaaaaggaggaatcaacccccaaa

SEQ ID NO: 34634 - DNA, 454 bp, Zea mays
  Clone ID: MRT4577_131590C.1
gtttgtttttttttttttttttttctcaggtggggggtttaactttttcttttcttattttttcttacttttttcctacaagcgaacattgctcccattttaacttgatgttcctgtgttttccagcactcacttcccgcaccgttgttaaggggggggggcggaccaaacggtttttttcagacgtcctgccctacagtttcacccaatattttctggtcctttcagcgcccccacaaagaccttacgcctgtccagaagacaaaatccccctaatttcaccccccttcgtggtagcccccctcctcgacacatttcacgtgctggcgtctggttccttgggccgtcacatcggcttctcgactcaaaaaatgccctcgctgcccttggtttttgtcatccgcgcctcccactgcggggactcgcccaaactctccagctgatttattgtgtc

SEQ ID NO: 34635 - DNA, 1636 bp, Zea mays
  Clone ID: MRT4577_131591C.1
ctcggcacggctgcaaagcgtaagcacggttggcctgtgacgagttttgtcctgccatggatccgcgacgcgcctgctgggagtgggaagagctcgacggacaacgtgacgaggccaccactgctgcccgtgcacgacgacaggcccgcggcggggtgctcctgctccgcgctcaggtccgtgctcgccaacaggttcgtggccgtcgcgtcgggcccgctggcgtgcgcacttctggtctgcgcgacggcggggggcctcggcgggcaccccgcggcgcgcaacaacatgctcggggtgctgacgtgggtggatcacggacgccgtggacgctcggcgtcgcgtccctggcgcccctgttcctctttccagcgttcggcatatcctcgacgtcatctccttcgtcctcgggagcttcatcctcgcgctcgccatcgagcagtacaggtacagcatccaccgccgccttgccctcaacgtacgtgcgccgcgctcgcgcgtccgaacaaacctgctgctcctcggcgtctgcggcacgaccgtgttcatcagcatgtggatccacaacaacacgccgtgcaccgtgatgatggtccagtattcaggctttgtttttggcccaacggagactaacaggccgaaaggcccagatgacgttttttttccatatcatcgagatgccgcagccggccgggccgtcttgtgttacacattccacgcaatggcgtcctctcctctggcaccaaccaggacctgctcgcccctagtgcccaagctgccccgccgcccctcgctcccatccccgtgtaggtctccccgtcgcagtgcgcggtggccgcgcttggcgtcagtcagagcgactccgggcagcagctggaccgcggcagcgacggaggagcagaaggagcggaagaggtgcctgagatgcggcggctcttaccgagacgaggagaaccacccgaccgcctgcgccttccatggccacgtcacaggcgagaaggggctgttctccctgtcgccgccgcaccagggcatcgacggcgagtggagcgacaagagcgggatcatcgtgtaccgctggaacgacgaggggagccggcccaacacaggccgcgctaactggaagaggcgctggagctgctgccaggagcgcgaggaggacgcgccgccgtgccagcgcgggtggcacgtctcctacgacgacggctacaccctcttctaggtctccctctacccgtggccgtggggagcagcaggagatataatataaggtgccaaactacgtccatgtttattacttggagtatagtacacagaagatatatgtttatgttggttgcctcaacgaaataagcaagggcagcaccgcagcagcatcaaaacctggaggaccactttgaagtttgagatgcagtggttgtaaatgaaaatcacgtaataaaaaaacagaattcaggaaatacgtaccgcgttgtaaagtggcccggaaaagaatctgaaccgatgcccttaccggaagtcgattcttgtgtcaattctatcagcctggtcactgtgtcctaacagtctaacacttttgttatctaagaacagcatgccacatctcccccaaaaaaaaaaaaaaaaaaggccccta

SEQ ID NO: 34636 - DNA, 336 bp, Zea mays
  Clone ID: MRT4577_131592C.1
gactagctctagatcgctagcatccgctttagattatccaagcgttactactctagcaggccaggttttttcaggtcgagagtggggctttctatcaatcatcaacaccggtcatggattctaactcatccaatcacaggaatgtgccaatgatcttatttgaaaaacatctacgaatttttcacactctataaccttgaagccttaaaccaatttccatcctcatgacatctcatacttcaatattgcttttgtctttcatatttattcccatcttttgtatcttttaattaatacctccaaatattctattacctcatctatttaccattattt

SEQ ID NO: 34637 - DNA, 425 bp, Zea mays
  Clone ID: MRT4577_131593C.1
acggctcatccagagggcaagcaatagttagttccgatctgtgtgtgtgaaagtcttggttagacacagatcctagggctcagcctggccgggaaggtagagcttaaccactaccagcgacaggaggaggttgcgagaatgtcacagcttttttcttcatgtttatcactatcatgtccatcatcggcgtggttttgtctttcgtcaagcacacctgtgaattaaacagcaaaagaggtaagaggaaaagagcatagcttaataggtatcaacacagttcagtgacgtttgtattctgagatgtttctcatctattaaagccttagttctttgttacctttttcacaactctgtactgttgcctcatattctgattgcgttttcaaaatgtgatgttggtgaaacaaaacgtattgatggtttgt

SEQ ID NO: 34638 - DNA, 267 bp, Zea mays
  Clone ID: MRT4577_131594C.1
gtacacgtacacgcagatccatcgctcctactccccttccctatcgtatcgcgtcgtcctcgtcgccgccctacgccccaactaccttggtggctagggttcccaaccaacgcgcctccatcctgcacctacctagatcacctcctccacttgaagcattcgtgccggcgtgtggaaggacgccacgaaggcgactcgggggatagcggcctatgcggctcggtacagtcttcccatccccaacaaccagcttagaggttcggttcg

SEQ ID NO: 34639 - DNA, 585 bp, Zea mays
  unsure (1)..(585): unsure at all n locations
  Clone ID: MRT4577_131595C.1
accctcgggcctgccgggaaaaaattaccccttcctgtgtggtctctttcctcttgattttggtggtgactagactacaagtttcctttgtatcctttgttataaaggtgaagccgtggagcattttactgttgagagacgactgattaggtctcaaaatggagattgacttcccctgctgctaaaatgcaggagtttgttcattcactctctcatttaatccatgtattccgaaccaagttggtttgtctcgcatggaagaaatggatgaataacctgaccaaatggatttctattcaaatacatgatctcttgttaaccaatgtgaactctcgaccattggattgccaatgggtaacaagacaatatttcttagtgccaaaagtagttcaacaggttggttttactaacttgtaactgccttatggaaaaaatattgagtttagagatcgttttatcgagttgtctaaactcactttagttcaacccatcctaagaaagntcttaccaaantcaagttaagtcgactaataaccacctaatcatcgctctagccatgcctcgatcgcctcacgtgtgcttttc

SEQ ID NO: 34640 - DNA, 357 bp, Zea mays
  Clone ID: MRT4577_131596C.1
gtgcacagccataggcggtcgaagtcgtccacacggacgacgagccggtttctagcgccagcgccgccgacgcagctgcagcatcatcggcccatgccttcgacttactctacagacgactacaacggaccacagggccaggcaatcagtcgaacacaaaacacgacaaggacaactccgatggggacgcaaggaggacaaagtgtagaccaaagctgcgcaagcgaaaacgaccagacgacaaccacgcgagtgctgctgcagggcgggaaatgacactacactacagcggggggaaacagcaacgaacgcaagcgggaacgcctgaggagggacaccggacagaaaggaaggaaa

SEQ ID NO: 34641 - DNA, 567 bp, Zea mays
  Clone ID: MRT4577_131597C.1
gccggccgggctgcgtaaacaactactaccgacatcgacctttctcctcgctacgcatcattgcaataagaaaagagccacaaagacaagaaacaccatgatgcctctcctccatggttcttctcattttaagagctgatagacgtgtcgtatttatgttcgatcgttccgcagagagcccaccgttgacaacttggcatgtacgcttgatgatacgctacaccactgtttgcgtgcagaaagaccgagaaacaagcccgcacagcgtgctgtacctgctacaactgtccgatgagccaccgagctacctgacgatatagatctcatccaaatacggctgctacaccgcggggctgtcaccgaacccggacaatatcgacaagaaccacgagctgtaggtgatccactcccgatgaggcatggtgtgcgagatcgcttgcgtcttccacgatatgctcgtccgcaaagatgtcaagttcggcaagtgcgtgagtatcaaagacggctcccacatcttcacttaggaagagctgcactacctcaataacgcgagcctcatccacgcgc

SEQ ID NO: 34642 - DNA, 771 bp, Zea mays
  Clone ID: MRT4577_131598C.1
atccacctccgagacagtaattcttatatgggacaggctgcctatatctctcaacaccacagctttgagaatagctatcatattgggttctatgtttcagtaccagaaaaactcagatggcctgttctagtgaccgctatcctagcatctgtagtcggaagccaagcgattattactggtaccttctcaattatcaagcagtgctctgcactaagttgcttccctggtgtaaagatcgtgcacacatcctctacggtgcatggtcagatatacatacctgagatcaattggatcctgatgatactgtgtctggctgttactattggcttcaataacacaaagcacttggcgaacgcacaaggtcttgcggtcataacggttatgcttgtcaccacttgtttaatgtcattggttatcgtgcttgtctggaacaaaagtatcttcattgcccttggtttcctgattttctttggctcaatcgaagtaatgtacttctcagcttcccttggcaagtttcatgaaggtgcctgggtccctattaccctttccttcatatttatggtggtcatgtctgtgtggcactgtggcacaataaagaagtacgagtttgatgttcaaaacaaggtttcagtaaactggttactgaacctcggcccttcactgggaattgttcgtgttcgaggcattgggctgatacatacagagcttatgtcggggattccagccattttctcccatttcgtaacaaatctgccagcatttcaccaggta

SEQ ID NO: 34643 - DNA, 780 bp, Zea mays
  unsure (1)..(780): unsure at all n locations
  Clone ID: MRT4577_131599C.1
cccacgctttcgaaaagaaaaaggggggggctgggaccctcgaggccggccgggccgggcatttcttcgccgctctgcccctcactctgccgccactcccactcccgctctacgtcacccagtctctgacgcgcacggatccgttgccatggagcttttcgccctccccgatgacggatctttcggcgagttacggagttagtacaccacgacatctgcctgtcgccatggctgggaggcgctcgacaccggtggccatcctcctcaccgcggccttcgtccccatctccttcgtcgttcgtccaatctttgacacgcacagatccgctgccgtggagctcttcaacttctccgccgacggatccttcgacgagttaaagcaagaggacccctgtgcattaaagaataagcacacaatagatcttcctaaacactgaacattgccttatatgcttataatatcaccaaccttaccttttaagttatagaatgtttactttgtatggtacactccgtataattatatatgtacgcctgtttatttcttttggagatagtttgtgtacgttagcagttcaggtctaaatgttgaaacaggtacaactagttatagtcgtatttaactaaaactctacttcagatgattttatttgtttcaaaactaagtaatgaaaaaaaaaagctgcctagggccnnnnnnnnnnnnnnnnnnnnnnnnnnnnnnnnnnnnnnnnnnnnnnnnnnnnnnnnnnnnnnnnnnnnnnnnnnnnnnnnnnnnnn

SEQ ID NO: 34644 - DNA, 891 bp, Zea mays
  Clone ID: MRT4577_13159C.1
atgcgcgaaaatccgttgacgggggtggaactgaccgcaagggtccacggcttagagaaagcgcaagagggtgtgtcgaagccaggtgggcccgagcatgcagaagagaaggcactggcatgtgggtcccggtcggtagaggcaccacagtgcacatacgcgaaactaggtgcgcggcgaggaactgacgagctggccccacatgtaggcgagcgacagaatggtagagtgtgggctgcgcgggggaaattccctagtgggccgaaatgggttccgaagcccagtcggcaaggtcaaagtgaccgcagtcacttcgccctttcactgaccgacctgaaaggaaaacaacgccgctcgccccgctccgactgctgtgccacccaccggggtgagactgacaacagccgagttctgcctcgggcgcaacaggaagctccgcctcgcccgaccttaggcctcggcctcggaaggaggtctccgcctcgcccgaccccagggcttggcctcagcctcggcctcgggaggatcgcgtcctcgcccgaccccagcctcggcctcaggagaagtctccgcctcgcccgaccttgggctcggaccgaccgcgccatgggggatacatcattaccctaccccctagctagctcaggctacgagggaacaagaccggcgtcccatctggctcgccccggtaacagtggttctcagccccctacggaagaaaggggacgtcagcaggatcccagcagcaccgacagctgtgcttctataggactcaggcacttctccgacggccacgttatcgcatacccagggctcaagcacttctccgacaaccacgttggcatgtacacagggctcaggcactcctctgccagacacgttagcgcatag

SEQ ID NO: 34645 - DNA, 501 bp, Zea mays
  Clone ID: MRT4577_1315C.1
gacagtggattaattgcaatagacagtgtgcacaacaaggtgctttattaggaacacatgccctagtaacacggacacggtttcaggaacacgccggttgaggggcagtgtttccaggaggaggggggggggggcgacggccactccacggaggcgaaccgcgactcataggaccccaaaggtgttcacgaacctgtacgcgacgtagaggaacccgtacagggacaacatctcgtcggcggtggccgacaggagggcagatactaagaggaagatggtcttcacgaagatgaacatgaccttcttgaggacgaccttgacgcactgccccaccacgaacacaaactggacaacggacaggtccacggagacaagggacatgtcactggccacggccgggatgacactgccgggagccttatcaacagggaccggaatggtggcgggggacttatcccggatgcttttagacggaggctgcagccttaacaaggggcgctc

SEQ ID NO: 34646 - DNA, 496 bp, Zea mays
  Clone ID: MRT4577_131600C.1
gcacgagcgtgcgcgaccaccttgggagggcggaaaccagccgttcgttcctcaattgctcgccgacgccaaggatccctgggctttccgtcgtgcgtcgtggtcgggtcgtctgagtgcataatccgcggattcaccgtcaatggcgccgccgtggtgggtgttctccgtcaccgacggtgtgtcagggagagaagacccttccgccgtggatcaatggatgaacgattgtgattagaaggcccgcgtaccctttcgtggtcagatctatgtcgtctgattcaaatcatgtgtatggggggcaatcttagtactttaaactccagggccgttgatctcagatcctgcggtcataaaagggtaccggttcacacgatggctgatttgatcttggcggtccgatgtagatcgatcggctcacagcagaaaataccccttcgccctaaccactttactaaagagaccctggatttattcgcatttaacccgcaggcca

SEQ ID NO: 34647 - DNA, 711 bp, Zea mays
  Clone ID: MRT4577_131601C.1
ggagcccttggggctgaccgtccaagagataaagccggacgggcactgcctgtaccgagcagttgaaaaccagctgtcgctccactccaatggcgctgcacggtacagttaccaggacctacggcagatgacggccaagtacatgagggagcacgccgccaatttccttcccttctacttagcggaaggcaaggccgatgttggaccagatcccatggcgagcttcgagaggtactgcgaggagatggagtccaccgcagcttggggcgggcagctcgaactcggcgcgctgacccactgcctgaagaaacatatcgtcgtctactcaggctccttcccggacgtggagatgggtaaggagtacaaatctggacctggaggtagtggcgccggcggtgcgagcatcaggctgtcgttccacaggcacgcctatggtctcggcgagcactacaactcggtggttccagccggatcatcctagcaagagaaaggtggatgctctgatggcctctaatacttcttgatttgaattgtttacgggtggcacttgtctgagtctgaaacacaataggccacttttctttttcccagttgctgtaatccctgtcatgagtagatgaaggttgagtgtaccaatcaaagctgtaccggggagtttgtttcccaaacaattttgctctcatcagttttatgtctgtggtttgatttgcc

SEQ ID NO: 34648 - DNA, 441 bp, Zea mays
  Clone ID: MRT4577_131602C.1
ctaaacggagaagagcagcactattataccaacattaacgaacttagtttgagaacacacgcatccagccccagccccattacattggaggctggcaaaagtaaaccacacaaaataaaccgagatgttcagacacgctcttcagccgggacacaaggtaccccaggcttagtcgacctgctccatcttgctctggccggcgtcgccctccacagggggcatgtgagtggcagcctaaggggccgtggtctagataatgctaaggcccagtttgagcatgcagtggatgcggctgccgaaggtgttggggtcgcagaggctgaatccggaggagagcagcgccagtccgaacagaaacatgacaaggtccttgacagacttgtcgatcttgtcagaccgcgcacgcttgaacaggtccttcatgatggagtacttcgggtt

SEQ ID NO: 34649 - DNA, 373 bp, Zea mays
  Clone ID: MRT4577_131603C.1
cggcacgagggtgagtgggagacacagacaggcgaaggaggcattcctgctcgagaccagagatcacgcggatagagctgtctctcattggccagagaccagatcagtagacccgtatggtgagccgcagcgagcaggtcggtaccactcgcactggccgctcgagggggcagcagtgagcctcggtcgcggtcgtgctcctgctctgctgcatggtgttatcggaagccgacagatagcctcgagcgcgtgcgggcggacggggggggcctaccctcacggtgcgtccattgagcccgtgggccctgctgccggtgatgacggggggcgtgccgatgtcgatgctgcgggcgctccgtcgagaattggccat

SEQ ID NO: 34650 - DNA, 304 bp, Zea mays
  Clone ID: MRT4577_131604C.1
caatggtattatttttagtgccgactacgctcggagaagaacccatacgggttggggaagacagggacaaaagaccggatgatgacgagggacttgaagatgcacggacgcttacaatgaacattgactggaccaggaataggcacgttcagggggtggaaccattaccggatgatgtgtccggggaggaacgccctgaagaggccgaccgagcgctcgccctgggagaagggccccttgtgaaacgggccatacaccttggctaaggacagtgtgtcgccaccgaacacctgcgtacagggga

SEQ ID NO: 34651 - DNA, 284 bp, Zea mays
  unsure (1)..(284): unsure at all n locations
  Clone ID: MRT4577_131605C.1
gagcttacagtcggcggccgcctttttttttgtggtttttttgntgctatattacacaggcccatcccgacaaaacttcgctccaggctacaacgggctaaatgatactttggatcaagacaacaagccaatcgttttctaagcaacagggcaaaaagaaacagcagaagaaggcacaaacccatgttcgaacacaggcaagaaaacgcgacacggccaaaaaaaacaagcacgacgggatgcagtccagaagccatgggggaggaacggcggtgcagccagcc

SEQ ID NO: 34652 - DNA, 718 bp, Zea mays
  Clone ID: MRT4577_131606C.1
ccctctttcgcgtacgagaagccttacctgaacaccgaggagttcatcgacgcagtcgctactgagctccgatcaagactgggagccaactgagcctacaagaaactttgcatggcgactttgaatgcttcgtcaccgtcaccgatctgctagtcgtcttttctgttatgaagaagtgaatgtgcgtcaccgcagtttcgatgcaagctaattatagatgtggtgtcacgtgagcgctcaaaataaaggatacacatgattaaattgtttttattttacaaaatgccttccgttcaagccgcgtactaccgcgggatcacggaccactctctcagacggccaggtggttgtggtctcccaattccgcgctccagtggcaccacgtctccaggccacgcgttccaatttccacggcgctagtgacgtcgccaaaaaaggtgagaggaaaaggagggccgcgacgaggacgaccatgccggggcaaccgacaccgggactgccgcgtgatttgtgcccttgcgcacagtactacctatctatgcgtgtgtacgatatcttgtgtgcgctgcttggctgctctgtctacgcgcgcgtggactgcgactctgaaacctttcggcagcgtacgcaattgtcggatttcaataaaggaccgtctggtctgaatctctcaataaggacactgtataagtcgaaaaaaaaaaaaaaaaaagcggcc

SEQ ID NO: 34653 - DNA, 284 bp, Zea mays
  Clone ID: MRT4577_131607C.1
gagctctctagtcggcggccgcccttcgcttttttgtgttgttccacaaagttcgcaagggtcctgtgcaggttgactgccttccagcttagaccgatgcgagcaagcacgcagacaggagccagccctgcccgggcacaatgggggagccaaagaacacagggtattttgtacaggaaagatggtgactgctagttaccgccattcggaacgtcaaagtaaaggggggcggactccggaagctgcaacgccagaacggaagcctaatatatgcgcacacagac

SEQ ID NO: 34654 - DNA, 778 bp, Zea mays
  Clone ID: MRT4577_131608C.1
tatcaatgtgcaggttttggatctttgggtttgatgacatcagtgttggtgtgccctgatggaaaaaccatcgaagctgaagctgcccatggcacggttacccgtcatttccgtgtccaccagaaaggaggcgaaaccagcacgaacagcattgcttcgatctttgcatggacaagaggacttgcccacaggtacaactggtgtttgcttttttacgaccttctataacattataatatagtcggggggggggggagttttacggctagctgattcgcttggggtactcccttaattatgcgccgcagggcaaagctcgacgacaacgctagactactcgacttcgctctcaaactcgaggctgcttgcgttgagaccgtggagtccgggaagatgactaaagatctggcgattcttgtccatggatcttccagcgtcacgagaagccattacctaacaccgaggagttcatcgacgcagtcgctactgagctccgatcaagactgggagccaactgagcctacaagaaactttgcatggcgactttgaatgcttcgtcaccgtcaccgatctgctagtcgtcttttctgttatgaaaaagtgaatgtgcgtcaccgcagtttcgatgcaagctaattatagatgtggtgtcacgtgagcgctcaaaataaaggatacacatgattaaattgttttcaaaaaaaaaaaaaaaaaaaaaaaaaaaaaaaaaacggaaaaggtcgaaaaaaaaatcgctccttgcggctcctggttctcg

SEQ ID NO: 34655 - DNA, 2405 bp, Zea mays
  Clone ID: MRT4577_131609C.1
aacctcaaagtcgtctacccacatcataatcgacggcccacgcggccacgcgtacgtccccgattctacaggctggccccaccttccgatcctaataagcccgctcccacactcctttcttcccctgcctgccgtctctcttccaccttccaccacaagcgccgccgcagccggtgcctgctccttcccgatccccgaggcaaagctgcgactccgcaaccgccgccatggcgttcgagaagatcaaggtctccaacccaatcgtcgagatggacggtgatgagatgaccagggtattctggcagtctatcaaggacaagcttatcctcccatttctggacctggacatcaagtactatgatttggggatactgcaccgtgaagcaactgatgacaaggtcacagtggaggctgcagaggctactctcaagtacaacgtggctattaagtgtgcgaccattactccagatgaaactcgggttaaggagttcaatctgaaacacatgtggaagagcccaaatggcacaattaggaacattataaatggcactgtgttcagagagcctattatatgcaaaaacgttccaagacttgttccaggatggactaagcccatctgcattggaaggcatgccttcggtgatcaataccgagctaccgatgcagttctgaaggggcctgggaagctgaagctagtttttgagggaaaagaagaacagattgatctggaggtattcaacttcactggtgctggaggagttgccttgtctatgtacaacaccgacgagtcaatccgagcttttgctgaggcttctatgacaactgcttatgagaagaaatggccactctaccttagcaccaaaaacacaatcctgaaaaaatatgatggcaggtttaaggacattttccaggaggtctatgaagctgactggaagtccaaatttgaggctgctggaatatggtatgagcatcgtcttattgatgacatggttgcgtacgcgcttaagagcgaaggaggctatgtgtgggcttgcaagaactacgatggagatgtgcagagtgatttcttagctcaaggttttggatctttgggtttgatgacatcagtgttggtgtgccctgatggaaaaaccatcgaagctgaagctgcccatggcacggttacccgtcatttccgtgtccaccagaaaggaggcgaaaccagcacgaacagcattgcttcgatctttgcatggacaagaggacttgcccacagggcaaagctcgacgacaacgctagactactcgacttcgctctcaaactcgaggctgcttgcgttgagaccgtggagtccgggaagatgactaaagatctggcgattcttgtccatggatcttccagcgtcacgagaagccattacctgaacaccgaggagttcatcgacgcagtcgctactgagctccgatcaagactgggagccaactgagcctacaagaaactttgcatggcgactttgaatgcttcgtcaccgtcaccgatctgctagtcgtcttttctgttatgaagaagtgaatgtgcgtcaccgcagtttcgatgcaagctaattatagatgtggtgtcacgtgagcgctcaaaataaaggatacacatgattaaattgcttttatgtcagtactaagctcagtcattcccccccccccagtatttttgtcgtttttctcctttgatttgcgtgtccattgtgttgtgtagtttacaaaatgccttccgttcaagccgcgtactaccgcgggatcacggaccactctctcagacggccaggtggttgtggtctcccaattccgcgctccagtggcaccacgtctccaggccacgcgttccaatttccacggcgctagtgacgtcgcccaaaaaggtgagaggaaaaggagggccgcgacgaggacgaccatgccggggcaaccgacaccgggactgccgcgtgatttgtgcccttgcgcacagtactacctatctatgcgtgtgtacgatatcttgtgtgcgctgcttggctgctctgtctacgcgcgcgtggactgcgactctgaaacctttcggcagcgtacgcaattgtcggatttcaataaaggaccgtctggtctgaatctctcaataaggacatgtataagtctaggttcttggttggctttttcagtataaaaacagctaagagatcagcatgatataactctaaactttaaatcagaaatgtatttcaaagacaatatgtatagaaagttgtgttgagatatgttttttatgaagagtctgtctcttgcaccttttttagttaatccttaaaaacttttcaaaagccctttgaaaaaaaaaaaaaaaaaaaaaaaaaaaaaaagtcaaaaaaaaaaaaaaataaaaaacaaaagat

SEQ ID NO: 34656 - DNA, 864 bp, Zea mays
  Clone ID: MRT4577_13160C.1
ttgggaccctcgaggccggccgggcaatgctttgtgcgcatggttgatttctctgtggcaaacttcccgtcctgcatggggttgtaagctgtctctaaatttcacggcaagtcgtgtgcctgaaccttcatcttaagttgttgtcgtaaaaaaaaaaaaaaatccactcccaagtcccaacacccgtcggcgtcgagcagcggcggcgatgacgacgagcctgaagaagaaccggaagaagcgcgggcacgtgtcggcggggcacggccgcatcggcaagcaccggaagcacccgggaggccgcggcaacgccggcggcatgcaccaccaccgcatcctcttcgacaagtaccacccgggctacttcggcaaggtgggcatgcgctacttccacaggctccgcaacaagttccactgcccgtcggtcaacgtggagaggctctggtcgatggttcccgccggcaaggccgcggaggcggtcggcgcggaccaggccccgctcgtcgacgtgacgcagttcggctacttcaaggtgctcggcaaggggatgctgccgtccaggcccatcgtcgtcaaggccaagctcatctccaaggtcgccgagaagaagatcaaggctgccggaggcgccgtcctgctgaccgcttaggtccttttgcatcttgtttcaactatctgcgctaagaaatattctatctttttttgggtggatttatgaggccctggttttgagcacttggtaacgaatatgagttcgattatatcgatgctccacatctcttgctgcatgtattattcattctatgcagttcatgttttgggaaaaaaaaaaaaaaaaaaaaaaaaaaaaaaaagggcggccgc

SEQ ID NO: 34657 - DNA, 227 bp, Zea mays
  unsure (1)..(227): unsure at all n locations
  Clone ID: MRT4577_131610C.1
cttatgaggatccaagcagaggaagactggccccatatgggattcgttttttttagaacaaaatgaaggaaaccggggtcatggatttagccaaaaaaggactgaaacccccatcccgattcaatgttggatttngacaaaatttaaaaaacaatgaggggggcgtttatattgtatacaacccaaataacggcgggcttctcaaaatcacatcatttattgtagcc

SEQ ID NO: 34658 - DNA, 350 bp, Zea mays
  Clone ID: MRT4577_131611C.1
tttgttgttcaaggatgacctctacaggagggagaaaactccaaagcgtactgattctgagcatgcacaaacgaagaacactggtggatacgcatgaaaagatgcggacctgcgacttccacagctcagacctcaaggtgaaatgggccaagaagcgctagattgtttggacttgctacagtcgcaccgagtgctgatcttgcgcgcctggtaacaggaagtagaagcaagggcgagctatccgattcagacgcactttgcgtgaacagacgcgagatggggactgaaatcgaagccagatctaacgattacatcagggtatgtacgaagatacagaatgggttactgta

SEQ ID NO: 34659 - DNA, 392 bp, Zea mays
  unsure (1)..(392): unsure at all n locations
  Clone ID: MRT4577_131612C.1
cttttgacagtdccttttacagccatncawcgamcaaccgcctccygctgcagaaacccacccccctctcgcgcatccaaccaaaccactacacagcactstcagasagacacaagacaaccctcmcaagtscccagtgcccrcstttyttttaacagcacagcatccaaggccaagcaaagcacacacccacaagccacccgcatccatccaattatgactaacacaggcggcccacatkggawtaccagccaaacactcgcsaatcaaytcyctctctccwcgctcgaraaagggrcgggrttcaccactccggcctggggggcbcagacagcctttggcgcgccamaccccacgcgcwgagccgtcgccgtcgsaacaccacgcgggaa

SEQ ID NO: 34660 - DNA, 293 bp, Zea mays
  Clone ID: MRT4577_131613C.1
gtgacttccttgtcggacaactcaacttcataggcccttgcaaggtcgacgtgaccatccaggtggatggcaatactgtggcgagcacggatctaagacagtacaaggatcatggtaattggatcgagattctatgcgtggataacctggtgctcatcggtaagggaagacttgacgggacagggccagccgtgttgagaaagatctcctgcaccaagaagtacgactgcaagatccttcccaactcgctggtgatggacttcgtgaacaaatgggacgtgtccggggtcacg

SEQ ID NO: 34661 - DNA, 804 bp, Zea mays
  Clone ID: MRT4577_131614C.1
cattgggaccctcgaggccggccggacgccactcatgaacacgcccaagctctctaggacttctcataaggcactctgacatcctccgtacttctcgttctgagcacccctcagtaccacttcgtgttcgaagattgctcgctctcaatatgtgcatatgattgaccctgcttggaagacagctcatttgcttcccacgccatgagtgctacgacaaatcgccatgactatgacctcatgactgctcaatgtggaagatacatacgtcttgagtgcggcgtacagaaacgtacttgaatgcgaacgcgccgcatgccgtatgatctcctccatggagcagacgaagctagatgcaggaaatgagcgctgaacgacactcatcagagattatcgcggtgagatatagattcgacttacccttatctgccatgcgtgtactacagtttgcattgagaccgtcttcgtcgcccgcatctactcgcccccgatcccaggggcctctatctcctaccgaaggtgattactacacataccttgcgtgaagtcaagagtggacctgacacacaagacgccgctgataacaaatgtggatacagctgccagcttgctcgttgactgtccactccgctattagttggactgcactacttccaggtctactataattcgactcactgatccgcctgcagtcttgcaaagcaggctgtttgacgaggccatctcggaactggacacctctgagcgaggagtcctacaaggacacgcactttgatcatgcagctccttcgtgataactgtacctat

SEQ ID NO: 34662 - DNA, 938 bp, Zea mays
  Clone ID: MRT4577_131615C.1
gtgcggcgctcaggcgggcccattattcctcttcacgcttcacacgcaccgcccgcaggccgtcatcccacgcattcgcatccttccccgctctcgctctctcagccgcagagccactcgtgtcggtgacggcggcgaaggcaatgtcatccctccgcccgtccctcctgctcgtggtgtcgctgctcgcggcggctctgcttgcagcggcgccgtcctccgcgtctcgcgacctccgcccgctccaggcgagcttcgtcgtgcgcggccgcgtctggtgcgacaactgccgcgcgggcttcgagacccccgcatccacctacattgccggagctaaggtgagagtcgactgcaaatcgaagaccaccggggcaaatacatgcagcttcgaggggcatactgaccgcaccggcacctacaacatccttgtcattgatgagcatgagcatgagctctgcgagtccgtccttgtgagcagcccggacaaggggtgtgccaatgttgtggctggtcgtgagagggcccccgtcttccttaccagcaacaacggtgttgcatccaacgttcgtttggcaaatgctctggggttccagaaggacgttgcccttcctagatgcgcgcagatcctcaagatgtaccaggatgaggatgaccgtgtctaattacgcctgagtttagatgtacttggcgagttacaatatatttatgtggtgtctgaaatgttctagaacctctaaatctattactaagagcaacgatattgtcgcttcttaaaccttagtactacggatgttatgagctaataaatatatttcgctaatgtgatgcagttaaaaaaaaaaaaaaaaaaacagccactcgagactagttcagcgtgcattttgtctggccgggcttacccttgaaaaaactatacgatgggtcgctcctttaaaaga

SEQ ID NO: 34663 - DNA, 332 bp, Zea mays
  Clone ID: MRT4577_131616C.1
gcatagcctgttatcttggacgggtacgaagaatctattctcgtatagtggcgaacacatgcactgaagatcgtgccaaatcaaatgcgtgaagcagagaccagacggacagagcatgtttaacataaatatacttaactggggaaacagacctgaggccccgccaagcgtgctctgaaactttgagtcgctccttccctgtacagttgcctacgcttcattcctggacgctgcgacgctgctggtctatagagactggccttagccaggtactatagacggattgtacttgtgccgcccttatgatcttgtcgaaaaaagtcacgcgctaa

SEQ ID NO: 34664 - DNA, 425 bp, Zea mays
  unsure (1)..(425): unsure at all n locations
  Clone ID: MRT4577_131617C.1
ccacggtttgcgccccggcggcgacgcaggcacacggagacggngcgccaggcagccccccggcggccggcggcaggacaaggccggcccggacccggaggacacggggagggcgacccggcaccacaccagcaccaagnccgacacgggcgccgagaaggaccggcgcgaccgcccccgccaggccgggggcggccccgccggcggcgacagcgccacggcccggcccgacaagccccggaggccccgggaggcggnggagaggcccacggcgcagacgcggggcccggggacggagaaccagcgccggccgggcgagggccacggccgccgccccgaccacccggaaggggacaccagcggcggcgacgacggcctccacgacaaccacgacccggccggccccgaccccaacgccacgcccg

SEQ ID NO: 34665 - DNA, 692 bp, Zea mays
  unsure (1)..(692): unsure at all n locations
  Clone ID: MRT4577_131618C.1
tttgcaggtggccctaatttttcccactgatgagagtgttctgaaagatgatctcagcaccattagaaatgattcccctttgcttctcaccaagactttcatgcatcgaagttcctccacaccatgcttgtctcctagtggcaaggatctccaacagcaaaaagataggggctgtccaattgaactgttagtatgcccgagccgctgttctcgaacaaggcagctcgtgaaggatgttgctagggcaatcaagaaaggtgtggatccagtacctatcaaaagtgggcttggtggtgcttactatttcaggaacagcaaaggtgagaatgcagcaattgtgaagccaaatgatgaagagccttttgctcccaacaacccaaaaggttttatagggaaatcccttgggcagccaggcctcaaaagatcagttcgaattggcgagacctgttttagagaggttgcggcgtaccttctggactatgataactctgctaatgtccctccgacgttacttgttaagatttctcatcctgtgtttcatatgaatgaagacatcaattttgctaacaaaaatattgctgatggtagcattcaagctgttagcaagactgcatcattncagcagtttattcctcacgattttgatgccagtgatcatggcacctcaagctttcctgtttctgctgtccata

SEQ ID NO: 34666 - DNA, 566 bp, Zea mays
  unsure (1)..(566): unsure at all n locations
  Clone ID: MRT4577_131619C.1
cgccgctcgagccgccggccggnacctcacactacgcgcgtctcacaacgccgtctctcccccgctccgtctccctcccccctcctcccccggtccgctccctcagtcgccagatcccgtcgagcctcgccgaggccccgtgtggaagatgagggagtgcatctcgattgatatcggagatggcgggattcaggtcgggaacgagtgatgggaactttactgactcgagtaagatatccaggaggatggncaagaaaacggggacgagagcataggaggtggtgatgagtgcttcaacaacttctatagatagagcggagaggaaaagcaagagcaccgagaggactgcgtcgacatcgatgccactgtgattgacgaggtcatcaccaacgtgtacagtgagatcttccacgccgagtatgtcatcagtgatcattgaggaccacggccgacagcttctgacgagggcactacaaaagagggaaggagactggggatctctgtctgtgctgtatccgtaagatggacgacgactgcactgtgctgcaggacttcgtggtcttcaa

SEQ ID NO: 34667 - DNA, 1064 bp, Zea mays
  Clone ID: MRT4577_13161C.1
gatcacatgaacaatctcagagcgctatgtgcgtcctgatactgcaattgtcagctgttaatcaggtggcccagggccacgaatgcatctttggcaaggcatttacaagagctgtcgtataaaaaaaaacttaaagctgttgcagaacggcagcttagttgcaggccatgataatcaacactgactacggccatggccgagtcataagaactgcttcaagaattcagtggccactagccggccacgagtgtttactgacagcttcagctcgctgatctccttgtcaatatcctccataaattgcacgatgaaatctatgagcttgtgcttatgcatgtcctcacaatggtagtttgttatcaggaaactgatatcatagccctgaaacataaggcataatttgccaccagttcagtcgtgaacaatttagatttctgaagggataagcagttatgttgataacttggtaaagctgagctctatgtgggaatacggcaagataagaggggagagagagaaaactagtacaacaaatgttagcaaaaatatggtccatcatccagctgtccacaatgatgtatccctgtgccttacaggtagttcatgtttagtacataaaacactgctcaaggtaatcaacgttaagttggaaacctgaaccggttttctcctcaacacttggaatgcctctgccctcattgacaaaaacctaaggaacttcttggcaagaatgttctccaattcatctgcctgcttaaccttcatgcttattcgtatggagttgattgaagtctctatcaagcatttttctgcttcgttgcggcatatcagtaccggattcagcagaagttcagggcttgtcctgtgaatcacctccggtttgttgtgcctctcgacttcttggcaagggaaattctggaggcacatcgccgcctccagagtgttccggatgcaggtgaggtacaaccgcagcgtattggcctggtgggtgctcatcgccggcgaagagccggacgagaactccccccccgcgtcaggggtccgtctagaggtccaaaatacgt

SEQ ID NO: 34668 - DNA, 297 bp, Zea mays
  unsure (1)..(297): unsure at all n locations
  Clone ID: MRT4577_131620C.1
cctgcctccagttcaacaaggacggcattcatttttcgcgagaactccacctccccgnggcactgcgacagtcgttactggaccatgtgccacctgcccatgttcggttgcaacgacgccacccatgtttacaatgatctgcaagaggacatcaaatcctacccggacgcctttcaccgtgttatcgcctttcacaacatcaatcanacgcattgcgtcaacttcatctcctacaagcccccggtcagcaactagaccgctcccgccggccgaccacctacggtttgctataactcc

SEQ ID NO: 34669 - DNA, 1155 bp, Zea mays
  Clone ID: MRT4577_131621C.1
cgggaaggactggccgccatctagttcttttgatcagagattgcctcgccatggtgctgagtttatcagtgcattgccatttcctgagtacactgatcctcgatatggtccgctgaatcttacagtcaagctacctgatggtgcattgaagccagatcttggaccaaaaacttacatcgcttatggattttaccaagagttaggcaggggtgattctgtgaccaagcttcactgtgacatgtctgatgcggtaaatatattgacacacacagcacaagtgccctatgcgcgttatcaacttgagaagatagaggaaaccagaaagaaaatgaaagaacaagatcttcaggaactttatggtgtttcagaactaaacctatcatcaccttttactgattccaggaatataagtgctgatgaaatgtcaaagacctcatgtttggacgtcaatgatgtaccacctgttaatactgaatctgaggtacaaagtggggcaggccagtgttcagattacattgacaaggatagaagttatgctgggatgcataacggggagagaaccggtggtgccttatgggatattttccgaagagaagattctgacaagatacaagattatcttaggaaacatgccacggaattccggcacatcttttgcaatcctgtgaagcaggttattcacccaattcacgatcagactttctacttaaccgaggagcataagagaaagctcaaggaagaatatggtgttgaaccctggacgtttgagcagaagcttggtgaagcggttttcattcctgctggatgtcctcaccaagtgaggaacttgaagtcttgcattaaggttgcgatggactttgtctccccagaaagcgtcaacgagtgcatgaaactgactggagagtttaggcggcttccacctgatcacagggctaaagaggataagctggagatcaagaagattgctcttcatgctctgaaccaagtagtaaatttcttggatccttcctcggagtggtcgaagagttggtttgcccaacccaagaacaaaaaaaaggctggagctgaagaacaggagaagcctaaaaggaagcgtggccgcccatgtcgcaagtccaacgatgaagctgctggcgataggcacagaaagaagaa

SEQ ID NO: 34670 - DNA, 577 bp, Zea mays
  unsure (1)..(577): unsure at all n locations
  Clone ID: MRT4577_131622C.1
gccggccggngtcaaaaaagggagaatcgacacgccacgttaccgtatagagaggcagggaaggaggaacacgaatgccggacaagaggaggaatctgcatcacatcgagatgatggagctcctgctcgtgaagtgggcggcgagatgccgctcatccacggctgcagcctcttcctctgagcgttctttgccccaaggcacggagcctgcagaaccatcgggttcctcgggtacagggactgatcgatcacaatgtgcatcggacggggactgcgaagatgaccactatcgagtatctgccaccgaacatccatccactgatgcagctagggagcgagcgcccgcaagcgctcgtgacttccgcgtgcataagagtgtgatatacccgaccagtctcacataggcagcgaacaagaaaggctatagccgaagtgattcagtggtataccgaacacgcgaccattagaaacatacaatgacaatccatatactcatgggactatatgattccggctcaccacgtgtgcagtaatatagacaagccgttatcgttattcaagaatatatgaggaccag

SEQ ID NO: 34671 - DNA, 472 bp, Zea mays
  Clone ID: MRT4577_131623C.1
ccagcggcagaaagaaagaaattaaaaaggcccacgaccaattccatgggggcggcccgtccgggagggggggtcagctaaccctccccatcagcaggctaaacaaatcttatgaacccggggggctaaccccacacgaccaattccattggccctcattcctacccaggaagaacaactccctcgggcatgaaaaatcgacagaccctaacaggggggggggaagggcaagctatccgacctatacgggggagggaccaaggctttcactgcttagggaggacccctaactggccagtggcctctgcccaccttaaaaataaccgggcagggcatccaccgggagacgagctcactaggctcctagcagtagatcccagttcaaaacgcccctcatttcgccaaaggaattgacccccttcggggaccacaagctttgctgggttgggtagccaacactggacagggaagg

SEQ ID NO: 34672 - DNA, 408 bp, Zea mays
  unsure (1)..(408): unsure at all n locations
  Clone ID: MRT4577_131624C.1
ggaatctggggcaangcagagacaccccttttttttttttttgttttttttttttttttttttttgggaaaaaaaaaaaatccttccccccctttgggtccgggggtccccaaggtttggggttcaaataccaaaccagggccccgggggccagtcttcaagcgaggttttttggcaccccaccctggatcctcgggggggccgaacaaaaccctccccacaggaagacccttgtccttccaaatggggttgcgcgccctctgcggcgacctcctcgtaatccttctccagggcgggcagggccccgcgtgcccccggggagtccccctcctccatgccctcgccgacgtaccagtgcacgaacgcgcgcttggcgtacatgaggtcgaacttgctgttgatgcggga

SEQ ID NO: 34673 - DNA, 217 bp, Zea mays
  Clone ID: MRT4577_131625C.1
gcctaatcaacaacctcatcgcatctgggtgccgatatgaaacgactatctttggaaccacttcttacaatagcaagactattctggacccaaaggaaaaaaaaatagcactcctcagctaattcctataccgcattgatccaaaccgaagcctctgtagtcaccatatgtgaacgagaatactgtgctgcaccagcaacacttttgacaatccaaa

SEQ ID NO: 34674 - DNA, 285 bp, Zea mays
  Clone ID: MRT4577_131626C.1
tcagctgagacggcggaatccgggtcgaccacgcgtcgggagcggcggacgcgggcggaccgtgggacgagtgtcaagtgaacctgaaacttgcggtgtcactagctggtagcctgagtgtgagtgagtgatcgagctagctgagctccgatcctcgctagctaggataccgccataccacaagtcttcttcacaagtttaggagtgacagcaacaagatctcgagggcctctgccagggtgcagaagtcgtccttccttccaacgaattcggattggggcgcaa

SEQ ID NO: 34675 - DNA, 1554 bp, Zea mays
  Clone ID: MRT4577_131627C.1
gcacccacgcgtccgcagtacagcaccagaaacagaaaggtagtagatcaaggaacgccagtgcggcgacaatgaccggcagtggaagcacgggcgccaatggcaagagccagagctccagggccaaggcaatgctgctcgccttgggcaagagctttcctgaccaagttctgcctcaggagaaggttgtggagagctacctccaagaaagcagctgcgacgatcccgccaccagggccaagcttcagcgcctttgcacgactacaacagtgaagacaaggtacactgttatgtccaaggagctattggataagcacccagagctgaagatggagggtactccgacactgacaccccgccttgacatctgcaatgccgcggtgatcgaccttggtgctgccgcagctcgcgctgcccttgacgaatggggtcgccctgcagctgatattacccacctcatctacatctcatccagtgaccttcgtctcccagggggcgaccttcacctggctgctcgccttggccttagcccaaacaccgtgcgcacttcccttctcttccttggctgctccggtggtgctgctgccctccgcactgccaaggacattgctgagaacaatccagggagccgtgtcctagtaacagctgctgagaccactgtgctaggcttccggccaccaagttatgaccgtccttatgaccttgttggtgctgcgctgtttggtgatggtgcatcagccgtgattataggagcaggtcccatgacaccagcagaaaatcctttcttggagcttgagttctccacgcaggagttcctacctgggactgataaggtaattgatggcaaaatctcagaggaaggaattaattttaaactagggcgtgatttgcctgagaagattgaaagccgcatagaaggtttctgcaggactctcatgaaccaggtagggataaaggatttcaacgatatattttgggctgtgcatcctggtggaccagcaatattgaacaggcttgagttctgccttaaacttcagccagagaagctcaagattagcagaaaagccttaatgaactatggaaatgtgagcagcaatacaatcttctatgtgctggagtacttgagggacgagttaaagaaaggggcaataagtgaagagtggggattgatcttggcttttggcccaggcatcacctttgaaggactgctagttcgaggtgtaaagaaaaccttcacaagctaatataatggtgggtacatggcaagcataaagattaattatatatacagaaacatcacataaagagcatagatgtctcggtggaagctgagcaccacatagcacatcgctaatattttactgtatttgtgttcttcatctatcaaacagtgtaaggtacttgagtttgcttcctagacattgtagaaataaggcactatacagcctgttgtagtgttgttccactgtactatgcaatgattgcaggattactttaatactgcttgtatggatgagtgaactgattacagtgcaaatatcatattttctaagg

SEQ ID NO: 34676 - DNA, 475 bp, Zea mays
  Clone ID: MRT4577_131628C.1
ggaacgtaaatcaccatatcattgcattagtatataccaacatactgcggggtatgcgagattcgaatactactagtagaacgtatgtagactaggagtagcacatgactacgacaacatgacgaggaatcacgatgccaatgatgagaggaagagaccaagggggtgaggactagaagacaccctagctagccgcagtggatgtgcacaccggtggcgatgacctatatgctgatgtgcgcaaacctgatgactgagaggacgaggatgtcgaggccgatgatgtccatggtgccgaagccgacgattcgccctagcgccggcagatagatcagcaagcccggtgagagcaacacgaacagcaccgtaggtattaccacgactgctcaaacaggcatggggggaaacgatctaggtggggaccgactattgaccaccttcctatgcccactggatggtgagtgagaaactcgaa

SEQ ID NO: 34677 - DNA, 445 bp, Zea mays
  Clone ID: MRT4577_131629C.1
ggccccccaaaaattttcaattttgggggggtggaaaaaaaaaaccccctttttaaggcccaaaactcagtttaaaaaaaaaatgcttttacaaaaccctttggtttttgggaactcatttcaaggggtctgcaatttttgaacccttcaaaaaactgggaaaaaaaaggggcatcggtggccctataaaaaaaacccggaaaaaccttgtttcccaattggggggaggacccctttttttttaaccccccaatgggggttcccctaccggcaggaaaaaatttttttgtttttttatgccccattggaaagtttttttcctaaaaccctttctgggaaatcggggaaaaaaaagctcttaagggggggtccaagggcccttttttttccaaaacctggaaacgctggctaaaaattcaagccccttttgaaaaacacccaaaaa

SEQ ID NO: 34678 - DNA, 179 bp, Zea mays
  unsure (1)..(179): unsure at all n locations
  Clone ID: MRT4577_13162C.1
ggctccgacttagcttaccggatgttcgtggaatgcccgntaccggagggtgcgccgagggcagatcccatctcgcgcgcgtgatgctcgtgcaagcgctgcacctagagaccggaggcttggttctattgctgtcgttggccaagggggggggggggaacaaagagaacaagctgtcc

SEQ ID NO: 34679 - DNA, 963 bp, Zea mays
  Clone ID: MRT4577_131630C.1
ttgggtacctcgaggccggccggggcgacgcgcaacccaaagcaaacgcaccggctcgagccaatccaccacccagccatgcctcccaagcgcaagtccccggcgacgattgcccctgccgcggggtccccgaggaagacgcggagcatggttgctgctgctgctgcagggaagcgggcaacggagcctgctccggcgaaggcagtgccggccaagaaggaagacgaggcggcggttgccgagttgaaagggaggaagaggggcaagaaggaagccgaggcggtgacggtggccaccgagccgaaagggaggaagagggacaagaaggaagccgaggcggtgacggtggccaccgagccgaaagggaggaagaggggcaagaaggaagccgaggcggtggcaccagcggcagaggaggaggatggggttgatgtggcggctggagcgaagcgtgtcatcgtcgaggcctgcactcagtgcagacagtttaagatccgagctcagaaggtgaaggaggacctggaaagttatgtttcgggggtgtctgtgataatcaaccctcagaagccacgccgtggttgccttgagatacgtgaagaaggcggcgaagtgttcatatcactgctgaacatgccacgccccttcacaccaatgaagaagctcgacatggacaaggttatcaaggacatcgccaagaagatctcctaaatcatgttggctggctatggcttggcggcaccattttgtgattgaaatattcaatctaagatcgtaatcttcaaagggtacggtgtaccttaggtgtaggtcccaatcagtggcgtttcctattgcattggccatgtgcccatgtctcgtactcgtacctatatgcttgtgctgcattgctggggcatatcattttctgttatatgatatatgccctgaaaattccttgacttctgatctaccatgttctctgcc

SEQ ID NO: 34680 - DNA, 127 bp, Zea mays
  Clone ID: MRT4577_131631C.1
agaattcagcacgaggctctacgctcactgggcataagcagcagtctcaacgggtccgcctaactcttggaggggactcagcgccgccaagctcattagatagagggggcgagcacattctactccc

SEQ ID NO: 34681 - DNA, 305 bp, Zea mays
  Clone ID: MRT4577_131632C.1
cccacgcgtacggttgcgagtggctacaacaatccgccggaacccacccagcgcggcgcgaccggcgacccgtaccccctagcccggagagcgagagcgacggagctgaccgaggcgcagctgagcacgtactactgcagctacccgtccaagcgcatctacgtatccgctcggggcaggtgctactacatcagctccggccgcagctactacggacgcggcagcgcctacatcgtcttcacaggccgctgagccaagcacgccactcggaacatgtccaatgacgaggcccacgtctaccggga

SEQ ID NO: 34682 - DNA, 901 bp, Zea mays
  unsure (1)..(901): unsure at all n locations
  Clone ID: MRT4577_131633C.1
aaagaataagcggaaggattacaataacataatttacactcatataaaatatagagagagtatttattacataacgggtgttcgagtgcagcacttaatattacataactgggaggcacaatatcctcccaccaacaagtttatggattttcctcctgctttggcaccaccttcgagcagaaatagcaaaactcagctgtttcatcacctacaacaacatgggttcgaaaaccctgagtacggagtgtactttcgcaagtcttacccgacaaaggaaaagacttctcaaggaaatgctggcttgtgggattcaaggtaaagcttatcaagaatcaaagactctgtttgcagaaaagcttactatncagtggatccttaaaaatccagttttattatcaggttaagttattacctgtatctagagttctttttatcctagttcagtcacttagcctacactagccatcttttatcaccccttgagtccactagattcctacgtgtagggcagtgaccaagtcttcatgtccgaaaagtaacgacgatccgaatcgattaatacccagctggagatctccaaccacacgatatatgtagcacttaacccttgcatatgtcaactcgccaccgggtttctcaagaccagaccgggttcacgccaaccgagagcacagatacaccaccgtccaacctcttaccacgcagggtacactctactctcgccatctctccactcccattgcgtgttggcctttctggtattggtctgcccgagttaaagcttacccatgacgaggcatatggccagttaaaaggtcctcaatcggcaagcctacatcgacacggttctctaacccactcagacggagacactacaccgagactacctnctcgtgcaagc

SEQ ID NO: 34683 - DNA, 1683 bp, Zea mays
  Clone ID: MRT4577_131634C.1
ctaaggagttatgcatcaattttatatcttatgctcccggataacttccaaatgattttacggggaaaaaagattgaccaccataacattatcaatgatctcatgctaaagaagcaacttacttataatccaacagtgggcgatggacttccaaaggatatgcatgtggcagctaaggtgacaattggttttgttaaggatgcgagacaacatattgatattcaagggtttaatgtttaccacaagaatcgcctaataaagcctttttggagagtatggacttctgctggagttgctggccgtggtatcataggtgtactggaagtaaattttgtagaaccagctcatgacaagcaggactttgaacgcacaaattgccttgcaagactcgaagcacgattaaaccgaatgcagaagaaatattggtctgataatcgccatcgaattggctatggaaccaatgatgctagcacagattctgtaaaaaggaaaacaggactgtcgttgcgtccatttggccaaggttcctggaagtcagggtatctgcaaacgatcagaagtgatggcagatcatgttctaatacaacaaataatattatgaatgcaagcatgtcatccccagaaacttccaagcttagtggtcccaatagagagttctcttcaacaacagtgtgccagcacagagctgaaaagtctgcaaataccataagatctgaaagatcagttttgcatggcttgtcaaatacagatggtggaaagactgagactgccaacgccccatccaaatcaacttcccctatcctaaggactagtttgccaccaactcccaatgaaggaaaacgaagtgagaggattgctgccaaataccaatcgaagcaagtaaatgcaacaactaatggagacagggaatccattgttgaccctgaagctatcatcaagaagttgaaggaagaaaattcatcgctaaaggagagaatcttgatggtgcaggaatcattatcaagggaactgcaaatcgagcgggataagaacaagtctctgaccgagaggtttgaggatgtggagaggcaactcgagttggcaattaaagagcaagaagcaacggtagaactctttgcagaagaaaggaagtgccacgaccaagaggtggaaaacctgaagcggaagctcacggaggcctcttccaccattcaggatctgatggagcagctcaatgctgcccggagctgctgcaagagatgaagcagcagacgaagcaacttcaccccccagtaatacgttagtacgtgtatgtcaccagcatgctcttagcataaataatgcccagatggttgtggagctgttagcagtagcagaccagaatgctctatgtatgtttcacgtcctgttgttagatgtgtggtagcaagtgtaagatgattgaatgagactaacgtgatgaattccctaggccctcatggttcctgatttagtgtaataataattagagaggatattgagagtgaattgcaactggctttgtttgggagcaatgatactgaaggggattagagggcctaaaatctgaatagcaagaggattctatcgccttaaatctattccggtattcttgctctcaaacaagccgctaagatgaccacgatttacgatgatcaacccaggtaggaaacagggggttttttt

SEQ ID NO: 34684 - DNA, 429 bp, Zea mays
  Clone ID: MRT4577_131635C.1
cttacacacaccgagcgattcgctctatcctctacctaaccactgtggctaccaagatattatcgctctgtgctcttcgcgccctttacgtgagctcatcacatgcgttcattattccacagtgctcacttgctcctagtgccattattccacagttacttcctacagttacttcaatgagcttcgaacacccaactgttcaagccttctagctacaacaagctcttgccaccagcctctaacaacatccaattgcccaattacaacaacattccttggctcatctaaccatacaaactatcgcaactcatcaacgtcaacaatttctaccagcactgagccaactagcttaagcgaaccctgtctgctaattgcaacagcatattcttgcattcaacccactttctcttgcaaacataggtgcatacc

SEQ ID NO: 34685 - DNA, 285 bp, Zea mays
  Clone ID: MRT4577_131636C.1
gagctcacttttcggcggccgcccaaccattatttttggggggtccatctttcgacccgtgcgggctacacatgaagctcgccccgccgtgtgggtcccgtttgtcagccgattttactacccgcgcgcgctgggtgactctatgtctggatgtcccggggctccagactcttcacccaacttcgtgacaaacgcctgagaatctaccgcgcctgagcaccgggatctccggaattcggatgcaattggacctattatagcggcgaaagtggtggcataagaaga

SEQ ID NO: 34686 - DNA, 132 bp, Zea mays
  Clone ID: MRT4577_131637C.1
agcttttgggacacggacgcgcctcacgccggactcggccgactagcacataggtgccgatagtgtacaacagtggcagccatactatgctgcctcctgctgctccttggcctatctgccagcgctgctacg

SEQ ID NO: 34687 - DNA, 550 bp, Zea mays
  Clone ID: MRT4577_131638C.1
catacatagccgatgtacacaactcttactaaagacatggccaagttcgctaccctcgctgctgtgtttggagtactcttagtcgccgctgcggcttcaagaaccggccgtgactgctatgatcaggtccggaggggtgagatgctcagccactgccaggatttccttgacgaggtgtctgataccggccggtgctacagggatgtaaggggaagcagcggacgaggcggcatgagaggaagccggcagttggagcagtgctgtgatcagctcagcgagatggatcaggaatgcatgtgcgaggggctaaaggagattgtgaaggaacaagtgcgtcaaagcccccgatccttcggtcgacagagcacccaggatgaggaggaggttgttgaatgcgccaggaagcttccccagatgtgcagaatgggacagagctgctaccagatccgcgttcactattgagcatcgccggccatgtctctcttaaataaaaatctctctaaatttgcaactaaatggtggcatatatattggccctccgtttgattta

SEQ ID NO: 34688 - DNA, 1290 bp, Zea mays
  Clone ID: MRT4577_131639C.1
ctcctcagcgagcttacgcataccatgaaagtaaatttcatacttggtgagccgagggagtgtgtcagactcgccatcatagttggggaatgtcagcttgtggcaatgagggtcgaagttttcgtgcaagctccggtcgaagaaaccatcgccaccagcacttggaacacgaccgctacctttgctgccaccaatggagaggggatcagttggaggcatctcagatgtagaattatccgtgggtcgcttctctagtcacgccaactcgcgatcctcggaggccattcaattgttgagggttgtaagctgcggcaagatctggtccaattttgcaatgtcggaagtcgctatgttaggatctttgacaatgccggacatggttgtcgatgtgtcggttgttcctgataccaattgatgtgttctagtttttctaggaggtgtacgcatgggagaatagagcaacaaagaggattatggtagagaacgcagagaacacggtggacgaatagagggtcggattccttcgtcggccgctctggcatgaaactccactagggtggtgaaggaacaaactgactctcgcaataagtagcaaaccaactcctaaacaaattctttgaggatatctttgtttctaaacttatctgattgctaaatcttagccacttctgttgttattttcttttcggcttggctgtcctgtctgattatgcgttctctggtattggtggccatggtaagagtacataactatcacttgcattgcaatagcattaatcccttttagctgactgaggttgaaggtgtgctgattttgcactttgtatgcgtcgcaataactgaatacttgtattagttttttttgctgctgcttttgttagaaaagttgtcgactctataggcctcagtttctgtgcttatgtctacaatctgcacaggtattcatacgatgagcaaactggaacatacaaagaaattcaggatgaacaaactggcacggttaaagaagagctgggagatgccatcaaggagtaaccgagttgctacggcccttctcgttcttgattgctgatgcaactgaggtagttcagaccgcccagtgttctttaaagcgaggcagcgagctgtagcttcagtttctcggtaggcgctttgggccacgactcgctaaactgccttgatagatgttttatgaagaaattaagaggaaaccagtcagatcatactataggttgtaaaccagaaagtgatcgactgcaactgtacaattgcaatattaccgttctcggc

SEQ ID NO: 34689 - DNA, 951 bp, Zea mays
  Clone ID: MRT4577_13163C.1
gtaccctccgggtttgccgggaatagcagtccaaagcaaaaccccagcaggaagcaatgtcgacggcccattaactctaacagtcccaggacccccctgcccatccgacggcgatcacgcctcgcgctcgccaggccttatagtacccctatcctagggtttactcgctcccatccactcccaagtcccaacacccgtcggcgtcgagcagcggcagcggcggcggcgatgacgacgagcctgaagaagaaccggaagaagcgcgggcacgtgtcggcggggcacggccgcatcggcaagcaccggaagcacccgggaggccgcggcaacgccggcggcatgcaccaccaccgcatcctcttcgataagtaccacccgggctacttcggcaaggtgggcatgcgctacttccacaggctccgcaacaagttccactgcccgtcggtcaacgtggagcggctctggtcgatggtgcccgccggcaaggccgcggaggcggccggcgcggaccaggccccgctcgtcgacgtgacgcagttcggctacttcaaggtgctcggcaaggggatgctgccgtccaggcccatcgtcgtcaaggccaagctcatctccaaggtcgccgagaagaagatcaaggctgccggaggcgccgtcctgctgaccgcttaggtccttttgcatcttgtttcaactatctgcgctaagaaatattctatctttttttgggtggatctatgagaccctggttttgagcacttggtaacgaatatgagttcgattatatcgatgctgcacacctcttgctgcatgtattattcattctatgcagttgcagttcatgtgggctgtgctactgagatatgaaatgttttggcatttttctgaaaaaaaaaaaaaaaaaaaaaaaaaaaaaaacggacgcgtgggcggacgcgtgggcggacgcgtggg

SEQ ID NO: 34690 - DNA, 158 bp, Zea mays
  Clone ID: MRT4577_131640C.1
ggggaggatacgcggagaatgtcttcaccaccataggcttggggggaataatcttgaccataccagcatataccggcctcaggaacttgggctacttctcgagctccttgccagattcgcctgtcgatcttggtaatgagctcagcaaacttgacggc

SEQ ID NO: 34691 - DNA, 398 bp, Zea mays
  Clone ID: MRT4577_131641C.1
gggtcccccaacccaaggctcccaacaaaagtggacttttttgttaaccataatttctaaacatttttttcctaatcaacttatatatatggtccccatatgggatggggggttttctgaaaaattcatttctcaagggaacccaactaatctttcgtatatcggggaaaacttcctgccaattacattacagcttgcatgcttgggggcccaaagttccataaaaatcacctttcaaaaaatcttgttggggggttttaaaacccaaaacccctggaacggtttgataaaaaaaaatatgcttatttgccatgcatgggaaaaaatgttcaaagttaaaaaaacaaaaaaatgaattgaaacctatgcccaaagggaaaataattataaaggttttc

SEQ ID NO: 34692 - DNA, 386 bp, Zea mays
  Clone ID: MRT4577_131642C.1
tcgtctagatttcgagcgggctcccttcgggaacccgtaagccggctagaagatctttaataccaattgcgcgcaatgcctcactttcgacaagggcgccgttcacaagcaaggtccaaacttgaacggtttttttgtgagacagtcttttaccactgttatcttctccttcttttttggaaacaaaaacaaggctgtagtttgtgaagaagacacttttgttgagttcctgtttaaccctaaaaagtacattcctggaactaagatgtgcttcccttggcttatgaagtcgtatgtgcgtgtttatcttattttgtacctgttatgaatgcaatttgcattattttattgacatgctcttatgccatgtagagataaattttttt

SEQ ID NO: 34693 - DNA, 216 bp, Zea mays
  unsure (1)..(216): unsure at all n locations
  Clone ID: MRT4577_131644C.1
tcgacccagcgtccgagcagcttagntttcgtcttctncggcgagcgaataggaaaatcagnaaccgttggttgtgggtaaggtttttttacaaaagacgtacacgtctctctctctcactccctctttaagatcagaagctcatttcttcgatacgatcagccattagagatgggctcggngaacaacnattactgggggggggggggagatgtg

SEQ ID NO: 34694 - DNA, 344 bp, Zea mays
  Clone ID: MRT4577_131645C.1
cgtagttcttgttcaaagaccaatccacaatggggtgaatgctcaaacttattataagaaacatgcacaccaacgactaattcccacttattttatagagggagatcacgtgaatctaatggtatccccaatgaacggggtatccactctgaaggctaaaggaaagcttgtacccctgtacattgttcgattcctaatacttgagaaatgttgtccagagtcataccgacttcaaataccatgaacttttgttactgcacataacgcttttcacgtttcaaaactgaagaagtgtcttgaacgtcaacaacacactattgaaaactcagatggtacaacagagc

SEQ ID NO: 34695 - DNA, 3916 bp, Zea mays
  Clone ID: MRT4577_131646C.1
cccacgcgtccgcggacgcgcagtgtgcgctcactccttagcaattcggcacgagggttcaccttgcgtgcgcgacatctagggcgaccgccgccgccgccgccgccctacgcccagcagcccaggtcttcgtcgcgccctttgccggctacgagcacccaccacaccagatcactgtaatccaggctgaattgtggctgaacctggtggcatattaatcttggatacttggtcaactgcaaacttgaagattcattttcatgcaatcaatggagagcctagcgcaattagaggtgttgtgtgaaaagctttataattctagagactcggctgagcgagcgcatgcagaaagcaccctcaagtgcttctcagagaacagcgagtacatttcgcagtgccaatacatattggacaatgcctcaactccatatgccctgatgctggcgagttcaagcttgctgaagcaagtttctgaccgcagtctttctttgatgctccgtctcgatatacggaattatgtcataaactatcttggcacaagggggcctaaattgcagaactttgtcattgtgtccttaattcagctggtctgtcgaattacaaaatttggatggtttgatgatgacagattcagagagactgtcaaggaagcgactgattttttaggtcttgcttcccaggatcattatttcataggcttgaagatactaaacaatctcgttacagaaatgaatcagccaaaccccgcgatgcctttgacgcttcataggaaaattgcgggttcattcaaggatcagtttcttctgcagatcttccaaatttcgttaacctcactaaaccaactgaagagtgaagctccggatgactttggacatattcctcttgaccttgccttgaagtgcttatcttttgactttgttggttctccggtggacgaaagctctgaagaatttggaacagtgcagcttcctgcatcttggaggcctcttcttcaagatccttccacactccaaatcttttttgattactacaaagtcaatgacatacgggtttcaaaagaggccttggagtgtctggttcgacttgcttctgtcaggcgcagtatttttgtggaggatcctgcaaggtcccagtttctttctcatctgatgctaggcaccaaggagatacttctaactggccaaggacttgctgatcatgacaattaccatgagttctgccgtctttgggacgtttcaaagtgaattaccagctggcagagcttttgaatgttgagttttatggtgagtggattggtctagtagctgaatttacaactagatccttgttgtcatggcagtgggccagcaacagtgtctactaccttctaagtctttggtcaaggctggtgacatccgtgccttacttgaaaggtgaaacaccaagtcttcttgatgaaactgttcccaagatcacagaaggttttatcacttccagaattaattctgttcaggccatccttgctgacaactcactggaaaatcctttggatagtgtggaagttctccaggaccagctggagtttcttcctttcctttgcagattccagtaccaaagtagtagtctgtacatcataaacatcatggaacctcttctgcaagcttatacggaaaggtccagattacccgctcctggtgatgctgatgagctgtctgtcattgaaggccaaattgcatggatggttcacataattgcggccattgtcaaagttaggcaggtaacaggtgttagtcaagaaacacaagagttgattgacgcagaactctctgcccgtgtactacagttgataagtgtgactgatacaggagcgcacacacagagatatcaagaattaagtaagcaaaggcttgaccgagctattctcatttttgtacaaagtttcagaaggtcatatgtaggagaccaagctatgcattcttcaaagttgtatggaagattgtctgagcttctaggacttaatgaccatttaattctactcaatgtgattgttggcaaaattgctacaaatatgaagtgctatgctgagagtgaggatgttattgatcatactctgtccctgttccttgacttggcaactggctatatgactggaaagctgctgcttaagctggagagtgtaaaattcatcattgcaaatcattctccagagaatttcccatttcttgcagaatacaaatgttcacgtagtagaactacgttctattacatccttggctccttagtcttcagggaagatagccgtccgcccatcagtactttcatggaagggcttcaacaggttgcattaaacctggaggcaactcctgatgctgcttttcggactgatgtcgctaagcgtgcatttgttggttggatgagagatctacgtggcatagctatggcaaccaacagccgcaagacatatggcctcctatttgactggttgtatccatctcgcatgccacttctgctgagagccatctcactttgcactgatgaaccagaggtcaccacacccttgctcaagttcacgtatgaatttgttttgaacaaagctcaaagactgacatttgattcatcatcaccaaatgggatccttttattccgagaggttagcaagataatcgtggcttacgggtcacgaattctattgcttcctaatggcacagacatttatggaagtaaatacaaaggcatatggatctcactgactgttctttcaagggctttgtgtgggaattatgtcaattttggcgtatttgagctctatggtgacagagcacttgctgatgcccttgatatatctctgaagatgaccctctcagttccattatctgatatattggcattcaaaaagctgtcgaaagcgtactttgggtatatggaagttctgttcaacaaccatatcaagtttgttctcaatttggacacaaacacattcatacatattgtcagctcactcgaatctggcttaaaaggtctagatgcagggatatcatcacagtgcgcttctgccatcgacaacctggcagccttttactttaataacattacatctggtgactcacctccatcaccagcttcagtaaatctcgcacgacatattggagagtgtcccaatttgtttcctcagatactgaagactctttttgagatcatgctctttgaggatgctggtaatcagtggagtctgagtcgaccaatactgagcctgataatgaccagtgaacagatgttcagtgaactcagagcgcacatattagcatcacagactgtggaccagcaacaacgcctttcacagtgcttcgataagctgatgacggatgtcaataggaacttggaacctaagaatcgtgacagattcactcaaaacctgacagcatttagacgtgattttcgactgaagtaacagctccttggtaccagctatcagtttgaaggtgttcctgcatgatgtaaatactccagttaccttcttttttggaaccacctttctgtgggttgagaaaagaagagcttgtccttaggtttgccttggattggctgaagatggtcttgttgatgcatgtggtagtgaaagcagctgtaaatttcatagcatgtcattttaatcagaatggtgaaaggtggagattgtttcttttgttttttattttatattgcatccctttagcatgtacagcaaaattggtgctagaacaggggtggctgtttgcccaatttgttaagtgggaggcagtcatctcagatataattcatttgttaagaagtcaacgaggtaaaggatgtaaatgattccgttggctttgctgaatatgaaagttgaacagtaagaaggatggctcagttgcatccgctgtgcagattgaactgttaatgataacaatttctttttttt

SEQ ID NO: 34696 - DNA, 480 bp, Zea mays
  Clone ID: MRT4577_131647C.1
gcgggatccagttttccaaagccatacatgtagaacattctcctccctacgactgagctcttttccccttgctgcgccggccagcgcgagcgaggctcctggtgatcctgctccagctgatggaacgactgggggatgtaccctgactgggagaccgccgccagcatgagggccaggagcacggtcctcgccgggcagaccaccaaggacagcgccggcagcttcgaggcgcgctccgagggcgtcggctgctgctgcatcacctggatctgcgtcatcacatgctggtggtcctgctgggtctgcatgtgagtcctcccggctcggcgatggatcacgacagtcgagaggaccacgaccgggaggggttaatgatagatataatggtggcgtccagcctataagatcctgtcaactgtaccctccattatccatggttgctcggtcatcgacagcatctcctgccccgcgactagaacg

SEQ ID NO: 34697 - DNA, 859 bp, Zea mays
  Clone ID: MRT4577_131648C.1
cctcgaggccggccgtggcgtgccgtagcgcgtgcgaggcgttcgggacgccgcagtactgctgcagcggcgcttatggcaaccccagcacgtgccggccgtcgacgtactcgcagttcttcaagaacgcctgcccgcgcgcctacagctacgcctacgacgactccacctccaccttcacctgcgccaccggcatcggatacgccatcaccttctgcccgagcaccaccagcgggaagtactccggcgagaacccgcaggccgcctcgtcggctaccggcacgatggtctacctcggcgacgagcagctcgccaccggcgcctccgccacggcgacccgagcgtctcagctcctcgtggccgccgccgccgccgcagtcgcgctgctctgagcttgccgatgtacgtcgccgtgtgaaactggcgcgcggcaggagtcgtatgtctttgttcagacacgcctcttccggcatgacggctgacgggggcagcgataagattcgacaagagaaaagggggttcgccgcccgtgcccatgagaccccccaaaggctggcgagtcacgacagtgctgctgctacggctaaccgaagaaaacaacgatatctccgcgtaccggatggcatcgtcctatactttataggtagcttatgtcatagggtttaggataactggtagcatgtgataacctttgcattcttctagtccacgcttcctcgatttgccgttgagccgaaacgatgtattctatgctcgacgtgctataatagattacagcaattatgattatttactttacctgttcaatattagtggaaaaggacgaaaagggtaaacaaaaaaaaaaaacaaaccacac

SEQ ID NO: 34698 - DNA, 251 bp, Zea mays
  Clone ID: MRT4577_131649C.1
atacgcaaatataaaggtcttattgttcttgtgaagaaaattaaacaatcccagctgggtacttaggtttgagccaattcgccccaaaattaaaaattgaaagaggaaaagagacatgtcctagcttgcccatcttgtcgtttttcaaagcaaatgaagaagtaaatttcctaataaaaaaaaaatgtaatggaatgacttttctgatcttgaataccagaattcctagactcacctaaaaataacaattc

SEQ ID NO: 34699 - DNA, 293 bp, Zea mays
  Clone ID: MRT4577_13164C.1
cccaaacctaagctctcaattcgaccctttcttttttatatcaacctaatcaacctctgttacccaaaaaatgtgcggtataaacaaatcccaacttttgcatctaccaacccacaccaaagctataaaactcctatcttgcctcctctaattttctaactacctatcagatctacaatatcccaccatcccaaaacacaagtatacctttacctatctctaaaactatgaacccaataatttacaacattcctaccaatcattaattctttcttaacccacccctaaataca

SEQ ID NO: 34700 - DNA, 666 bp, Zea mays
  Clone ID: MRT4577_131650C.1
cctcttccaccttcacatgcaccaccggcattggatacgccatcaccttctgctcgagcaccaaccagcgggaagtactccggcgagaacccgcaggccgcctcgtcggctaccggctcgatggtctacctcggcggcgagcagctcgccaccggcgcctccgccacggcgacccgagcgtctcagctcctcgtggccgccgccgccgccgccgcagtcgcgctcctctgagcttgccgatgtacgtcggcgtgtgaaaatggcgcgtggcaggagtcgtatatgtctttgttcagtcacgcctcttccggcatgacgggggcagcgataagattcgacaagagaaaagggggttcgccgcccgtgcccatgagaccaaaggctggcgagtcacgacagggctgctgctacggctaaccgaagaaaacaacgatatctccgcgtaccggatggcatcgtcctatactttataggtagcttaggtcatagggtttaggataactagtagcatgtgataacctttgcatgcttctagtccacgcttcctcgatttgccgttgagcctatgctcgacgtgctaaaatagattacagcaattatgattatttactttacctgttcaacattagtggaaaagaacgaaaagggtaaaatcattgttcacac

SEQ ID NO: 34701 - DNA, 483 bp, Zea mays
  Clone ID: MRT4577_131651C.1
cccacgcgtcccgaaaaaaaaaaaaaaaaaaaaaaaaaaaaaaaaaaaaaaaaaaaaaaaaaaaaaaaaaaaaaaaaaaaaaaaaaaaaaaaaaaaaaaaagggggggccggtcgttttggatgcgcatccttacttcacgcactgcttgctgtgcctctgttctttcttttttttgtttggcgcctacttataatttaattgggctgggccgtttttttaccatcgtgactggttggaaccttccctgggccccaccttatttactctggctggccgtccctcttctttcggctggcgggattgctagggggcaggcccggatggtccttccttccaattgttcgcccttcttggttggtgattggcaccctccctgtggcgtttaattacgtggggggggtggggtgcttacaggttgactgttccttttgcttgccccttacctcccgcccgttccttttgtttcctttccttccttgcc

SEQ ID NO: 34702 - DNA, 610 bp, Zea mays
  Clone ID: MRT4577_131652C.1
ggggggggggggagtggttccccctttgtaaaaggggccaaaaaattttaccattctcaaggggaggggtaagggggggaaaaaaacttatccgaaaaacaccccccccggaaaaaaacaccagggggggcctcacaaaaaaaaaaagggggccccccccgggtattgaccccacggtgcggccccaaaaaaaaggccccgtaaaacaaacacttggtgggttaaccagccccccgttgaaaaaaaatttttagcccgcaaattgggccaagctaaccccctgaggggggttccttccccccccgcggggaaaaaaccccccccgggggggatttatttttttttccgcggaaccgcgaaaaatccccgccccacccaaaaaatttatcctccccccgggggaaaaaggaaaaatttttggcccccccctccttggcagtctggaaaggggcggcctcgtccatttaattatttttctgcccaaaaaagagggggaaaaccgtggggggcccgcaaaaaccaaaaatgcgcagggggtcgggaaaaaaaacccgggggaccaagaaaaaaaaaaacagaggcgcggggcccccttttttgccaccccccc

SEQ ID NO: 34703 - DNA, 335 bp, Zea mays
  Clone ID: MRT4577_131653C.1
ggggggggaaaaagacactttttctggtttttaaacacataaacccattgggacaaaaacccttacaggttgggacatggtttgggcccattttacaggcaggaacaggggcctaaacaacgggtttccttttaaagatccaactgaacttggccggccgggggttgtcctttttggccctgtcctcggggcgcttcggggcccggggcattcttggggcggggccccaaacaaagtccctggccctggggcccttggcggagaggccggtttccagggttttcaggtttcaccgtttgacaagggactctgcgatttccgcgttgtcccggggg

SEQ ID NO: 34704 - DNA, 578 bp, Zea mays
  Clone ID: MRT4577_131654C.1
ggccgcttttttttttttttttttacttttttttttttttttttttttttttttttttttcggttttttttttttttttttttttttttttttttttttttttttttttttttttgaaaaaggtcctttcttttttgggggaggccccacccgctcgccaaaaatttttttggcgaactataccccctagaaaatgaaaaggggggccccccccatggggggttcggggggagaaggccgcggggttaccaaaaacaaggggctcgaagggcaccaattgcgccagcacgaagagggtccccgacctggggcccggctggtggtacaacgcgaacaaccgcgcctggcgcaaaaagggcaccgggctcacccccaccttccgggctgaaggggaaacttgcggggcctcgcgcaaaaaaccaggaaacgtaactgctcctacggggcttaatgaaaaaaaaggtcggggggggggacaacatagccggcttaatggcaagctgtttgctggcaaacaaaaacccccgtcaactcccgctcggtcttttaaggaaaaaacatcctgctctggaaagtac

SEQ ID NO: 34705 - DNA, 329 bp, Zea mays
  unsure (1)..(329): unsure at all n locations
  Clone ID: MRT4577_131655C.1
aaaaaagtttcnttccaaaaaaaaaaccgtgttcctccccggggtttttttataaaaaaaaggacgncccggtctgctcccgctgctcgatatacgaagaggtagctcctgttttttgagagggggtaaggggagcagcgatatcgctaggtagcatcagcacacgctgactctcaggagcactactctcatcacgcgggtgatnctcagtagtaaacagagcagcatggcagtacagcaaacacaagtaccgagtgtagagcgtagcaccagagcagtccagagcagctcagagagagtagcgctctgtactagagcagtcctcatct

SEQ ID NO: 34706 - DNA, 426 bp, Zea mays
  unsure (1)..(426): unsure at all n locations
  Clone ID: MRT4577_131656C.1
gccggccgggttggggtgctatcttcccttgatcttcccctgctgcctgctgcctgcgtcgngtcaccgcaaagccatgcaaccgctagatccgggtcgcgcggaagccccccgaaggtccatcgatcgaatagatggcggattccgagcacgatgctggggaactggcggagcacacagaacttagctcagcacctgaaaccattgccatccattgatattggtggcgagcactcagcgaagaaatcctgtcgagcccacctaacctcctgctaacactgtgtgaagctacggaggcggcgtccgcatcgatcatctctcctcccacaaggacatcctccactcctctcgctgctggagcttccccgtgctgaacacgttgtttctcctctccacctagcacgggcgcctcctgataaccatgga

SEQ ID NO: 34707 - DNA, 312 bp, Zea mays
  Clone ID: MRT4577_131657C.1
ctctcgctcacccagaatacttttatctcttctactcgccagtatccatgcgcacgactgagagctgaatcaaccgattcggaaggatctgcactctcttatccagggtcgccctccagagctagcacttccagctcctcaccttcaacgacccctttatcaccacatactacatgacctacatgttcacgttcgacaccgttcactgacactggaagcacaaccacatgacactcaacgactcctagacccttctcttcacagacaagccggtcaccgtctttggcataaagaaccctgattatataccgt

SEQ ID NO: 34708 - DNA, 462 bp, Zea mays
  Clone ID: MRT4577_131658C.1
gggccaatatcaaagcgtgtaaactcgaatataccagtcacttcaatgccatagggtgccgcatgacagcaacataagaaggaactaacaagctggcttcccaccatacactgggcaccttcgctgcaatcggctactccttggattctaacgagttatgacatctactgaggaatcccgctttacctcgttatgccatatttcgtgaatttatctctgcttggaaaagccactttgggtgccaatcagacacattggcacgggaattcacaacatcggatttctatcctggccatcactttcacttgtcgactgaaatttcgttcccactgtcaatgaacaatcctgaagaaaggttagctgacgccgggtcaaagaactctgcagcagtcccccgagaaggcaaagagagatgtgagcttcaaccaaaatccaccaggaacggttccttatacagcaatg

SEQ ID NO: 34709 - DNA, 426 bp, Zea mays
  Clone ID: MRT4577_131659C.1
gctcgtcctttttttttttttttttttttttttttccaggggtccatgaagagtctgaaaggacgttgtccattgacagaaccccattagggtatgcaagtttatacatttacggggcaacgtgtggggtgccgacgtaccctgctgtaaccggtccatgtttccacccgggggggttcgcccatgctgcaaagttcgtcccgtacgggcgtaccctagctacctggcggcgggtggcttttgggagtggggaccaccaacttgctttaacacgacacccgaacactgtccggcgggggcgtggttgatttaccagttgacccaagggattatttgttggggatgcttgggccagtctaatctaacgaaatggtgccttaaaacgagggacaaataccatttgctataccaacgcaattttgggta

SEQ ID NO: 34710 - DNA, 1252 bp, Zea mays
  Clone ID: MRT4577_13165C.1
gtccaacggaagtgcgtcaaacgtcatccgcaggaagctcgtcattattggagacggtgcctgcggcaagacaagtttactcagcgtcttcacacttggatatttccctacacattatatcccaaccgtcttcgaaaactacgtaaccgactgcagagtagatggaaagtccgtgcagctggccctgtgggatacggctggccaagaagattacgaacgtttacggccccttgcctattccaaggcgcatgttatcctaataggcttttcggtcgatacacccgattctcttgacaatgtcaagcacaagtggatcgaagaggccacgcgtctttgcgaaggtgtacccatcatcctcgttgggcttaaaaaggatctgcgggatgaccctgttgccattgaagagatgcgcaagaagtcccaacgatttgtaacagctcacgatggcgaaggcgttgcccgagaaatcggagccaagcgatatctggaatgctccagtttgagcggagagggcgtcgatgatgtgtttgaagccgccaccagagctgcccttcttacattcgagaagggggagactaccggttgctgtgtcgttctgtaaaacggcatgccagccggctctcttgaaccgacccgactttggtacatctatctgacccacagacagtgaccaagtacaccatactggcccacatgttgcaaaatgagatcacgacacgataattaagtcttcacagcttgctgttgcttgcttatcttagcacatacactctcatctcatctcataccgcgaagagtgttgtcatattacgcttcatcatctcacggcttctaaaccagttttattgggtactctggcaatacagctgattctcaccatatgaggcaacataaaagcatacaactatccgagaacataatttcaaccccagagttgaaatggctacaaatttttcttcactgttccttttggcttatctgttggaaatatgtctttttttttatcctcctgtatcctcgcaatgtttttggcaagcgtattttgttgcagcggagaaaaagcgctcttaactcgaaagcgacttcaacctctgtactaatatggttgattgcatagatcaacaactgatttttctttttttttccttctctggggtatattgggggaggttttttatggacggaaaagggtgaatgatggagatggggatatttatactccactgatggcaataaaattgtcgagcctccc

SEQ ID NO: 34711 - DNA, 211 bp, Zea mays
  unsure (1)..(211): unsure at all n locations
  Clone ID: MRT4577_131660C.1
gccgacccacgcgaacgcgcagggatgcatttaacaacaacacccaaccgaacaacnaacccggccgggaagaaggtgcgaaacaaagcaagggcacaccccacaggaacggccagaaaaaacagacgcaaggcacagcggcagacaacagaaggccagaacaataaacagccagcaaaacgacccgacgaacctgcgggaagggagacga

SEQ ID NO: 34712 - DNA, 1665 bp, Zea mays
  Clone ID: MRT4577_131661C.1
ttggtaccctcgaggccggccgggagcatttcgatcccgacaccccaaaatccctcagccctctggcctcggcggcgctcaaaccttcgccgtcccgccgtctccaaaaccctcttaccatggccgccgcgacaaccgcgggggccggagccgcgacgccgcagccgccacggcagtacaagctagctccgcagagcgagctgcgtgtggaggtgctccccgacgcgcccctccgagtgcgcctcgtcactggcaccgcagagatcttcggcaccgagctgcctccggagggctgggtccccgtccctccccgatccaagatcgccattttcacctggcacggcgcgacggtggaactggacggggtgagcgagagcgagtacacgtctgacgagactccaatggtaatttatgtcaacacgcacgccattctggatgcccgcagggcaagggcgagaacagccgcagctcaggggggcgataaggaggcatcacagggacctagagtgattgttgtggggccaacagattctggaaaaagtactctctgcaaaatgcttcttagctgggctgccaaactgggctggaagcctacgtatgtcgatttagatattggccagggatctataacgatccctggatgtatttctgctacaccaattgagaaacctatagatataattgatgggattcccttggagatgccactggtatacttctatggtcacccaaatccaagtattaatgcggatgtttacaaagttcttatgaaggagctagctaaaacattggagaaacagttctctggcaatgctgaatctagggcagcaggaatggttatcaatacaatggggtgggttgaaggccttgggtatgagttacttctcaatgcaattgaaaccttcaaggccaatgtagtactggtactgggacaggagaaactctggaagatgttgaaagatgcagttcaaagcaagtccaacattgatgttgtaaaacttcataaatcagagggtgttgtcctcagaaattcaaaatatcggcaaagaacgagaagcttccgaatcaaggaatacttttatgggattgcaaatgatcttgcaccgcactcaaacattgtcaatttcagtgatgtctcggtgtataaaatcggtggtggccatcaagctccccgttcagcattacctatcggtgcagagcctgtggcagatcctactcgacttgttgctgtcaacatcagcacggatatgatccatacagtgcttgcaatttcctatgctaaggaacctgaagaaataatatctagcaatgttgccggattcattcatgttactgatgttgacatccaaaggaagaagctgacgtacattgcaccttgcccgggggacttgccaagcaggttgttgatcgcgagttcacttacatggtatgaagcgtgatcagtctaagttagatgggccatatgcccatacgcatgttgtaaagccaggacatgtgacgttgggactgagcgttcgatgtctactgctaaccaagagaaacgatgcaaggacaaatatcctgttccctcgtgatttactgtgttctcgtttcttctcttattatacgccaacatctacggtgcggttgagataacaaatggcgtggtggtttgagaaatgaggt

SEQ ID NO: 34713 - DNA, 969 bp, Zea mays
  Clone ID: MRT4577_131662C.1
aattcggcacgaggcgcgtcacagctctgcccgttcttatccacaatttcttcgtcccgattcctccgccgacgcccacgctgcggacaaatcagccgccgtcgccctctcgggatcgctggctcccctgcctctgtgcacactcctcaccaggacccaagccagctccgtcgggcgccgtggggaactgctgggaggggcggtcgaccggcggtgcctctgcttcgggttctccgtaccggcgtcggaggggatcggatggcataaggtaccgcatgacctccctcctcaactcattatttcacggatttattcttctgggacgtgcctatgcgcttgttccatgtttcgttgccaggattattcttctgggatgtgcctacgcgcttgcttgcgcttgttccatgtttgttgattggattaatgtttggcgtggcaagattgtttctttgttgtttggattgaggtatggtgcgctaggtttgttgcttgactgaagtttcctttgctaacaaataatgtggagtgattgcctgctgtttgaggggttgtctcaacgggagatctgttctctccgtgattgagggggttggaccttggctgtgtattttttctcagattcgttttgttctttgtaatgccctagttgtttgccagccaattggtgtgggttgtatcagtactagtaatttgcccgtgccctgcgcgggtcattggtttatttgtttacaccatttaaaaaagtgttgctttagatatatgaaagcaacaataatctagtaataggacaattcaatctacaaatatagcagcataatcagcatagatgttatattacaatgacgctgcttgaagagagctgagcagatatatatacatgtattgaagcaacaaaatgctggtcttaatgaacacaaaataatgatactcttgaataaagtttacagtgagtttctgcagccacgcact

SEQ ID NO: 34714 - DNA, 304 bp, Zea mays
  unsure (1)..(304): unsure at all n locations
  Clone ID: MRT4577_131663C.1
ggagcatgaaggacgaggcgaccgccgcaaccgcctatttcaagttattgngccacaaaaccaacagggggggngggctcttatggacacaaggagaccacccgccccaccagggacccatgttgggtactatatatgttctattgttatagccacaactatagctgccctgcctgaactgaactcaggtttttttaagaaaaaactgtccaagattggattgcttgttaaagctaaatattgttattgacgtgttaaaaaaaaaaaaataaaaacaaaactaaaacataaaaaataaaaaggg

SEQ ID NO: 34715 - DNA, 411 bp, Zea mays
  unsure (1)..(411): unsure at all n locations
  Clone ID: MRT4577_131664C.1
gcgtccgcgatnttgtgcacgaatgtgggtaaacacagcaacactcaattccttnaggtacggcatattgtatattatgtgttgttcancgactaaataggatacataaatgtagggttgtgaacagcttgatgtttgcgattatactgtctttgttcgtgtcactggcatgttcaacaacacatgcatattgcattgttgcgtaaaggaattagcctgtgacactcaagcactgccttttcctggcatgcttttttgcaggttgcagagagagccttgttcctatggaacaacgagcacctattcgacatgatctcccaaaaccgccaagtaatcctaccaatcatatacccagctctggagaggaacacccgctggcactggaaccagtcggtcctcaacgtaacgatg

SEQ ID NO: 34716 - DNA, 114 bp, Zea mays
  unsure (1)..(114): unsure at all n locations
  Clone ID: MRT4577_131665C.1
gccgggggtcagcagaaggattttcgtaataacatttacatgattaacgaggcgcatagactatactgcacattggctagcgatcatgcanatgttattacgaaaatccttctg

SEQ ID NO: 34717 - DNA, 2785 bp, Zea mays
  Clone ID: MRT4577_131666C.1
ccgcgttttaccctaacaacctaactagctgcggttctccactatcactcgctgctactgcacctacttcctttccgctctggtactgttgctggcttgctgctgctcttggtggtggtggtggtggcaccgaaaccctagcccttgcctcctgtcggagctggagccggtgctggcttgctgctgctcttggtggtggtggtgggggcaccgaaaccctagcccttgccctcatgtcgcagcaggaggctgtggacccgccttcggcgacggacgagcggctgggaggtcgacggcggaagtggctccaccagccgcctcaacgcgcaggcgccggagttcgtgccgcgcgctgccgcggttccccctccccctccgcagcagaaggtggtgggttcgtgcgcgccgcctacccacgcaccgtcctccgccgcagcactaccgaaaccgtagcccccgcagtagcagtaggaggaccggtccaatgggaacccccccgagatctggccacccaggcaggattgagcaagagcaagagcaggcagcacaaccacacccccgaccagcggctaataacaaacagcctcaagatcctcgcatgccggatggctcacggggattcagcatgggcagagggaagccgcaaacattgacgcccagagtatccgagtctgaacctgaacaatgaattcgaacctcgcagagagactaatgggttccggtttgccatgttgatacatatgctgagagacttgccttttagaagtctgtcctcgaggtcgctttctaatttatgggaccatatacatttctgcatgtgctgtgtgtgtacttccaaagccagcagacactggttcgcgaatagtacggttgcggccattctgtaattccatttttgccccccttatgcagttttgggtgcaatactgaaaatcaaaaactcatgctaaaaaggttgaaaagaaacaagtcgttagagagattgtagaacttaatgatgagaggaactggagaagtgggcttagagttcgattgttgagcacttgcatggtaaccttccattgaacttcattaattgccgatgagatggcttattggtgttcaaccgcttgtacatacatattacaaggaatattccaaaaatcctctggggcctcggaacagctatacaggaatcatattacaaagccctggatgaactctgcagaaatacatttattttgaatctactttttagtgaagcagataccacccaatgaccgaccagatccatagggggtgatggggataacttcttttggaaacttgaaagctctcttgaactgctgtgctatagcattataacacagttttttcttaaaaaatcagggagaagtctatggccatccaacgttcatatttggtgattcagctattttgatgggtggttttggtgacgtggatgacaagtggcagtcagccccgcttgtcatcattgttcaattttttagaatggctcaaaatggagaaatgaccaaaaccaaagttgttatagttgagatctactttgcacttgacttgttcatttgaaattatttacattctcaaaactctgtttgacgttctcatattttgaaatccaaaattttcgaactgttcaaattaacttggatggggaaatgacccaaacagaagatgtagatctcatcgatgagatctacaactttgtagctggcaactttttttagtgaaaatcatttatggtccccaattttgtttgaagtcaaattttgaagttcaaaattttcaaacctccttggatggagaaacggccagaaacaaagatttacttctccaccagatggagggggaagaagataatgctgacatgtgggcttgctctttccctaatttgtttttgtgtcacaaaacaattttctaatttatttgctgcctgctctttgcaattgagacaaagggaggtaaagggaaaaagggtgggcatgaatctgatgggtatggtgacgaggagaatgtctctacttctgatcaaccatatgataaatatttagaagaaacacctcagatgtcagatgtgcctggagaacacatgactgaggatagcgctggagatatgggacgaggacgtgtccggggacgtggtcgtggtggcaggggccgggggcgtggttaccatcaacagaacaacaatcaacaccaccagcactaccaaaacagtagccaccacagtaacagtagtagtacccgtccagtgggaaccccaccgccatctggccacccagtcatgattgagcagcagcaacagcagcaggcagctcaaccacagcccctcacagcggctaacaaacagcctccaggtcctcgcatgccggatggctcacggggattcagcatgggcagagggaagccgcaaacattgacgcccagagtatccgagtctgaacctgaacaatgaattcgaacctcgcagagagactaatgggttccggtttgccatgttgatacatatgctgagagacttgccttttagaagtctgtcctcgaggtcgctttctaatttatgggaccatatacatttctgcatgtgctgtgtgtgtacttccaaagccagcagacactggttcgcgaatagtacggttgcggccattctgtaattccatttttgccccccttatgcagttttgggtgcaatactgaaaatcaaaaactcatgctaaaaaggttgaaaagaatcgagtcgttgtaaaataagattgtttcttcgctgtttgcgggggactgatcc

SEQ ID NO: 34718 - DNA, 245 bp, Zea mays
  unsure (1)..(245): unsure at all n locations
  Clone ID: MRT4577_131667C.1
cacagaaacctgctagggnaaangtgggntcggatcantgtataaagggntncttnnctgaatnnaaaganaggttgcggttaagaanactgaanagatggcggcgggcagggggaaacgtgaagttccatgctgaggtggaatnttatcagtcgtgtgcatcatcnccatctagtttctcntgtggggtattncatttcagannaccaganattgcttnnctacgattttgtgcccaacgacac

SEQ ID NO: 34719 - DNA, 2005 bp, Zea mays
  Clone ID: MRT4577_131668C.1
agaccgatccccgacctagccgcggtaaataaatacccgacttcgccggcgtccgcgagcttcgagaatacatccttccccgcgttttaccctaacaacctaactagctgcggttctccactatcactcgctgctactgcacctacttcctttccgctctggtactgttgctggcttgctgctgctcttggtggtggtggtggtggcaccgaaaccctagcccttgccctcatgtcgcagcaggaggctgtggacccgccttcggcgacggacgagcggctgggaggtctaccgcggagcggctccaccagccgcctcaacgcgcaggcgccggagttcgtgccgcgcgctgccgcggttccccctccccctccgcagcagaaggtggtgcgtttgttcgcgccgcctccccacgcggcgttcttcgtcgcggcaccccggcccccaccgcccccgttcgagtactatgcggcggttgccaccggtgggggtggcaggttcggtccccccgccgctgctgcagagcaggaggccgaggctgagcagccgccgagggacgggagctttgatgaccccgtgcccaagatcagaaagcaggtggagtattatttcagtgatataaacctggccaccactgaacatttgatgaggtttatttcaaaggatcctgaaggatatgtgccaatatcagttgttgctggctttaagaaaattaaggctttggttcaaagtaactccatgcttgcttctgctcttcggacttcatcaaagcttgtggtcagtgacgatggtgcaagagtaaaacgtgagcaaccatttacagaatcggatttagaagaactccaggcccgaattgttgttgcagaaaatctcccagatgatcattgttaccagaacctgatgaggctcttttcagttgttggcagtgtcaggacaattagaacttgctatcctcagaccccaaatggcactggtccagctactaacagatctgcaaagctagatatgctttttgccaacaaacttcatgcttttgttgagtatgatactattgaagatgctgctagagcgattgtggaacttaatgatgagaggaactggagaagtgggcttagagttcgattgttgagcacttgcatgacaaagggaggtaaagggaaaaagggtgggcatgaatctgatgggtatggtgacgaggagaatgtctctacttctgatcaaccatatgataaatatttagaagaaacacctcagatgtcagatgtgcctggagaacacatgactgaggatagcgctggagatatgggacgaggacgtgtccgggggcgtggtcgtggtggcaggggccgggggcgtggttaccatcaacagaacaacaatcaacaccaccagcactaccaaaacagtagccaccacagtaacagtagtagtacccgtccagtgggaaccccaccgccatctggccacccagtcatgattgagcagcagcaacagcagcaggcagctcaaccacagcccctcacagcggctaacaaacagcctccaggtcctcgcatgccggatggctcacggggattcagcatgggcagagggaagccgcaaacattgacgcccaaagtatccgagtctgaacctgaacaatgaattcgaacctcgcagagagactaatgggttccggtttgccatgttgatacatatgctgagagacttgccttttagaagtctgtcctcgaggtcgctttctaatttatgggaccatatacatttctgcatgtgctgtgtgtgtacttccaaagccagcagacactggttcgcgaatagtacggttgcggccattctgtaattccatttttgccccccttatgcagttttgggtgcaatactgaaaatcaaaaactcatgctaaaaaggttgaaaagaatcgagtcgttgtaaaataagattgtttcttcgctgtttgcgggggactgatcatttcgatgcttttaccaaaaaaaaaaaaaaa

SEQ ID NO: 34720 - DNA, 423 bp, Zea mays
  Clone ID: MRT4577_131669C.1
aaaaaaaaaaaaaaaaaaaaaaaaaaaaaaaaaaaaaaaaaaaaaaaaaaaaaaaaaaaaggcgggaaaaaaaacaaagggaaaaaaaaaaaaaaaaaataaaaaaataaaaaacggggcgcccttttttaaggatccaattttccttccccttccttgcaacttcatagtttttttttagggccccctaatttcaattcattggccgttttttaacaacctcgttactggaaaaaccctggcttacccaaatttattccctttgaacaacatccccttttccccagttggcttaattaaaaaaaggcccccaccgatcgcctttccaaaaatttgcccacccttaatggcaaatggaaccccccttttaccgcccctttaagcccgggggttttggtttttccccccagttgaacccttaca

SEQ ID NO: 34721 - DNA, 328 bp, Zea mays
  unsure (1)..(328): unsure at all n locations
  Clone ID: MRT4577_13166C.1
tctttcttntccnncggagggctttttttatttttttttgcaacacacaaaccccccttttattctgatccaaattgcgagctaactgattactattgtcggatccattattctagacaactcattacaaaacaacctttggtttgaatagccaaacccccaaaaattacttgtccacaaaaaaaaatggtcccactgtgtttggggcaaaaaacaccctttcaaccgccgatatacccagagaacctttttattttcagacacatatttgcatgaagttgacctatcaaaaccaccgatggtgttttgacgacctttccaactaatg

SEQ ID NO: 34722 - DNA, 401 bp, Zea mays
  unsure (1)..(401): unsure at all n locations
  Clone ID: MRT4577_131670C.1
gggaannccggggcggaccacacccgtccggtcagacggaatggtccaagtttttggccattccaggggggccaggtaaaggttgtgggggccttggcccaaatccttaagatggagaatcggttgaaggaattgaggggttaactgaactgcctaaaaaaagacctaaagttgggcctcgcaaagcccaatcagatgtattaggaaggagaaccaagctgtcaacacatccaactttttgtaataggaggcggcagatcaagcagggttcaaatcccaactgggcaactactactgttgaagcccagggttcaaattggcccaagtttttggccccaagccgttttggtgggaggaaatgcttcgatccctttggtctgcactggactgaacatgatgaa

SEQ ID NO: 34723 - DNA, 617 bp, Zea mays
  Clone ID: MRT4577_131671C.1
atcccaatgtatcttattattatatgttgactccggagcaaagcacgggcatacacctagtaacaaaataagcagtaaacaaaaacacagacagatttatgcatttttggcaatcccgcgggggcgggcgaacaggtagggctgatttggggaccggaaatccccaagggaaaaaatccttttgctattcaaaattgaattgcaaagggattcctcccccatggatctcctagggatctttaatcaccaaaccagcatgtaggggggctattcctttttgcatcgcccggacatgatgggaggatgggcaaacgggccgtcgagcaccccgcgcgccatgatccggtacacggcctccgtcatgtgcagcccgtcccaggacacgtacctggacgggtcggcgcactgcacggcgcccggctcggagcagcgccccgtccagttggcgttgtggaagccgccgccgccgcagcacgcgtcgagcgccgtggcgggggcgaagccgttgcgcgccggggcgccgacgatcccggtgacctcggcgtagtagtcgacgtagacgatggagacgtcccggtacgcgcggcggaggccggcgagcttggcccggagcagcg

SEQ ID NO: 34724 - DNA, 3621 bp, Zea mays
  Clone ID: MRT4577_131672C.1
gaaaccaggggaaggcgcagcggtttgccggcagacgggcgggcccaggccgaggaaacaggcaggtgcatccatccagagccacgccggcgaaacgcggcgaacagatacgagcacgcgagagtggtgcagcgaggttgaagcaacgacccgcatccggccagcccccgagctgcgctgctctgctcttgctctcgttcgtcccactcctttcttcccaccgaggggagagacaaccccctggctcctgcctgctcgacggacccaaagcatcgcctcctcttcctacccctctcctcaatcggctcgtccggtcgtcgcttagcgccctccacccgccagccaccccactgcgacgccgcgttctccccttcttccgacgtcgctgtctctctctcagcccagctccaggggcgaggctgtgaaagaagagggaggaaagggagaaaaaaagaccctcttttcttccgtcggcaggcctcgtgaccatggatccgccgcccgccgggctctcgacgctgccgaggtctgctggagatccgtagccagcccacgtgtagacggttatggtgctagtaccggtgccaacgctgtgtttcttggcgggcgttgctgctcctcctccgcttgaggattgctgctgcatccggcaggagggatggtcggaggcggaaggagcgtcggcacccgcagcgtggaatcgacgacgggcgcctccagtcggttcagaaatgcgcaaatgcgcgtctgaatgaagcctggttggaggtggtagagccgatggtggtgggaacggcactgctgcgcggggtttcctccgcgtggatcctcctgttcctctcctccctgctcctctcgccgtcagcggcgtctgtcgatttcggccactgcggcggctgcgacgacgccgacgacggcgccctctccagcacctataacatcctgcaatgccagaaggtcagcgacttcctcatcgccgcggcctacttctccatcccgctcgagctgctctacttcgccacctgctccgacctcttccccctcaaatggatcgtgctgcagttcggcgccttcatcgtgctctgcggcctcacgcacctcatcactgtgttcacctacgagccgcactccttccacctcgtactcgcccttaccgtcgccaagttcctgacggcactggtctccttcgcgacggccatcaccctgctgacgctgataccacagctcctgagggtgaaggtcagggaaaacttcctgatgaacaaggcgcgtgagctggaccgggaggtggggaggatgaaaaggaaagaagaggcgagctggcatgtgcgcatgctcacacaggagatccgcaagtcgctcgacagacataccatcttgtacaccaccatggttgagctctcgaaggcactggaactgcagaattgtgctgtctggatgcctgatgagaccaggagcacgatgatcttaacacatcagctgagggaaagggatataatggacccacagaaacactcgattcctattgatgatccggatgttcaagaaataaaggcaaccaaggatgcaaaagttcttggcccagattcggcgctaggggtttctagccgaagcaagcatgaagcagggcctgtggctgcaataaggatgccgatgttaagggtgtcaaatttcaaaggagggactccggaagtgatgcagacgagctatgctatcttggttctggttttgcctaatgatggttcattagggtggggtcgaagagagttggagattgttgaggtagttgctgaccaagttgcagtcgctctgtcacatgctgcactcctagaggagtctcagctgatgcgagagaagcttgccgagcagcatagggacttgctgcaggcaaaggatgaagccatgagggcaggggacgctaggaattccttccagactgcaatgtacgatggaatgcgaaggccaatgcactcaatccttggtctcgtctcaatgatgcaacaggagagcatgaatccagagcaaaggcttgtgatggatgccattgccaagacaagcagtgttgcatccacactgatgaacgatgtgatgcaaacatcgacaatgaactgtgagcacttgtctttggtcaggaggccgttcaaccttcattccttcattaaagaagttgttggagtggtcagatgtctaactggttgcaagggtgtggagtttgagtttcaagtggagaattctttgccagaaaggatcattggtgatgagaagagagtcttccatattgtcctgcacatggtaggcactctaacagaccgatgtaatgctggctgtatctcattatatgtaaatgtccataatgaggttgaagataggcataatcatgactggatgctgcgaagagcaaacttctctgggggctatgtatgtgtgaaatttgagattaggattagaaaatcaaagggctatctgttgagttcatcaagcagtcagataagtcagggatccaaacccaacaattctgagatggggcttagcttcaatatgtgcaagaagattgtgcagatgatgaatggcaatatttggtcagtatcagattctaaaagcatcggagaaactatcatgctagtcctccagttccagttggaacctgtgactccggtctctggagcgtcctcagatttgtacagatcatccgcaattcccaactttaatgggctcagagtcctccttgcggacagcgactgcaccaaccgagctgtaactcacaggctcctagagaagcttggttgccgagtcctttcggtcgcttctggcgtccaatgcatcagctccttcgctgcggagtcgtccttccagctggtggttcttgatcttgacatgcagacgatggatggattcgaagtagcccgcgcgatcaggaagttcagtagcaatagttggctgccgttgattattgccctagcagcaagaatcgacgacaacatccgggatcgttgccagaggtcaggagtaaatggcctgatccagaaaccggtcacattagccgcgctgggagatgaactgtatagagtccttcagaacaattaaaagagcctgacggttctcatttctttcaatctcaatagattgctatagcttgatcggtaactaatttctgccaggttagctccatacaatcacaaaaaaaaacattttgaggcaaaagggaaatgtataggaagctgaaagcatcgctttctgcttggttcctcggtgaaggaggaggaggacgactacgacaggaaggtacaaaaaacttggagagatcatactgttagaacttagacccattcatctgtaaaccctcagataagcaaagaattagattcatgcactaacactaaccacgatataattagtttggacgaaaaaaaaaaaaaaaaaaaaaacatcgacgatccatagatgggttcagtgaatgctggcatagtagatgcctaaagggggcaaggaacttttgttatcggttagacatgctgaaaagcaggccggatgagattgcggacaggaaggcagctgatacggccgatgctgaccttgtatcttgttgaagattaaatactatggtagtagtacttgcagtct

SEQ ID NO: 34725 - DNA, 274 bp, Zea mays
  Clone ID: MRT4577_131673C.1
ttgggtacctcgaggccggccgggattattcccagcgggcgcgctcgctctctctttctccctcccctcctcgtggcgacgattgggggcagtcgctgccgccgtacgccaggtgcccagatcttcttcatgcccttctccagcgacgagtatcagaaggtacgcccatcgcttggtcttctcttcctgctgtgcgaaaacgagcacgcaaaccctaatttgctactatttatattcggatctgatctattacgagtatacatgcatgtatcat

SEQ ID NO: 34726 - DNA, 3331 bp, Zea mays
  Clone ID: MRT4577_131674C.1
gtagaagatcgcctactcttcctactcagctccgctggtccggtcgtcgcgtagcgccctcacccccaagccacccccaccacgaaggccgcgcgctccccgccttccgacgtcgctctctccgcccagctcaagcgcccagcggtgagggaagggaaggaaaaacagacctttttttttcttctcctcggcggcctcgtgactatggatccgccgggctccggtctcccgccggtgccgaggtttcctggctcgatccgtgaccggcccacgtggagacggtgctggtgctagtaccggtgcctccaccgtgtttcttggcgaccttactacctccttctctcctcctctggaagattgctgctgcagcctgcaggaaagatggccgaacgccgaaggtgggcagcgagcgtcggcgcgtgcagtgtggaatcgacgccgagcgcctccagtcggtgcaggaatgcgcaaatgcacgtctgaatgaagcctggttggtggtagagccgatggtggtgggaacggcgccgtggcggggtctccgtctcctccgtgtggatcctcctgctcctttcctccctgctcctctcgccgtcggcggcgtccgtcgatttcggccactgcggcggctgcgacgacgccgacgacggcgccctctcgagcacctacaacatcctgcaatgccagaaggtcagcgacttcctcatcgccgcggcctacttctccatcccgctcgagctgctctacttcgccacctggctccgaccttttccccctcaaatggatcgtgctgcagttcggcgccttcatcgtgctctgcggcctcacgcacctcatcactgtgttcacctacgagccgcactccttccacctcgtactcgcccttaccgtcgccaagttcctgacggcactggtctccttcgcgacggccatcaccctgctgacgctgataccacagctcctgagggtgaaggtcagggaaaacttcctgatgaacaaggcgcgtgagctggaccgggaggtggggaggatgaaaaggaaagaagaggcgagctggcatgtgcgcatgctcacacaggagatccgcaagtcgctcgacagacataccatcttgtacaccaccatggttgagctctcgaaggcactggaactgcagaattgtgctgtctggatgcctgatgagaccaggagcacgatgatcttaacacatcagctgagggaaagggatataatggacccacagaaacactcgattcctattgatgatccggatgttcaagaaataaaggcaaccaaggatgcaaaagttcttggcccagattcggcgctaggggtttctagccgaagcaagcatgaagcagggcctgtggctgcaataaggatgccgatgttaagggtgtcaaatttcaaaggagggactccggaagtgatgcagacgagctatgctatcttggttctggttttgcctaatgatggttcattagggtggggtcgaagagagttggagattgttgaggtagttgctgaccaagttgcagtcgctctgtcacatgctgcactcctagaggagtctcagctgatgcgagagaagcttgccgagcagcatagggacttgctgcaggcaaaggatgaagccatgagggcaggggacgctaggaattccttccagactgcaatgtacgatggaatgcgaaggccaatgcactcaatccttggtctcgtctcaatgatgcaacaggagagcatgaatccagagcaaaggcttgtgatggatgccattgccaagacaagcagtgttgcatccacactgatgaacgatgtgatgcaaacatcgacaatgaactgtgagcacttgtctttggtcaggaggccgttcaaccttcattccttcattaaagaagttgttggagtggtcagatgtctaactggttgcaagggtgtggagtttgagtttcaagtggagaattctttgccagaaaggatcattggtgatgagaagagagtcttccatattgtcctgcacatggtaggcactctaacagaccgatgtaatgctggctgtatctcattatatgtaaatgtccataatgaggttgaagataggcataatcatgactggatgctgcgaagagcaaacttctctgggggctatgtatgtgtgaaatttgagattaggattagaaaatcaaagggctatctgttgagttcatcaagcagtcagataagtcagggatccaaacccaacaattctgagatggggcttagcttcaatatgtgcaagaagattgtgcaggtaaatcaaaataatagaatatcttaagcatttatacccgcaaatttttttgtacagctaggcactagcagcttagacttggccgtcacatagatagtttgctatacaccaattgaactgccaaactacagaatgtgtttagtggctatagtgtggcctttttgtgcaagtgcttggaatatttattatctcacctcaaactgggcatactgagaggacatattggtccttatgttgaacttacgttttagtcataactatttttatggtatttcttccgtagtatgtgtgacttgcatagatatatttaattggtatgcttgtagtagcccgaacctcagcgactctatttgattgttatgttttggtttgcaatttgttcatccagttgtggaagtggccaatgtatacttgatttgatgtgcaatcattagtgtgcttactgatacgagccctcctttgtgctgcagatgatgaatggcaatatttggtcagtatcagattctaaaagcatcggagaaactatcatgctagtcctccagttccagttggaacctgtgactccggtctctggagcgtcctcagatttgtacagatcatccgcaattcccaactttaatgggctcagagtcctccttgcggacagcgactgcaccaaccgagctgtaactcacaggctcctagagaagcttggttgccgagtcctttcggtcgcttctggcgtccaatgcatcagctccttcgctgcggagtcgtccttccagctggtggttcttgatcttgacatgcagacgatggatggattcgaagtagcccgcgcgatcaggaagttcagtagcaatagttggctgccgttgattattgccctagcagcaagaatcgacgacaacatccgggatcgttgccagaggtcaggagtaaatggcctgatccagaaaccggtcacattagccgcgctgggagatgaactgtatagagtccttcagaacaattaaaagagcctgacggttctcatttctttcaaaaaaaaaaaaaaaa

SEQ ID NO: 34727 - DNA, 186 bp, Zea mays
  Clone ID: MRT4577_131675C.1
gtacgacaccgatagtattaggcgacgccgggtgagaaagcctagcgccgagtccgttagatctccggggcccttgcacgcgcccgatcacgccaccagatgcgtggtcagcgttgccgccgatcgacacccccgacgacgggcgaccgtagcgacgtggaggacaagatcgacccgatgcggggc

SEQ ID NO: 34728 - DNA, 619 bp, Zea mays
  Clone ID: MRT4577_131676C.1
ggctgaatatggacagcaagctgagaagattgttccttcctgctgcactgtaaaagaaaagtacaaaaaaaatgaaaaatataaaaatctaaaacaagagattctgggggagtttggcatcagattatggctatcattctggtgactggatttggtcctcttggccatatgcgagtaggctgacagcctgagcaattttctatggactccagcaatctgaaagaggattcacattcaaaataatcagagcttggatgtattggatggaagatgcttttcaagtagaacaagatgtgcagattttggaccaggtatttagtgacaatccgggcgtcatcgatgtaagcctcaactgtatagaagtaacctatctatctgtacccttgtgtgaatcaatctccttcccaacaaaaaggggggaaaaggcagcacaaaaaaatatgttctcttttgttttttcctctccatgaactgttttatttattgtactaatatagctgattattcagttggaccattcatttttttgtccaacagttaaccataccttttttcctggggggccaccaatagattgaccgtgctacctgacttgcatttccaccatttcatgttttaa

SEQ ID NO: 34729 - DNA, 440 bp, Zea mays
  Clone ID: MRT4577_131677C.1
gaacctttgggctgatttatgtgcttgggcgtcttcacatagtgacgcagccccatacttaactattacgccaccatgaggggccggggaaaattcacctaaaatctacccatttcccaccccaaaactaaagtatattctataccattccccgtattaccgggagccacgaagtaccggttcgctcaaccctacgtgaaagggttcatagtcgagccggtcatgcggcacgagcagtatcttccaggcttcgaacccagtctcgtacgggagtaaacccgagcacgacttcaaaatacttgtctgctcgctttatgttaaagtataagctcaacgtctggtttcgactgcggacggctagtgacgtacgggcctgcggtggccctcagatccgtgcgatgctcctccagcataacgcctaaggtacgctcgatcccccc

SEQ ID NO: 34730 - DNA, 351 bp, Zea mays
  Clone ID: MRT4577_131678C.1
ggccgacccacgagtccacggtcgcgtgggctgccactgcagcgtgctcctgtccgcgattctctacacctgtcaccgtctgtcgatccatggcgaagggaacggcacaggcatcttcgctacccacccaccaacttaccctcatgggtgtcctatccgtttccgttctcctcccgctgctcttgccgtcggcagctactgtagctgtagcgtctcctgcggggggctggaagcagttggcggtcggaaaggacgagggaagactggtcccggatggggatgctggtgaacgcgggttagtggtcgagaatgagttcgcgggtggcttcggcgccctcaacagcatgctgc

SEQ ID NO: 34731 - DNA, 346 bp, Zea mays
  Clone ID: MRT4577_131679C.1
ccggccgggaaatcatcgtaccattatggatggttcgtggatgtcggcgtgcagcctctcctgctgtcgctgctggtctactgtgttatgcatcgccgccgatgtcgtcaacgtcggccacgccaagcccctgacgcctgcctggggcgtggtacaccactaccacggcaagttgacgttggggacgtggaaacccgcccacatgaccttctacgaacagcacttggttctaacacacctcgtcgctggtgcgggtacatatgacacgcgcgcgtatagctatggagtgcagacggtgaacgtgagcacggtgctgtatcaccgactgcttggactgcggcggatg

SEQ ID NO: 34732 - DNA, 1135 bp, Zea mays
  unsure (1)..(1135): unsure at all n locations
  Clone ID: MRT4577_13167C.1
acgtactcttgcaatagcaaagggtttttaacaataaatctgtggccatcggcagatagctgctagccaccatcatcaacgacgactgctgtctgtgagcttgaactctagctgtagtacctaccatcttgagttgatatgctacattactctcactctcaccgctgcatgcaaaccaccactttaatactccatctactcatcttggtctcgcgttacgatttattgaccgacgctttcctgctattgacagtttgaagcacgccttccacatggcgctgcctctgcgccgccgctacaatttccttacgccgaaccgcctgtctctgctctggaacgagaccagcgcttggaggtaatcggcctctccgaagtcgggccacagcgtgtccgtgaagaagagctccgcgtacgccgactgccacagcaggaagttgctcagccgcagttcgccgctggttctgatgaccaggtcgggataagggagctcgttgccgttggcgttgctgtggctcgtctcgagctcaccggcgaacagcgactcgtcgatgtcctccggctcgagcaggttgtcgcttttcttctgggccacggctccggcacgcctgcactatgtccctccgcccgctgtagctgattgccagtgctagatcgagctgcgagttgttccgcgtggcctcctcggcttatctcgcggtcctctgaagagaaaccggcagccttgaggagtcgccgattacgcgtagccgaattccttctctcaaaaattcagataggctttcgcggacctctcgctcaaactgccccatcaagaattccacctccaccttgggccggctccagttctcgtgggagaaggcgaaggcggtgagcgtgcggacgccccaggcgcgggagagccgcaccacctcctccagcgcgcggcgcccggcctcgtgcccggctgcggacggcagcccgcgcgcgcgcgcccaccgcgagttcccgtccatcaccacagccacgtgccgcggcagcgactccgcacgcagcccgcccggtaggagcgcagcgtcggccnccggtgccggggtcgcgccggctcgcgggcatggcgataggagcagcgtccggcgggaagggacgagtggctgat

SEQ ID NO: 34733 - DNA, 103 bp, Zea mays
  Clone ID: MRT4577_131680C.1
catggtacccgccctgtatcggagcattaagcgcatctgatgtggtattgacacgcaccctgatccgtacaatttccagcgccctatgtgcctgtcacttcaa

SEQ ID NO: 34734 - DNA, 178 bp, Zea mays
  Clone ID: MRT4577_131681C.1
gacagattagctatatagattatcagctgctgccttgcgggggtactctggggaaatggcgatactgcagacgtcaagtataagagacgaaacttctagagtcagggttgccgatagaatactggcaagagtgacaacttagattatggacctaaacttcaaggagcttgacaaaggc

SEQ ID NO: 34735 - DNA, 456 bp, Zea mays
  Clone ID: MRT4577_131682C.1
acaagctttttttttttttttttttttttttttttcttttttttttttttttttttttttttttttttttttttttacccgcccgggcgggcgcccgggcagggacccctcaaaaacgggggcttcgggatgggaaaacccaatccttcaaccctacaggaaccaacagggaatcgcagcggggatcttacctttatcacccttggtcccccaacaatcatcagccctattacaacaggtacctttggggcatttattggcacaaaacattaggggacaacaaccacaaaaacttgggctagcaaaacccggtgcctactctcaaaaacagaagtttcttccattcaaacaaatagggtcattgaactctggttcttatttgcaacaacaacaactaccattcagccagctacctggtggctacccccagcaattttttccattcaacccactggg

SEQ ID NO: 34736 - DNA, 133 bp, Zea mays
  Clone ID: MRT4577_131683C.1
cagccggctctcgcgcgggcgctcttgccttctctataagtccactggagggctggcccccatcggcgcgatacgatccgccgacattcggcagcatccgacgcggacacgatacttccgccccattccggct

SEQ ID NO: 34737 - DNA, 516 bp, Zea mays
  Clone ID: MRT4577_131684C.1
tcggggcgcttgcgcggttgcgcccttgcccttctctctctctctctccaagaacaatactcccatcccatgcctacagctacaggtcgagcagtggccaggggcccggaagagcacgggccaactagagaagtagagattggcattacacacataaagtatatatatattggcacgctgcccgctcctccgcatctgtgcaaggccgcaagggcaatcacgctattctccgcgggaatgggtttgccgcggacccatataggctcagcgggagaaggtgagctgacgggcagagcggccgccacacgccgaccgtcgccgaccagtcgtccaccggcaatcaccgagggcgtcgcgcccgccggccattcattcatagtctctcggtctctcttcctgctactttcttggcctggcgatacttgtggccgagatgaccccggtcagaacttcttctgcctcgcgttttggggtcgtggggttcttgcttccgcggctccgcctggcttctgcctc

SEQ ID NO: 34738 - DNA, 393 bp, Zea mays
  Clone ID: MRT4577_131685C.1
aaaaaaaaaaaccctgggctaactttgggagggttaggaaaacaacaaaggcagggggcaggaacgattcaaaactcggatacaggggtttacttggataaaaaaaaaaaacaaccccaaaattgttttgaatattacagggggcgggggtccctacccaaccaaactttgggacatgaccctaccctaaaaactacctcccctaccaagtcaagcccaactaggggggtatggctggaaaagggttaacaatttttgaaaccaaaacccaggtccccggttttttttcggggggcccccatttgtccagagccaaaaccctccaaacccgggaaaattggccggaaaatagtccttccggggtcaatcgaacccccccctgggggcgggggg

SEQ ID NO: 34739 - DNA, 769 bp, Zea mays
  unsure (1)..(769): unsure at all n locations
  Clone ID: MRT4577_131686C.1
gggaggacggnagttcgctgccaagctgcggctgctgctgtggaggaggtcgatgaacagaagattgcggaagctatcaagnaggaggtggaggagcagccaaggcaggtgaaactcgtgtttggggaggacataaggtgggctcaggtgccggcgagctgcagcatggcacagctgcgcgaggccgtccggagcaagtttcctggactgaaggctgttcttgtcaagtacaaggacaaggagggtgatcttgtgacaatcaccaaccaggatgagctgaaatgggctgaggagttggctgaggctgggagctcacttcggctgtatgttaccgaggctgatccggaacatgaaccttatgttgacgacaccaatatggagagaaatgtaaacagcaattcggataatcggactattaggcgcaatcgtggggatgaggacaggagcactgtgacctgtattgatgattggattgtgcaattcgcccggcttttcaagaaccatgttgggattagctctgatgagtacctggacctccatgaggtcagtatgaagctctacactgaggcaatcgaggacactattactactgaggaagcccaggaggtgtttcatcttgctgagggaaactttcaggagatggcagcacttgcatttttccactggggtaatgttcacatgtcccgggccaggaagagattgttgctatcaggagattccccaagtgaattggtgcttgagcaggtgaaggaagcatatgaatgggcaa

SEQ ID NO: 34740 - DNA, 803 bp, Zea mays
  unsure (1)..(803): unsure at all n locations
  Clone ID: MRT4577_131687C.1
cttctatctcgtgcctccgccggaagtctcctacttctgcttccacctctccaagctcgagggcgacgacgacgacttcgacttccagccactgtttctcttttcagctaagggtttcgtcctctttcgtttgctcttcatcaatcgaagcgacagaagcaatctcgtcgagtacttcatgtacaaggcagggggcggcaaaccgtcgctcgaacctatcccgtcaactcctctaggtagcagttgcgattcgatatgcttgagcatcgttccctgccccgatgacgaggacaactatgtccttgccgatctctctgtgggtagggaccttgggcactacgacctccacgtttactcgtctaagacgcaccagtggagcaccaagccgttgcagctgccggaatctcctgccgtcaggacaaatgacgacctgccttgtcaattcaataaggtgctcgtgcttggagcaaatgagtttggctgggtagacctctggcgtggcattgtcacctgcaaggtgcttgataatgacccagttctccgactcatccctctccccaaacctgaaatcaacaatccccatgtaattggaggagatgtggagtttatccgggatgtcacctaccgcaatgggatcttcaagttcattgagattgataatttttgcataccagctattgctcgtgatgagacttctaatatcatttccaagacgatgcagcattttgacagcaacgatatcatacatgattcagagctcatctatcctgttttanagcagcgggacctatattgtccctgga

SEQ ID NO: 34741 - DNA, 551 bp, Zea mays
  Clone ID: MRT4577_131688C.1
agccctaatatacccgaaatatttgatatgaaagccctgcccaaacaggaaggggcaagggatttaaaaactccgtttttttaacccaaatgggggaaacaaaaaagccctggtagttcaaatttagatcccaaaacccaaaggggaataggggctgaaaactagggggggagcacaacggcccccccgggggccttgattttttttttggggaccttggaaaagaacttggccttgacaacaatgggcttggggggaaacccccccttcccgagccccttgaagtaccccaactgggggacgtcaatctggggggccttggcccccccggtttcccccccctttttggggggccccattaaccaaaggcgcttgatgttgaccggggggcaaaaaaacttgttggggagcttggggaaataacccatgccccccttaccgaagtacccgggatggtacttgtcaaaaaggatgcggggggggggcatgccaccggggttaccgcaacctccgggatgctttctgtgcttgccaatgcggccggccccggg

SEQ ID NO: 34742 - DNA, 2646 bp, Zea mays
  Clone ID: MRT4577_131689C.1
aaagagaccatggcggcggcgcgagagtcactgccctgccctctcctcctcctgtcctgctgctctaccccccgcgccgctgccgcaaccaaaaccctaaaagtcactttctatccacttgctccgccgcctccaccaccgggcgccatggcggacacagtgcagtaccgcctggagcggatgaccgacgaactggacgacctggagcgccggggcctcttcacgcgcggcgagctagctgacgtcgtccgcaaacgccgcgacttcgagtaccgcctccgccgccactccccgctccgccaggactttctcgactacatcgcctacgagctctgcctcgactctctccgcaacctccgcaagcgcgccatcatacgcgccgccgccgaagacgacgaggaggagcctcagcacgacgctcgcagcagcgacgacgagggaggccggaggaagaggaaggataaatccaagaagaagtggaagaagtccgtctcccgacgtcgcgggcgtcctccgcgtcctcgacatctaccggatggccaccgtcaggttcaagggcgacctcgacctctggttccggtacctcgagttctgccgcgacaagcgacacggcaggatgaagcaggttctggcacaagctattcgcttccatcccaaggttcctgggctttggatctatgcagcagcatgggaattcgatcagaacctgaacgttgccgcggcacgtgcactgatgcagagcggtctcaggtcttgccctcagtcagaggatatgtggatcgagtatcttcgcatggagcttacctaccttaacaagctcaaggctcgaaaggttgctcttggagaggatgtcaagacgctgcaaaagaaagacaacgatgcgagccagtggaaagaggaaaacaaggaactgttcatgccactgaatgaacaggtcaaagatcctaaggagccaggctcggctggagatgccctggaggagaaggaagacctgttttggcgtcaagggttgttaatcattcagaccatatatcatggtgccgtggaagctcttccgtcaagcttaaccttgcggaagaaattcttggagatactaaacagtgttgacttggcacattctgatgagttaaaactggaggtcctggatgaccttaagagagatttctctcatagcgaggactactgggattggtttgctaggcttcagcttagcaacttgaacagttccagtaattcgaatagaaaggatgctatatcaaacaagttgaacagatcaattcaggtgtatgacgaagctatcaggaagctaccaaattccaaaatgtactcattgtatgcaaagttttggatggatgttatatatactgacagagaagattcagtcacattattccaggattctgaatttgatgcttcagagttcacttcatccatactgaaagtttatgaaaatgcagaatcatgtggatgtcttactgaggatcttgcttgccaatacatatcactttacttgaaactagaaagactggaggaagctaagactctcgcagaaaagctttgtgatggtcctctttcaaatgctgcaaatttgtggagcctgagatttactatggagataaattcaattgcaactgctcctggcagttcttccttgagcaaggagaacctgagctctctgcttgatctatttagcactgtactctccaagttgtctgtaactgaggctgagagactgtggcatatggccatgaagttgttttcccatgataaggtctgtttcgagaagctggtgaagtgtgcgatgctatcattaagtctggcaggtggcagtgattcaggagcatcagtttcttctgctatcgttggatggtatttgcaaagagatggtgtgaagcatgctaggaagatgtataagagattgcttgctttacctcgaccaagcctcaagttcatgcaatactgcatagcgctggaggcgaaccttgcatcgctcggagacaacggcgccctcaaagatgctcggcggctatatgattcagcgctcgacctgtatccccaggaaagagaagtgtggcggagctactacgacctggagctgaagatgggaacatcggagtctgccaacgccgtgtactcgcgcgctcgtaaggtgctgggtgactccactgccttgactgctccccggggctaggtcgcagcatgcaatgtattccaagatgcaatgtgatttttttttgtttggatctgtgttttccaatcctctctgtgagtctgggtcagcaagcaattaagctgatgcatcgaaattttggctctaaatgggagtggtaagctgctggggaacactgtatatcttgttcaaaaaacaagagtactgcagctgctggtggctgtctcctttcagaacacttgcctgtgtcccttttctttctttttcttttttgtttgagcagtagctgggctgttggtgatgctgttccttagtgttgagttgctatggtgtaacagtgtcaattgcgacttgaacaaattctgggatctcgaaccatttgttgagattttgaaagtgtactggtggtcataatttttgttgggacctcaaaccaacaaaaaaaaaaagtagggcggccgccgacaaaacagctc

SEQ ID NO: 34743 - DNA, 522 bp, Zea mays
  Clone ID: MRT4577_13168C.1
gccggagggtgtacaaagcttttttttttttttttttttttttttttttttcttttttttttttttttttttttttaaacacaaacatcccctaaccacaaaaaaaatgcaccggcccgggcggagggcaaaggcaaacacaagcacacgggggggggggggaaccgaacccgaccccaaacccaacctaggcaaaaccaaggccaaagccggtgccaaagggaaatcggtacccaatcacaaacacaaaaaaaacacgaaccgaaaacaaaaaagccaaagccggcgaagccaaaagagaaaccaaactaacaggaatgggctaacgcccactgccccattccaaaaacggaaaccgccagcgccattaaaaaaaaggaaaaccccaacgcacagggagaggcggtatgggaaacgggcccccttccccttccacggacacgaaccccctgggctcgggcgtgcggctgggggaagcggttcaatcaaacgcaaagggggggatacccgcatccacagggg

SEQ ID NO: 34744 - DNA, 1254 bp, Zea mays
  Clone ID: MRT4577_131690C.1
atggcgcccccgtccctgccccgcctcggccccgccgccgcgcccggccccggccatggcgcccgccccgagaacgatctggttgaagagcccgaagaactcgcaggagaagcccctgagcagcagtcggtggcaatgagattgatggttctggttatgactatagtgctggttgtcagcattgcaaccactgctcaggagaagatgaagccgtggaaggagacttccaggagttccaagattacgatgagttctaggcatgggttagcggcaacccccagtcggctgccagtgaaggccgcgtttatctatgtttcgttttcgcactttgatttactatggctcgtcttagacacactgcacgaaagtccatcatccccttcttacccttccgccttgctgagcgtccgcttcgccgtcccgtggccggagatagagtccgtgaggagctgctcccctgtgcttcccctggaggcgccccctgcaccaccactgggcgccccagcctatggagtagctgatggaggagacccagacgacggaggtggcgacgacagctcgagccacgacaccgacttctctgctgaccaagagccggaaggatgggttgctcgacccatcactcgcgacgctgctcgcgggtgtcacttccatgatgcgctcgacaccctgctacgtcgggcacttaaccagcgtacttggtccatcgagtattgctgtgtggtctaccagcatagtcgcggagtttacccggaccgctgggaggcgacctgcttggtgcgccgtccggagaacagtctccagggtgctgaggtctgctcagagcactattccatctctgagcgggactcagccgaggcggccatgcaagatgctgcacagcgtgcgctttcgcactactgctcggttctcggtggggtagctgacggtctcaacctgaagtattacccccaccgtccatctggcagcacaggaggcgtgattgtctcacctgttggtgaggacaatcctaggttgagcagcacagtcaacctagccgtcgtgctaaacacggagctagaccatgcactgaacgagctgagtagggctcgtgctgagattgccctgctgcgggctgagcgcgcggaacgtcgtcacctagatgatggttcccccgctcccgttgggactcagcacctgtaccgctcacctcggcgtggacgccagtcttatggcaatcccgactgcaagaccaagataaatctagaaccatag

SEQ ID NO: 34745 - DNA, 248 bp, Zea mays
  Clone ID: MRT4577_131691C.1
ccgggttctacccacgcgttttattagttgttgcatgttgttgcaacagttggtcgatgttgttgtaatactatgtctatggtgtttcagttgctccatctaatggttcaacctatgctgttgtattagttgttacatgttgttgcaacagccgttctttgttgttgtaatactatatttatggtgtttcggttgctccatctaatgcttcaacctatgttgttgtattagttgttacatgttgttgc

SEQ ID NO: 34746 - DNA, 1089 bp, Zea mays
  Clone ID: MRT4577_131692C.1
atgaagctgtggaaggagacttccaggagttccaagactacgacgagttctaggtgtgggttagcggcaaccccccagtcggctgcctgtgaaggccgcgttatctacgtttcttttctgcactttgatttattatggctcgacttagacacactgcacgaaagtcagtcatccccttcttaccctcccgccttgctgagcgtccgcttcgccgtcccgtggctggacagtccagccacttggagagactacaccaccgcctgcgagatagagtctgtgaggagctgctcccctgtgcttcctctggagccgccccctgcaccaccactgggcgccccagcttctggagtagctgctggaggagacccagacgacggagatggcgacgacagctcgagccacgacaccgacttctctgctaaccctgagccggaaggatgggttgctcgacccatcactcgcgacgctgctcgcgggtgtcacttccacgatgcgctcgacaccctgctacgtcgggcatttgaccggcatacttggtccgtcgagtatcgctgtgtggtctaccagcatagtcgcggggtctacccggaccgctgggaggcgacttgcttggtgcgctgcccggagaacagtctccagggtgcagaggcctgttcagagcactattctatctctgagcgggactcagctgaggcagccatgcaagatgctgcacggcgtgcgctttcgcactactgctcggttttcggtggggcagctgatggtcttgacctgaagtattacccccgccgtccatctggcagcacaggaggcgtgattgtctcacctgtcggtgagggcaatcctaggttgagcagcacagtcaacctagccgccgtgctaaacacggagctggaccaagcattagacgagctgagtagggctcgtgctgagatcgccctgctgcgggctgagtgcgcggaacgtcgtcacttggatggtggttcccccgctcccgttgggactcaacacctgtaccgctcacctcagcgtggacaccagtcttatggcaaccccgactgcaagaccaagataactctagaaccatag

SEQ ID NO: 34747 - DNA, 864 bp, Zea mays
  Clone ID: MRT4577_131693C.1
atgagattgatggttctggttatgattatggtattggtaaggggtattctttccgtttggaaaggatacattgggttaataacttgggttaatgttaaaacctggctttctactacttctggagtagctgctggaggagacccagacgacggaggtggcgacgacagctcgagccacgacaccgacttctctgctaaccctgagccggaaggatgggttgctcgacccatcactcgcgacgctgctcgcgggtgtcacttccacgatgcgctcgacaccctgctacgtcgggcatttgaccgacatacttggtccgtcgagtatcgctgtgtggtctaccagcacagtcgcggggtctacccggatcgctgggaggcaacttgcttggtgcgctgcccggagaacagtctccagggagcggaggcttgctcagagcactattctatctctgagcgggactcagctgaggcagccatgcaagatgctgcacggcgtgcgctttcgcactactgctcggttttcggtggggcagctgacggtcttgacctgaagtattacccccgccgttcatctggcagcacaggaggcgtgattgtctcacctgtcggtgagggcaatcctaggttgagcagcacagtcaacctagccgccgtgctaaacacggagctgtaccatgcactagacgagctgagtagggctcgtgctgagatcgccctgctgcgggctgagcgcgcggaacgtcgtcacctggacggtggttcccccgctcccgttgggactcagcacccgtaccgctcacctcagcgtggacaccagtcttatggcaatcccgcctgcaagaccaagataaacctagaaccatag

SEQ ID NO: 34748 - DNA, 126 bp, Zea mays
  Clone ID: MRT4577_131694C.1
agatcaatatgatggatgggaagagcatgctcaggtgcttgacaatgacaaaaccgcttggggaggttgctgctctgaaaactcctcatggcccgcatctttatagtaataatcttgtgcgccata

SEQ ID NO: 34749 - DNA, 975 bp, Zea mays
  Clone ID: MRT4577_131695C.1
atggctcgacttagacacactgcacgtaagtccgtcatccccttcttaccctcccgccttgctgagcgtccgcttcgccgtcctgtggccggacagtccagccacttggagagactgcaccaccgcctgcatgaggagcaggaacgtcgacgacaggagcaggagcagcaggactcttctttctcgctccagcaggagatagagtctgtgaggagctgctcccctgtgcttcccctggaggcgccccctgcaccaccacagggcgccccagcccctggagtagctgctggaggagacccagacgacagaggtggcgacgacagctcgagccacgacaccgacttctctgctaaccatgagctggaaggatggtttgctcgatccatcactcgcgacgctgctcgcgggtgtcacttccacgatgcgctcgataccctgctacgtcgggcacttaaccggcatacttggtccatcgagtatcgctgtgtggtctaccagcactgtcgcgggatctacccggaccgctgggaggcaacctgcttggtgcgccgtccggagaacagtctccagggtgcagaggcctgctcagagcactattctatctctgagcgggactcagctgaggcagccatgcaagatgctgcacggcgtgcgctttcgcactactgctcggttttcggtggggtagctgacggaggcgtgattgtctcacctgtcggtgagggcaatcctaggttgagcagcacagtcaacctagccgccgtgctaaacacggagctggaccatgcactggacgagctgagtagggctcgtgctgagatcgcccggctgcgggctgagcgcgcggaacgtcgtcacctggaggatggttcccccgctcccgtcgggactcagcatctgtaccgctcacctcagcgtggacaccagtcttatggcaaccccgactgcaagaccaagataactctagaaccatag

SEQ ID NO: 34750 - DNA, 1355 bp, Zea mays
  unsure (1)..(1355): unsure at all n locations
  Clone ID: MRT4577_131696C.1
gcgtaacgactccgaagggcgattggatacaaaagagccggccggggcgcgccgcgccccagtccgctctccgctgaccgggtgggacgaggagtccgtcctcctcgccgcgatggtcgtcgaggacaccccagtctgcgagtcccgtcgcaagaggcgggcctccacctcctccgtcggcggcagcgccggatccagcaccaggaagaggaggccgcgtaggcagtctccggccaagatcctgccagtggttttcgcgatcgacgacgaaaagtcggacactgcggcagatggcaaatcggaagtgaaggccggcaaggaggaagagaagcctgtccttgtgggcgacaaggaggcgtccgattctggcgagaaggcagtggccgcggcaaacatgtcgtgcatggatcggctccgggaggagctctcttgcgcagaataggatctctgctcacgctatgaagctatcacggaagaaaaatcgccgaaccaaacagcacctaatggcaacctgttctattacacatattgatgtttcctgctcacaatttcgggattggcatgccgactggacaaatcttcgtctcagctatggttgttcgtgttgcaaccactgctcaggtgaagatgaagccatggaaggagacttccaggaattccaagattacgacgagttctaggcgtgggttagcggcaacccccagtcggctgcctatgaaggccacgtgtatctacgtttcttttccgtgaataactgatcctggcacgtacatggttcgcattcggtttgccttctaaaaaccgggtgtgacataagtggtatcaaagccgtgctgactgtaggaccgctaacctagagtagaatggtcgttctaaggattatagacctctgtctctgccttgactttggtatcccttcaaaagttggtcctactgaccaaacctatgttctactacatattataccttgctgaaaattatgttttatcctgatccttcatttacttatgattcattatttgctggtcatattaattctgttctcacccttttgcttgcgatgtcttttgtagatggctcgacttagacacactgcacgaaagtcagtcatccccttcttaccctcccgccttgctgagcgtccgcttcgccatcccgtggccggacagtccagccacttggagagactacaccaccgcctgcgtgaggagcaggagcgtcgacgacaggagcagcagagctcttccttctcgctccaccaggagatagagtctgtgaggagctgctctcctgtgcttcccctggaggcgccccctgcaccaccactgngcgtcccagcttctggagtagctgct

SEQ ID NO: 34751 - DNA, 981 bp, Zea mays
  Clone ID: MRT4577_131697C.1
cccagacgacggaggtggcgacaacagctcaagccacgacaccgacttttctgctgaccaggagccggaaggatgggttgctcgacccatcactcgcgacgctgctcgcgggtgtcacttccacgatgcgctcgacaccctgctacgtcgggcacttgaccggcatacttggtctatcgagtatcgctgtgtggtcttccagcatagtcgcggggtctacccggaccgctgggaggcgacctgcttggtgcgtcgtccggagaacagtctctagggtgctgaggtctgctcagagcactattccatctctaagcgggactcagctgaggcagccatgcaagatgccgcacggcgtgcgctttcgcactactgtttagtgctcggtggggtagctgatggtctcaacatgaagtactacccccgccgtccatctggcagcacaggaggcgtgattgtctcacctgtcggtgaggacaatcctaggttgagcagcacagtcaacctagccgccatgctaaacacggagctggaccatgcattagacgagctgagtagggctcgtgctgagatcgcccagctgcgggctgagcgcgcggagcgtcgtcacctggatgatggttcccccgctcccataaggactcagcacccgtaccgctcacctcggcgtggacaccagtcttatggcaacaccgactgcaagaccaagataaatttagaaccatagatcgttagagccggatcttgtaattaatacaaaatatatacatagaagctacaatcttagcattagtctcgcttttagttagtcttagttagacagggtagtttgctatatcctgtgcatttatgtttgtcatgatgaattatgtttgatttggatcattgtaatgactgtcaccaggatgtgggtatcccctgcattttggtttacctgttatatgttaatggagttagctatttagttgggaagccttttattcc

SEQ ID NO: 34752 - DNA, 1041 bp, Zea mays
  Clone ID: MRT4577_131698C.1
atggttttggttatgattatggtgctgatggctcgacttagacacactgcacgaaagtccgtcatccccttcttaccctcccgccttgctgagcgtccgcttcgccgtcccgtggccggacagtccagccacttggagagactgcaccaccgcctgcatgaggagcaggaacgtcgacgacaggagcagcagggctcttccttctcgctccaacaggagatagagtctgtgaggagctgctcccctgtgcttcccctggaggcgccccctgcaccaccactgggcgccccagcttctggagtagctgctggaggagacccagacgacggaggtggcgacgacagctcgagccacgacatcgacttctctgctaaccatgagccggaaggatgggttgctcgacccatcactcgcgacgctgctcgcgggtgtcacttccacgatgcgctcgacaccctgctacgtcgggcacttaaccggcgtacctggtccatcgagtattgctgtgtggtctaccagcacagtcgcgggatctacccggaccgctgggaggcaacctgcttggtgcgccgtccggagaacagtctccagggtgcggaggcctgctcagagcactattctatctctgagcgggactcagctgaggcagccatgcaggatgctgcacggcgtgcgctttcgcactactgctcggttctcggtggggtagctgacggtctcgacctgaagtattacccccgccgtccatctggcagcacaggaggtgtgattgtctcacttgttggcgaggacaatcctaggttgagcagcacagtcaacctagccgtcgtgctaaacacggagctggaccatgcactagacgagctgagtagggctcgtgctgagatcgccctgctgcgggctgagcgcgcggaacgtcgtcacctggatgatggttcccccgcccccgttgggactcagcacctgtaccgctcgcctcggcgtggacgccagtcttatggcaatcccgactgcaagaccaagataaatctagaaccatag

SEQ ID NO: 34753 - DNA, 1829 bp, Zea mays
  unsure (1)..(1829): unsure at all n locations
  Clone ID: MRT4577_131699C.1
gcgattgggatcctcgaggccggccgggacctccctcccttgccctggataatcttcaccctgcagcaccggcgtgggcttccttgagtaagccacgactgcaccccatgcacatagttatcccccctgtaaactcaagaatccagtcccttgatattttccctgcctatataaagagcaacagggtgagggaaagaaagcagaagccagtgcagtgatccgtgcctcgatcatcaaccgtagtgagtagcttcagtcagcagtattgctcttccttccccaaatcataccctggacgcgcccaattccatcgatcaaggcactgaatgtgtctggcgaccacacctgcagatcttccactttaccgtggccagaaaacgaagaagagagtgaagtgactgaagagaagacaccaccacctttggattctcaggcagggacttggctctacttcgacatctgcggatccgagcctgactcacctgtgaacgaagaaaacgaagaagagagtaaagtgactgaagagaagacaccaccacctttggaatctcaggcagggacttggctctacttcgacatctgcggatccgagcctgactcacctgtgaacaaagagaacgatccgatcgaagagcccgaggaactcgcaggagaagccctgagcagcagcggtttgggtggaggttgtcagcattgcaaccactgctcanganaagatgaagctgtggaaggagacttccaggagttccaagactacgacgagttctaggtgtgggttagcggcaacccccagtcggctgcctgtgaaggccgcgatggctcgacttagacacactgcacgaaagtcagtcatccccttcttaccctcccgccttgctgagcgtccgcttcgccgtcccgtggccggacagtccagccatttggagagactacaccaccgcctgcgtgaggagcaggaacgtcgacgacaggagcagcagggctcttctttctcgctccaccaggagatagagtctgtgaggagctgctcccctgtgcttcctctggagccgccccctgcaccaccactgggcgccccagcttctggagtagctgctggaggagacccagacgacggagatggcgacgacagctcgagccacgacaccgacttctctgctaaccctgagccggaaggatgggttgctcgacccatcactcgcgacgctgctcgcgggtgtcacttccacgatgcgctcgacaccctgctacgtcgggcatttgaccgacatacttggtctgtcgagtatcgctgtgtggtctaccagcatagtcgcggggtctacctggaccgctgggaggcgacttgcttggtgcgctgcccggaggacagtctccagggtgcagaggcctgctcagagcactattctatttctgagcgggactcagctgaggcagccatgcaagatgctgcacggcgtgcgctttcgcactactgctcggttttcggtggggcagctgatggtcttgacctgaagtataacccccgccgtccatctggcagcacaggaggcgtgattgtctcacctgtcggtgagggcaatcctaggttgagcagcacagtcaacctagccgccgtgctaaacacggagctggaccatgcactagacgagctgagtagggctcgtgctgagatcgccctgttgcgggctgagcgcgcggaacgtcgtcatctggatggtggttcccccgctcccgtcgggactcagcacccgtaccgctcacctcagcgtggacaccagtcttatggcaatcccgcctgcaagaccaagataactctagaatcatag

SEQ ID NO: 34754 - DNA, 1091 bp, Zea mays
  Clone ID: MRT4577_13169C.1
gaacagtaaaggaatactgttcactatttataggcacaggacacagcctgtggggaattacaattatgccccttataagggattacaacagcgactcaaacatttatggactaaaaggtcattctacttttaagttggtttgtaattccgaagcttcacgaagaggatccttcggtcgtctcatgcggacagcttcagccgaagctgcttcttcctacaagaccttcggcgacgaagcatagtcccaacaagacaatttgtcgagcacttggcaggtattatacgaacttcacgcacatcttcatccgacgctcaacaagtttctccataaccggctaggacctttttttacgtatctccccgtcatacaccacatgacgaactctcaacaccggtcgaaagtaatccgagtaacccgccgaaaccaaactcaactcacagccggcgtggtcaactgaaacgacaacgccgggattagagaaacccgcgcgacatgggtaggggtgagctgggctgaatccgagctggagctcgcggcaacagggagcagggcgctggttccagggagtctattggtgttgccaagctgggctaaactcgaggacgcggctgcgcgcagacagcggggaaacgtagccatggaggaaccttgggcacggcgaggaagcaacctagaggctgagccgcaacaggggaggaagctccactggcgagcagggaagacgccgagcagaggagcacggactcaaccgagacacagagacaatcgtagagagaatggacgcagcatgaccagagaaggacctcaaccccggattgaagaaaagggagattgggcgagcagaaaaggcagggcgagctcaaccaggggcttggacgccaagcgccatgggagatctgagcgagctggagagagccgcgtacggggaggaagaagaacacagagagcagggagacgcgcggctggagatatagccggtagtgcagaactatccaagggacagagagggaagcgtacaggagctgctgaccgtggaacagatcaggaagagggaggtcttcggcggctgggcggtcgtctgcccggccgg

SEQ ID NO: 34755 - DNA, 282 bp, Zea mays
  unsure (1)..(282): unsure at all n locations
  Clone ID: MRT4577_1316C.1
agaagaataccggatcagcttnattgggaaatggggaatattggatacaaccaaacaaccctagcggacttgtactttaatattagtaaaggacttcctcggtgaggaggtttgacaaacccccaggcaancttcgggtttttttatcaaagagaggtacccggggagacagacccgtatgaagagaccccaaagattaggcgccaagagactaaaagaaagaacacagggatcgggtgagccctatattttaacggaagcacacaaggtggggcacgccct

SEQ ID NO: 34756 - DNA, 636 bp, Zea mays
  Clone ID: MRT4577_131700C.1
gccggccgggatacaaaaaggcgtttcttttggctctgtgcggctctggcgtcctgcacctgtctctctcgtcggctcgcctcacacctgctctcccatccacttccctccgcgtgctccaccgcctcgccttctctccctctccctcgggagccgctgctgctccgacgatgccaccctcatgcatcgctcggatctctccctcgatccagccggagtagttccctttccctcctccacacgcgaccaccgtcatctcctccttccgcacctgcccctttctaaaaagtctcaaaccctaaacgacggcgactcctcctccccgcggcagcgacctgggccggaggtgccgtccggttcttgtggacgcccccagaatcgtctcgcacccgggggacggcgcaggcggttggatcagcaacatcatcgtgacctcctacatcaagttcgtcgaggccgctggcgcgcgcgtcatcccactcggctacgacgagccaaaggaccgcctcctcgaggtgtgtgtgctgcgagagcgtgcggcaatagtattaagctggaccttgtgccgcactcgactaccatcaagaaggcagagaaggagatcaaggagatgaccaaaaaaacccccgacctttg

SEQ ID NO: 34757 - DNA, 1404 bp, Zea mays
  Clone ID: MRT4577_131701C.1
atggtctccgcctcgcccgaccccagagctctgactcaacctcgactccggaagacggtctccgcctcgcctgaccccagggctcggactcaacctcgacctcggaagacggtctccgcctcgcccgaccccagggctcggactcaacctcgactccggaagacggtctccgcctcgcccgaccctagggctcggactcaacctcgacctcggaggagtcaccacctcgctcgacctcgggctcggaccgaccacgtcacagggggggccatcattaccttacccctagctagctcaggctacggggaacaagaccagcgtcccatctggctcgccccggtaaaacaggtggcaatgagattgatggttctggttatgactatggtgctgatggctcgtcttagacacactccacgaaagtctgtcatccccttcttaccctcctgccttgctgagcgtccgcttcgccgtcccgtggccggtcagtccagccacttggaaaggctgcaccaccgcctgcatgaggagcatgaacgtcgacgacaggagcagcagggctcttctttctcgctccagcaggagatagagtccgtgaggagctgctctcctgtgcttcctctggaggcgccccctgcaccaccactgggcgccccagcctctggagtagctgctggaggagacccagacgacggaggtggcgacgacagctcgagccatgacaccgacttctctgctgaccaggagccggaaggatgggttgctcgacccatcactcgcgacgctgctcgcgggtgtcacttccacgatgcgctcgacaccctgctacgtcgggcacttaaccggcgtacctggtccatcgagtatcgctgtgtggtctaccagcatagtcacggggtctacccggaccgctgggaggcgacctgcttggtgcgtcgtccggagaacagtctccagggtgctgaggtctgctcagagcactattctatctctgagcgggactcagctgaggcggccatgcaagatgctgcacggcgtgcgctttcgcactactgctcggttctcggtggggtagctgacggtctcaacctgaagtactacccccaccgtccatctggcagcacaggaggcgtgattgtttcacctgtcggtgaggacaatcctaggttgagcagcacagtcaacctagccgccgtgctaaacacggagctggaccatgcactagacgagttgagtagggctcgtgctgagatcgccctgctgcgggctgagcgcgcggagcatcgtcacctggaagatggttcccccgctcccgtcgggactcagcacccataccgctctcctcggcgtggacaccagtcttatggcaatcccgactgcaagaccaagataaatgtagaaccatag

SEQ ID NO: 34758 - DNA, 541 bp, Zea mays
  unsure (1)..(541): unsure at all n locations
  Clone ID: MRT4577_131702C.1
ctccccccccccccccccccccccccccccccccccccccccccccccccccctaaaaaaaaccaggcccgttccatttccacgtaaggttataaacaacaacaacaacaacaaccagagggggttcatcggcggggttgaacaagttctcgggaaaggggaggattcatcgcccgggttgttccctaaacacagccacacacacaggcccccttaaaaaacccacagaaaacattcagttttggtgccttttccgggaaatctcccgggccttttcgcgcattttttttggggggggagggcggggcccttaaggggggaaaaccacgtacgggcggaggcccatgacctttttgagggtcttggagccgggggcaacaaggtaggtaaccccaacggccacggaaactaaaaccccaaacttggcaatctccagaatccccttggaaagttcccaaaaacaacatnggtattttgccgggggccgaanccccacttccttccttttttcctccggttgactccctcctaaccacgcccc

SEQ ID NO: 34759 - DNA, 368 bp, Zea mays
  Clone ID: MRT4577_131703C.1
acttaaaccactctaagtgacatacattactcacggcctcacagcaatgtgtgccgcgataccatatatttattgcgctccttgcgctgcactgcgatcgcatcaaatcgtccttcattatctcacacagctaactctatcgaaggctcattattacactagacctttgcatcgaatccattcaatgggcatcttaacacccatgtagcacatcatataagctacagcaagcctttgccgctagcgtcagactgcaaccaatctagcagctgaaccacaatccttgcaacctctaacaatccacatcatcgtaacgcatcagctacaccaatctgtaccagcactgagccacctagccatggtcaacc

SEQ ID NO: 34760 - DNA, 237 bp, Zea mays
  Clone ID: MRT4577_131704C.1
aaacaaaaaaacccctcctttttttttgccccccatttccagtcttttacaagttttgccccaaaaattccccttgccttaaacaaaaccccctacataagggtaaattcccaaccccaacagccaaaatttttttctcctaaccccgcccttttttattccaaccttatctttctttttgggttcaaactttacccccttccccccccttacaaaaactttttaaataaatgggtg

SEQ ID NO: 34761 - DNA, 227 bp, Zea mays
  Clone ID: MRT4577_131705C.1
atagccccctaggttcttttcagaaaaaaatattatggaaaggtagcatactttttgtcctttggtgtcacccctctccattatgcctggtggatcatatccatttgaaaattctgaggatccaatgaactttccgtaaacaatcagcataattctttgcgttcaatacttcatcccggattatgtgagagtgtctttatactgcataccccttttttcttatatat

SEQ ID NO: 34762 - DNA, 317 bp, Zea mays
  Clone ID: MRT4577_131706C.1
gaattgccggctggacgccacgcgtgcggtcgtcatcatcagccccgggtgtggcgctggtcagctggtgaactgttcgagcttgtgttcgaacgatcagccgcggaccgtgagcccaccggatcaacagcaagccgcagattcccctggttgcagaactccgtcgaatcctgcgagtcctacacgcagacgcagctgcatcttctcttagtcatcactcatcgagccgatagcaccggcgcccggacgcttgatggaggctggtggcgaggagttcgcgatcggcgtgacgctatgcacgaagaccatcctggggg

SEQ ID NO: 34763 - DNA, 383 bp, Zea mays
  Clone ID: MRT4577_131707C.1
ccacgacatggggcacgccttcagggcactggagggcgccacggtcggcggcggcggatccgagttcctggacgagctcagcttctgagggtgcgcgccggcgccggagcccatcaaggtgcgcgggtttggcgacacccagccgggcagcgagctaacctgcaacgttggcagagggcggtagatcgactagactacgttgtttcctccctaggaatcgagcacacctgtgcgcccggaatcttgcatgattgccaccagtaagagttcgttctctgcgccctagccgtgtgcacggttatcagtgcagcaccatccaaatgttggttagactagtgccaagcaacaatgtagggttgagtgacgaaaacattgacgacaat

SEQ ID NO: 34764 - DNA, 430 bp, Zea mays
  Clone ID: MRT4577_131708C.1
cttattgattacgttattcacgctttatttgtgcattatacgagcgcatactttcgtacgcgcgcaaaaaaaggagggcgcttggggggacaggaaaaaacacgcggggcacaaagggggggaaaaaggggcggaacgtttaatttttttttggaggggggggaggaaaaaaaatttttttggacaaaaaaaaaagggggcccccggggggggcggggctccccaaaagggaaaacgggggaaaacaaccccgtaaatttttaaaggggggaccccaaaaagtgaaagagggcaaggggcctgtggtttttggaaaggggggaaaaaaaaacggggaaagcccgggggcccagggggccaaacccccccccggggggggggggattgcgcccccccccctcccccgtgacccggggggccccgcccccgg

SEQ ID NO: 34765 - DNA, 429 bp, Zea mays
  Clone ID: MRT4577_131709C.1
cccaaactttcccacaccagaaaaaccaccagagccttacggaccgcggacagagaggacgcgagcgatgtctgaggcgccggcaaggagcggcacagggtctgtggaaagggcgagcgcgaagcctcaccgcgaaggtgcctccgcggacaacatccagggtcatcaccaaggccgagacatccggagagctggcctaggaggggtgacagtgaagcgcatcctcgggggtcatctacgaaggagaaccgcggaagtgctcaagatctcttctcgagaacggcatccgaggacgccgccacctacaccgagcacgcgagccacaggaccgtgaccgccatggacgccgtcgacgcgctcaaggggcagggccggcccctctacggcttcggatgctaggctagacgcctcttcatagtcgccgacctg

SEQ ID NO: 34766 - DNA, 296 bp, Zea mays
  Clone ID: MRT4577_13170C.1
aggggcccggccaaagggtaatccggtttacacaattaacagggctttcacctcaaaaatttaccaccggggggaaagggtctttggaaacccaaccaacaggatttggaaagaaacacaaaaaccttttggggccagggccatgtttagggaaaagaaaaccccgaggggaaggggggggacaccttaaacagcatgttttggaaaatggcgcaaaggattcacaatttagtctgaaaggctttctaaaaagggctcccccggtggtaaaggagggcgggaatggcttttccctt

SEQ ID NO: 34767 - DNA, 442 bp, Zea mays
  Clone ID: MRT4577_131710C.1
aagctgcactattttttatttcggcagaccaggaggcatagtgtttgaaaaacatgggggggctgctaaagtttaaactgaccattgctgagccatcatggagttccatctataaaaccaaccgtattttgagagaacaagagccgcagcccaaaacaacggaagccgacggaaaatccgacgcctgcagctttacctttccatctccatctccactgacggaaattcccatcccgctaagctcgcacgaagtgatggaaaagtaatcaccgcacctgcatgggtacgacagctctacagtatcggcatcggcagggctctcaatgatcatatccccgacttggacttcaaatgcgatgatctcgatgttctgtctggatgactgcagctgcttatcgtagtctgctctagatgtaggatggcttaagatttcccatgcttt

SEQ ID NO: 34768 - DNA, 2029 bp, Zea mays
  Clone ID: MRT4577_131711C.1
aggccggccgggatctgcccatccggccgtccgtccgtgggcttcgccccactcttctcggacctccacctgcggcggcggtagaggtcacgtagccctcgtcgctcgtcggagcgtcttggatccttccttgaccctactcatctcagattccggccagatggaaggcggcgagggatccggattcgatggggcacacatgaagaagcggcggagcagcgcggtgaggcggccgaggccggagggcggccctgccgcggtgcagcgggacaacggctcccctccgccgctgtcggtgacatccaggagcgccccgaggagtctgctgttgacttcggacgagaacgccaccggccccgacgggggcaaccgtaggcgtgagttcctcctgaacgctccgtcgccggagcgcgcgaccaaggggagcatccggctgcgttccgaggccgcagccggtggctccaggaagagcgacggtagcagccatgcccctgaggggaaccgtgagaagctggggaaggtgaagctcaagattcgtaatgtgctaccgaaaccgaaccctgatacgtcgcctgtgaagcccccacggcctgtagattcgcggcaccagcaaaagcatggccatctgaaggaaggcacaaaagattctgacaggccaacctcttcacgagacaagaaagccagaaaggagaggtcgattcaagaaacaatggcacatgtgcaagcagacaaatttcagagagaacctacttcagatcctgtacggaagagtaggaggcttgctaagaaatctgtggacaatgaatttgacgaggactttggtacaagcaatcttggaactcctgaagattgggatggtactcgtgagtctaagagcaaaggaagtggctctaagaagagtgcctcaaggaaagggaaaaataggagcaaggtgtatggggctgataacgattttgttacttcccgatctggcaagaaaagatctagagaatcagctgatgatgataatactgaagaagaaccaacctcagacagtgaacctgacgttgaagacactgaacagaaaacaacggcgactgaatcacctgtcaatattagaagtgaacctctcacgacacgtcgccgcgcccttcaatcatggatggatggcagcagcatcagtactgtcgagttccctgatgggctacctccagctccttcgagaagcaagaaggacaagctttctgaagaggaaatgcttgcgaagaaggctgaagctgctcagaggcgcaggatgcaagtggaaaaggccactaaagaaagtgaggcggaagctataaggaaaatattgggcatcgactctgagaagaagaaagaagagaggaagcagaaggagcgaggagagaaggagcgagctagcagagcacaaaacatggcggcaaactcgatccgctgggtcatggggcccaccggaacagttatttcgtttccacacgcagtaggcctccccagcatcttcgactccaagccacacagctatcctcctccacgggagaaatgcgctgggccatcgtgcacgaacgattacaagtacaggcactccaagctgaacctccccctctgcagcctcaagtgctacaaggccgtccaaggaaatgcttgatagggctcagggaacataatggtggggactggggagtttgtgctgtctccattggcatgccatctatggctggaaataaggcatgaagatgatgtgcatctatggtgggagttctaaaggatgcaatgcaataagggtctgcctgcaaatgtatagaaatggatatctatctacatgtagatttgtggggtagagatgtagaagatctttttgctgaacctgtgattaaagatgccggatgttattgctatcccacaatacgcatcctgtttttagttcttttgagagaaaaaggtgtttttgttgtagatactgcacgtacgtttcatatgtataataaagagcagaataagtttttgtaaaaaaaaaaaaaaaaaactcgagagt

SEQ ID NO: 34769 - DNA, 608 bp, Zea mays
  unsure (1)..(608): unsure at all n locations
  Clone ID: MRT4577_131712C.1
gnagnagaagtggaggctagtacacaaaaggaggatccaatcagatcacagcagcgtttgcttgtccaaatgcagattttgatctcagtgctccaaatcaatgatcctactgctgcttttagcgcgcaaaaagccgatctttttttttactcgtgctcttttcttcctttctttggggagcactccatcttgttttgtttgttcatcattctcctgtctttgcagaatggcgtccgtgctgatgagttggtttggtttctctctcttttccgtacgtgcagccccggtgcggtgtgtgttcgcgtggcgtcaagagtggcggcagctcggcggtgttcacggccgagtgctcccacgccttccacttcccctgcatcgccgcccacgcgcgctcctcctccgccaacggcgtcctgtcctgccccgtctgcgcctcgccgtggcgccaggcgcccttcctcgcctccctccgcctccactgctccttccacgacgacaagcaccgaggaggcggagacggccgcaagacgtcgccgctcgccaagctgtacgacgacgacgagccgctgctggcgcccaaggccacggccaacggcggcggcttcaac

SEQ ID NO: 34770 - DNA, 1897 bp, Zea mays
  Clone ID: MRT4577_131713C.1
gccaggcccgacgtgcccggccgggaaaaaaaaaactgcgagagcgtcactcaccgtccacgcacgcttttgccgacaacacatggcaccacgccgcccccggtcgccaccccaatctcttccaccttccctccactcttttgcctgtcgcggggttagaatcccatggcgctgtcgtccgagatccgcttcggccaccagatccccctatcccactgcgacactgactcctacgaggaggaggaagaggaggaaggagaggaagaggaagacgaggaggaggagttcgagggggaggaggaggaggaggagatggatgaggtgacggtttcgtctccgctgatgcttccggcaacggaggccaggggaggggtgtccgtggtcgagatggtgacgggggcgctccggaggtcgctcatgctgtgcagcagcagcgccggcgccggcgtgcgcgagccggagcaggaggaggacggggcgactcccccgggtggtatgcagatagggggaccaacggatgtgcggcacgtctcgcacgtcaccttcgaccgcttcgttggcttcctcggcctccccgctgacctcgagcccgacgtgcctcgccccgtgccgagcgccagtgtgagcgtatttggagtttcaccaacttccatgcagtgctcgtatgatagaagaggaaacagtgtgccaactatactcttgactatgcaaaagaagttatattcacttgggggtcttcaggctgaagggatattcaggataaatgcagacaatagccaggaactatatgtgagggatcaactaaacagggggattgttccagatggtgttgatttgcactgccttgccggactgatgaaggcatggttccgggaacttccaagtggagtactggactcgttgactccagaacaagtgatgcactgcaacactgaagaagagtgtagccatcttgcaagcaccctacctcctgtcgaagcagcattgcttgaatgggccatcagtctcatggcagatgtcgtggaaaacgaaagctacaacaagatggacgctcgcaacatcactatggctaccggaccgaatatgaccaagatggcggaccccttgactgctttgatacaggccgttcaagtgatgaatttcctcaagacattgatcttgagaactgtaaaagaaagggaggaggctgctaaagtagccagggcgttcccatcgaggtcttgttccccgagcgacagagatgcgcctcgacctgtgcaacagttggacatgcttttcgtctgctcaagccagcgaaatgtagagtatcctatggttgatgaggctaagtttgtccagttcctttttagagtggaagttgctcttcaccatgatccgcaaggtggcacagatggacccaagaatcatgacagcggtggaggttaccagagaagtaacagtgagatcactccattggacaccggtttgaccggccaaaatgagttcagtaacaacagcgaggaaggtctctttgacaagtttaaatttaggaaaggggtagggaggctctgcaggcaccctgtgtttcagctgagtaggtccatgaagaagtcagatgaagcggagcaagcatgtgtatagggcatgcctgtgcagtggataatattgacacacctgtatttctctgcagcttgtttactgtgtaggtcttcggctattctcctagattgtgtgcctagaaggcattggccccattattagtactgatttgggtgtatatgtgactatgtcagctgttcacttattgctgtcctaattgttaagaagctatcatgcactagtgatttttcttagtttgtcagatagaatctcgtgtgtgattttcatttggagggtgactccgaattgctttgtgctt

SEQ ID NO: 34771 - DNA, 474 bp, Zea mays
  Clone ID: MRT4577_131714C.1
tggtaatatagtcaccgaattattaaggtccaaagtgtatcaacgatgacgctttaatgttgagcctgaaataaagagtatgtggacgaggtgaagtgaacttaaggtgcaggcatcataggtatcttgtgccaaacagactgttacatgcaggctagaggcattaacactggaacttgcagcagatgcccggtcttacgttatttggagcccatgtgataaagcgcataccgtataagctagtttcagagaaggcattagcacagtttaaagagtgggtagcttgatgcagacaaacaacggacgagggcctttgttcgtgataattgtttaaaataggttgacacattatggtgagatgagaaacatactaaaggttaaaagtattttctgccaaacaaggggaggaaactggaatcattatttgaaatgctgttagcgatactactatatcttgcaaatgccgggtgtttg

SEQ ID NO: 34772 - DNA, 167 bp, Zea mays
  Clone ID: MRT4577_131715C.1
gcccgccgaatcttactaggattcccctagctgcggcgagcgaaccgggagccgcccagcttgagaatcgggcggtctgcggtgcccggtttgttgtctggagaggcgtgctgagcgttggaccgggctttttttttttgccgtggcgcttctgcgagggggggcgt

SEQ ID NO: 34773 - DNA, 132 bp, Zea mays
  Clone ID: MRT4577_131716C.1
gggccaaatttggcttacctaacctttgggaaaattggaacccgccccccccagaattggtgagattcggagggagagggaccattggcggggaaattggccctttcaccaacaggggttaaattaaacaaa

SEQ ID NO: 34774 - DNA, 250 bp, Zea mays
  Clone ID: MRT4577_131717C.1
cgttgctgtcgattcacagaagccaccagagggcatgttcaaccaagataacaaaaaatgtgtttgaatatttttttatattatgcaagctcacataaaaggtcaagcatcgaatatgctataaaaggtcaaccaacataagtggttctcccccgaccatgcgactttgtaatcctcggtgacaaccacgtggaccctgtcctccccggcgtggccgtgcgcccactcgacagcaacggcgacagcaacg

SEQ ID NO: 34775 - DNA, 631 bp, Zea mays
  Clone ID: MRT4577_131718C.1
cttcgcgggttacttccccaaccggccgtccatcgcgcgcaccaacatgccggtggaggagcccgtcgacgccaccgcgctcgcggcgttcctggacaacccggaccaggcgctccgcgagtgcttcccgtcgcaggtgcaggcgacgctggtgatggccgtgctggacctgctgtccacgcactcccccgacgaggagtacctgggcgggatggagaccgcgccgtggaacgacgatgccccggtgcaggatgcgtacggcaagttcaacgcgcggctcaaggagatcgagggcatcatggacgagaggaacaaggaccgcaggctcaagaaccggtgcggcgccggcattttgccgtaccagctcatgaagcccttctctcagcccggtgtcacagggatgggcatccctaacagcacgtccatctgatgatccttgttgactcctcactatttaattttacctcggtacggtgtctagtggaattatttattcatcaatgtaacggtaacggtaatgtaataatggcataaacttacttcggccggtgctatatatattaagagctctgagcttccaaaaaaaaaaaaaaaaaaaaaaaaaaaaaaaaaactcgagggggggcccggt

SEQ ID NO: 34776 - DNA, 307 bp, Zea mays
  Clone ID: MRT4577_131719C.1
gccgccgcggcgccacgcagacctagcagagaaacacccacccgaaatggccattgctctgggccgccttgccggccttttccgattcgcctccgacctcttttgccgcggccacggtgctactccggtcggcgctgacccgcccgatctcaacgggtttccggagggaccccaccactttgggtccattccaagtccccaccgccaagttggggggcccccaaacccaaaaatcgttgcaaaactttgacattggcgggaaccgtaaaaggatgcccgttccaataatccgggcctttggcgtgct

SEQ ID NO: 34777 - DNA, 443 bp, Zea mays
  Clone ID: MRT4577_13171C.1
agttaatacaatttcagtctattcctctccgtgctatcttcttccttccgctcctctctgcttgctcctcctctgtgtacccttctgctaacaagcacatagcctccgttactccgcctcctcagaggttccagctatgctactaaaccatgtgtcaattgatgttacttgcgaaatgttaaggggaacaacacttgaagctgacatggagaagaaaaatgcaatgacagtccacatgaagcttgtgaaaaagaattcaactcataatttcttctaatgccgaagtttctagtgaagagacttgtactctgtttttatgttatattgtctatttgtacatgtgaatggagatgatcttatgtgatgtgatgatggatatattaactttgttggttggatattaaatgttatttaagttaagctttgttggattaactataatg

SEQ ID NO: 34778 - DNA, 248 bp, Zea mays
  Clone ID: MRT4577_131720C.1
gcgggccaacatctcgcggtggctcgccttgggcaaccggacctgcccgaccacgattcaggagctctaggacgacgccctgaccccaacgccactctacggccactcaatgccggctgggtcttcccgcctggttttgcattttggtttcttaatctgcaatcatggtttttcataatactgcaaggtgggcctgataaataattaaaaggtagttaatcttagatattgtttgaacgtatgggatg

SEQ ID NO: 34779 - DNA, 355 bp, Zea mays
  Clone ID: MRT4577_131721C.1
ggggaaagacccatttttttaaaaaagggaccttttcaatggcaggggttggtctaaaggtccctgccccggccaacatgtttttgaccccctttgactaaagggaccaacgggggtgcccacgggtttcccccctttataactatttacctggccccccctttagagactaagttttataccgggggtttccataaacgggctgaccagggggggggctcaacccccagttaaaaaatgacgtatcctggtccgggggtgtttccaaaaaccaggggttttaatataaaataaaatggggaattatttggtggtaggcggggggaccttggttttgcataaaaggattttttac

SEQ ID NO: 34780 - DNA, 938 bp, Zea mays
  Clone ID: MRT4577_131722C.1
agaggacagcaatgggtgatgacaaaccatgggctgacatggtggcgaaggatgaccagcaattgggtgatggcaagtcaacacatgatgttggaattactgaacaaaacgagagcagtaagcatgcaagtaagctggagtatagaacgccatcgtcctctcaagaaagcaggacccatcaaagaccagtcatgggtggtcaactgcaaggttcttcagcaggttcatggagacgcagtgactccaaaatctacatggataagaacgtgaactgggatcttgtgaggactgctccgacatggagcaggcataaggtacatgaccacaacaatcgagtttggcaaaggcttgacacaattcatccccgtgagagagcctcaagcacgaagcaagtaccacggagaagcaacacatctcagcgcgctctttttcctgactggaaatcaaaagatgaaggatatggccatggctatgttccgtttgatgataacgaacacactcagtgttccagtcacattgaggccactcatcgctggcataataatgaggcaagtacagggtcatggaggccacagaaccgtctgcgggtcttccaggaaatcacaaatgagatcaaccaaaatgttgtgtaactatgtccttgttccttgctgtcgatggaagttctcctttccagcaacatgttgtttgcactacaaatgggatctgtgaaatagttccgcaatacacagtttttcgcttcatatgattatgtttttgagaaaaaaaataactacaaaaaactctgtgaatatctttacaggccacccgttacatactactggcacgttggaggatcgtgatatctgtatatattttctttatcactagtgtgccaaagtatctgcaaaagaaacgcgattaccaacaaaatgcgcaacctgaaatggcgaatggga

SEQ ID NO: 34781 - DNA, 408 bp, Zea mays
  Clone ID: MRT4577_131723C.1
tccggaagcgcacacatccggcgagctgctagtgtgcctgcgcggggagacgagacgaggcgagacgagcgatcgaccggttccagagagaccggtatcagcgccgagacaccgacgctggtgttcatctgatactctgcaggtgtgctcgtgaatcccgtggtaatcgcgcgtgctccgtgtccggcgggcgaccgtatccgcgacccggcgtgccgcagaatagaacctgttttgctgttcagagctttaagctcggagaatcgccgaaccgcccggttctagcagccgcccaggtgccgggccgtgtataagaattggaaaccaaagtagcagaccgcacctgcaacaaacacgcccgttcctcatggatgtaccccagcaacaaagttcccaaagctcgattac

SEQ ID NO: 34782 - DNA, 453 bp, Zea mays
  Clone ID: MRT4577_131724C.1
agggttccgttcgccgcgccgtcactcccctccccttactcgcaacctcgtcgtaaggcactccggcggcggcggtgactacgtcccccctcctcccgcctggtaagcagccatgtgatcccaccccgtcgccgttttgtttctggcgcaggacgtgcatgcggggcacgatcattggctactacaagcgaccccagcagtgtctgactctagaccgaggtagaatgccttgctcacctcagccgttcgactgtgtggtgtcctggttgttggatatcataccagtttacatgtcagcttgaatgcttctctatcagtgacgcaaatactggcttgaatataacagtgttacatgatgcgaggtttagatgtcaggttgggcacacctctatcagttttaatgcaagctagtggttgtgtcttgtatgttggtgatgcaaaccttcaagggcc

SEQ ID NO: 34783 - DNA, 320 bp, Zea mays
  Clone ID: MRT4577_131725C.1
acgaagcaatccgtgtgaaattaagttatggatgaatgtatgtacattgattgatagagactgtctttcatcatcgtaaggtatatggacattggtagatagagacctgagtctgacaaactcgggcgcggtgacgagccaacaatttgattgatctccgtagtcgtaaacggaaggatggatcagtggacctcgacgttccattgctagcccttcttgagctgcttcttgtactgaattcagttgatcccaagcttgggtgcaaggttgagcatgatgatccaccatgcccttcttcatgcccttgagcccgcacatgt

SEQ ID NO: 34784 - DNA, 283 bp, Zea mays
  Clone ID: MRT4577_131726C.1
gtggcttctcataaccatcttaccaagtcttcctccgattagggttccttacggtttagtggaggggcgatcgcgaccgctgatgtcacctaccgatacttcatcgtctgtcttgcctctgccatcagcaacgactcctttgagaataccttgtgctcctacagccatttctttgattgcaacttcatcacctaccggtagacgtataggttcctcttctatcactttcttacctactgcttcgagaactccatgctcgaagctatcgagaacatcaacggca

SEQ ID NO: 34785 - DNA, 215 bp, Zea mays
  Clone ID: MRT4577_131727C.1
cccacacgtgcgtctattaggaggagtcaacttacggggcatctagacactttcgcaataagggtggtagccacataactacagcgattagccgttgcgtggtacgctcttgtacgacactgtgggacgcacgcacatgtggaggatatccattgtatcatcacaacataatatggtaccctccgatcatacagcggtgtccagttctgagggca

SEQ ID NO: 34786 - DNA, 634 bp, Zea mays
  Clone ID: MRT4577_131728C.1
ggccctaggggccttttttttttttttttttctttttttttttttttttttttttttttttttttttttttttttttttttttttttttccagcaagggaggagggaaggaaacccccaaactttccccggggggccaggacaaaaaaaaaggtttttcaacaccaaaaccgggttcgacagccaaaaaaattcttgcaagaaaatcagtattccccctcctcgccaccgtaataacggccgccctcgggggggaccccctcgaagtccttccccaggggggccaggccctcgggggcctcgaaaaactccccctcctccatgccctcgccgacgaaccagggaacaaacgcgcgtttggggaacatgaggccaaatttgttgttgagggggaaaaacaccccaacaacgctgggggagttggaaatcatgcacacggaacgctgcaccttggggagggcggcacccggaaccactgtcggcgcctggaatttgatgccccacttgaaccccggggggcaccagtccacaaacgggagggggcgcttcgccttgaggggggccaccggggggttcacgtccttgggcaccacgtccccggggaacatcaggaagaaagccatgtacttgccggg

SEQ ID NO: 34787 - DNA, 810 bp, Zea mays
  Clone ID: MRT4577_131729C.1
taaacaaactatgacatttttatttcatcaccaattaataaaaatcaacgtacacttgaatgcaatccaaattgtgcatataatttcatcaaacattaagagtctatctttaaatcttcgaccgagtattattttctattagcaacttcttaaaatcttcgacctcaattggttgattagctacagtggctgcaaattcttgtgacgccttgacctcaattggttgattagctacattggctgcaaattcttgtgacgccttcaaggtttccattttcgccaaagtctatcgtttttcttgtcttagtctctagttgagattagagttcttgcacttttgatgaaactaagcttgtcttggagacatactgaaggccaacattgtgaaggaatttacttgagctcgacaaaacgtggaaaacaacttgtgtaaaagacttcacaagctgatcatcttcaactagtgctgccaccattgctccatatcatcctgatcaaatctcgtgctagggatgtcaagagttgacactgcataaggagagtctactattccagagatcctgctccttggagtacccaaacctagcaaggtattcgatgtcgttcaggactacacgcttgtaagcaactgatgcatcaaggaaatgctgcttcccagattcatccacacttgtagtgttagctaagaacaaaaccatagaacttgtgcaggaaaatacctagagcaaattccagcagaaacataatgcttgcaagtgtttccagaactttgcaatcataagcatcagcaactttctgaattgattaagt

SEQ ID NO: 34788 - DNA, 139 bp, Zea mays
  Clone ID: MRT4577_13172C.1
ttcggtattgtccccgtcttccctgatcccttcgatccccgaagcaaaagcgcaaagcgcatcaacgcacagttagacagtcatggcgacggcggcggtgcagtcccatccggcatctatggacgcgcgccggtgggac

SEQ ID NO: 34789 - DNA, 102 bp, Zea mays
  Clone ID: MRT4577_131730C.1
caaaagaccggccataggactttgagaatcgaggagtttgaagggcagcccatttcaatgaacgaaagaaccgccaaccatacaggcgccagcatgaaacac

SEQ ID NO: 34790 - DNA, 674 bp, Zea mays
  Clone ID: MRT4577_131731C.1
tcgggaaaaaaaaaccagcctacatccctgactcgctctctccgtttgacatcaacatgctcgccaagtttgcttccctcgcgctcttcgtttctgctgcgctagctgctccccacaaggccgcatcacctgtcatctcggcctccgctacgacaatttctgacgctcttcacaccaccgtgttcgatggccatacgatcactttcatcgaaagcactttcagtcctgagcccacggagagcctcaagaccaccgtctacgatggtcacaccatcacctatgtcgacagcacttacgtcccggagcctactgagagcctgaagacgaccgttttcgatggccacacgatcactttcgtcgagagtacgttccgcccggagcctactggcgatcttcacacgactgtatttgacggccatacgattacgtttgtcgaaagcaccttcagccccgagccgaccgaaagcctcaagaccaccgtgtttgacgggcacaccatcaccttcgtagagagcactttccgcccggagcccactggggacctgcacaccactgtctacgatggccacactatcacattcgtggagagcacatacgtccctgagcccactgagacgctcaagacgaccgtcttcgatggccacacgatcactttcgtcgagagcacgttcagt

SEQ ID NO: 34791 - DNA, 238 bp, Zea mays
  Clone ID: MRT4577_131732C.1
gagctattagtcggcggccgccctctttttttttttgggcggtttatacatgttggctctaattactaagactatgtagcgttacagattggtcggaggaggctacacgctatgccttgacgccaaggcaaaggacggaatgccaaggggtgctgcacagcacgaggcagggggcgacaggaagggatccatgagcataaattcagcgctggcaaatgggataaacgctgaccttaag

SEQ ID NO: 34792 - DNA, 1510 bp, Zea mays
  unsure (1)..(1510): unsure at all n locations
  Clone ID: MRT4577_131733C.1
cggatcaccgtcgccgccacccgccgttcctgcgggacctctcgtccccgatctcctcgtcgtttcgcccgggaccgggccggggtggggcttagaaaaccaaggcgcactcggcagtggaactccgctttctcttgctagggtttcagctctccgccaccgtcatgagtgcctccaggccggatcaccgtcgccgccacccgccgttcctgcgggacctctcgtccccgatctcctcgtcgtttcgcctcccaccggcctcgatgcggcgagaggcgcaggcctccaccccgccgccgcctccgccgctgctctccctcgacgacctctcccacctctccccctccaggcagccggccacgcctccgcaggcgacgacgaccccctcgcctcagcccccgcgtggagccgttctcttctcctcgccgctgcggtccaacggctcgccgggcccctcggcatggtggaccccctcgagggaggagaatcccagggagggatcaccgatggatggcgtcgtgcagtaccagcagcagtccccgacgacgccgtcgggtcagcagtcacagcagcagaaggtagcgctgatcacgctgccgccccccagggaggtggcgcggccggagatgcccagagattcggctccggctgctggacgggtcgacgaggaggagtgggtcaccgttttcggattttttcctggtgatactaacatggtgctgcgggaatttgagaagtgtgggatagtcttgagacatgttcttggtccaagggatgcgaactgggtgcatatcttgtatcagagccggcatgatgcgcagaaagcgctcgccaagcatgggcagcagctaaacagtgttcttatcatcggtgtgaagccagtggatccgtggcagctgcagtacctgaacgagaacaccaacgagaactaccaggggagcgctacggccacgttcacatcgcaacctgtagcgccaagtggatttgcaaccaggaatgcactagcacctctacctagcaacactctgacgaatggcagctgcaacgacagcagcaaccttggcgcgtctggggccgttgcgtcgcctacaaaatctgtcctgtccaaagtcatggacttgatgttcggcctttaagttgcgttgctcacccaaatggtgccgggtttttgtttttggggttccttctgggaaaactctaggccagaatgaggttcacttatcgatgttacggtaaaaacgttacgtgatcaccgtggttgaaccactgggtgtcaatgcgaccgttatatgatgctgcgagctagcatcgcgaaattcaaacggttgtattgatgcgttgcaaatcatgtctgaaacgacgtcatgaacctgaaaaaaaaaatgttggacatgtcacatgcccacgacatttatgaagggatgtgagcttgggnggcgccaagctatgctgtcttcaaaagtcaaattggaaatgggatatggaatttggtcccaaaaaaaaaaanaaa

SEQ ID NO: 34793 - DNA, 1412 bp, Zea mays
  Clone ID: MRT4577_131734C.1
attggtaccctcagcggcggccggatccaagaacagagagaaattactgaagcatgagcgcggagctgaagagggactacgagatcggcgaggagatcgggcgcggccgcttcggggtggtccaccgctgcacgtcccgcgccaccggggaggccttggccgtcaagtccgtggaccggtcgcggctgggcgacgacctggaccgcgagctcgcgcagctggagccgaagctggcgcagctcgccggcgcgggcaacccgggcgtggtgcaggtgcacgcggcgtacgaggacgaggcgtggacgcacgtggtcatggacctgtgcccgggcccggacctgctggagtgggtgggccgccgccgcggcgcgcccgtgccggagcccgtggccgccgccatcgtcgcgcaggtcgcgcaggcgctcgcgctctgccaccgccgcggcgtcgcccaccgcgacgtgaagcccgagaacatcctcatcgacgccgacgacgacgccgggagcgacgaggaggaccaggccgaggcggcgccgcgcgcgcgcctggcggacttcgggtcggcggcgtgggtgggcgccggtgggctcgggcgcgccgagggccttgtggggacgccccactacgtggcgcccgaggtggtggccggcggcgagtacggcgccaaggcggacgtgtggagcgccggcgtggtgatgtacgcgctgctctccggcggcgcgctccccttcggcggcgacagcgccgcggaggtgctggcggccgtgctgcgcggcagcgcgcgcttcccgcccaggctcttcggcggggtgtcgcccgccgccaaggacctgatgcggcgcatgatctgccgcgacgagtggaggaggttcaccgccgagcaagtcctcgctcacccgtggatcgtgagtggcggaggagcccgggcaatggagcggccaacctgaggaggaatccagacggacgtgtattgccgtagagcactcaggcacggcaaggaatcccggacgttatgtatgaggtttttgtacgtacgtacgtagtagtgtacggtagctgctgccagctgcagagcagatcgatcggcaaaagaagctttataggcttgtggttttcctttgcccccgggtttttggggacgctctttacctagcggagcagagagcacccgttttccgatgtgctggttttcctagctggatgtacatacactgaccgtcttttgtacagatggagtgtggtgttggatacataaataaaaaaaaaccaagcctttgtactcctgcccccgggtttttggggacgctctttacctagcggagcagagagcacccgttttccgatgtgctggttttcctagctggatgtacatacactgaccgtcttttgtacagatggagtgtgctgtt

SEQ ID NO: 34794 - DNA, 607 bp, Zea mays
  unsure (1)..(607): unsure at all n locations
  Clone ID: MRT4577_131735C.1
atgtatccaacagcacactccatctgtacaaaagacggtcagtgtatgtacatccagctaggaaaaccagcacatcggaaaacgggtgctctctgctccgctaggtaaagagcgtccccaaaaacccgggggcaaaggaaaaccacaagcctataaagcttcttttgccgatcgatctgctctgcagctggcagcagctaccgtacactactacgtacgtacgtacaaaaacctcatacataacgtccgggattgcttgccgtgcctgagtgctctacggcaatacacgtccgtctggattcctcctcaggttggccgctccattgcccgggctcctccgccactcacgatccacgggtgagctgcattattttattaccaacggcagatctgttagataaactgcatcgacgaacaaggggaaatcaaatcaacggagcaggaggaggagagaggttgtcgggggaacgaacgaaaaaactcaccgaggacttgctcggcggtgaacctcctccactcgtcgcggcagatcatgcgccgcatcaggtccttggcggcgggcgacaccccgccgaagagcctgngcggnaagcgcgcgctgccgcgc

SEQ ID NO: 34795 - DNA, 392 bp, Zea mays
  Clone ID: MRT4577_131736C.1
gggaaaaaccgaaaaaaccttgattccagttcggctcggttttcggttgaaatgtgcctacccctagggggtccccccccccccaagggatcagagatttcattttccccgaaaacaccaagtttgggcaaatcatcgggtcttttaggcggcatccatctcctcaaaaacaacctgggcaacagttttggcatgctccaacagtttatttggaaccttttgatgctggggggtcgattcatcgcaaatccagcttaactccaactcgaaaggtttattcttcgcttgggcatgcactccataaattatttttggaactttaacaatgccttcccggcacgtaagctttgaaagtttaaacttttttttttcactgggtgaccacctttaaa

SEQ ID NO: 34796 - DNA, 440 bp, Zea mays
  Clone ID: MRT4577_131737C.1
acgcgtccgccagcgccggcagtcgccgtcatcgatcgatcgccgtaaaaccgacccctaactatgtctggagcctgcgtggaggacaagaagcccgcatagggcggagcccacatcaaccttaaagtcaagggacaggtcagcacgccagcaggttctctcttcctcattttcttctttcttgtcatctcgagggtgatcccacttcctcaccatcttgcctgtagcgaggtaaattagcactgctaaacccgcaccttctagcgatcgatcgtagttgcgaggtgcattcttagattgctagggagctgactcattgtgattggtaggtagcgatgtgtcaatgctgttagatggttctgctgagagcgaatgctttgacgatagcgcctagaatgtgctataactagcctcttgcgaagcgcagctcatactttctg

SEQ ID NO: 34797 - DNA, 1381 bp, Zea mays
  unsure (1)..(1381): unsure at all n locations
  Clone ID: MRT4577_131738C.1
aaggtgcagaggcacctctccatggcgccctccttcctggcttcccttgcgtaggggcagaagcttccatgtatgcctccctccccaagctccagagcgcacaggacagcaacactttcattccccttggatccatggtgctgggaggattttccccattgctggaattcgatgcagccttcccatggcacaggttccacccatggccgacgcccctacccttgttaccttcctccctgtgttcggcacctctccccatagcagcagctcgctggcacccttccttggtccggcatggaggaagctccacattggcgtcctttcctctccccatggagccctccctctgttgctcctccctgctgcatgcgctccactcctccacggacacgccccccctgctcgcatcaaggtctcagcaagcagcagcttgcccgaacctcctgttgtttcctcgtcggccgagcttgctgagagcaggccctatgcaaagcttgcttcctcgctgccagcgctgcgtgagtgccaagtgtttgacgaaatgcccaagcgaggtgatgtgtcgtggacagctccatggctgttccctgtgtcctcgctactcgctgcacagcctcgccgtgctcgctgttcttccgtcccctaggcccagcaagcaggccgacgcatccctcgttgctcctcccttttttttccttctccgacgttccttgctgctgctccctcgccagcaagcagcggcgggtgctgtcaagcccctccaacccgccctcgctgatgctcgcagccgagctccatctagtggtgccaacacttcgcccctgcagcacacgctctgcttcatcgtcggcgctcctccgcacgctcaacatgtggacaatttgcgcaacctaactgctatgttgttgccacgtcgttgcgcgtctgcgctaagcaactgcgccgtgtcgtggcatggccattgcagcaccatgctcgccgtgtgtagcaggcccggccgagtccctccgttgtgctgcgccatcgctgcaggccgccaccaccaaagttcacagccccatggagtctttcagcgagccacgtccttcaacttcatttcagtctcccgtgcgcgacgacgcgttcgtattcacgccgcatgtggagcaaccacgactgaggtttgatatggaccgagagatgatgatcgtgctagtgatgtggtgccaaccacaagatgcagttggtggacgacctgaagaatgatggacttaaccagtggatgcttgccaagcgagtgccacccaacaaatactatctaagtgttaaattcaaggcaagccccggttttatgcataaccattatatatgctattntactacacttaatgtttgtaggctt

SEQ ID NO: 34798 - DNA, 333 bp, Zea mays
  Clone ID: MRT4577_131739C.1
ggggccgccgccaagcccttcgcgtgcgccgcaaccgctgagtgagaagaagagatggccggcaagggcgatgggccggctatcggcatcgatctcgggacgacgtacgcgtgcgtcagcgtgtggcagcacgaccgcgtcaacatcagtgccaacgaccagggtagccgcaccacgccctcgtgcgtcgccttcaccgactcggagcgcctcaacggagatgcggccaagagccaggtcgccatgagccccatcaacagcgtctttgacgccaggcgtgtcagcggcaggagggtcagtgaggcgtctgtccagactcagacgaagttgtgg

SEQ ID NO: 34799 - DNA, 2360 bp, Zea mays
  Clone ID: MRT4577_13173C.1
gtgcggcgctcaaggcggcctggttcgagaccggcgacagttggacagttggtggcagagcggacgacaacgcacgcgcgcctgttcctcctcctcctccccgccgccgccgccgccgccgccgcgcgcgcctttgcgtgccccataccgtctcctccaacacgctcccctcgttggcatcaatttcccatcccacctgtccaccgtcggccgccgctatctcgcacccgaacccagcgcctccctcgtcgccgccggcgcgccgctatggtgtcgcagcacggcatcctcctcgcagttaacatcatctccgaccatttcggtcctatcgtatccaaagtgtgtggctgccttctgcgccacggcgcgctgtcgttgcaggatatcgtccgccgcctcgaactctcgcccgggcaggtgaagaactccctcctcattctcattcagcacaactgcgttcaggcctacacaagccccagaggggctggcgataggacagtgacgctctacctggccatcttcgacaatgttctgcaccggctgcgcttctcaaagttcctttccgtcgtccgtgtggatattcctgagtcagaagttcttctcgaaggattacttcagaatggtaggctaacatttgagcaacttgtggagcgaacaatatttaaagtatcagaagacagccccttaccaacaagggaagaagtacgaatgaacttcaacaaacttgtctatgcgcattatgtggaacgttgcccaaaaccagaacctttttttgatcctcttgcggttgaacaacctacatccacaaggaaacgggctcctaaaactgttgaggcggttctttcacttgagcagaaagttgtctgtactgcagctctatctgacgctgaaagattttctgagataccatacttcatggacgggtcatcgagtgcaaaagatggccatcatgctgttgctggtaataagcgaaaacatgaaaccttagaagttgatgaagatgattcgataattgcagaaagtgaagtactttggcggataaattttgagagattcatattttgtttaaagaagaagttttgtgcagaacgaaagaaagcaaagatgaggctcggaacacttgctatatgggaagcattttttgaggccaatgtaacaaacaacgacaacaagactgtgacatcaccaatagatggaattttggaaagagtaggacaaaaggaaggaggcatgtcaatgactttggatcacataacaagtgtgttgaatgatttagagtgcacttctaccgctaataacccagaagaattcacattcgatttgaataaattggttgagacatgtcgaaacgatgagatagagtctcttgtgaaaaagaaacatgggcaagaagcttatacaatctttaggttattgctgaaacaaggctctccagttgagacggatgaaattactgacaggacaattctagacaagcaggttgttcatgaaactctatacaagctttggaaagatgaatacatagattcagagagagtcccttcaacatcagcaacaggaacaggaagcgctcagttctttgtttggagagtaaaaaatatttatagggaacacttcatggacaatctttaccatgctgctttaaacttgcgccagatggtcaattatatggctgaactactacttgagggttcaaaggatgaaatcaagcttcggaacagaaaaaacattttgatcctagctctcactagacatgatgaatcccttatgttgttccatgatttttgagaatactggaacaggatctggttataaatttctggtctttggagaaaccaaagcatggtgatttttctttggaattgtcaaagcttcgtacctatgatgttgttgagggagttgctcgtcaacttgaattggaccatgcatgaaaattcggcttacatcccacaattgctaatctcagcaacctaaaccacagcctgtcaagtatcgaacagtggagcatctgttggacatgctcatcctttacaatcagattaaccttttttgtttcttttggtcaatatgagcatgatttccgtgtaacaaaatgtgttggacttcctgaactttaacaaagattattacattcagttaaaacatcgtttcccccagtttatatgtaacatcagaatagatgttctttgtggttaaatgtcattgtgcgccaagtcatgcatctggtatgcttgtctgttgctgttaacgcctcgtaggttgtctggacgacttcatttggaacacatgccaacaggcaaacaagaggggcatatttatattgcagtttagagtaaaaaaaaaaaaaaaaaaaaaaaaaa

SEQ ID NO: 34800 - DNA, 201 bp, Zea mays
  unsure (1)..(201): unsure at all n locations
  Clone ID: MRT4577_131740C.1
attcgcaagttgaggacttctacctcatcacntatacttcccccaatgaacacatnttccaaatgcccaccaacctctccagcatcattctagatggccccatccttcttaaagcttgcactcaaataccatttcctgtctctccgcaccatattactctccaagtacaagatcacctaccagttctaccccgtcttcccc

SEQ ID NO: 34801 - DNA, 485 bp, Zea mays
  Clone ID: MRT4577_131741C.1
aggccggccgggccgggaccattcccgagcacactagtctctcttccctgcgcttgatcgctccttcttgcccccatggcagctgctcgccgtgcagggcatggccatgcccaccgacgccgcggacctcccatctcacaaccacggagacgtctcatcctacgtctccacctcctcctacgcgcgcgcagcctccgccgccttcccacgcgcccgggatgcggacgccgccggcgacgtcttgccgtgccaccgatcactccagttcttgacgtctactgcgggagaggggacaagaaatagaagaggggcgaaaggctcaaccattcatatggcaatgctaggccgcgcaacaagaagaagggaactgaggctgcgcggatcttagcccctcctgctccgcgcaggaaagatcatgtcgatgatggggagatcatttcaatcgggattgacgaggacatcctggaatacgacggccgagctct

SEQ ID NO: 34802 - DNA, 1212 bp, Zea mays
  Clone ID: MRT4577_131742C.1
ccacgcgtccgtcctcctcgggtggcccgtcatcgcgttcaccctagttctttctttcctggcagcgacaactgcgcagcggcgccgccaccggacgtcagatctccgttgggtgtttgatggcgatgagcacctgtcaggtactctaaggccactttctctcattaaggtagtactgagttcattgcatgactatgacttctgaagatggagacattttggctcttctgtctgagccaagcctaaaggaagagcaacttgaggcttctgaatctgatgctatgttttctgcaattatgaaagccattgaatcaaataagaatgtagttgaagtttcacctgaggaagctgcctgggcagattcatgcttcgtgcagacttctgaactgtcatatgatgactggggagcgatgaggagtatgctgcttgatgccctcgaaaagccaacagaaagtcccagtgatacttcagaaagtgcacataatgcaatctcagaggcaaaacctcactcccttcctgctgaaaacatttctgagcatggcgacatccacatggagcaaataaacaataccgatgatgacaaggatggtactgaagcttttgaaattgctgatgtaatcagacgtgtagacgataatggtaagcaaattgatagttatgtagcagacgctggtgatgagttggtccttgagcagacccagtcaacaggttctatatttaaggtttgggacctggaactgccattttctgatgatgatgatgatggcgagcttgaactcgtcaaggatctgaagaagcttctcaaggagaacagccttccagaggatatatatccaactcttcctccagatgatgcagccaaacccttgagccagataagcatcaatgaaattgtggcgggcttgagcgatttatcaatacagcaagcccatgagtgactattatttctcaaatagctgtggcacaccttggtcgtccaggcgatattttgttttgtgcaaatcacttgggtggtttaaacagcaggtttaggctaactgttgtgctgtctgttttttctgtatactcgccgttttgatttctgcttaacttgaaatcagctaaaaatgaagatgctttggtagaattcgcgttcagaaaaaaaaaaaaaaaaaaaaaaaaaaaaagacctgcccgggcggccgctcgaatgttggccttatcaagactacg

SEQ ID NO: 34803 - DNA, 289 bp, Zea mays
  unsure (1)..(289): unsure at all n locations
  Clone ID: MRT4577_131743C.1
gacaccgccagctagcaagcgcgctcgatcgaataccgttaccgtgtcgccatggccattgggaagaacgtgtggcgtggcgctggggcacgggacccgacgcgggaaactgtgtccgcgcagcgactcgacgatactttcgtacgtatcgtgcgctgaggagctggcggagaaggccgaggaggagaggaagcgatcggaggaggaatgtggagggaaagggcaaggaccgggagaacgtgagaaggaaaaggagatgagggaactggaggataaggagnaggagaag

SEQ ID NO: 34804 - DNA, 769 bp, Zea mays
  Clone ID: MRT4577_131744C.1
aattgccaattttctcgtttcattcctcctcgggtggcccgtcatcgcgttcaccctagttctttctttcctggcagcgacaactgcgcagcggcgccgccaccggacgtcagatctccgttgggtgtttgatggcgatgagcacctgtcaggtgctgtggttcagatcttatgcatatcacttttgaagaaaaaaatagaaatgctaaatgccttattcacagcggtgggaatttggaaagtgtatttgtgctgcttcactgcacttgatttggccaagaaacaaatttcctggattcaatgaaattcattaaccactttgattggcagtattctttggttctaatattatgctaactccatggctcaggtactctaaggccactttctctcattaaggtagtactgagttcattgcatgactatgacttctgaagatggagacattttggctcttctgtctgagccaagcctaaaggaagagcaacttgaggcttctgaatctgatgctatgttttctgcaattatgaaagccattgaatcaaataagaatgtagttgaagtttcacctgaggaagctgcctgggcagattcatgcttcgtgcagacttctgaactgtcatacgatgactggggagcgatgaggagtatgctgcttgatgccctcgaaaagccaacaagaagtcccagtgatacttcagaaagtgcacataatgcaatctcagaggcaaaaccttactcccttcctgctgaaacatttctgagcatg

SEQ ID NO: 34805 - DNA, 197 bp, Zea mays
  Clone ID: MRT4577_131745C.1
caattactcactggagcaggatatgaaaccatctgagccgccatcgtgtatgactcactatcgctctcagcgggacttgtgcagctccacagatggaattacaccccggctcgacctccgcggtaatgcacgtatgcagtggtgcctgcttgcaactcctctgcaaccctacctgggacctggaggccaggcggcta

SEQ ID NO: 34806 - DNA, 619 bp, Zea mays
  Clone ID: MRT4577_131746C.1
atgggaaaatatcactatgacactaatattattttgatgatataaatatgtaatgttattataaatatggggactcgattaaaaggatactcaacaacaaacaacacattgttgcaaataaaaaaaaagcttacaactatttcgatgaagcaagaataaagttccattggacagttccattgctagaattgggaatataagggttagaaacatttacaacaacaaaggcgtagctaaaagaatacagggaggttattgcaacgactacccaaaaccagtgaaagagacataaaaacaatggcgacttttaaaaactccaacaattctttgcagcattgactgcacattctctttgtgaactgttaagaaaagaatcagatccatacaattgtgaaccttcattcgaatttggtagcaaactattaggttgcttcactacatggcacacaacattcgttagagtcgcaaacttactttcctgatagtgttctggatgttcacattcaacagatcctgcaagctgtattcatgaagctcttcaacattttagatgcacttagacaatagcttataagcaaaaaaggaacttttcagcaaggtatggcccacaacaaaacgc

SEQ ID NO: 34807 - DNA, 387 bp, Zea mays
  Clone ID: MRT4577_131747C.1
gaggaggccgtgtcagcggcggaggcggcgggtacggtggatgcgccgtcgtcgcggcgtcactgcggttgcgtgcgccgtgatggctgccgcggctactgcggtcgcggtggctaccgtggtggcggcggtggctacagtggtggtggctgctgctactgctgctaccgccgctacggcagctcctactggaactggcggaactgagctgtggtgcccgcgccgacaacttatcctgttcgctaccgtgttgtttaccctagtccagagtgtttatcttcgttcgtctcgtgtttgttgttgctcatctgtgtatttgatctgcatgtctctctgtgtcagttgttagtgctgtgttcatcctcagctccatcagacccatgcatc

SEQ ID NO: 34808 - DNA, 214 bp, Zea mays
  Clone ID: MRT4577_131748C.1
aaaggggaccccccctgtaccggcccattaagcccgggggtggggggggttccccccagggggcccgttccatttgccggggccttagggcccgttcctttggtttttttcccttcttttttggcaacgttggccggttttccccgtcaggttttaaatggggggctcctttaagggttccgtttaagggttttacggaaccttgaccccaaaa

SEQ ID NO: 34809 - DNA, 290 bp, Zea mays
  Clone ID: MRT4577_131749C.1
ggaaacggggggggacggacgcgaccgcccacgcgaccgggacggggacagattaggctcttcaagaccttactaacagctgtgaggtgtaacaaaaatcttcagggggatttgagaactcgaatatatttgcacataaaaaacctgttgctgtatctgtgtcattgctttgacttcttcatcattggcttatatatttccgtgcactaacttgacttgccattcttgtggtagcatcttgacaatacttttagaagagacccgaccaactatgagggcgtgtataaaca

SEQ ID NO: 34810 - DNA, 391 bp, Zea mays
  unsure (1)..(391): unsure at all n locations
  Clone ID: MRT4577_13174C.1
gccaactgcgtccagctcccactacttcccnnctcctcggtcaatcggctttcctttccgccttccaccnnntccgcgccgcnncccctggatgcgcggtatctgatcgacccgccgacncnnccagatccnnnctttccttcttccgcnncgtcttccccaggcccaggcccggcccagcnccgtatcccaaacatcncnnctcccaagggcctntcatagggcagtggatagggagccctntnnatgaagctggttagtgctgggagcctttaccttttcaattcttgtgggctactanaagatgggcnncagggcctggctcagcaacaaaggtctgggacaagggactaagcanntagatgaaatagcagggcgccttaccatttct

SEQ ID NO: 34811 - DNA, 564 bp, Zea mays
  Clone ID: MRT4577_131750C.1
ggaagcggggggcatcattatgcgggagggacgtgagtttgggtctacattgcatatcacttctttacgtgcatacatgggacgagaatgttgcccatggccacttaatatgtcttgtttctcttgataataaatatactgtccgatgctagacattgatagaaaaaactgggttctacggagtaaaacctgcctcattacctacaactcaaaaataccggattgagtgtttctgacagaggcaattcaaatatggtttttttccacggcaagactaaacaagcgggctcctggataatgcttttgttcaagccggcgcattatgtgcgcatacctaatgctcaacaataacgcatgtatggtctcataaattggctcatcacaacatgaactttaagtgcctccgagaggaatatacagggtcatattataactggggtcacttgtgcttaaattttgaattacttctgcgagcttgtctaatacacttaatactatcccaaaggaagatactacgggagaggcgcacacacgatccaatgtgacaacttcaagaacaacacg

SEQ ID NO: 34812 - DNA, 1148 bp, Zea mays
  Clone ID: MRT4577_131751C.1
gggaacaatctccttctgctcctgctcctgctcccgcgtcaggtggttgtattgcattgcatatatacacacacgcggtgccagtgggaccgggagactctgccctgaccacagcaaccaacctcctctttcctttccatccatcggaccatcgatcacaattcacacagccctagcccctaggtagtggcatcatggcggtgaaggactgcggcgggcacaagggctgcgagtgcgagcgggagcggctgtaccggcggtgctgcgcggcggtcgtggctctgatcctcctggtcctcttcatcgtgctcgtcgtgtggctggtgctgcgcccccacaagccccggttctacctgcaggacctgtcggtgctgtgcctgaacgtgacgccgccggcgtccacgtacctgttcacgacgatgcaggcgacggtggcggcgcgcaacccgaacgagcgcgtgggcgtgtactacgaccaggcggacgcgtacgcggagtacaagggcgtggcgatcacggtgccgacgcggctgcccgtgcagtaccaggggccccgggacgcgtccgtgtggtccccgttcctgcgcgccccggacggcggcgtgcagctcccgccgcagctggccgtggcgctggcgcaggacgagacggcgggctacgtgctcgtcgacgtccgcgtcgacggctgggtccgctggaaggtcggcaccagctggatctcgggacactaccacctccgcgtcaactgccccgcgctgctcaccgtcaacgacggcaggggcagctacggcgccaacaccggcggcggcaccggatacttccgcttccagcaggcagcggcctgcgccgtagacgtctagcagtgctctctctctctctctctctgtaccagctagctgtgtttgccaattcgtcgatcgaatcaaaggacgatgcttccttcgtcggtgttcatcactcacgcactagctatcttctttctgcgactgacgacttttcgtccggttggttggttggttgattgattgatatcgctactatatcagctagcttttcgatcgatcgattcgtgtaaaagcaaagcaaagcaaaggaaaggaaatgaaaaaggctatcttttttttgtttaaaaaaaatgtggacgattg

SEQ ID NO: 34813 - DNA, 162 bp, Zea mays
  Clone ID: MRT4577_131752C.1
ctcacacctgccgggctctgcttagctccattcgagctgcaatcatagtcgtgaccagagcgctatacgtagctacagtgctgtgaaaatgccgaccattagtatcgcctggggagccactaggaggtgtacaaacctggagcactcaatgaggcagccgcg

SEQ ID NO: 34814 - DNA, 1171 bp, Zea mays
  Clone ID: MRT4577_131753C.1
cattgggaccctcgagtcgggccgggtccacgacgctggcatcgatcactttttaaccactcccacacccacactcgatgggccgctcctgctcctgctcccgctcccgcgtcaggtggttgcattgcatatatacacacacgcggtgggagtgggagggggagactctgccctgaccacaagaaccaaactcctctttcctttcctttccatccatcggaccatcgatcacaattttcatggcggtcaaggactgcggcgggcacaagggctgcgagtgcgagcgggagcggctgtaccggcggtgctgcgcggcggtcgtggctctgatcctcctggtcctcttcatcgttctggtggtgtggctggtgctgcgcccccacaagccccggttctacctgcaggacctgtcggtgctgtgcctgaacgtgacgccgccggcgtccacgtacctgttcacgacgatgcaggcgacggtggcggcgcgcaacccgaacgagcgcgtgggcgtgtactacgaccaggcggacgcgtacgcggagtacaagggcgtggcgatcacggtgccgacgcggctgcccgtgcagtaccaggggccccgggacgcgtccgtgtggtccccgttcctgcgcgccccggacggcggggtgcagctcccgccgcagctggccgtggcgctggcgcaggacgagacggcgggatacgtgctcgtcgacgtccgcgtcgacggctgggtccgctggaaggtcggcaccagctggatctcgggtcactaccacctccgcgtcaactgccccgcgctgctcaccgtcaacgacggcaggggcagctacggcgccaacaccggcggcggcaccggatacttccgcttccagcaggcagcggcctgcgccgtaaacgtctagcagtgctctctctctctctgtaccagctagctgtgtttgccaattcgtcgatcgaatcaaaggacgatgcttccttcgtcggtgttcatcactcacgccctagcagggtagcagctattttctttttgcggctgacgccttttcgtccggttggttggttggttgattgattgaaatccctcctaaatcagctagcttttcgatcgatcgattcgtgtaaaagccaagccaagcaaaggaaaggaaatgaaaaaggcttttttttt

SEQ ID NO: 34815 - DNA, 745 bp, Zea mays
  Clone ID: MRT4577_131754C.1
agagactaagcacccagggtacaaggcactaccaaatgtgtccgaatcttgttcgctgagggctcccggaaagggcaattatgatcatagatctcagatcgatatgatagctcagtatgacagaaggattatattaaaaagagacyggagacaaatgagaattttgtggttaatggcttacatgctgctaagaagcctaaattgttgaaccaagcaccagayatttcactggaagctcttaaaccaattggtccaatggcbtctcttgctgcatcacaaatgagcaacatggcaaatcctacgagggttataaaaatcagcacycgttgaagaaaaagtaaaggactcaagatgccagctggtcattcaggtcctggaagtccatggtcaagttttgaggatcaggctcttgtkgtcyttgtccatgakatgggtgaaaactgggaattggttagcgatgcycttaacagcatcatccaattgaagtwcatatacagacggcctaatgagtttaaggaacgccataaacttctcacggataaaagttgttgcgacggtgctgacascgcttgatgactcacgctcatctcaacactatccttctkcattccthggkattccaaagggtagttcaaggcaactktytyagcccytycaaggaccgtttgaggaagggctctcaagayacactttgagaaatwawattgcttggcmaaaattgcatcaactcgtagaaaggtgaaac

SEQ ID NO: 34816 - DNA, 384 bp, Zea mays
  Clone ID: MRT4577_131755C.1
cctctctcctcagcgcttcttctttcttggtttgatcctgactgctgtcatggcgtgccctctggagaaggcctggatgtgatggtgtccaccttccacaagtactcgggcaaagagggtgacaagttcaagctcaacaagtcagaactaaaggagctgctgacccgggagctgcccagcttcttggggaaaaggacagatgaagctgctttccagaagctgatgagcaacttggacagcaacagggacaacgaggtggacttccaagagtactgtgtcttcctgtcctgcatcgccatgatgtgtaacgaattcttagaaggcttcccagataagcagcccaggaagaaatgaaaactcctctgatgtggttggggggtctgc

SEQ ID NO: 34817 - DNA, 496 bp, Zea mays
  Clone ID: MRT4577_131756C.1
tcgagcggccgcccgggcaggtacaagctttttttttttttttttttttttgtttttttttttttttttttttttttttttttttttttttttttttttttttttttttttttttttttttttaaggaaaaaaaaaccttataaacaaaagccaaaagaagggggaaaagagaccaacccccgggccccacaaagggcgaaggccaaaaccccggggggcgggaacaagggatccgggcccggtaccaaggtcggcgttaacagggccaaaaatgtttcctgggggaaagtggaattcgctccccgttccaaacaacaaacaaaccgaaagcaaaaaaataaaaacctggggcccctaatgagtaaacaaacaaacaaaaaaagggaagggccaacagcccactttccaattcgaaaaacggaaaggccagcggcaaaaataaataagccaactcccaaaaagaagagagaagcgcatggggaacaggtccctttt

SEQ ID NO: 34818 - DNA, 116 bp, Zea mays
  Clone ID: MRT4577_131757C.1
ggccgggccgtgctttcttagcagtgggtcggcttctcctacccctccggctcggtttcggaatcgtgagggtctccggggatcgggtacgcgggagagcgaatcgagatgcccgc

SEQ ID NO: 34819 - DNA, 365 bp, Zea mays
  Clone ID: MRT4577_131758C.1
cagaaaaaaggccccggataaacccccgaaaatcgggaatttgctaaaaaaaacccaatggtggaaaggcccacccgaaaggggaacaaacggggggcatgtttgggccaattccggtttttttaagctggaccctaaaaattaacccattttcaaaaggacccgtaacaaaaaaaaacccaggggggggaaaattttatgcaaaccctccaaacggggaatttttgggtcgaattcaccacaaaggtttagttttctgaaaccaaaacccaaagcttgttttttgttcccaaaaaatggggggtaaaccccccccctgggggcccacccggcccggcaaaaaggggtttaaatgcccccggggg

SEQ ID NO: 34820 - DNA, 137 bp, Zea mays
  unsure (1)..(137): unsure at all n locations
  Clone ID: MRT4577_131759C.1
agcnttacaagttgctgcaaagattatttttatggaactttgttttcagtcttcgaatcacagtatcacactttccatttgtgatttaaccttaaatgtattatatatttttttgcagtcctttgcagagtgttgtc

SEQ ID NO: 34821 - DNA, 475 bp, Zea mays
  Clone ID: MRT4577_13175C.1
ttttggtgtggtttttttattgttttttgtctttcataatttttttcttgttttttttcttttttaaaaagaactacaaacgggattcaactgcaatcagggtccaaaacacaaaaatccgtccagatacacacaggggaagcaggggggttccacggcccaatggaaataaggggggcagcagagggccccaaacgttcaacaacaacagataggacgggttcttcacgggaagaaagaaacaagagctttattggactgccttactaaaaaggaacccacggtttcccccttccaagggggggaacgataccattaccgcagggttaaccctattggccattaaaaccttggccaaccccccagagttgaactggccttcgccaaaacaggggccctccggaaaaatttggccacccccttggcgggcagcttttcccctaagggggaaaaaaccgggggggacccccctggg

SEQ ID NO: 34822 - DNA, 156 bp, Zea mays
  unsure (1)..(156): unsure at all n locations
  Clone ID: MRT4577_131760C.1
ctttttattttttttatcatccaatcggggcaggtccgttagctcagagcaaggttgtcttcttttggctaccaaaattntttgttgcgtacgtcgtatatatacaagataaagaagaagtgtaatatgtgaaacccacgcacgcatgcagcatgc

SEQ ID NO: 34823 - DNA, 170 bp, Zea mays
  Clone ID: MRT4577_131761C.1
tgtccaacactatggtgaccctctcctacacctcttctccgaacgggacgagcacgtcgacgacatcgtctgccattcagaaagaaatgctgtgaccttgtccaagacatcggcgaaagacatctactctgatgtggtgaggtagtctgcgctacagatccgacaggatg

SEQ ID NO: 34824 - DNA, 438 bp, Zea mays
  unsure (1)..(438): unsure at all n locations
  Clone ID: MRT4577_131762C.1
gcaggatttgactgtgactataatttgtacccagataaagatgcccagtatcacttcttcaggaattatctgcaccctgatagacctagtgaggtatgtgaaacaaaaccaattgaaatctattcttggaattcaagttctttctgaagtaaatgaagctttctgttagtacctactctatgtaatatatatttgacgctatgagtagttccatctttgcttgttttttatgaagttagtaatacctccatatgtgccacatgtgtttgacattttgagcgttgttaagctttttttctgaacaaacataggaggtctgcgtgccatttcattaacgccccgtttggatcactggaattgaattccattctaataataataatttaagcatatatcaattaagctaattcattnttatacaaaatatatttgtatact

SEQ ID NO: 34825 - DNA, 526 bp, Zea mays
  Clone ID: MRT4577_131763C.1
cctcgagccggccgggaaatttgattatgaccctacacctgcctgttatgctcctaggtcgtaaacccaacacgccgtctctcccctcgacgggcttctccgctccgcgcggacgctatgaccgtgacgctgaacacgaacctacgcgacatcaagtgtaaggggatctgtgagcagccgccgggcacgtggtacaacttcctggagctctgcgtcagaggctactacgacaggaccgatttgcaccgcaacatcaaggtacttacatggtccatggcggcgaccccaccggcaccggaaagggagattcgaccatctggtacggcaaggtcgcggacgagttgagggagtcgatcaagcacagacgcgcgcggcatcatgacgatggccaacagagggaccaacaccaacggcagccaggtcttcatcacctacgccaagtaatcgcacctcgacgaacactacaccgtgttcgccaaggacatccgcggcttcgaggatgctgtgcctcatggagaaggagcag

SEQ ID NO: 34826 - DNA, 448 bp, Zea mays
  Clone ID: MRT4577_131764C.1
tctttacattctctattctctataccacaacaaactactccataatgcattcttcccaccttctagaggtccaaatataaaaagattcacattacccctcttactacaaagctcctaaagattatgcaaaatttcaataatacaaattcatttattttccccccctcaattctatgatttctttaaatttttacctaaataattattatttttttttactaaaacaatcttttatttatcaaaaattcctttccatttgatcattatctaaatatttcatcaattttttctccttaaataaaatttaaatattttctctcatctcttttatttacacttatttctttataaatatactatttttattcaatttttcttatttttaacacctattttcactattatatttttcttataaaatacattttaatctatatctctacttatc

SEQ ID NO: 34827 - DNA, 222 bp, Zea mays
  Clone ID: MRT4577_131765C.1
gccttctgctatacaggtgcgcccgcccttatttttttttttcgcctggcaggtatcgataactaatggttcgtgggctcttagcacttaatgattctatatatagtactcaaaactatgcttggtgtgtggtgctgtccgtgagaaccatggttcagctcttgtgcgcactagctgaaccatattctcagcagtaacctaatgtttgttcgctggaccgaa

SEQ ID NO: 34828 - DNA, 829 bp, Zea mays
  unsure (1)..(829): unsure at all n locations
  Clone ID: MRT4577_131766C.1
ccggccgggaaagcgcggcgcaggtcgcgtagctgcgggagtcgctcttcccgcgggagcgggagctgaagtaagcaaggaggtgaattctcgccaaatcccgttcatctggtcactatctgcttgcgtcgtgtctagggagggatggctaagtttgcagacgtcctctgtgcagttacactacttgtgttgctcccctgctcggatgttgcattggggcagactactgacccttccgaggtcaatgggctcagggctatcaagggacgattagttgatcctatgcaaaaccctatgaattggaataggggagatccgtgcaggtcaaattggacaggagtcttctgccacaaagtgaatgatgatacatttcttcatgtgacagaattgcagttatttaagaggaatctctcaggaactctggcaccagaggtcagccttttatctcatctgaaaacactggattttatgtggaacaacttaactggtagcatcccaaaggaaataggcaacatcactacgctcaaacttatacttttgaatggcaatcaactctctggtattttaccttatgagatcggtaaccttcaaagtttaaacagattacaggttgaccaaaaccaattgtccggccccatacctaaatcattttccaatttaagaagtgtgaaacgtcttcatatgaacaataattcgttaagtggggccatcccgtctgaactttccacattgcctcttcttctcacctgcttgntgacaataacacctatctggacctctccctccagaatttgctgaagcgcctgccatgaaaatatttcaggctgat

SEQ ID NO: 34829 - DNA, 202 bp, Zea mays
  Clone ID: MRT4577_131767C.1
ctacttgatcaatatattgacccatggtcccttctaaacactactaaatacatctcctgcacttcaatactaatacctatggccaaggcatacgcaatcaacttttttaatgccaaaaaattacttgcccttgactaattaaacacgtaaacacccagcctgttaatgctaacatgctcagcgcgttcgtacggaaggttct

SEQ ID NO: 34830 - DNA, 352 bp, Zea mays
  Clone ID: MRT4577_131769C.1
ctgttctagaataccatccacatccaggccgaccctgagggatgtgactccgaccgtctgcgctcacagttctttgtgatcctttttcacgagggagagagtagagggaagggaaaaggtcacttttttttctgtaggaggaatccaatcgccatttgcgagggcacatagctgctttaccatatccgggcccacgagaacctgtcttttcactctcgcatccgctgcttcctcataaagaccctctacgaatcctagccagcatctggttactctggtcccccactttgagctggatccaagaaccccttatgcggtttattggcgctcgcctgttgacctggatagtttt

SEQ ID NO: 34831 - DNA, 290 bp, Zea mays
  Clone ID: MRT4577_13176C.1
gcggggggaggcatcgtcctctccgtgctttctcagaggtgggttggcttctcctggcgcaccggttcgtgttcaggttctggttcctgggcgagagggaagagatggcggcatgcgacgtttagtaccgttgctctcttggcggcctcgtctgggccaccgacgaccactcgctcaacaactccttcagcacctacggcgaggtcctcgagtcgaagatcatcctgcatcgggagacgcagaggtcccgcggctactgcttacgcaccttctccacagacgacgcgatg

SEQ ID NO: 34832 - DNA, 732 bp, Zea mays
  unsure (1)..(732): unsure at all n locations
  Clone ID: MRT4577_131770C.1
ccctcggccgccggaggggagcccgccaaagcacaaagccattggcgactgcgatcgtcactcgaaagcggctcgccgtgtgccgtccccggcggcccactccaaagccccccaatcttgtcgctttttgcgcgccgtcgcccatctatcgtgtccgccatcccaatcgcctccggcaaaaaccctccgtttccgccgcgtccccctcgctgtcccggctcaccggacaccggtcgagtgttggtgctcgctctcgcggctcccctctttcctgagcctggaagggccgatgcaggccgcgcccgggagcgtctcttgggccgcctcgcagccgtccgtcctcgaccggtgcggcggcggtgcaccgtccgcttcactcaagtggagagctggcggcatcggaggaggggaatgcagggtccggggccgggacgtcgtcgtgccgcgctcctgcgcgcgcgcgcaggagaagcgcctgccgcgggtgcggaaatccaaggaggagaggagggagatgngtggagtccttcatcaaaagctaccgagtttcaaatgaaggaaaattcccatcaattaatctgacacataaggaagttggaggatcatattatatagttcgtgaaatcatgagggatatcatccaagagaatagagtccttggtcctggtggattgtatgctatgacacttagttttgaagattgcgctgattcttgaaagtcatccatgaagc

SEQ ID NO: 34833 - DNA, 480 bp, Zea mays
  Clone ID: MRT4577_131771C.1
gtgttcatacctaataatgattgctacaaaatcgcaagcccactcaacaaatttgcggggctgaatttagaagcacatgctgagttcgtcggaattgctgacgaaaatattaactcgacaatagggagatgcctgaaaagccagctggaaggcggaaagtcaaaacagggcccagattaggtttctgctgaaaaaaaaacacatattacaacgagggtcacgtgggagcaccaggggctaatagaaggggtcttcgagaaaaccgcaggctataaacaggagttgtttttgtggggagagctttaaaaaggctcagtcggttaactaagccgccatgggaatcctctgccgtcaagaggtctgtgctagaagcgacataccatagctttacaatacagtcaggcgatccctatgcaagcaaagcttctttacagccgaaagcaagtgtggacacacaagagctgtgtgctcattatggtg

SEQ ID NO: 34834 - DNA, 327 bp, Zea mays
  Clone ID: MRT4577_131772C.1
ttcttttatttatatacatggtcttaaactgaggggggataatttatgggtaggggaggccatttcttctaaaaaaatatttaagccatcaaatctgccttgttaatatgttaatcatactcgctttaaatatttccttcatttaaacttaactaattttcattattattttttgtatatctattactatgaatatgtttatatcatcataattttttatacattatttttatatcaatttaatttattataattaacttcttttttgttattatattttagttataatatttatatttatctaatataatataaatttatattatt

SEQ ID NO: 34835 - DNA, 728 bp, Zea mays
  unsure (1)..(728): unsure at all n locations
  Clone ID: MRT4577_131773C.1
attcctctatcctcttttctactcccccctcccgctctccattgcctctctccaccctctcgctctcccaccaggagacgacggatatggccacgcgccgcccgcgcgaccccaccacactacanatcgagtagcttgcaagccgttcttcgacttgtcattccccagacgaacgcagcgcctcgaccaagacatagctaacgagatcgataggattctgactgatgtaatcgcgagagcgatctctaagtacagatagctgccgcgaatgaccagattatgtattgcgtatatgctgaccatccagaggagcactcgctctcgtctgcgtatgtctgtattcatgtacagatagtgctacgagcgttgactagtataatctcgtgtgcatagcttgttactattacccaccgcatgctagcatcacatcacatgtctcatcaatttgagacttgacacaactgatgcttgccaatcatactcgtgctgatacatcctttggatctatgagggctcagagatcgcgtgcatttgtttcatgagtatcagaatattgatatggacactgatgatcacctccctagagactcctaatgcacactatatctttgcgtgcctctataatgtcgcacttattaggactactactgcttaccgagtgcttctggccctcaaggcagacttgaatagctgtactagatattcctcactagctgctgatgcctgct

SEQ ID NO: 34836 - DNA, 199 bp, Zea mays
  Clone ID: MRT4577_131774C.1
ggccgggacaccctcctcttccaatccaccagcaaatccttattcctccgagttcgagcgaccatgttggggtgtggaaagggagggaagggtatgggaaaaggtgtagaaaagaagataagcaaggttgtccgtgacaaaatacagggaattatgaagccaggaaatccggaggacggagaggaggagcgtcgagaag

SEQ ID NO: 34837 - DNA, 541 bp, Zea mays
  unsure (1)..(541): unsure at all n locations
  Clone ID: MRT4577_131775C.1
gggggaaataagctcaggccatagcataactttttgtctactgtccaggcgtccgacaacagtttttggtagaacttgaacaggctcagtgcttgtacaatgtgggttgcccgcacttgggattctaagctcccagagaaaaacttggcatggccctttagaggccacctttactccaacaaaatccttaccttaaaggctgctcgggtacctgatcactttgaccttgcgccccatggactcaggcgggacgttggactagcacttggcgcggacgaccccccatttgtcgggcgggcgggtgaccttgccccatatgcacccgttgcggagctaggtgatatcggcnctagccatttagatgtacgccatgcgctagcgagcgtaccagacgacttcctgcttggagacgaccccctcgatccgaacgagcaacctggactcgtactggttagacttggacctgttgcatacgaggacggcgccccggagggaaacactgacacgatggcccgtgattcccttaaaaccgacgccaggg

SEQ ID NO: 34838 - DNA, 249 bp, Zea mays
  Clone ID: MRT4577_131776C.1
gacatgggcagggcctcgtaagccgccttgaacttccagattttgacctggccccggaaacggaccaacctaacggggtaattataataataaatttggctacctccaagtgaaaagcctaagggtccagaattccaatcctgcctgcagcttatctaatatccctaggttggtgggtcctggctcaaaagagtcagccggttgcctttggtttggtttggtaatggtaatagataaaggtaagcgatt

SEQ ID NO: 34839 - DNA, 596 bp, Zea mays
  Clone ID: MRT4577_131777C.1
ccggggcaacggaaaccctttctaaacaagggggcccaaaaaacaatcaagtttccataaggaaactttggagccaaaaaaacgggaaagggaaaccccccccctccttttttttggggggaccccgggcggggggggggggggaacccctggggggcaaggaaaagttcccaaccccctgaaatcccaactttcctttttttgggggcaagcccggcccccaggggggcggcaacccctggggggaaagggcccgctctaaaatgtcccccccctgggaccccgggggggagggccccaaaaagggctgcaaccaagttcgggggaagttttttccttttaaaagcccccgctttcctttaggggaaaacccccgggtttttggtttcgccggccctggaaaaaacccctgggggggggggggcggctctaaaatgccccccccctttgggccccggggggagggcccccaacagggctgcaaccaggttcgggaaaagttctctccctttaagggctacagtcttccttggggggaaacactccccccggttttgggcttccccacccctggaaaaaacccctggggcccaggg

SEQ ID NO: 34840 - DNA, 253 bp, Zea mays
  Clone ID: MRT4577_131778C.1
ttcagattttcatgataactaaataatccacaaattcataggagtattcaaacttggctcttgcgccgttgcgcgcgcgcctccgtgcttcagaaagcttcgatggagaggtgacgtttggtcgtcggaggctgtcccttgcagtccactcacagtctagctgagcagcaacgacgttattgcggactctaattggctcagacgagaggactctaaccgactcggaagcatgggagagcagatatgcctgctg

SEQ ID NO: 34841 - DNA, 301 bp, Zea mays
  Clone ID: MRT4577_131779C.1
cgaaacttgaaggtttgcccctttgttttacctaaagggtttttttaaaaaaaatttttttaccccgtgtttggaacacataaatttaaaggggttcccatataaatttcacaaaaatcacctcaaatttattgggcataaaaaaccccggacccgggggggaaaatcttgttccaaaaaggccctcagggggtactatatataactcgttttcaaacgggcaaccggtttttgaaaccttcaaaaataccttgtttaacaaggaagcttcccggttttttttttccaaaaatttttttgt

SEQ ID NO: 34842 - DNA, 440 bp, Zea mays
  unsure (1)..(440): unsure at all n locations
  Clone ID: MRT4577_13177C.1
gcctgctaggtttagagcggtggcacggaggagggacgcgagaggcgacgcgtgcggcgagcaagcggcggcgtgcggcgagcaagcgactacgccgtggagtgcgacctacagcctgcagcctccaggagtaaagttcataagaggaagaggaatgggtaaagaaacagaggtcaatgaatatgaactacagagggctgccaacataagagaaaatatgaagaggatgagatctcttaatctccctgtacctagtactatggttaatgaagcaaatggatcacatcgagccagcaagaaacacaagacaaggaaattagcatattcaactaatggtcctactttgcgatcaaggactcanagggatattgttgacgataaccatgaggatagtacttctgaaatagttatggagaatctaaatatcccatcaatgatga

SEQ ID NO: 34843 - DNA, 834 bp, Zea mays
  unsure (1)..(834): unsure at all n locations
  Clone ID: MRT4577_131780C.1
cctcgaggccggccggggnanannttacaaaaaaaagaaaaaaaaaaaaaaaaaaataaaaaaaaaaaaaaaaaaaaaaaaaaaaaaatttcatgaaccgggcaacaactatggagcgagcggacgaggagatgctgtttcgattttccacttcctcttcctctacctctacctcgggttcgccagttttgggctcctgatcgatcgaatcgtcgtcctgggggctcccatacagccggaccgcatggctgggcagcgctgggtcggtaaagtggcggctgctgctgttgtggcgctcttgctcctgtcgaccgctcttcccggaggagcacggagagaacccgatgtcaacaacaatggacggagttttgtttttaactatactctggccaaggctgttgtggaatatgctgcagctgtatatatgacagatctgacggctctatacacatggacatgctcaagatgcaatgacttgactcgaggctttgagatgacttgtataattgttgatgtccagaattgcttgcaggcattcgtcggtgttgatcacaatctcaatgctatcattgtttccattagggggactcaagagaacagcatacagaattggattaaggacctgatatggaagcaggttaaacttaattatccaaacatgcccaatgctaagttttacgtccagccatcacgaatgctgttcgcaaggcaaggaagctacatggacacagtgacgtaattgtaacagggcattcgatgggtggagcactagcttctttttgtgctcttgatcttgcaatgagctttggaagtaacatgttcatctgatgactt

SEQ ID NO: 34844 - DNA, 347 bp, Zea mays
  Clone ID: MRT4577_131781C.1
gtaacggggccgccagtgtgtctggaaattccgcccttaaacgtggacgcgcgggccgaggtacctttcttcatttctggggaagccacaagacacgagcacagaaaaactttatgtatgtgaactatggactgcataaggaaatctgaaaacaggggcaccacgcaatggatgggttgttggaagcaatgctgcccgggttccgacacaagcaagttggactgaatggcagcaatcgctgcagctgccagagggcgccagcgttaggcgcagagtgctgagagaacggttacaatggtgggtgtgccaagaagggagatgggctgagaccagctagctggctgaat

SEQ ID NO: 34845 - DNA, 976 bp, Zea mays
  unsure (1)..(976): unsure at all n locations
  Clone ID: MRT4577_131782C.1
agcggacgaggagatgctgtttcgattttccctttctcttcctctacctctacctcggggtaacttgtagaactcaattttaccctcgcgtcccgtccctttcctttgttcctccagcctagtagtttcttgctctgcagttcgccagttttgggctcctgatcgatcgaatcgtcgtcctggtggctcccatacagccggaccgcatggctgggcagcgctgggtcggtaaagtggcggctgctgctgttgtggcgctcttgctcctgtcgaccgctcttcccggaggagcacggagagaacccgatgtcaacaacaatggacggagttttgtttttaactatactctggccaaggctgttgtggaatatgctgcagctgtatatatgacagatctgacggctctatacacatggacatgctcaagatgcaatgacttgactcgaggctttgagatgacttgtataattgttgatgtccagaattgcttgcaggcattcgtcggtgttgatcacaatctcaatgctatcattgtttgcattagggggactcaagagaacagcatacagaattggattaaggacctgatatggaagcaggttaaacttaattatccaaacatgcccaatgctaaggtccacattgggttttactcttcttacaataatacagttttacgtccagccatcacgaatgctgttcgcaaggcaaggaagctacatggacacagtgacgtaattgtaacagggcattcgatgggtggagcactagcttctttttgtgcccttgatcttgcaatgagctttggaagtaacaatgttcatctgatgacttttgggcaaccacgcgttggcaatgctgcatttgcctcctacttttgcccagtatngtgcatacacagtccgaatgacacatgaaacgtgatattgtacctcatctgccgccttatttcttcttcctcccaaactgacataca

SEQ ID NO: 34846 - DNA, 246 bp, Zea mays
  Clone ID: MRT4577_131783C.1
atttgcacagaggaaaccaaggcctggttatttgtggagcaatactcctcctgtaactcttctgcacgtggtaccactgtagagttcagatatttgaggtctttgctagaacaatacagtcatgttatcagtagctaccaccaatggcagccaagggaactccatggaaacagtcatggcaacaatggagcgtcaaacagctcgcaggacccagactaatgtgacacagatgatggaatctatttt

SEQ ID NO: 34847 - DNA, 325 bp, Zea mays
  unsure (1)..(325): unsure at all n locations
  Clone ID: MRT4577_131784C.1
cgtggtggnacccccgagcgcgcgctgcggctagggctcctagcgtctacctacctgctacgnntgggcgtcctctcaccacgctcgccccttgcacgcgnaggggggnntctatctggnactcgtnncgtcaagaagggggtccgcnacctgnntgtcctaggcactctagctggtagcttgctctagggtaaaagccgtgcactgaacggctatggtagtaagtaacgcgtagggcctggttcagggactgtcaacgaccagggtacattcagctattttntctgtctcaaaggccactacaaggcacttacttanggtacta

SEQ ID NO: 34848 - DNA, 275 bp, Zea mays
  Clone ID: MRT4577_131785C.1
catccttcgaatcccaaggaggaggccagagaggagagagtgagtgggacacttgtgactagactagagagacgttgccgttgctggttgttgttattaacgccgccccctgcattcctatgctcctcgttctcccggggctactccgtccgtaaggcaccgtcgtcgcgtcttggctggaccgacaggccggccgatccgtcttctcctcctacttctactgcaggttggcttcagggacgatagcggcgagggcggctgatgagaacagaaag

SEQ ID NO: 34849 - DNA, 555 bp, Zea mays
  unsure (1)..(555): unsure at all n locations
  Clone ID: MRT4577_131786C.1
cgggggcggggggtactgctacttgggccagttacacctagcaagctcagtaaatttggagtacatgtgctcatccccaagctcatctttccagctagatagtacttcctccagttacaaatacttgaggcttttgccgaaatatggggaggcggggaatttttttattgcgaataggtttcagaatatttaggttgagaacataaaaaccatatgggggcggttttcttgaaagctatcttcataataccatgcgtattagatattataactcatactattataagaaaaaataatgggccgaggtagaacttgaggaacacaaaaagtgaatggggacaaggacttagaccggagggattactgtgttctaatcagtgatttgaagctttttaacccacagagtgacatcttaaatgtggtatctatcatgtgaatgaggnagtaaggtgcacatttgaagaggatggataggtgagccagatgtggcacacaagcattcatattatctcctcttattcataaatgaatccatttgcgaggatgtggtaaaag

SEQ ID NO: 34850 - DNA, 443 bp, Zea mays
  Clone ID: MRT4577_131787C.1
ggcccccaaggaaaagcctccaaatccaaaccggaactacatggggttttaccccaatccattctaacatttaaaaaaaaaataacccccccccagtccaatttgccatggaaaaaaaaaacccccccagtttttaatgttactaaaacaggcgggggccctttgggcgcccttttcaagggcggggaaaaattcgacaattttaaaaaaattttttttgggttaccacattggatcccacaactcccagaaatccaaaaattatagggtggggggctttttttattatccccaacaggggccattaaattccatgaaagggctccaagggatgacctttttttttttccaaagagagggacttaataactgacctcccaagatgggggggaatgggggtgcctccctaaaaaggttggcccttttgggcacccaaattttgg

SEQ ID NO: 34851 - DNA, 289 bp, Zea mays
  Clone ID: MRT4577_131788C.1
catgatttttatagatccatttttcttattcctatcactaaacttctaatgggctctagtacatgtatatacaaatacaaatgttaaaatctgataatacatattaatagttaaatgccgaactttaacacctcacagtgtaactactagtccacctaacctactattcaaatagaaatgcgtgtcttttattcatattattatgccagttgacacaaatcatatattcttaaccggtctattgaatttaactacttttaatataagatagaactgtattatattactt

SEQ ID NO: 34852 - DNA, 510 bp, Zea mays
  unsure (1)..(510): unsure at all n locations
  Clone ID: MRT4577_131789C.1
ggtaccctncgnaggccggcgcggggccaaaatttccaagnccagaccccaaatgcgagccagccacaccgccggcagagaccggccaccgcgacacgacgcagccctggcgcatgcaaacataaccacccgagcccaaggggggcacgtgatagccacacgccgagcccagcgctgacaggccgcgggaggacgacacccgctgcacagggcggggagaaaacaaaggagctgacgggcccgagcgggaaagcctcaccaacaacgaaaggggggactgctcccacggcctcggaagcagcacgagtacaccgaacctacacgcccacggcagtgcacaaggtccgcacggccaccgccacaaaagcggaggggacgggcaagaagaaggcaggggaaccccgcgcgggccacgcctgtgagataggccagaccggtagcgacgccccagggctctactcagcactgctgaggactaaggtaaaaccgggcgaaggaaccacgctagaa

SEQ ID NO: 34853 - DNA, 299 bp, Zea mays
  Clone ID: MRT4577_13178C.1
attcggctcgagcgggctgtactgtgatgtgcaccgacttctgtgctctgagcctaccgtgtctaagctacataaccgtgacttgaaacgtatggatggccacaaacatggcatgtgggctgttatgaatgcttacctccattgccggctgatgatactactctctttcggatccacacatatttgccgcctctgtaaagaccctaattcatgaaacagaatcacggctgtgtcaccctgatataactacaattactatagatcgaatggtccgcgccgttgaaattgctaagaaaaag

SEQ ID NO: 34854 - DNA, 770 bp, Zea mays
  Clone ID: MRT4577_131790C.1
aatacaatcaagagggagaagaaaattttcagtaccatggcgagtggaggttttgtggactggagaggaaacctcgtgaacagacaggtgcatggaggggttaaagcagcatagtttctgcacttcctgacatttgtaacaaacatggtgaatgtcccaattttgctgaatctggtcacctacctccgaggaacaatgcatatgggagtgtcggactctgcaactacagtcactaattttgttggtgctacatccggatttactttgataggagctttcctctcggactcttacatcactcgttccagaactatacttctctttggtccattggagtttctgggctacggattgcttgcattgcaagcgtacattccatcgctccatccaccaatttgcaacattgaagccgaaccaagtaactgcaaagaggctcatggttggaacgctacactgttttacgcagccctgtatatctgtgcgtttggtgaaggttgcatccgtgcttgcttgccatctctcggagcagaccagtttgaccatgaagatccctctgagtcccaccaacagtccagcttcttcaactggttcacctttgggatctcctttggaggttttgtggggctgattttcatcgtgtggcttgagaactacaaggggtgggacattggactcggactgtctgctatcctaattctgcttgggttgcttgtgtttgcggctggcctccctttttaccgcaacaagtacctgaaggaagccctctaact

SEQ ID NO: 34855 - DNA, 2448 bp, Zea mays
  unsure (1)..(2448): unsure at all n locations
  Clone ID: MRT4577_131791C.1
cgagagagttgtgactcccccagcggcggcctgcgaccacccgttccccagtcgtctcttctctccagaccgcatttgcgcccgtcccgtcccgtcccctctccctcggcgaggtccgagagcagagctgcctcgggagggtcgtagtccagtccacccgtccgctgcggcggcggttacgaggcggggaattccggcgcgggttgccgcgatccccgcagtgatgtgcggatcgggtcatgggtgtgacccagccgggaagtagtagaggctgctggagggctagggccgggactgggagctgcggccacgacgatgtacgtcgcccgggagtctaccaaggtctcgattcgctgcgctcgtccccggatgcttgctgggtatcgctcgcggagtttttctgatcagtgtctgcctctgcacagctgtggaggaggggcattgggctcgagccggccggaggagcccggcagatcgcccgcccagtccaccggctcctgcagtcctgctcctcccctaccctcggaatcaacgcgagagcaaccgcccctatcgaactggccggctgactaggagcgagcccactgcttttttacgaaaacgcccacacccccggctccttttctcccgaacggccgaacccgaacccaccctcactctccgattcaaaccgtcgccgccgtcgccgagagagttgtgactcccccagcggcggcctgcgaccacccgttccccagtcgtctcttctctccagaccgcatttgcgcccgtcccgtcccctcccctctccctcggcgaggtccgagagcagagctgcctcgggagggtcgtagtccagtccacccgtccgctgcggcggcggttacgaggcggggaattccggcgcgggttgccgcgatccccgcagtgatgtgcggatcgggtcatgggtgtgacccagccgggaagtagtggaggctgctggaggactagggccgggacctgcggccacgacgatgtacgtcgcccgggagtctaccaagctgtggaggagggtgtgcgcggagacgacagcggagctgcagcttctgttcgagaagtggcaattgctccttgcagggttggtgtttcagtacatccatggattggctgctcgaggagtgcattacttgcatcggcccggaccactgctccaggacttgggatttatggcccttccagagcttggccaagagaaaggttatcttagtgagagcttattcactttcatcttcatttccttttttctgtggagttttcacccttttgtttatcacagcaaacgcttttacactgttctactatggcgcagggtgctggcatttctagttgcttcacagtttttaaggattatgacattctattccactcaacttcctggtcccaattatcactgtcgtgagggctcaaaactggccactctcccaccaccaaataatgcacttgaagtgctcctgattaactttcctcgtggagtgctttttggttgtggcgatctgatattttcatctcacatgatcttcaccctagttttcgtgcgcacgtaccataaatatggctcaaacagattaattaagctcctttcttggctgatggctataattcagagtcttcttataattgcttctcgcaagcactacactgtggatgttgttgttgcttggtacactgttaatttggttgtgttctttgttgataagaagctgcctgaaatgccagatcgtacaaatggattatctttgcttccagtaagcacaaaggataaagacgggaggatgaaggaagaactccataagcttgagaaggacgggaggatgatggatgagttccataaattattaaatggaaacactgtcgatgctacagattggcgacaacgagtgcagatgaatggaaagcatggagaagacacgaaccacactgtctctgatgccacccctactggaacatgatcagtagcttttctttgttatatcgtttttaacatccacaggggagtctgcgatgaaaaaggaaattgcgtgttgtgcctctgtatctgaaaggcttctcaggtacccgcaaggctgcaacatcatatcagaatgttttgttgtgctctccatggcacgatgacaggaaaaaacgaggtgttgaagtagtggtagaaactaaatcaggatctcttcgcttttctaagaggccgcagctacagttttgcatccttcagacatttcaaaaacgacggtactagagagaaatttatgtttgatgtaaatgttgattagattcagctagtcctcactacaaaaaaaaaatccatttgtgccaatgagtaatgactaacttatgctgattggtaatttaacgtgagcagctgtaatgatcgcttttgttaccactttgaaggtctttttagaattaaggaattttacgagactnggtttattt

SEQ ID NO: 34856 - DNA, 251 bp, Zea mays
  unsure (1)..(251): unsure at all n locations
  Clone ID: MRT4577_131792C.1
aggcagactaattgttcccttaggtgggggttgtgaccctcgttcccagtcccatgtccctgtgggtggcagtgactgccctacctcctgtcatggtggtncaccctgtccagaggctccctccactcctcttgcaggatccctagagcagctcagccctgtcggtgttgtgattgtgcttaagtcttaaggtctcacctcatagtgcccccataagctgcccctctctgtgtggctcctgcccaggcgtg

SEQ ID NO: 34857 - DNA, 738 bp, Zea mays
  Clone ID: MRT4577_131793C.1
gcacgaggaagcttctccgttcgcacgcagacgcagcgactcgcaggcagatagatgcggccaggccaggcgcccggcacagctggagcgctttgctgcgcctgcacggctcggctcggctggccctggcctgcctctgcttctgcctgcctggcacaccactgccgctcgcctgctccagcgcagcggcagggcacgtgcgcgcgccagccagcccggcgcgatccgtctaatcgccgcgattgggagggacctgctctggctgtggctggaatccgagccggtgggcgatggcgcacaacttgcactgcagtactagtacgagccacgtgggtcccgtcccgcccggccccattagctgtgcccagcctggacggagtacggacggacaccaggagtccaggacatggacactcgcactccgctccgtcctctctcgcgtaacagcgcacgcctctcatccttcgctgcctcgtgggggccacaggcgggtgctctggtctctgtgggcgacgccgagctggctgaccggaccggattagttaacggcagccggggaatggaattaacgcggcgtgtttttataattgaggtggcggataccatacgtgcaggcccgccgtggacggagctgcggctgctggacagcacagcgtcggcctttttctttttctctcggtactagtacaaagtacaaagataaaaatacatttgttttcgagatcaaaaaaaaaaaaa

SEQ ID NO: 34858 - DNA, 412 bp, Zea mays
  unsure (1)..(412): unsure at all n locations
  Clone ID: MRT4577_131794C.1
gagaacaccaactgtgacgacccggagctcaaggagaagctcaccagactctgcaagacgacgaccgtgaggactcggtacgtggtgatgtcggatgagatcctcaagaactacccggagctggcccaggaggggctgccgacgatgaaccagcgtctggacatctcgaacgcggcggtgacgcagatggcgacggaggcgtccctgtcgtgcgtccgctcgtggggcggcgcgctctcgtccattacccacctggtgtacgtctcgtcgagcgaggcgcgcttcccgggcggcgacctgcacctggcgcgcgcgctggggctgagcccggacgtccgccgcgtcatgctggccttcancggctgctcgggcggcgtngcggggctccgcgtggccaagggcctggccgaga

SEQ ID NO: 34859 - DNA, 209 bp, Zea mays
  Clone ID: MRT4577_131795C.1
ttcatgcgtgcgactatgttcaatatgtaccagatgctctcgtcctggctccgtgtagcgtaagatgtgcacaacccaatcgacgagcgaatgaaagacaagtgctgggaggcggctggctgtgactgctggatccaggagcgcgtggaataactgatcggggacaggtagtggacctaacactagctgaaagacccggaccagttgct

SEQ ID NO: 34860 - DNA, 370 bp, Zea mays
  unsure (1)..(370): unsure at all n locations
  Clone ID: MRT4577_131796C.1
gccgctcgagccggcgggcgggcctcctctctctgaccggggactctgtgtggcggagcgaagtgggagcaacgccaagccagccgagcgactcctatcctcctcttccccttccccgcagagtttccccaatcagggcctccccgccggatccggngcgtatgtgtaagagttgaactggctttggtcacttgtggacctccgattgtgtttnttgtttttttttttttttttttcttctttanttttttttctntttttttttttttttttttttttttcctttttttccttntttttttcctttttttcttttcctttttttntcccttttttttttttttttttttttctttcgtttttttcctcc

SEQ ID NO: 34861 - DNA, 288 bp, Zea mays
  Clone ID: MRT4577_131797C.1
atgccatgaagtatagcagtgtatcttcaggactaaaagcttgttgtgaaagatgagggaccttcccaactttcgagaggttggggaagcaaattctaagcctttggtggcaaggctgtctgcaggtttggcctctctgactgttacacgaacaggtcctcctgaccgacttgtagacagtagcaagtgcagcatatactttcttagaagagcctctgcgtcgaccatagcttatgttcgcctgggtgctccagaatacgagaacgcacccgttgacactcaccccct

SEQ ID NO: 34862 - DNA, 650 bp, Zea mays
  unsure (1)..(650): unsure at all n locations
  Clone ID: MRT4577_131798C.1
ctcctgatgtgattattaggcaggggcgagagagtagtcggcagatctaccgcagcaatggcagagacggtcgggtccatcgtcgtcggcgaggtggtgaaccggacctcctccttcattctcatcaagcacagggagcgtctgagcacgcgcgaaggcatcgagcgcctggagatggcgtgcgtaaagatggaggccgcgctggagctgtccagccgccccggctgctggcagcagcaggccatcgccaccaagaccaacgcgtccctgctccgctggcgccgcatgctgcggcgcgccgcggacgagtgcgacgccgcgctgcgccggttgaagctgcgcgagctgcaggaggaggacgcccgggcgaggctggcgcgggcgccgctcccgcgccgcgtcgcgcgcgcgctcctgtgcctcgcgtcggcgctcctgctgctcgcccgcggcggcggcgacgacgagcgctcccgcgcacgctccgncgtncagaggttcgagcggctggccggcggtgccgccgagttcctcatgtgcgcgcagctcggctttgcgccccggaggtgcggcgggngcggcggcggcctgtcgttgggaggcctcgtggtgaacgcgcgagctacgtctacgagaggctgcaaggtggt

SEQ ID NO: 34863 - DNA, 367 bp, Zea mays
  Clone ID: MRT4577_131799C.1
ggcggcgacgacttttcgacgtcgtttctccttcttgaaggtgcggcccagaagacctgcagtttgtgtgttcgttcgtgttgtggaggctcttcgtcgctccgcttggctcaatggtgtccgtgttgtggaggctcttcgtcactccgcttggctcgatggtgtccgggcctttgtcgctttaggcgtctgctcgctcccggagttcgacgttgtggatctttgctcgtggtgaagaatcggagctgcctcgtgtgggtgtgttgaggcttggcaacgatggcgcgccgcggtcttattccttgcgtcggtgtctgaatgatgattctacatccaagttggaactggaaagaagatatgcagagga

SEQ ID NO: 34864 - DNA, 1809 bp, Zea mays
  Clone ID: MRT4577_13179C.1
aaaggagaccggaataatggaggccaaattgtaaaagcaaatgtatgcatcgatatgagctggccgggaggcttccagtttctggacaattcaatccattcacatcacagctagctagctatgtatgaggttacctgtccattcttcaatcctctacgaagtgagtagtccatggaatctgccatagctgcggttgcaggtgagctcgtcagccggttcatctccttcgcgttgaaccgatgctgctcctcaagctacgaaagatcggaggagaagcgggagaggctgcggcacctcctgatgaggtctcacaccgtcgtcgaggaggcagatgcacggcacatcaccaactccgggatgctgacgcagctgaaggtgctgtcggaggccatgtaccagggctaccatgcgctggacaccctgagattccagctcgacgacgaggttagcgacgacgactcaccagcctgctcctcttccgccactcgacgtctcaaacgtcgccgcgcagttcttgctccggcggcgaaaggggagggcaaggcacaggccgcactggagaacctggaaacagccatggcgaacagcgcagagttcgtcgcgcttctgtgcgggtgtgagcgcctgtcccgtcggccctacgacgcgtacctctacctcgggagtatcatgtttggccgacacgccgagaagcaaaggctcctcaacttcttgctgcagcagcagccaggcgacgacggggcacccgcctcccgtcctcccaatcgtcggcgctcttgcggccgggaagaaaactctggtcgcccacgtgtgcgccgacgacagggtgcgctcgaaattcgcttcggtgctccatctgagcggagacgacgacttcctcctgaacaccgtccaccatgagaaggccatgctgctgggggtatcgtcactcgtagttgtcgagcttgtctcggacgtaggcgacgaggaatgggacgcgttctactcgttcgtggccagagcggctggtgcaggaagcaaggtgatcgtcatagccaagcatgcaagatcagtagcaaggtttggtgggtcagcaagaccaccaatctttctcggcgctctgtcgtacgaggagttctggtacctgttcaagaacctggcgttccaagccgcggacccgggcgagcatccaaggctagtgcacatagcagaggggtttgctaaggaactgcaccagggtggatcgcttgtcgcagcgaacgcgttggctgatgtgctgagaagaaacctgaacgctcaggtctggctgtcgatactgaacaggtgcagaagagtggtcgagaagaacctctgcgcctacgggcagcaaccgaagctgctcctggagcaaggccgtgaggtggacataacggagttcgtcgttccgagccctgctggtattggtcaccttcgcatgataccttgtactagtagaggtagtagcaaggcttactctcgagttgtcaatgatctaccaaaggtggcgtttggagagctactgttagatccttcggttaggcccaaaggagaatttagtctgctgacgtggaaatcaaggttacccccttatacttcattcaccaacttcgttccaaattgcaccgcagacatgcctcaaggacatagcttgtcaggcaggaagcgccaagcagtgcctttctgataacacaatgtatttacatgtcgggtgtactgttttcagacatctagctacagtgattattgaacagtttacagtttactgctggaatgttgtttacaaaaccgaaaaaaaaaaaaaaaaaagcggcc

SEQ ID NO: 34865 - DNA, 189 bp, Zea mays
  Clone ID: MRT4577_1317C.1
ccgaaatagaacacgtgggcggacgcgtgggcgggttggttttttggatcgatggaccagtcacccaatggatttgccgttggaggttttttcatgcacattgatgggcaaaaccgttctcccccttttgtaattgttattggtggagggatttaaggcattttagtattttatgctttgtagattgtt

SEQ ID NO: 34866 - DNA, 777 bp, Zea mays
  Clone ID: MRT4577_131800C.1
gcgctttcgacttcaccatccccatcgagatgcctcacttctcgctcggtcaggacacttcggcggcgtcctcgtctggcgccggggactacagcctcagtttttccatgtcctcgggtttcttgggtgccaatagggggacccttcagtccaattcgcagtcgaacttctcaggcgatcaacaccagcagctccagaggctggacggcccgctcttgtttggccacgcccacgccgcggcggcgatgcatcccgcatccgataaccagctgaccgcatcggcggcgttacagctctgggacgggctccggcactccggcatgaaggagaagggcaggagctgattgcacattcttcaatagaaaaccgaagacgacgtccaattgctgggggccgttccggcaagaattctcttgtggagctgctaccattttgttgcggtgacgacttgtcagatcgccgcacgcaaggctgctatggtcaccatatcaaccatccatcagcgatagctgctgccgttgatcaaacaatcctgggccttcttatttctttttttctttcatttccgtcgttgatgctgttgtacagattttgtgggagatgagagtttaaacaagtcgtcgtaggagtgctcggtaatcgcgaaagttttagtggctccccgcgtctgactgctggtctacattattttgaggttttggatgaacaggtcccctggacaagcgttgtggtccctgatggctcgttctaggtgtgatgggatgaattttcgatagg

SEQ ID NO: 34867 - DNA, 1604 bp, Zea mays
  Clone ID: MRT4577_131801C.1
ggccaactcttccccccgtccgggaaacgggcacgacgcgggcggggcggggagccaaaatggcgctcccgggcccggcggcgacccgcgcggcggtgaggctctgccggatcgcggcgagcgcttcctcgtatttgccgtctgcggcggccgacggaaggagggagctggagctgccgttcgcgctggtggcggagcgggggatggtggtgggcggccaccgcgggatggggatgaacgcggtgggggcgccgcccggggcgcgcttcggggccgccagggagcgggagaacacgctgctctccttcggccgagccgccgcacatgctgccgtcgccttcgtcgagttcgacgtccaggtcacaaaagatggctgcccaataattttccatgacgatttcatcctaacacaagggaccggggctgtatatgaaaggcgtgttactgatcttctcttggaagatttcctctcttatgggccacaaaaagaatcttgcaaggtctccaagccattacttagacgggcaggagatggtagagtccttaattggactacagaagatgacgattccctttgcacattgcaagaggcctttcaacgtgtcagtcctcgcctgggatttaacattgagctgaagtttgatgacagcattatgtatcacaggaaagaccttcagtgtgctcttaaagctgtattgcaagttgtttttgagcatgctaggaacagaccagtctttttttcatcgttccatcctgatgcagcacagatgatgcgggaactccagagcttgtatcctgtacttttcctaacagaaggagggacatcgaaacaccacgatccaaggaggaactcgtttgacgacgccgtccgggtatgcctagagtacgatctgcacgggatcgtgtcagaagcgagaggcgttctcaagaacccatccgcggtcgccagagcacaagaatctaacctcgcgcttctcacgtacgggcagctcaacaacgtgtgggaggcagtctacatccaatacctgatgggcgtgcacggcgtcatcgttgaccgggtggaggagatctcggacgccgtggccggttttggtctggggaaaccaggccttggccggggcggtgctggcgtggacggagcgaaaacgcatcaggctcaggccttctcgcagcagcagctggggttcctgctccggcttatccctgaactgattgagcagcggcactgaaaggacggtacaccaccatatgtaacatcccagtttttgaccccctggaagcggatggcaagcattcgtctttggggtcaacccttgtcccgactgactgactgattgataggtccgatttgacagcgtatacttgtgctgcgtgcacacactcttctgtatagtctgaaaactcgcggttccttgttggttcagtacaggtacagccgaccatggaccgtggtcgatctcttgttgtttcaagtaggctcaccagaaaaaggtcagcaatatgtattgttggaaacttgtatgattgtaacgtgtgttgttgacaaccagggatgaaaaccgtaaccgaagtctattgtttccataaaagagaatattcttcgt

SEQ ID NO: 34868 - DNA, 352 bp, Zea mays
  Clone ID: MRT4577_131802C.1
actctttacattgttctggtgccggcttactcctctggatgccggcgtaacagggagctgcgactgcttcttcaacctacggggcccagacgcagtcgaccgatctgcatggcgggacctccacagccgccgacgatctctactaatataccggtgagcccgaggctccatacgcgccgtaccccgcgaccatcggacgacaaactgtcggatgagtacttcgcagcggaagaagaaaaagaacggagctcaccagagattaacacgccagggaaaactgctctccaccggtgacccgcacgagtgcacacctggccgcccccggatgggccaatcggagaccactcccctg

SEQ ID NO: 34869 - DNA, 372 bp, Zea mays
  Clone ID: MRT4577_131803C.1
ggggctgtatatgaaaggcgtgttactgatcttctcttggaagatttcctctcttatgggccacaaaaagaatcttgcaaggtctccaagccattacttagacgggcaggagatggtagagtccttaattggactacagaagatgacgattccctttgcacattgcaagaggcctttcaacgtgtcagtcctcgcctgggatttaacattgagctgaagtttgatgacagcattatgtatcacaggaaagaccttcagtgtgctcttaaagctgtattgcaagtacagtcttttcccctacttcgtatagagctcagtaaagtatcgattgatttgcattcagattcggtctattcacatccatttcagcgc

SEQ ID NO: 34870 - DNA, 667 bp, Zea mays
  Clone ID: MRT4577_131804C.1
ggccaacttttcccccatcaacttaagcttttcagttgtctctagtccgagtcttggcattaggtacttcacttaactttgagaataatcgtcttcgccgttttttctgtattttgcatcaggtacttttcctaacagaaggagggacatcgaaacaccacgatccaaggaggaactcgtttgacgacgccgtccgggtatgcctagagtacgatctgcacgggatcgtgtcagaagcgagaggcgttctcaagaacccatccgcggtcgccagagcacaagaatctaacctcgcgcttctcacgtacgggcagctcaagtaagctaagcagcatatatagcatatatagctaccagttcatggatcgtctcacagccttccctacaaccggatgcgtgtataatctcagcaacgtgtgggaggcagtctacatccaatacctgatgggcgtgcacggcgtcatcgttgaccgggtggaggagatctcggacgccgtggctggttttggtctggggaaaccaggcctcggccggggccggggcggtgctggcgtggacggagcgaaaacgcatcaggctcaggccttctcgcagcagcagctggggttcctgctccggcttatccctgaactgattgagcagcggcactgaaggacggtacaccatc

SEQ ID NO: 34871 - DNA, 545 bp, Zea mays
  unsure (1)..(545): unsure at all n locations
  Clone ID: MRT4577_131805C.1
gcacgctgcccgcagcctgtggagactcggcatcgcagggtcgtacacctcacccgctttcctttgctccacacgcgcgacgcgatttctctctcttttaaattaaattatcttggactgctattggtctggtcggcggctggtggcatagggatggagacggcggcggcgatggtggagggcggggtggggcggttctcgcgggcgccggcgctggccgcggcgctgctggcggagacgtgggcgccgctggccgtggcgctcgcggcgctggccacgctgcccagcctgctgcgccggctgcaggtcatcgtgctgcgcctccgctcctgcgggaaggaggccatccagtcgcacatcgggacctactactactcgtcctgcgacgaggatgacggcgacagcgaccaggacgagagctccgacgacgaggcggatgccggctcctccggcgacgacgaggaggatctggagcgggtngggttctacgagggccccgcagactgcnttctcccatggggaggcgccacggtccggacctggca

SEQ ID NO: 34872 - DNA, 439 bp, Zea mays
  Clone ID: MRT4577_131806C.1
ctcaccttctcatcctcatccctccacaccaaccatcgactgagcaccagtcgtctcactccattccgtgggcgtgctctcatattcaacctactcccccccctcagtgccatcgcctttcccactggaattaccccactccgctgctcactcatttccccctttctcctcacttcaccacattatccactctatccatacctttacccctctcaactgttcgatttgcatcccactcacaacatttattatacagagcgccacactcccattgctcttcaaccaatttaatgccacgacgaagctaatatcactaaatacacatattcaactcattaaagaccatatgaataatattgatccaaaatcacttcattacctacaacctaatatttcaactctatttcaaaaacatggacttaatccacttactccaatt

SEQ ID NO: 34873 - DNA, 629 bp, Zea mays
  Clone ID: MRT4577_131807C.1
ctggttggaagagagagaggatcagatgatgatgagctcaatgaagctgtggtggccaggtctgaaccgaaaaacctagttcaaccaaatgcatcggtacccttgacctcacaaggctttaaccaattattggatcaacccgggccttctgatccttctgttgtatacaaggacagtatctgcaaccgatgtgggaaagtagcaggagctggtagcgttctcaaatgttacaggtgcatgctaccttgccacatttcatgcattgaggctactggttcacccatttcaactggaaggtggtgttgtaaaaactgcagcgctggcactaaggaaccagttgaaggagacatggtcttagcccatggcaatccaaattgcttgcatgaaagttgtgtcgtctgcgacagacttgcggcctgcaggtctccaaaatgtgataactcaagagcattggttatttccagcgtggacccagagattgatacatgttactcatgcaagatatgtggaggcaccgaagaggatgagaagaggttcttgatatgcggcaacgtcctctgccgatacatgtactaccacattgggtgcctcaagtccatgcagatctctaccagtgtagagaggggcag

SEQ ID NO: 34874 - DNA, 445 bp, Zea mays
  Clone ID: MRT4577_131808C.1
gatgagcaatggatgcaactagtcaatatgtggtctaccccaaagcacaaggaaaaatgtgtgaacaacaaagtgatccgtggaaaagttcggttccagcaaaagacaggatctcggagttacattgcacatatgcatgccgtgaagcaagccaaatatggagatgcaccaccaagtgcgattgatctttttaaagagtgccattgtagtaggaagactggttttgctgagcctgtaaaggaagcaattgacacaatggaagcacttgtggctgagcctggagtagaagggaaagaatctaagacccctacagaagcagttgctcaagtgttgtcttcatcaaaatttctttataatattggtcttgtacctgccacaaagaaaagctgcaatggtggtgatcctacacgcgtggcagaacttgaggctgaacttgaatcagaga

SEQ ID NO: 34875 - DNA, 529 bp, Zea mays
  Clone ID: MRT4577_131809C.1
gccggccgggttccgagtgagtgggtgtgaggagagctttgaggggaggggagctagctagctactgcctactggaggagggcttcctccgacgccggacatgggggaggtgaagcacctgtgcctggccaagttcaaggagggcgtcgtggtggacgacgtgctcaagggcatgaccgacctcgccgccgggatggacacggtcaagtctttcgagtggggccaggacgtgctgaaccaggagatgctgacgcagggcttcacgcacgtcttctcgctcaccttcgcctccgccgccgacctcgccgccggccactgtacgcctccccttctcaggtcgcgcagcagatccacgtgtgcctgcggccgcggtgctggtagtagtactagtactgtctattgcctattgcctgttatgtatgttctatctatctatgtccacgtacctacctactattattgtttggttatcttcggaataaattttcggtcacttttatggtaaaaaaaaaaaaaaaaaaggccccta

SEQ ID NO: 34876 - DNA, 646 bp, Zea mays
  Clone ID: MRT4577_13180C.1
tcgcgggtcgatacacgcctctagactacgtcgcggtaccacgaagtggcctagggacgacgataaacccatttggtgcgtaccatgtagtgtcttctgctgcctcttacctgcactcccgggccacggccatgggcgttatgccatttggtcccgggaatggcgtcaaggacgatcatccagcagccgtcacgtcgctcgtgagcggcgcgagcggtgacggattgagcgtggacgaggcttcgttcgtggccacgacgagttcggtgacctccatggtcgcggcgaaggaggagacgcggcaagccgttgcggatgatctcaactcttcgagatcttgcccttgcgagtggttcgtctgtgaggatgatcagaacagcacgatatacttcgtggttcagggctcagaatcaattgcttcttggcaggccaaccttttgttcgaacctgtcaaatttgaggaggtggacgtgctcgttcacaggggcatatacgaagccgccaaggggatgtatcaccagatgctaccctacgtgaaggcgcacctgaagagctggggcaaatccgcgcggctgcggttcaccgggcactccctcggcgggagcctggcaccgacagcaacgctgatgctgctggtgcaagggga

SEQ ID NO: 34877 - DNA, 1042 bp, Zea mays
  Clone ID: MRT4577_131810C.1
tttttcacacacacacacacacacaaggggggggggggagcggaattaagccagctcgtggcgcaatccgaccacgcgtctgtgggcgcgtcgtgtttagtttactgttgtgtgcccaagtgatccagtccacaggctcaggctctactgctctaggaggaggaggagtgatgagctctgcagccagtgacccctgtcggcggcggtagcttaaattggccaccatgtcgccacgatccatcggactcctctgcaaataaagccatcggggaagtgactgactgagtcagtgagtgggtgtgaggagagctttgaggggaggggagctagctagctagctagctactggaggagggcttcctccgacgccggacatgggggaggtgaagcacctgtgcctggccaagttcaaggagggcgtcgtggtggacgacgtgctcaagggcatgaccgacctcgccgccgggatggacacggtcaagtctttcgagtggggccaggacgtgctgaaccaggagatgctgacgcagggcttcacgcacgtcttctcgctcaccttcgcctccgccgccgacctcgccgcctacatggcccacgacagccacaccgcattcgccgccaccttcatggccgccatcgacaaggtgctcgtcgtcgacttccccgtcgtcgtcgccaagcctccgccgtcggcatgacccgcttgccgctctcgcatccgccggccactgtacgcctccccttttcaggtctcgcagcagatccacgtgtgcctgcggccgccgtgctggtagtagtactagtactgtctattgcctgttatttatgttctatctatctatctatctatctatctacgtcacgtacgtacctactattattgtttggttatcttcggaataaattttcggtcacttttatggtagcgtatatctagcggctagctgcttgcaatacaccctttccgatgtttatgatggattgtcagattcctaatcgacttttagttttcttgttaagaaaaaaaaaaaaaaaggcccta

SEQ ID NO: 34878 - DNA, 650 bp, Zea mays
  Clone ID: MRT4577_131811C.1
ctggacgcctgcggtaccggtccggaattcccgggtcgacccacgcgtccgaagatggccgactttgaggatcgggtgtcggatgaagagaaggtccgcatagccgctaaattcatcacccatgcacccccaggggagtttaatgaagtattcaatgatgtccggctactgcttaacaatgacaatctcctcagggaaggggcagcacatgcatttgcccagtataacatggatcagttcacacccgtgaagatagaaggctacgatgaccaggtcttaattacagagcatggtgaccttggtaacagcagatttttagatccaagaaaccaaatttcctttaagttcgatcatttacggaaagaagcaagtgacccgcagccagaggatgtggatggaggcttgaagtcttggagggagtcgtgtgacagtgctctgagagcctatgtgaaagatcattattccaacggcttctgtactgtttacgctaaaactatagatgggcaacagaccattattgcatgtattgaaagccaccagtttcaaccaaaaaacttctggaatggtcgctggagatcagagtggaagttcaccatcacaccaccttcagcccaggtgggtggagtactcaagaatcaggttcattatta

SEQ ID NO: 34879 - DNA, 425 bp, Zea mays
  Clone ID: MRT4577_131812C.1
gactctagaggaaacagcgcgtcttcccaacactagcagctacagcaggggcaaagtctttgatacaagccccatccaaccatctatctggggcaaagtaaggtattagacccatttccaatcagggtaattactgaagaagcaaagaacttcctgacatgctgctgaatagggaatttaagcccataccaaggtctatttggatctgttttttccaaccacaaccatttagcttgcagtgcccagctttggaaatacaagttagaaatcccaagtccaccaagatttaatggtcttgtaattatatcccaagagacaatacaacttcctccatttacctcatttcttcctttccaaataaatcatcttcgaatctttttttttttcgaacacgcaggagagctgcgtatcattgtattaagaag

SEQ ID NO: 34880 - DNA, 301 bp, Zea mays
  Clone ID: MRT4577_131813C.1
ttgaggctcaacccgattcgtgcacttaagtcccatttgttctcgagtgcttgggcccgcctcactacctatcagcaagtccaacagatgtgaagcaacaaactatgccattgttagtttcagaaacattttatgctatcgtctacgtgtgattcaaagggcttcataaatatgaattataaaatcatgggatgtcctttcgaaggtataaacaacgaaatatcgtgtgtttcttaggataaactcatttcatgtccatgatcgcgccctattctaacggacttcaagatatttgaaaggg

SEQ ID NO: 34881 - DNA, 738 bp, Zea mays
  Clone ID: MRT4577_131814C.1
cccactcgttcgcggacgcgtgggcattactccaattcacatttcacgtatatgcgtatatgttaagaaaagaatattctctgcaatgatctttgtgaagaatcattagaggaatcttacagatgatagtttattgaatgattgtttggttacttttattgagcatgctattttctccaatgtaagtgaagatgacataattcacctcttcatggccataaagaagcgtaaatcaaaaagccttagagtgttaggctagtatttttctagtatttatataagatcttatctactttgaatgtttatgttgtaagctatgtaatataatttgacgaattgaatgtaatatgagacattttgattattttccgtccatatatcgaattgatgaaaattatatatgtgcgctattgaattatacatggtattgcatgtcatttttttaatcctcgactaccctagattcaagtcctgggtccgccactgatagtggccctagcctctaggcgtcaaaactgaccggcgacaccactggttgagggcatttgccgtgggaacaaaggactgtgtatcgagcaggcataccctgttaaaaatcctggttccactactagtcaggccatggctgcagcagaggcatgggtgcggcaggagaaagttaggaagtttgaggagttcgtggaccagcggttgaaacccgacctcaccaatgccatcgcacagcgtaacaaggtgttt

SEQ ID NO: 34882 - DNA, 308 bp, Zea mays
  Clone ID: MRT4577_131815C.1
gttatgataattatttagtttttttattttattattgtttgaaatcatatgtgcttgtatgttacacgggtccccaacgggtaaaaacagaccaagaagagcgggcacaccctcatcttatccaaaatgaagaggcactcgctgtacacaaaaaaaaggttacataaaaaaaaaaacgttttttgcgcaaaaggcgtactagaaagaccaaggaagggttgaggaaaaccgccggagctaggacctaaaatgaacaatccttacggaccaccccggccctgcagaaaaaaaattgggggcagcctcaa

SEQ ID NO: 34883 - DNA, 300 bp, Zea mays
  Clone ID: MRT4577_131816C.1
gagtacactagtcggcggccgccctctatttggggggtttttttaaattttttttcggttgacaaccagtatgctaaaaaagcgggctacacaaacaggctggttttcggaaggtctttaacaggcacagatattgttaaggtctaaacacggcgtaaacaaagctaacaaaggttccacaagcttattggtattgccaaattacgaacaagaccatctacacggaatatttagttgatcacactgtcacatgctctaatgtgaagtcaaatgactatggtacaaaaactttgctgcgag

SEQ ID NO: 34884 - DNA, 798 bp, Zea mays
  Clone ID: MRT4577_131817C.1
gttattaacataagaaagctggattagagttagatcttgtcaacatacaaggaagcatcgcctatactttcagaagagattactcagttgtgcaacttacacaagatagaatgcaacaacacacaagctcaaatcccatggtcttcagagggaccctgacacttgacgcgagtacatcgagataggctctttatccttttcctcctgcgattctcttacccattttgtggtcatctagccaccaccttccacttcagtccgtggtcatgggctcagaaatacaacagcggaagcgtgctttgcgcacgttgctcaggagctccatctcagcactctcaagcatgcagacaatctcagtaaatggcgggcgaacttcagggttcgcatcccagcagcgagtcataatgtggcttagagaagataggcagtcttgagggatcaccggacgagcacccttatttacaacagcaaaagctgcctgaacggccgtcatgttggtgaaaggaagcatgccggttattagctcccacaagacgatgccaaagctatagacatcaacattatgatcatagggcctgtgctggatcatttccggtgccatccaccggtaggttcgtctctggtgtcatcccttcagttttcacttcgatgcgagcagctccaaagtcagcaatcttaatggacttgtcttgcggtgctcgtcgccggcgcagggtcccaagaatacctgggtgtgccgttggtagcgacggccacccagtcgtcgccatgagagagagagagcaggctcccggccgg

SEQ ID NO: 34885 - DNA, 317 bp, Zea mays
  Clone ID: MRT4577_131818C.1
tcgatctcagcacaccagatatagagggaccgtgggatcatggctctctatagtaccgccaaatttacaggagggttcacgctgatcctacactcgtgctgtataaccatgctgacggcagggtctggcggaggcatgcctggaccacgacacagcctgtggtgacacgctgatgacagaccggttactcagatggcaagcctcgcacaaccggtcatacccgacctggggtgactggacctgtatgttgcaggtgtacccggcgaccattgaggacaccgaggccaccaaccgggcgggcaacctgacgtacacgc

SEQ ID NO: 34886 - DNA, 361 bp, Zea mays
  Clone ID: MRT4577_131819C.1
ggggggctcaactgggagcttatatgaattgccgtagctccacaacatatatatttatatatttataatcacaagctagcatggtccgcgttccgccccgaaaattgggtcctcatacctaaccccggaagatattttatacactccacctctggcgccttcggtctttctgaggcatcacctgagcctggcatcaccttccttgcttcggaatgctggccgggtaaaagaaaaaacgtggagctcttccagtcagttgatcctttttcggtctgaacatttgcaggtgggtttggaaatgtgctgctgatggactcgtcttgttcagcaaaaaccttcttctcaaacaaaatcattatat

SEQ ID NO: 34887 - DNA, 195 bp, Zea mays
  Clone ID: MRT4577_13181C.1
gcgaaaaaaaaataaatctattttaataacaaataaaaaaaaaaaaagagataaatacaaaaatggggctaaggggcaaatacgattttggggagacctaaatatttactaatatatcctaatgaatacaataattattatatggaaaacaacattcagttgccccggccgttaatatataaggggggggcccct

SEQ ID NO: 34888 - DNA, 566 bp, Zea mays
  unsure (1)..(566): unsure at all n locations
  Clone ID: MRT4577_131820C.1
tttttttttttttttttttttagctagctacccagaatgattaaattacgatcagatcaaaattacctctgatctctctatagttcatcatctccatccaccaatccatcgatccaccaccacaccacgccaccattgatcgatagagacagactatattgattcctagctagttaatccgatccggtacaaattaaggaaaggaaaggaagctcctaccactatcgaatttcctctcctcgctcgatcgctcagtgcattccatggctgctctggccgccggcgctgctgaacccgaaccctagcgcggcgtgggcgccggcgccgcccatggacgacgaggacgatggcgacgtcggcccgtggatgtcgacgggcctcacgagcccggcccagacaatgagcggcaggccgcccacggccgagacgctgggcccggctcctgctccggcggccgcgggcgccgggggctggagctcctgcacctggcgcttgaggaacttgatgtancggatggcctggtcgagcatggaggcggtgcccatcttggtgccgtcgggcacgaa

SEQ ID NO: 34889 - DNA, 195 bp, Zea mays
  Clone ID: MRT4577_131821C.1
cggccgggggaatcattctcaccaccgtgctccggctggagcttttccccggctgctgccggcgaccagccacgctacagagcccgcgatgatctacggtttactctttcctctccagtcctctccctcgaatcagtgccctcagattagaccgctcgtgagctcccccgatcaggggcaaaaacgtggagcccc

SEQ ID NO: 34890 - DNA, 668 bp, Zea mays
  Clone ID: MRT4577_131822C.1
cccttctcgagttttttttttttttttttttttttttgagcatcgaaggggctgacgaatcgattcggcagctgccacattgtattcaagcacacaggacatcttattcagaatgtattacaatttatgctctgttagggtgaaggcggcaggcagatcgaaatgtaacaattcttggggtgtaaacaacagaaattgttttcgatttgggtacaaaactgatccaatcaccagctaaatgtgcctcctactacaatgcataaagttttcgtttctgcttcgcactcgaggcacgtgaacagtagcttccacacaatcagtatgttctgttgctgcagcagtttagcatactaccgaggaccctcgttgaacgttaattgctggaacagctttgcttgtttggtgaaatatacacaatgcaaaccagtgggggtgctctaatgtgctaagatcccataccagccacccccttagctttggctgccgcctgctgtgctgccgcggcggcggctgctgctgctgcagcagctgatgcagctggtgatgcgggggaagctggtgcgactgaggccttctgtggtgcttcgatagtatgctcatgttgcggtttgttatgaacttgggctaatatgttctttatctgggctcctgggagggtcttatgctca

SEQ ID NO: 34891 - DNA, 791 bp, Zea mays
  unsure (1)..(791): unsure at all n locations
  Clone ID: MRT4577_131823C.1
ccnggccgggccgggtaccctcaaaaaaaaaaaaaaaaaaaaaaaaaaattaaaaaaaaaaaaaaaaaaactgcatcccatcccacgaaaacaagcagagagagaaccccagggggaaaacgcctcccccccccctgcctccaggccccaaatccggccatccgggtagctccagcccttctccaatggcagtcaaggtctacgtcgttcgttgatgagggcagcaattccaaacgtcattggttggattgcgatctcctttgcaaaaggaacaaaaatggtctacaagcatttggccacactatactttgtttttgtctttgatagctctgaaaatgagcttgccatgctcgacctcgtacaagtgtttgttgaaacattggacagatgcttcaagaatgtatgcgagcttgacatcatatttaacttcaacaagagatggaggagtctggattcgccatcaccagcatcaatggaaggatcaacatggctgtttgggggccactaaacaggaccatcgtcactgctaggggggatgctaccattcgcatatgggactcaaaggttaggataacatggtattatgtccctacaaatagtattgatggccgctataatttggttatctagccctaaaaatgccccatcagtttcttgttgtaatgtgggctatgggcatctgatggtgatacaatttgcctttactgtataatatgcaatgtttttgcactattaaaaattttaattgtttctccataacaatgganaggaggcccaggaggatgaggagc

SEQ ID NO: 34892 - DNA, 279 bp, Zea mays
  Clone ID: MRT4577_131824C.1
attgggaccctcaaggccggccggggcggacgatactcgttagacccacgcagtgtagcttgccttcgccagtgcgacgccgacgaactcagaagccgattgagcaagggctgcgatcacgggagcacgaccacgccgggcgagatttcggtagtgacgactaatgcggctcgcgccaaacggaggaccgacaaagagcggctcaaagacgaatagcacgcggacatcggctagacctcagggaataacgcacagacataactggttcagcatggccgc

SEQ ID NO: 34893 - DNA, 396 bp, Zea mays
  Clone ID: MRT4577_131825C.1
aaatcaaacattacccaaactggcattttgacaatgttagccggggacccccacaatggaaacagtaatctggggccaagccggcccctttgttagctgggaaggggggccacccacaaacccaccagaccagggggggaacccccccccagggggcccaacgaggggcgctttccgtttttgcccgacaaaaggaaaaataaaacatcccgagggggggggaaactgaataattttaggacatggatataggccccttttttttgaccgccacggggccttttgtaacccctccattggtggaggaaacaccgtccattggcttgagggagctctccataactgggaattatattaatcctcctgggtaccctttttggcatcctcggaattgac

SEQ ID NO: 34894 - DNA, 403 bp, Zea mays
  Clone ID: MRT4577_131826C.1
gggccacctctcgcggatctccgaggacggcgccttcccgggcggcatgatgggcgaccgcgcgggccgcggctctgctggcgagagcagcggtgccgccgcggcggcgcgctcgtactcggccggcgggttctccatcgttgggccgtgggaggagtccagggacatcattaccaccctcggcgcatacgaccctcagtttagcggcgccatggcgggtacggcgctagagatggcgggcatggacaggtacgtgcagctgcagcaagaccaggtgccgttcaaagtgcgcgccaagcgcgggtgcgccacgcaccccaggagcatctcctagagggagaggaggactaggatcaacgagaagctcaagaagctccaggacctcgtgcccaacatggacaag

SEQ ID NO: 34895 - DNA, 359 bp, Zea mays
  Clone ID: MRT4577_131827C.1
aaacaaagcgcagttacaggatatttacaagagtgaaagcgggaagaacagcccttccacggaactgaaagcggggagaggggggcggaccctaccgttgcaacgtcggggaggggggggggggggggcacgcaacagaggcaacacacacagcgggcggggccttcttggtttggattccaccgaacccacaaaggggtttttgcgccatggggagcagttggggaacctttattggcagttgcttggccacaaaaaacaagggatactttggaggtcaccttcttgggcacaaaaaaaccaggaatttcttggtcagcccgaggggcggggggggtcaagacaaaaaaacgttaaag

SEQ ID NO: 34896 - DNA, 506 bp, Zea mays
  Clone ID: MRT4577_131828C.1
gttggaacctttgggctgatttatgtgcttgggtgaggaggatagggagttgagtgtaagagtcgaggtcctgttgtgaaattttagattctgtgttgttttccttttcttgtggtgctgcttctgtatgtctcttgacttaagacgcacaagtcggggagaggaaattgtgataaggcgtagtagcctacgattaccattggtgttagcgagaaggccgtttcctaggtatcgaaagtcagcgaccggtatccggaaggagtccccgatcctcctcacagttaattctaggccctcgcggctaacatctggtactccgaagacacccctaatagacacaaagaattcgacgtcgacacgacaacggcggaaggaacactctaaccccgtaacgactcataggccgacttctaggacaccgctacgtccgctacactacggtatacgaaagttgttataacgcgcgaacccatctgctaggaacctaacggcggatcgtagctaac

SEQ ID NO: 34897 - DNA, 527 bp, Zea mays
  Clone ID: MRT4577_131829C.1
cgggccgggactaaaaaaaactaaggagataagtatccgatcatccaagctaagccaaggctataagagaagaagagggagcaagaagcatcgtcagcatgcatggcaggggactaggcaactagtgtggacatcctgatcgccatcatcctgcactccgctgggggtgtgtcctcaagtacggtggcagccacgatgatcggatgctgcctcctcctcagcttgctgatgtacatacgcggcatgatctacgccatgtacgacatcaccaacaacacatagctagccatccttgccaaagacgaaccatgtctgtggatctgaggatgtgcatatgcctgatgccgacttgagccgtatgtgggagcatgaattcatccatagtaactgcaaagctaccgtacccagcccatgcatcaattgctaccatgacgcactatgatagcacataacaatgtaatatacctaattcatcatgtggtgtactccttctcatctcttcagtatgcagtactgtattactttcc

SEQ ID NO: 34898 - DNA, 657 bp, Zea mays
  Clone ID: MRT4577_13182C.1
aaccccggaagggttttccttaaattaaattttcaaaaaaaattgggcctttttgggccacccccccaccgaaaaaaaggggggggaaaccctggggaaaaagggaaaaaacctaaattccccccggggggaaaaaaaaaaaaacccgccccgggggggaaaaaaaaaccaaaagtttttggtttgggaaaaaaaacggggccaaagggggccccccccccggaaaaacccccaaaagggaatcgccaaaaaaccggggggggggcaaccaaaaaaccctccagggaaaccccccttttttggaccggggttttttgggcccgcccccggaatttaaaacccttttttgaaaggggggggctttaaaaacccccgggggggaaggggcccccgggccccccccaaaaaggggccccccccaaaaaacccccggaaaaaaattttggggttaaaacccattcccggggccccaaaaggggataaaaccggccggcttaaaaaaggggccttttttaaaccccccccccccccggggggggaaccaccccacccctccgccaaaaaaaaaacccccccctttttggtaaaaccctatattttttgggggcaggatgggaaaaaccgccccccggggctttcatatttgggggggggggg

SEQ ID NO: 34899 - DNA, 256 bp, Zea mays
  Clone ID: MRT4577_131830C.1
gttgtaatgacaataccaaagttgtagagcactttttaagcttttcagaaaatcctggtttgctatttttggaataatatttggagagttatgattaaaacaagtgactgctgtgctgctgtcctaaaaatctgcatgtgcgcatttgattgtttagttcacccttctcgctaaaaatgtttggtttgctcttaagtaatgtagacttgccatggttaagctagagatggcatgtgtgtcttgttttatatgttcc

SEQ ID NO: 34900 - DNA, 318 bp, Zea mays
  Clone ID: MRT4577_131831C.1
atgtcgtctaaagaggaagaagaagaagagagatgtcaaccaaatgatgaatccatgtctccaagaggttcgatttctcattccgctttgcatgcttccgctaatattgatgacagggagaatgaaatcgaggatgtggaagaagatgaaattcgccatctatgtgctcatcttaacaaggaaaacaaggcgatcttgatgaagttgttgagaagaataggcaatcaaggcaagacgcttctcaagctagaagagactctcatcgagaccaaagaaaacttggagaagctatccaaagaacatgaggagctaaagtga

SEQ ID NO: 34901 - DNA, 135 bp, Zea mays
  Clone ID: MRT4577_131832C.1
aaattcagacttttctattactactataccaattaaactactgagaatcatttaaaaaagcaggaagactccactctcctcttataatcatcatcaatttcctttttgttcttcataatttactattctacacac

SEQ ID NO: 34902 - DNA, 394 bp, Zea mays
  unsure (1)..(394): unsure at all n locations
  Clone ID: MRT4577_131833C.1
aatcggtgtacagtgcgtgatgctcgcatttttttttttttttggttcgaacgcgtatacgtacggtttgagaagggtgccgcccgcgcgcctattgaaccatggcaaggaaggcgctggtcggagccgaagtcggcaccggtggtgcagccgtcgtcgctgccggtgctggtgcggtgttggttgtggtgccgactgggttcggcctctggaactgtatcctgtactgcattttgccgtcgtcctcgccttcatccccgtcgtcggtgtactcgtcgctgtccgtttcgtcctccgtggtgaactcccgagacggttgctcgctcaacatcctggcgatgtcttctggcttcttcatgccggngtcggtgtcgaaagcggcaggcgtcgtcgt

SEQ ID NO: 34903 - DNA, 315 bp, Zea mays
  Clone ID: MRT4577_131834C.1
tttcccaagaaagggaatctagctgtggacggtcttccagtaggaagagcgaaatgaggcatgacaagaagcctgttgatggagaaactaacatatctaggagtctcagagcctttggcaataatgatgataggaaaaaggagacactgatgagcggggatgataaacaggatcacgaaaaacagttcaaacaaataatactggacatggtactgttgtgcgatgagaaatttgtcttggagataatgatcggtgagacgaatggtgctatgcacaggacttctagcctggttaatggtcctgacccggcgctta

SEQ ID NO: 34904 - DNA, 270 bp, Zea mays
  Clone ID: MRT4577_131835C.1
taacttcacaaataccaacaagtttgcgaaccagtggctgttgccgctttcatctttcaagaggagctcatcggtgatcacttggcgtcacgcagtcacgcttgccgtcctgcggttgcattagcacatcgttgttaagactttacacccgagaacgttgctacgtacgtcgtctgagatgggacaataaattgggaatatgtatgtacaatgattctagctcgtaactgatttccgcaaaccctatcatagagctatgatagcaagcaa

SEQ ID NO: 34905 - DNA, 456 bp, Zea mays
  Clone ID: MRT4577_131836C.1
gccgccggggccgcggcagcccgtagcaaccggcaccgcctgaccatatagtgtctatcgggcgccgcaaggacgaggacttgaaccactcgttgttctacaccgccgacggatatcgcagtcggacacttctcctgaacggcggcgtaccgacacgcctacccatcggcaccggcacagcaggccgcgaacacgcgcctactaacaccgaacagagcaaggcctgccgggacgcgacagagggccggacactcttgatgggtgggatgagggccgacgacaagtcgcgcgaaacctacaagctgttgcggaaagtccgcggatacgtgctgctcctagctccggacggtcaaaagacgttaggcgtgtgcccgtggtgggcatggatatcaacagggtgaactagctgccttgagcgccagactaggaacgacatgcgatcttgaaacaaagtgc

SEQ ID NO: 34906 - DNA, 927 bp, Zea mays
  Clone ID: MRT4577_131837C.1
atggatcctaggggcaaggggatggtggtcaatgataaggagaaggagtccttcgtcaatgatccaaaagatgacaagcctactgactcgggctcaagccacaaaagaaaagacgggaagaagaagaaaacaaggctcatcaaggagatagtctactacgacgacagcgacgagtccacttcttcccaaaaggacgacgacaactacgagaaaaagaaaacggtgagcgacttggataacgccaagaagatttgggacaccctcaagatctcacatgaggggaacgacgtcaccatgctcaccaagatggagttggtagaaggcgaacttgggagattcgcaatgatcaggggcgaggagccaactcaaacgtacaaccggctcaagaccctcgtcaacaaaataaggagctatggaagcacgcgatggacggaccacgacgtcgtccgcctaatgctaaggtacaccaagatgacgcccgaggagatacttggaaagttcgtgagcgagcggatgatgatcaaaaaggctagatacgttgatgatgctttgaatggtccaatccacgagcctcaaaccgttgctctcaaaacaacaaggagcaaggaggcgctacctagcaaggtggcacaagttgaggcggccggacttaatgatgaagaaatggccctcatcatcaagcgcttcaagacggctgaccaggaacaagggaacaagagggaaaagaagaaggcttacaagaaggctaagggtgaggcacaccttggcaaggagtgggactcggattgttcgtcgtccgactccgacaacgaaggacttgccgccaccgccttcaacaaagcgtccctcttccccaatgagcatcacacctgcctcatggcaaaggagaagaagattgttagaaaagcaagaggatctcttatatga

SEQ ID NO: 34907 - DNA, 2946 bp, Zea mays
  Clone ID: MRT4577_131838C.1
atggatcctaagggcatggggatggtggtcaatgataaggaggagtccttcgtcaatgatccaaaggatgacaagcctactgactcaggctcgggccacaaaagaaaagacgggaggaagaagaatataaggcgcatcaaggagatagtctactacgacagcgacgaatcttcttcttcccaaaaggacgacgacaacgactatgagaaaaagaagacggttaactcaaacttttcctttgattattctcgtattccgcaaagttccaatgctcatttgctttccattcccctcgctactactgttcttctagcttcattgtgcagggatgaataccataaggtgagcggcttggataacgccaaggagatttgggacaccctcaaaatctcacatgaggggaacgacgtcaccatgctcaccaagatggagttggtggagggcgaacttgggagattcgcaatgattaggggcgaggagccaacccaaacgtacaaccggctcaagaccctcgtcaacaaaataaggagctatggaagcacgcgatggacggaccacgacgtcgtccgcctaatgctaaggtattttactatccttgatccacatcttgtgaacaatattcgtgagaatcctaggtacaccaagatgacgcccgaggagatacttggaaagtttgtaagcgagcggatgatgatcaaggaggcaagatacgttgacgatgcgttgaacggcccaatccacgagcctcaaaccgttgctctcaaagcaatgaggagcaaggaagtgctacctagcaaggtggcacaagttgaggcggcgggactcaatgaggaagagaaggccctcatcattaagcgtttcaagacggcgctaaggggtcgcaaggagcatcccaacaagaccaagacaaaggggaagcgctcatgctttaaatgtggtaagattggtcattttatcgctaattgtcccgataatgatagtgaccaggaacaagggaacaagagggaaaagaagaaggcttacaagaaggctaagggcgaggcacaccttggaaaggagtgggactcggattgttcgtcgtccgactccgacaaacgaaggactcgccgccaccgccttcaacaagtcggccctcttccccaacgagcatcacacctgcctcatggcaagggaaaagaagaatctagagatgacgaaatagactattcatgtttattcaagggcctagatagaactaaggttgataagattaatgaattaattgatgcattgaatgataagaataggttattagaaaagcaagaggatctcttgtatgaagaacatgataagtttgtagaggcacaaaaatctcttgctttagaaattaaaaggaatgaaatgctttcttatgaattgtctacatgccatgactctatttctagcttaaagagcataaatgatgatttgaatgctaagttagaaatagctaataaatcaacatcttgtgtagaacatgttgcaatttgcaataggtgtaaagattttaatattgatgcttgtagtgaacatctagtttcaatttctaatttgaatgatgaagtggctagtcttaatgcccaacttaagactagcaaaagtgaatttgacaaactaaaatttgcaagggatgcctacacgattggtagacacccctcaattaaggatggtcttggcttcaagagggaagtcaagaacttaacaagccataaggcttccatctccatcaaggagaaagggaaggcccctatggctagtagtgctcaaaagaaccatgctttcatgtatcatgataagagacattctaggaatgtttatagaagttatgttgcttttgattctcatgccatgattgcttctagttcttctattatgcatgatagaaatttggctaggaaaaatgctatgcctagaagaaatgttgttcatgttcctaggaaagtaaactatgaatcttctacaaattttcatacttgcaatgcttccttcactatttgtagaaaggataagaaggtgattgctaggaagttatgggaaagatgcaagggagataaaacttgcatttgggtccctaagacaattgtcactaaccttgtaggacccaacaagagttggctttgtaacatgggatataactgcttattcacaaatgtagatgtgtctgtctttagaaggagtgatggttcattagcttttaagggtgtattagacggcaaactctatttagttgattttgcaaaagaggaggccggtctagatgcatgcttaatcgctaagactagcatgggctggctgtggcatcgccgcttagcacatgtggggatgaagaaccttcacaaacttctaaagggagaacatgtgataggtctaacaaatgttactttcgaaaaagatagaccttgtgcagcttgtcaagcagggaaacaggtgggaagctctcatcataccaaaaatgtgatgacaacatcaagacctttggagttacttcatatggacctcttcggacccgtcacctacctaagcttaggaggaagtaagtatggtcttgttatagttgatgatttttcccacttcacttgggtattctttttgcaggataaatctgaaactcaagggaccctcaagcgcttcctaaggagagctcaaaatgagtttgagctcaaggtgaagaagataaggagcgacaacgggtccgagttcaagaaccttcaagtagaggagtaccttgaggaggaagggatcaagcatgagttctccgctccctacacaccacagcaaaacggtgtggtagagaggaagaataggacgctcatagacatggcgaggacaatgcttggagctgtaacacctcaagtgttaccatggctagagcacaccttggtactgaggactgtgatcacatgtggtagaaacttaaggagaacataa

SEQ ID NO: 34908 - DNA, 388 bp, Zea mays
  Clone ID: MRT4577_131839C.1
cccacgcgtccgcggacgcggggcggacgcgtgggccctcatcatgtatctgatgtcttgacgacacatatggcacaacggatgaggtgtacgctgctgataagatctacacgcttccttgctgacccatgcaaacctgaggagcacaactgttcgtcctgctgggcgttttcctagtctaggtggcctaccctagatttgtgaatataatgtcttgaccctccaaattatgctcttgattgcctgggacaaatagcttagctgaagtcatgaactaacgtagagttattttttgtgtgctttgcgcatatctctgtccatcatgtagagcacatggtttactgcacatagtttaaagatttggacattttctgaaaaacagcgcgag

SEQ ID NO: 34909 - DNA, 198 bp, Zea mays
  Clone ID: MRT4577_13183C.1
tcgtaataatataagaaataaggtcattcggactaatttatggaaaggactcataaattaataatgcaccactttatttaaaatggaatgattttttcaaccaaacaccttctaatggaaccaaattcccctggttgattgcatgcattaatattgaatctggatttgtttcttacagccctgttgcatacttgttat

SEQ ID NO: 34910 - DNA, 194 bp, Zea mays
  Clone ID: MRT4577_131840C.1
cttacaaggaatcctacgttacaaatttattgtttttaatccatgacaccgaacaatagtagctgttcatgactcaacactggggggcctcttcatagctaccaatgcggacgctgaaaaaggaagttggttttaccccagttcatgattatccaacatgaaggtgtgtagatacacattttttaaacaacaca

SEQ ID NO: 34911 - DNA, 395 bp, Zea mays
  Clone ID: MRT4577_131841C.1
cggacgcgtgggcgccagggccgcagagctttccctccagctcctccctgaactctgcccctcggatggcgtccggccggagttccttggcctgaccccatgctgcgttcgcccatggcgttttcccctgctcggcgtccggtcctggctcacccgagctccctgcgcgactgccgctactccctcctgcaactcggtgcctctcacctgctccctctgatctctctctgacccgcgcctgttccacttcgtggctcagggccccagttggttgggccttgaacttccattgcttaatggccctggtcaaggttttgggcgccaagttccttaagttggttcttccattggttgcttgtccgggcggcctggttcttttcctttcttccggtttc

SEQ ID NO: 34912 - DNA, 3510 bp, Zea mays
  unsure (1)..(3510): unsure at all n locations
  Clone ID: MRT4577_131842C.1
ttagggaccccccggtctcgaaacgccgacactctttaagctagaaatagagtcatgacatgtagacaattcacaagagagcatttcatttcttttaatttctaacgcaagggagttttgtgcctctacaaacttatcatgctcatcatataagagatcctcttgcttttctaacaatcgattcttatcattcaaagcatcaatcaattcatttatttgatcaatcttagttctatctaggcccttgaataaactagcataatctatttcatcatcatcactagactcatcctcactagaagaagcataagtggattttcgagaatttaccttcttctcctttgccatgaggcaggtgtgatgctcattggagaagagggacgctttgttgaaggcggtggcggcgagtccttcgttgtcggagtcggacgacgaacaatccgagtcccactcctttccaaggtgtgcctcgcccttagctttcttgtaagccttcttcttttccctcttgtttccttgttcctggtcactatcattatcgggacaattagcgataaaatgaccaatcttaccacatttgaagcatgagtgcttcccctttgtcttggtcttgtttggatgctccttgcgaccccttagcgccgtcttgaagcgcttgatgatgagggccatctcttcctcattgagtcctgctgcctcaacttgtgccaccttgctaggtagcgcctccttgctcctcgttgctttgagagcaacggtttgaggctcgtggattggcccattcaaagcatcatcaacgtatctagcctccttgatcatcatccgcccgcttacgaactttccaagtatctcctcgggcgtcatcttggtgtacctaggattttcacgaatattgttcacaagatgcggatcaaggacagtaaaagaccttagcattaggcggacgacgtcgtggtccgtccatcgcgtgcttccatagctccttattttgttgacgagggtcttgagccggttgtatgtttgggttggctccttgcccttgatcattgcgaatctcccaagttcgccctccaccaactccatcttggtgagcatggtgacgtcgttcccctcatgtgagatcttgagggtgtcccaaatcttcttggcgttatccaagccgctcgccttatggtattcatccttgcacaatgatgctagaagaacagtagtagcttgtgcatttttgtgaatttgctcattgataaacatgggactatcactactatcaaattgcattccactctctactatctcccatatgcttggatggagagagaacaagtgactacgcattttgtgactccaaaatccgtagtcctctccatcaaagtgaggaggtttaccaagtggaatggagagtaaatgagcatttgtattttgtggaatacgagaataatcaaaagaaaagtttgaattgaccgttttctttttctcgtagttgtcgtcgtccttttgggaagaagaggactcgtcgctgtcgtcgtagtaaacgatctccttgatgcgccttgttttcttcttcttcccgtcttttctcttgtggcttgagcccgagtcagtaggcttgtcatcttttggatcattgacgaaggactccttctccttatcattgaccaccatccccttgcccttaggatccatctctttcgggcgattagtcccttttcttgaagaagaacggctctgataccaattgagagncacctagatggggggggggtgaataaggtgatcctgtaaaaacatgaaacttaatccacaaaacttgattaggagttagcacaattaagccaagtggctagagaggagagcttgcacaacacgataaccacaaagagatcaacacagagatggncacagtggtttatccccgtggttcggccaagtccaacacttgcctactccatgttgtggcgtcccaatggacgagggttgcaatcaacccctttcaagcggtccaaagacccacttgaataccacgggtgtttttgctttcactttactatatcccgcttgcgaggaatctccacaacttggagcctctcgcccttacactttgatgttcacaaagaagcacggagtaagggagggatgagcaacacacacaagacacgaaatcagagtaccaacacgcacacaagtcgcaacaagagctcacaacacaacttagcgagttcacaactcaaatggagctctaattgctatcgcaaagaatcaaatgcgcagaatcgaagtcttggtgcttaggaatgcttagagaatgcttggtgttctcctccatgctcctaggggtcccttttatagccctaaggcaactaggagccgttgagtgcattccaggaaggcaattcttgccttctgtcgcctggcgcaccagacagtccggtgcaccaccggacactgtccggtgcggatctctttccttatttggcgaagccgaccattgcagtcttggagccgttggcgcaccggacactgtccggtgcacaccggacagtccggtgccccatccgaccgttggcacttgccacgcgtcgcgcgcggattccgtggccgaccgttgacccggccgactgttggctcaccggacagtccggtgcaccaccggacagtccggtgaattttagccgtatgccgccgtcgaagtcccgagagcagccagttcgccagagctagcctggcgcaccggacactgtccggtgcaccaccggacagtccggtgcacccagactgcgcagagtcttggctgctcagccaagtcttttccaaattggtcttttcctgtttctagcacttagacacaatacattagtctccaaaacaatgtactaagtcttagaaacatacctttactcttgatttgcacttcttaagtctttggcacaaatattactcaaagcatttgtgtggagcacttaatcaccaaaatcttatagaaatgtcctaagggtacatttccctttcagggctaagtatttttttgtaaatcatattttgatacttcaccagaagtatccataaaaggaatggatttcaaggtagccaatgcatcaaagggtttccaagcaactcctataaacctaatgcacatttcactagacttaaagtgtgtaaaaatcatttaaaacacaaggaaggggttgcatgcaccggggcttgcttttgttagtaggtgagtcaggctcggactcgcagatgtcgaagtagagccaagtctctgcctgagattccaaaggtggtgatgtcttttcttcagtcacttcaccctcttctccgttttctaaatataaccatataggtatatatataagaatgaatgccatgtaatgcaaactatcacaaagagagatggagaacagaaacactacaactaaagcgcatgacaagaatatacctatttcttatcgctcgattaaagtgaccaatttgaattcacttaggtaaaccagggaattaatccaacttata

SEQ ID NO: 34913 - DNA, 1217 bp, Zea mays
  Clone ID: MRT4577_131843C.1
tcacccggccgcctcaacttgcgcctccttgctccttgttgctttgagagcaatggtttgaggctcttggattgggccattcaacgcatcatcaacgtatctggcctccttgatcatcatccgcccgcttacgaactttccaagtatctcctcgggcgacatcttggtgtacctaggattctcacgaatattgttcacaagatgtggatcgaggacagtaaaagaccttagcattaggcggacgacgtcgtggtccgtccatcgcgtgcttccatagctccttattttgttgacgagggtcttgagccggttgtacgtttgggttggctcctcgcccctgatcatcgcgaatctcccaagttcgccctccaccaactccattttggtgagcatggtgacgtcgttcccctcatgtgagatcttgagggtgtcccaaatctgcttggcgttatccgagccgctcaccttatggtattcatccctgcacaatgaagctagaagaacagtagtagcttgtgcatttttgtgaatttgctcattaatgaacatgggactatcagtactatcaaatttcattccactctctactatctcccatatgcttggatggagagagaacaagtgactacgcattttgtgactccaaaatccgtagtcctctccatcaaagtgaggaggtttaccaagtggaatggagagtaaatgagcattggtactttgcggaatacgagagtaatcaaaagaaaagttcgaattgactgttttctttttctcgtagtcgttgtcgtcgttgtccttttgggaagaagaggactcgtcgctgtcgtcatagtagatgatctccttgatgcgcctcgttttcttcttcttcccgtcttttcttttgtggcccgaccccgagtcagtaggcttgtcatcctttggatcattgacgaaggactccttctccttatcattgaccaccatccccttgcccttaggatccatctcttcgagcgattagtccctttcttgaagagaacggctctgataccaattgagagcacctagagggggggtgaataggtgatcctgtaaaacttaaaacttaacaccacaaacttgattatgagttgaataatgaaatcaagtgagtagagaggagaactcatgtgacgcacaatagacacaataaggacaagcacaagagacacgaggatttatcccgtggttcggcc

SEQ ID NO: 34914 - DNA, 303 bp, Zea mays
  Clone ID: MRT4577_131844C.1
agacaagtatcctgactttttcactccttttgacacagatggtttcatcggtagtcttctcgatgttcatcacggggtctatgactatcgctatgatgataccaagggagtttacattgcaattcataatgctcttctagaagttcgtaatcctgttgatgtccccttcaacgtcactgtgtgccaaggttctactattagttctgcgctaaaccgcatgctatacttcataaaaaccttcctgtctactgaacagtcttttgaccacatatttgtatccataaacctgtcagtcattcacga

SEQ ID NO: 34915 - DNA, 643 bp, Zea mays
  Clone ID: MRT4577_131845C.1
ttgggtccctcgaggccggccggggccggggaagtcccaccacagcaaagcaactgcttgcagcctccgcacaacaaaaaaccccacgggtagtctcggatctccacgccaccaaaacattcgaagcttcttcgatctcttgcgcggcgttctggaatctgaaccttcaatcttggagagcggcgcgtccccaaagaattagatcaagctcaccaccatcctgcgcaagaagatgggcgacgcgcagctcgtcgaggtcgccgaggacaagaagaaggaggagaagaagcccgaccccgtcgccgaagctgcggcggcgtactacaaccagtactactaccactacccaccgccggccgccgtcgtttacgacccctacccacggccgggcaacacctgctccataatgtagactcagcctgtggacatatgcaagttaagttttgtgtgtagcggtgcgtgtgtgggggaggcgcgcaagtgtagtttctatacggaattcttctcttatctcccttttgaggttaagggcatgtgcagtcccagttaatatatggtcatttgaaaagtctctatgggttaatttaaaaattacgagagacagattcttccaaaaaaaaaaaaaaaaaaggcccctagggcc

SEQ ID NO: 34916 - DNA, 1122 bp, Zea mays
  Clone ID: MRT4577_131846C.1
ctacgctatcgccggcctggccgagcatatataaacagtcggcgggcggggcccggccgggaagtcccaccacagcaaagcaactgcttgcagcctccgcacaacaaaaaaccccacgggtagtctcggatctccacgccaccaaaacattcgaagcttcttcgatctcttgcgcggcgttctggaatctgaaccttcaatcttggagagcggcgcgtccccaaagaattagatcagccatggccaagcaaaagatcgtgatcaaggtgccgatggcgagcgacaagtcccggtccaaggcaatggcgctggtggcagccgcgggcggggtcaactccgtggccatcgccggcgacggcaaggaccaggtggtcgtcgttggcgagggcgtcgactccatcaagctcaccaccatcctgcgcaagaagatgggcgacgcgcagctcgtcgaggtcgccgaggacaagaagaaggaggagaagaagcccgaccccgtcgccgaagctgcggcggcgtactacaaccagtactactaccactacccaccgccggccgccgtcgtttacgacccctacccacggccgggcaacacctgctccataatgtagactcagcctgtggacatatgcaagttaagttttgtgtgtagcggtgcgtgtgtgggggaggcgcgcaagtgtagtttctatacggaattcttctcttatctcccttttgaggttaagggcatgtgcagtcccagttaatatatggtcatttgaaaagtctctatgagttaatttaaaaattacgagagacagattcttcgtaaagagtaaatatctaaacgactctatatactatgatccgatgaaaaaaagttgtaaaattttgtataatgtaaaaaaagcctgtggacatatgcaagttaagttttgtgtgtaccggtgcgtgtttggggaaggcgcccaagtgtagtttctatacggaattcttctcttatctcccttttgaggttaagggcatgtgcagtcccagttaatatatggtcctttgaaaaaaaaaaaaaaaaaaaaaaagggcggccgccgactagtgagctcgtcgacccgggaattaattccggaccggtacctgcaggcg

SEQ ID NO: 34917 - DNA, 453 bp, Zea mays
  Clone ID: MRT4577_131847C.1
ttgggacctcgaggcggcggaaagcttactacagcggggaagctcatctaaccgcttcgtcctaccctaccgccggctggtcggcaatacataaacagttggggacgctgctctgctcccaagtcccaccacagcaaagcaactgcttggagcctccacacaacaaaaaccccacggatagtctcggatctccaggccaccaaaacattcgaagcttattcgatctcttgcgcggcgttctggaatctgaatcttcaatcttggagagcggcgcgtccccaaagaattagatcagccatggccaagcaaaagatcgtgatcaaggtgccgatggcgagcgacaagtcccggtccaaggcaatggcgctggtggcagccgcgggcggtgtcaactccgtggccatcgccggcgacggcaaggaccaagtggtcgtcgttggcgaaggcgtcgac

SEQ ID NO: 34918 - DNA, 627 bp, Zea mays
  Clone ID: MRT4577_131848C.1
gatgaacaaagcaaaaacctaaagcgcggtggggcatccacatacacagaccgccatcgcccccagctttcgatgaaggatccgcgcaccactaggcccacagtggcggacgggcctactagcgcacctggtgccgatcagccaccatgcccggcctccactgcaccatatggactagacatgggcggatgcgcctgccacgagcagacagacacgcccttgtacctaccgtggttgagaatggcgcgacgctagaactactacttcccaggaggcctgcactggccacttctacggcggctacagaggaaggacaggagcaagacaggggcagaggtagctagatctagcaagcacagggcggagactccatgcgacaactgagggagcatcatgaggagaggctgagctatctaatgaaccggtggatcttgctctagtggcgataaggaaccacgcatagacttgccccgcttgcgctgcaccgtcctggcctacagagctgcccagcctgctgcatataattactgactctaacccctccccggatacgacttattgtggctgccataccaccagagacagccaccgcatcccaatgcccaggctggcagcccagcactgtgc

SEQ ID NO: 34919 - DNA, 1148 bp, Zea mays
  unsure (1)..(1148): unsure at all n locations
  Clone ID: MRT4577_131849C.1
aggacgggcagaagannccaaagaagcttgaagcatgctgactccacggtttacatcgtttgtttctctggaaaaaaaaaaaaaaaaaaaaaaaaaaaaaaaaaaaaaaaaaaaaaaaaaaaaaaaaaaaaaaaaaaaaaagcacgagggacatgtgagccctgtacgtcggggccggccggcgtcacatgcgctgacgcgcatccccccggcgtggcgtgcgctttgatctagctcttcttctcgaatccagcccgaggcctttttcttctgcggtttcatccgtacccatcctgcacacgaagcctagaatagccctcccctgctccgccacctcctcggatcccgaccaccccacccccaccccagacaacaggttgatggaggctaagatgggacgcttcttcgagtccgtgagcaatttcttcaccggaggcgaccacatcccctggtgcgaccgcgacctcatcgccggctgtgaaggagagcttgtcaatgctgcaaatgaggaacagaggaatgaaagccttatgaggttgtcatgggcccttgtgcactccaggcagacagacgatgtaaaccgtggaatcagcatgcttcaagcttctttggataattctgccagtcctctgcagactagggaaaagctgtacttgttggctgttggattctacaggattggcgactactcaaaaagcaggcaacttgcagatcgttgtttggagattcaagcggattggcggcaggccatatcgctgaagaaggcaatagaagataaaattgccaaagatggtctgattggaataggaattgcgacaactgcggtcggacttctggttggtggaattgcagctgctgttgccaggaagaagtgaggtcaatatattggatcggcagctcattgaactaggggagctcccgtctctgtaattccaacttttctgttgttaccttggtgatattacagttgaattgccactctttatatgtacgaagtaatcgtatgataatgataacaccattgtgacattatagctttcaaaaaaaaaaaaaaaaaatcccaccaaaaaacccaagcatccgcccacgcgtcccgtccacgttatcaaaacacgcctaccggagcggcgaaatcgtcctaacagctg

SEQ ID NO: 34920 - DNA, 281 bp, Zea mays
  Clone ID: MRT4577_13184C.1
cttcccctaggactccccgccacctttctcgcttgtgcagtggcaccaccatgcgaggagctaggaaggaggacagaacttggtatgtacctgttcattctcctctccattcatgtctattcatagcggaatcaagctggcaaggagctgggaaggaggatagaactgagaatgattttcatctaaccattggctgattatcatgtatttgctgcaatgttttgtcgactaatggttgctgcatcatgtattggatggactaactgtattttaagcttctc

SEQ ID NO: 34921 - DNA, 410 bp, Zea mays
  Clone ID: MRT4577_131850C.1
gtcaaacaacgtctccggcccggcgctgttctcccaccaccacctgctgcccggcggaaggtacgtgttcggtggcctccaccgtcatggcggcggtgggtttgactttgacaaggggttggttgtcgagctcgccgtcgccgccatggaggagctggtgcggatggcccagctcggcgagccgctctggctccctgcccttgccgtagacggggctaccaccatcgagactctcaacgaggaagagtacgcccgcgggttcttccccaggggcgttggtcccaagctgccggagctccggtcggaagcgtcgcgggaagccgtcgtggtcatcatgaaccacgtcagcctcatcgagatgctcatggacgtgaaccagtggtcgacgctgttctcaagcatcgtgtcac

SEQ ID NO: 34922 - DNA, 464 bp, Zea mays
  Clone ID: MRT4577_131851C.1
ggctggcaacatggtactctaagtgctataggaaaacatgatacttaatatcggacaatatagcttaaaaatatgtgcgacattcaacacagcagtccaaattgatcgagccacgattaaatgaaacttgatctaatagcaacatacaagtccagtagactgatcacgcccgcatgacgcagaacacccctcatgtgttggatgccctggggtatatctgctggttagaatgaacagagaccattcttatgagcccctttgccatcagattctttatggcaccttcttgccaaggatccattaaccctgaggcgctcagataggatggatggggctgatctggttggacattcggcacctaaggagagcaccttattggacgtggcctgatcgaagagcacaatgccggtgaccttgtccttctggttacccttgctccacttattcttcttgtgctacccccc

SEQ ID NO: 34923 - DNA, 345 bp, Zea mays
  Clone ID: MRT4577_131852C.1
caaataactcccgtaagcaccgtaatagactccacattaagcagcagtggacgtgcgctaaggcggcgcggatggaggtgtgtggagcattaacatgcggaactggagcgtgcaggcgggcacggttatcggggagtccggcgagtatgcgtagaagcgcgaagcggtgagactatatttggtggtgcgcggtgcagctcgatgcgtgtatctttgagcgtgcagtcgtgccagtcagaagggggcaattaagacgttctcaccctagcgagtaatcgcgtcgggggcgatgtagctgggagctgtcgtgggagaaggatgggctgtcgttgcaggttcctgcta

SEQ ID NO: 34924 - DNA, 331 bp, Zea mays
  Clone ID: MRT4577_131853C.1
gttgcttcaccaaatggtcatctcttggtatgacatgatcattctgaccttctttccaagccaaaaaacttaagttcccccacccaaccttcaaaaagaccaaagccatggtgggtttaggcctccacaacggaaccaagaatggttcctgtctggtaactggttgaaaccttaatgtcaaatccaccctggagttttccttttcctcataaaagcaaaacttgctttgaagaaggcttggcctttaccagaacaccgaaccctaaatattgaaagggcaatactgcaggtctccttagaaatggttattttaacccaatggccactaaaa

SEQ ID NO: 34925 - DNA, 414 bp, Zea mays
  unsure (1)..(414): unsure at all n locations
  Clone ID: MRT4577_131854C.1
gaaaacccgggccggccgacgcgtacgcgagttccggagagagtcgagtccccatgcatgcaaggtctcagcagacgttcttccgttgctgactatgaacctaaggatggtggtgagggtggcaccacgcatgatgttggtaccaagggaagtgaattggaggacaccatcaaacacgaacagcttgtctcaagcgtggtcctccctgcggatttggcaacggatcacgtcaagatcgacgcagatctttctagcagcaaggctgtagaatcaactgtcaaacagagagatgagactgccgagcttccacgtaagggtgccagtgtgttgtactgcgtgcttcctgtgagaagtagcgattctgctgcaagtacatctattangcaagaccaggattcactttcagtgcatgtg

SEQ ID NO: 34926 - DNA, 234 bp, Zea mays
  Clone ID: MRT4577_131855C.1
tagcttttcgcctcgccgctctcgtccttcgtgatgatgcccaagaacaagggtaagggaggaaagaaccggaaaccaggaaagaaggaggctgacgaccacaagcgcgagctcgtcttcaaggaagacggacaggtagtacgcgcaggtcgacacggatgatcggcaaaaggcggcgccaggccatctgcgtcgatgtaacgacgtcgcctctgccatatccggactacaatg

SEQ ID NO: 34927 - DNA, 218 bp, Zea mays
  Clone ID: MRT4577_131856C.1
accccctggtgttgcttcatgcaatcaaaaacacagattggcaacatccaatgaaggaggaacgagttcagtctgggccgggcatccttttttgcacatgaacgttaaatcttcctagccataacacagacctgttgtttgctcaagatcatccttgaagcctagcacacaggtggtcttcaactaccggaaccaacgacgaacaaccttgtggactc

SEQ ID NO: 34928 - DNA, 165 bp, Zea mays
  Clone ID: MRT4577_131857C.1
gtaagctcggaattcggctcgagagtgaccagacacacagattttgcaccaaccagccaattacaaggaagctcgacatgaagccgtacttactacaatcacaggccaggcgcctacagtagcattggcactccatgctacctacgtcgaccaagcatccggaca

SEQ ID NO: 34929 - DNA, 245 bp, Zea mays
  Clone ID: MRT4577_131858C.1
gtttaatgtcattgggtatacattacttctcagtttgattgaatacaagacgcttgtgatgcgcggggatttggaaagtgcaaatgagatcttaccgtccataccaaagacgcaatataatagtgtcgctcatttcttggagtccagaggaatgttggaggaggctcttgagatagccactgatgctgattataagtttgatttggctgagcagcttgaaaaactaagagtggtgaaggctgttg

SEQ ID NO: 34930 - DNA, 201 bp, Zea mays
  Clone ID: MRT4577_131859C.1
aaagctcaggggccaggaccacgtaaattcagtaaagggggtcccattttattaggccgaaaatttcggcggaatttaggtcccaccctaaaaaagtttaaaagggtttccaattggggtacccacgggggaaatccttgaaaggaaggcgggtgaagcaaactgctgaaggggtttcccccttctgattgtagacgtagg

SEQ ID NO: 34931 - DNA, 114 bp, Zea mays
  unsure (1)..(114): unsure at all n locations
  Clone ID: MRT4577_13185C.1
acatgatcgagctctaaaaaaattgtgatgaagatgtcaacaggtctgacaacctnctaaccagcatgctcttgatcacgctggttatgaggttgtcatatcagtcgacatctt

SEQ ID NO: 34932 - DNA, 376 bp, Zea mays
  Clone ID: MRT4577_131860C.1
acgactcgttcgacatgatcatggactgctgcactcgatctgaggcagcacgcgctcgggcctgtcttgacgtatcagagggcggacttctaaagcatcttccacactctgtatgcactcccggataccatgcgactcctggaccctactctccaccagttccttccacaagggaacatcgactacattgtaactgaatgatctgctgagaccgtagccaaccatgaggataccctcgcgcgaatcgacaaactttcaaaagtaaacccaacgcttggcatccgagactgcaggctcggtatatcgtgccctgcatcgacaaagacgcaaactccctccatctttgaagctgctatcgcaatgaccaaccaaagtg

SEQ ID NO: 34933 - DNA, 556 bp, Zea mays
  Clone ID: MRT4577_131861C.1
cgaagctacctaccatcgacttaacaaacacatggctaccaagatatctagccctccttgcgcttcttgccctttttgtgagcgcaacatatgcgagacttattccacaatgctcacgttgctcctagtgccattatactcatcagttcactccgaccaggtacttcaatggacttccaacacctagctgcgcaagcctacaggctacaacatgtcgcttgcggggagcgtcttacaacatccaattaaccaagctgcaacgacattgccttggcacatctaaccatacaaaccatcgcaacacaacagccacaacaggtcctaccagcagtgaagcaactagatgtcgtgaaccctgtcgcctactagcaacagcaggtgctggcatccaacccacttgctatgacaaacgtagctgcataccaacgacaacaacaattgcgacagatgctgccagcgctcagtcgactagccatggtgaaccctggcccctacctacaacagcaacaactggtatgatctagacgtctcgttgaggaggatgcacctacatacg

SEQ ID NO: 34934 - DNA, 109 bp, Zea mays
  unsure (1)..(109): unsure at all n locations
  Clone ID: MRT4577_131862C.1
atncctctgtggtgaagatcagtgagctggatgattagacancaggcnatgctantgnnctactagggcacgtttagccaattttgtgnctaggccgtnacttatgtgc

SEQ ID NO: 34935 - DNA, 552 bp, Zea mays
  Clone ID: MRT4577_131863C.1
tttttaaatccatagaagttgaaatcattgcaatttatttcaatacacttcaatccacatgaaattaaaagaacaaagtctaaggaatagacattacatggaccttctatcacattcacccacgccagcccatacatgtttgcattgctcttcctcggcctattcgaacgacgtggcccatcagcacttgtagacgacggtcttcttacttccttcaccagatctgccaacagacgcagtcttcttgcttccttcaccagagctgccaaacgtgtatacgtgctcttcttggaaacatttcgcgtgaattcgatacgaaactgttccatcttccatgataattgctttctcaaaagcagagatgaaatgtttctccttgggtaaaaaagaaaagaaatcgacatgaacgtgtgcacttgctgcatttcagaggcatgaatagcattctggttgcaactagcactgccatactagattccaataccacgcactaccaatggtggaatcccaaatgcatacgtgtccccaaaaaaaattctggaatctggaact

SEQ ID NO: 34936 - DNA, 1572 bp, Zea mays
  Clone ID: MRT4577_131864C.1
cacttctcccgttcggcctctttttccttccaccaatggaagctctcacagcccgctcctctgtactctcgccgccggggattgccggagacacctcgccctcccttcccctgcccctccgccgagcctccgccgcgtttcttgggcctcgcaggagcccctccgccctcgccatctccacgcgctggctgcgcgctccgcctcgacgcggcggccgcctgctcgcgggggaaggggaagaagtgccccccgaccccgccgatgacgcggctggccgggcggaagattttctagtactcgagaataatgtaactctacgccaaagcaatgacatggataccattaaacatgatgatgctggcacttctggaattggtgggagtaacactggtggctctaggactggcctattcagaacacctatttcaggtggtgtgcacagtgcaactgctgttcatgatttaccaccaccagctttggctgttcgcaacctcatggaacaggcaaggtttgctcatctgtgcactgtaatgtctcggatgcatcaccgccgtgagggatacccattcggttccctagtagattttgcacctgacccatttggccacccgatcttctcattatccccactagctatccacacaagaaatttgttggcagacccaagatgcacccttgttgtacaggttcctggatggagtgggctatcaaatgcacgagtaactatctttggcgatgtcattccgttgcccactgaacaacaggaatgggctcatcagcagtatgtttcaaagcaccagcagtgggcatcccaacagtggggtaacttttactattacagaatgcacacaataagtgacatatatttcattggaggttttggtactgttgcttgggtagatgtgaacgaatatgaggctctgcaacctgacaagattgctatggatggaggggaacaaaatctgaaggaactcaacgcaatgttctcaaagcctctgaaagagcttttgtcaactgatgaaggagaggtagacgatgttgctcttatttcaatggacagcaaaggtatcgatatccgtgtccgacaaggtgcacagttcaacatacagagggtgccctttgaggtggatcacagcgtcgaaacactggatgaagccactgaagcgctcaggaggataatcagcaagtctaggtggcacacaaagagctcagtcataggacgcccttgaaagctgaagctggaggctctatagaacagtttgtacagtgcggcagcagtctctactatggtatgtgccaataagaggaactccgttccagagtttcgtctactgccaagggcctcgtgtttgtgggtgggttgaataaacacgcaatttgagatgacgctgttttgaccatgaatttagattgaacgcacaacggcaaaaaggattttatgtgaagttgtcgatgggttgaaaaagatgtgaccatctctgacggtctgacctgcttcattcatgaggaattgaggataaagcacatttgaacagaaaaaaaaaatgaagggcggcaaaaactagtgagctc

SEQ ID NO: 34937 - DNA, 214 bp, Zea mays
  unsure (1)..(214): unsure at all n locations
  Clone ID: MRT4577_131865C.1
annnacnncaaacacttgcncngccgcnggcntcacaggtaaggccgccatggtctccggttcgggcgtgtncncnaaanatncgtggtcgacgcgcgcnancacatgcngggccgtctcncctcgatcatagccaaggagcngctcaatnggcagaaggtggtcgtcgtccgcngcgaggagatnngcatgtngggcggcctcgtccgtcana

SEQ ID NO: 34938 - DNA, 352 bp, Zea mays
  unsure (1)..(352): unsure at all n locations
  Clone ID: MRT4577_131866C.1
gcatggtaaccctaatttctccctncatgcggttgggtctgagaatgtaagggggacgaaatttttctgccagaagtgtggggaagaaggtcatcacgcaagggattgctgcaagtctctttggtgtgagatctgtcgcaaggacacccatgtgatggctaaatgtgtttggccgcgacagattaagcccatgatgccgattgtgggcatggctgcagatgggctagggttcttctcatcccagtatgctaaacccagtctcaggaaacctaatctatcttgcttggggttggttaagattctggaagggtttgtgtctgcctctgagcttgaaaaggattttagctttcac

SEQ ID NO: 34939 - DNA, 294 bp, Zea mays
  Clone ID: MRT4577_131867C.1
ggcggtctttgctggcctcgtgtcgtatccacggagacatggagagaggccaacttgtggcggacaagataatggatctggagcccacttcctcagcatcctacgtaattctctacaacatgtatctggatgctggcgagctgtcctcggcttcaaagactcgagatctgatgaaagagcgaggcgtgaagaaagagcctggtcttagttggatcgagctgagctctggagttcactcttttgttgccggtgacaagtcccatccagagagcaaagcaatatacagaaaagtgg

SEQ ID NO: 34940 - DNA, 417 bp, Zea mays
  Clone ID: MRT4577_131868C.1
tgttcttgaagatggctctggccaagacacgcaggactttaatacaagtgactccaatgaatcttcggagcaagatgaagagatggatccggttgattagagatctgcagcgcacctttttaactgctaccaggtccagtctactcaggcatgaaaagcacgaatcatgttgcatcgcaggagcgcatgaccatatgctgtaaccccagcatgacaagctggtcattcatcgtggggacttgcctggatcgcactctggtttacaaccaggctgaatacgaaactaacactgtggactcttcttccttcacgtattactcatttttttgtttacgcgaaattgattctgtacaaatgtgttaactgaaaatacattaatttttgagtgggtttggtatatgaaaacctctatggtgg

SEQ ID NO: 34941 - DNA, 287 bp, Zea mays
  Clone ID: MRT4577_131869C.1
tggacctaccaagtacatggtcatccaaggcgagcctggtgccgtcatccgtggtaagaagggatcaggaggcatcaccgtgaagaagacagggcaggcactcgtggttggcatctacgacgagccgatgtctcctgggcagtgctacatggtggtggaaaggctggctgactacttgtatgaacagggtatgtaactactacttacccagctggattgcattgtgacgaagatggttttcagttttgactttcaatatttgtatccacaatgcataggcctttctt

SEQ ID NO: 34942 - DNA, 405 bp, Zea mays
  unsure (1)..(405): unsure at all n locations
  Clone ID: MRT4577_13186C.1
gtctctatatgccctagtaggcattggctctcagatggctgctcttatactacttgcgattgtaccgtccattgttgctatgttatatgtggagacaagaactatcataacttccttatattgcgtgctactctcttacatctttcatgtctacgatattgtagtgnatggtctgtattgactgaatggtcgtaaacactgtataaaagctactatccttacagcatgacttcctgcattctggtatctctcgattggactgctgacacacactattgctatcttataccaatcatctgcaactataccatttggcacaatggatgtcatgaatatgctctgacctttcatgtacatcatgctcgtcatattggaaactgtagctgatctaaattaggaatgcgc

SEQ ID NO: 34943 - DNA, 172 bp, Zea mays
  unsure (1)..(172): unsure at all n locations
  Clone ID: MRT4577_131870C.1
tcctcccacgcgtgcggcatcatcacccggcccatgttccatancattctgagccacctggggtaggggtttttccaggacgggttctacacctactactccttcatcgagggcgccagcaagttccccgggttcgcaccacctcggggggggctccatcttactcccgctt

SEQ ID NO: 34944 - DNA, 618 bp, Zea mays
  Clone ID: MRT4577_131871C.1
tcgtttaaatattaatagagctctgcagagatctggggggggggggggggggggggggcccgacaagtgtggcgtgcgacccggaactacacgcgcgagttactaccgtggggaacactccactggagaactactcccgcccgccgcaccactagttgtggacccccgcacgtgtcggccagctcgttatcctgaggacggacgtaaccgggttgaaggtccccgcagtctattctttacggcgaggttagctttcccggcagtcgcgagctacggttctctggagacccgaaccgaagtagaagtaccaggcctcttacttgctcaagattgtcttgcagttccaaatccttccagtctttaagtgcgagactaaggggtaggttgtatactacgatgagaactagaaggacaaactaaagacggagtaggacatcctgaagaagatctactagagggaaaacaaggtcgcgatgtcgattgacgttttctcattacagtagaattacagagtgcaggtgaacttgatagattaattcacaatctaacaggtcgtgaattatgatgactcggttacagtgacgcatcacgtggaggttccaacacacgtgcacaatc

SEQ ID NO: 34945 - DNA, 1286 bp, Zea mays
  Clone ID: MRT4577_131872C.1
aacacgttgcaggcagaagttgaaaatcttagtctgcaggagcaagcactagatgagcgtataagtgacatgcgtgaaaaactaagggggttaactgaagatgaaaataataaaaggtggctctatgtgactgaagacgacatcaagggattacccagctttcagaatgaaacactaattgctattaaagcacctcatggtactacacttgaagtacctgatccagatgaggcgggtgacggacgatttcatcagggaatgttacctggagtttagtcagggcatcaaatagatgtttacttagttagtcaatttgatgagaaatttgaggaactgggtggtgttgcgacacccgtcaagcattccagtgtgcccagacatcaacccgcggaagatttcaatacttatgctggacaaagtagcacaccaatggacgtggcacatgatgtacagcatggccagaagattccccaggatcctagtgctttgcatgactttggagggatgacaaggattagtccttccgacgtccatacggattctgattactggctcctaacagagggggatgttagcatgactgatatgtggaaaacaggacaagaagtgcagtgggaccagatggatttcctgtcagaagatgttgtcacccctcgagcccataatcagcagccggtcacagttgacgggccacatatggaggttccaagcatggacccataagacattaatggctcaacaaaactgacatctggagcggtgagttctcgtgtgacagcaaatgtttattgcaacagaagggccagacggtttcatgagcgtatgtcatctggagtgtagtcagggcagagcagtccacaacttcagattggtgcacgcccggcacctctgttgtgaagactgacgagctcaactgactaagttaacagtctactgcctgattagtaagcgcagcactttagcttagcagacactgaagcgccagtttcttcgtgactggtgctgtgcacttgctctcatattcaccaccgctccattcgcttaccaagctaacattatcataccagatcagtggacctccactgaaaaatgctgcaaaatgtataaaacatcaggacaaaacagtgcacagtgcaaggggtgttggcgttacaggatgagctatcgattgaaggcaggaaattctttgtacaattgtttgatgccccaaaacagaacaaagcagagctgttcgcttgtaaacaaatgtttctatgcatgtatttaagaggagactccattttttt

SEQ ID NO: 34946 - DNA, 340 bp, Zea mays
  Clone ID: MRT4577_131873C.1
gtttcaccacactgaaactgtgacttactcatcagaattggttgacattgcagaggcttctgaatgagagcaggggtaaggcagtcatgttcacgggccactccctcggtggcgccattgccacccttgcggcgcctcactaccttttcatcttattttcaagcttaccaatggcaccctgttgttctggtctgggccgtaaccttggaaggccccttcttagccattgagccactgcccaggccattcctccttaacccctgggttggtaccttttgccacttggcttaccagaccaacttggtccaagggttctttttttgccccccgacaccccgcc

SEQ ID NO: 34947 - DNA, 135 bp, Zea mays
  Clone ID: MRT4577_131874C.1
accctctgccactcgcgcacgtcaacgaggcgctccccgacctcgacgcctataaacaagtacgcgaccccgtgccccacccgggcagttccctgctagccggtctccagggagccaacccccccctgctcctcg

SEQ ID NO: 34948 - DNA, 303 bp, Zea mays
  Clone ID: MRT4577_131875C.1
tggtgggcatgttcatattataacatgcaatgatgacttataccagatgataatagtagcatacacagatgtgaaaactattgtatctaatttcaaagcttcctgatgtgcaccatgccatgtcattgctcctgtctatgcttaaacgtcaactacttatcctaaactaatagacttgacaatacacattaatcacttgatattacttcaactcttcatatgacatccacgcaacaacgacattcttcttactcaacaacggacaactaatctacaagctagttgacgcaaacaaacctgagc

SEQ ID NO: 34949 - DNA, 2928 bp, Zea mays
  Clone ID: MRT4577_131876C.1
ctactttgcaatatctttctcaggagcaaccgacgaagacgggcgacttgaggaatcaggagtagcattcacatcagcccttatgtcgtcgggaacaactatgctgggtctcctcatcaagatccgccccgcacgaatggctttatccatagccctgtcacgctgggccctcagagtaacggaagtttcttcaacaactttgatggccagctgagcggtctccagctcctgggcgatggacttcttggaagcgcgcagttccttgatagcagcatccttagccgatatcaactgcctgagacggatcacgtcatccgtggattcctgcagcctacagcgaagattatctaactcctccatggtgaaacgatgactcctttccagaatggtcaacgagttgctagagtcacgatacagtctgtccagattatcgcgagaagcaacaagggcacgtttttcttccagttcagcctggccttgagaatgtttttcttccagaacgaaaatctgccgagccatgccttgcgacctcagctgactagccatcccgtccaccaatgcctggaggttggagaagaacgaagagactcccaaatcgtgagagatcaattgatggcctggcataaagtcgccacccgacgcagcttgcaatgaaccagcagggaccaactcagtaccgtcaacagagcccaaaacttggtcagcgggaacgctagcctctaaggcgactccctgaccagaaacttgggccatcaccataccaccagagtgtggaggagatccgacatgaacatccatggaagtacaagagggagaccctgctcggacaccctcgggggctggatcatagctcgcgctgcccacttgagccggatcgtctccggcaacaccctcgggggctgggtcgtgacttacgcctcccacccgagctgaaccatcctcagcaacaccctcgggggctgggtgagcgttaacaccatccctgagggtcaagctttccgcggcagccgcctctaaggctgaaggcccctcagttacgcgctctaaggtcgatgaggcgcgggacgctgcccgggatgaccccaactcggcgtcgaacacatcagcacaaacatccatcgcgtcaccatccgctggctctgataataggtcctctggaaccatatcttctagagtctgatcaacgtttgccagagctaactcctgtagaccgacgagggctgacagagcaggagaaggaaccccactactttccccactggcaatatactgccgactgttctttcgagtcagagggacctcattttcttcctccctgtcgtctttatcagcaacacaggcaacacccccattgggatcagcgacagatggagtacacccattgggatcagcaacagacataccacacccattggggtcagcgtcagtaaattcagacacgggaacctcctcagcagcaggaaccgaaggaccagtgccccgatccaaactagatacttgccgaagacgtctctttttctttttctgctcatcagcagaaagatcaagttgattggctcggcaaggacgtctcgggcgaacactgacaggtctctgaacatccaaggttgtaccagcttctaggagaggcgccaccgccaatgtcccagcaggagcagcattagaagattcttcggccagcatatcaagcatagcacttatttctacatcattaggatccaaaggcacctcaaagtggacttgtcgttcatcatcgggaatttctccaatcgaagcaaccaaagcactaacttcttcagcagagggtcgcactctaaggcccaaactgccatcagcgacaggtggattcgacacaaaatgagtaaaagccttggaaggaggcaagttccaggccgagtatacgataggggcaccaacattggacaccttgcctctaagtatcatttcaaaccggctcaccaagtctacagcaagaattcttctattggtgacccgggttgggtcagctaaacctcggtacaagtaggctgggtatgccctatccttcaacggttgaatgttcttaaagacaaaatcggcaaccacagcctctgcagtcagacccctctctttcagcagtccaactttagctagcaaagcccctgcctcagccacctcctgatccgtgggggactcggtccaactcggagtgcgaacatccggttgtctccccgaccgtggggggagagagtttccatggttctcaacaataaaccattccaagcgccatcccttaatactgtccttgagagggatttcaagatattcagtcttcctcccacggcgcatctccaaactagcacccccaaccagctggtgctgccccccggccattccagggcgatagtgatacagatacttccacagtccaaaatgtggcaggacgccaagaaaagcctcgcacaaatgaacgtaaatggaaatttgcagaatagaattgggattcagatgggtcaagttaaggtgataaaaatcaaggaggccacagaaaaagggataaatggggagagcgagaccgcggagaagaaaaggaacgtaaatcacggattcatgagtatcctctgtcgggacagtgaccccatgacaaatccgccaagaacaaagctccctcgggggaaggaccccgatggacatgaggtggagaaggtcaggctcggagacaacagacatatggttacctgcgaaaggcaactggctgttggggtcgatgggcgggatgattgccacggtggagctttgcctcttccgtttcggcgccatcgcaatctctaaaacgccggtgtcatcagctatcgctcggcggttatctctaaaaacgccggcagcgttaggcgcaaagatgaacgtcgtcgtcgctcctgccgccgccactgcctccaccgccgccat

SEQ ID NO: 34950 - DNA, 780 bp, Zea mays
  unsure (1)..(780): unsure at all n locations
  Clone ID: MRT4577_131877C.1
attgggtacctcgaggccggccgggtcccatttcaaagcccatcgaattccctgagattactctcccctcgcctcctcatctccccctatgccatcgtcggacaggaatctaatagaacgccgctgcatccgagttaatgaagccatgtagcacaaagacgctgggtgacaggcccccgagggacccatcctctgcatcaatatactgtggattcttcgagcaccgcggagaccatgaacatgcgctccaagtggcacaaggagatgataacgaagcatgatcatggccaagatggatgcctctctctatcgacaggatcgcgaacggaagcgacgctcgtcatgcagccggatgctgctagtaccaacacggcaatagctgttgcccaagttgagttgcaaacaatgaacgtgcagcagaccgctgatgttgtcgtacccagcgaggctttgtcggagatctccaaaggggggaagtgagggccgaaccggtgcatcgcctgcaagaagagggttgaacttacgggattcaactgccggtgcgggaacttgtactgcgcactccaccgctactccgacaaggacgactgcaagttcgactaccggactgctgtcagggacggcattgacaaggataatacggcggtgaaggaagacaagctccacaagatctaggacgcngtccgtacgggttgtgtatcntgcacattgtaaaccgcggtaactcgtcatgcgggactgctgccttgccccccgcgnctttctcttccatgtttgctg

SEQ ID NO: 34951 - DNA, 1503 bp, Zea mays
  Clone ID: MRT4577_131878C.1
cgtgcggtgatgcttctgctgcagtttcccagttagttgaagaagataaacttgcttcgaatcagaggaggcgtcggtgccgtccattatcttctgatgatcaacgccatagaaggattctacacatgttaaagaagaagaaatttgtactgaaggtggagttacataaatggttagaacgacttgaaaagaaggacgggaaaataatggataggaagacattgactcgcacgttgaataagcggacgcgtgggggaagctgtaaatgtatcaaagtcagtgctccattggtgacaaattatgctcgcagtcgtctctttgatgtaatactgcattcttctgttggagacgtgtcaccagaacttgtggagcaatttaggaccagacaaaggaactttgacaccgaatctcgcgcaggtgcagcagctaaagtgaagcaaaatcaacatatgactgccatacctggtctgaggatttcacgcagagttaaagtttacaaaccattactattagaagctatgtatgcaaatggattcataggcgcaaagatgattcgagcaaagttatttcataaatttctgtgggcttatgtcaattctttgccaaattggtgcaatgcatttggttgtaccaaagcagggcagtatgataagagccttaatcaatcatgcctgttattttctatggaagcagctatgaaagaaatgccccttgaactctttctacaaattgttgggtcagcaaagaagattgataacatgataacgttgtgtaggcttggaaaaacactttcagaaatacctacagaggaatacaatcagatcttggatactcatgccaatggccgactctcacgtttagtaaatattttggacaagctcaagctggttcagcttgcaaaagaattcttagaagatgctggtgtatcgtcaaatgccatgtatacacattcgatggagctcaggccttacatcgaagaacccatgccaagaattcttccatcttcccaactgaacaatcatcggaaaattcggcatgattttgtactttcaaagaaagagtttgttgattcttattgggaaacactagagtgctgttatttaacagctggtttggctgacccgttaagtgccttccctggcagttctgtcccggaggtttgtctcatctgctgtacatcattgatgcataggattatcgcatacgttgaataaatgtacttagcgcctgtttgtttgctccccaacttacataaggtagcttctgggcatgggcagtacggtgagaaacaccacccttgatgccgaaataagtttcccatatttgtgtttaccatactgcccttgggccataagctatcttatataagtatggatgaaaacaaacagacccttcgaatttgaattatcaaattcctcaactttgaatgctaatatagctgtgttaactatttatattgacaactgtgaaaatagtgacttggatttgacctgtgttaatttc

SEQ ID NO: 34952 - DNA, 510 bp, Zea mays
  Clone ID: MRT4577_131879C.1
tattcggcacgaggagcatgcctactcgggtctgcgcaaggacttgcacaaacattgtgaggtacaaacattagcaccacctgatgctactcttggaaatgctataaaatatatctgatgatagaatgccttcacaatatcgctgtaatggagctgctgagatgactgcaaaatctgttaccgagctttaactgtgttagcagcacatgaccttggtccattgatcttgctattgccccacactttgcataagtgtaatccgaagttcagccctgaaacggttgatacagtgatgcattcaaaccatggaattatcgcatgatcttgataggagcttaacacttatgccatgatagttcgtgaatgatatgggtggcactttccacaactaacctattgagcacggatagtatacagtctgccaaagctgctatgatgatggccagcatgagttaatgctatcaagcttgacttctctgagatattgacacatgaccagctctagacaca

SEQ ID NO: 34953 - DNA, 597 bp, Zea mays
  Clone ID: MRT4577_13187C.1
tcttacgatttcaaaaggtacccctagatacatttggttttttgtttagaataccggtattctttggctaagttcatttggtttatggtttttgtttagaatatgggtattctaaacaaaaaccaaatgaattttgccaaaagagatggatgtcaataaaagcccacatatctatttatagaggtgatggatacatcatatccacttagccggggcaaaatggatcaactcctaggattttgatcagacgaccacgcgctctacacaaagttgcttcgcctcgacacaccctttgtgatgatgtcatgtgccacctctgattcctgccgaaaccgccaccgtcaagttttgaggcccaaactcagcaaaaccacgatgggtggttttgaggctcaaccacaaaaccaccgcgagtagtgcatcgcatgcgcgtccccacgtcctggacacatgtcccattagtccttgaccgcatcggcgacagtgcgacacaagccactctgtcatgtcctcgcgctagtgcgtgtcctaagtgtgagccaccacaacttgtcaaccggctcctccgaccccttggtcaagtcctagtgctcgtct

SEQ ID NO: 34954 - DNA, 293 bp, Zea mays
  Clone ID: MRT4577_131880C.1
aaattacagcaaatacagatggtatagcttctttaagacaagatgagtgcccatctgtaccataattatttgtttgcactgtctggcttacattgaacaaattccatggccttaactgcggcattaaccttggggtgaagggaggtagcaaagattgtttgcaccctactcaatactgttcaggggtgaactggacggtttaccccacccccatgttttctgtttgcattgtgcaacatgacctggtgttggcctatctccgcggaattgctctttgtagagcccgttgtggt

SEQ ID NO: 34955 - DNA, 901 bp, Zea mays
  Clone ID: MRT4577_131881C.1
ctatgtctcgcgtgtacgagctagccaagcgtttcgttgcagaagcaaacaagctcacacaaaccacacgcggagagccagaggagtggtgtggaaggaggaggaagagcgaggggtcaagggctgaagctctagagagagcgagtgagttcactcaacgtgctgcggcggcggcgacgtcgtacgtcctacgcacaggatgtcggcgtcgagcgccgcgtgccgcgtatgtggcggcgtagcggagtgcgcgtgccacggcggcgccggcgcgcggtgcggggccgccgtcgcggacctcaaccgcgggtttcccgggatgtggcaccaccaccaccagcagccggaggaggaggaggagcccagcgtcgccggcggtggcgcggcggcggggctgcaggagttccagttcttcggccacgacgacgaccacgacagcgtggcgtggctgttcaacgacccggcgccccacctgcaccgcggtccggcgccggccgcggccgggaacggggttgtgcccgaggccgcgcagcggagagcgccgctgttcgacgggtacgcgcacgctcagtacggccagctgccgggccacgggctcatgttcgacgtgccgctgagccggggcggcggcgacgacgacgcggcggtgctggaggcagggctggggctaggcggcgccggcgccggcgacagcaatccagcgacgacgtccagcgccacaatcatgtccttctgcgggagcacgttcaccgacgcggcggccaacggcagcgcaagcggcgccgacccggaggtggaccgagaggcgaaggtgatgcggtacaaggagaagcggaagaggaggcgctacgagaagcagattcgctacgcctcccgcaaggtctacgcggagatgcggcca

SEQ ID NO: 34956 - DNA, 410 bp, Zea mays
  Clone ID: MRT4577_131882C.1
tttaatttttttttttccatcgttttctcttgtttttttttttttattttaccgcttttttcctctgggggcaataaatgagatgccaaatggtgcatccaacgttgccctttccgaagcatggggggatttcacttctaaacgcttccggacccaactttttaatggcgcctttgccaccggatacgggtgcttatctcggagggacacccatttaagaaaatgtgggtcctttattaacctaagggcccacagaaccaatcccaacccttccttagttccaaatttcgacccgttcattaaaaaaccgggaaccggtccaaccaaggcttggttaccaaacaaggagaaatccaccgatcttccgtaaaagtcttttaaacaaaccccaaaaaaaacctttaaagggg

SEQ ID NO: 34957 - DNA, 346 bp, Zea mays
  Clone ID: MRT4577_131883C.1
cgtcgtaagctcggaattcggctcgagcgccactggcggctagggtatctgcctgttgcgccagccctggatggtctacgtgctcatccatacttacaagcccagactgaccctgaaccggagtctgatcctgaggctgatgtgatagagggacgtgccaagcttggtaagctgatagagggctacttcaacatggagaacatatgctcagatgcgcaccttatgcagcacagggatggctagggatgggttgatacatatctaatagctggctatagaaaggctcatggactgcagaaggacctacaatatataaaagagacggtgcagcactcagttgcgctgg

SEQ ID NO: 34958 - DNA, 359 bp, Zea mays
  Clone ID: MRT4577_131884C.1
cgctaacttacatggtcgatctgtcaggtgggcacacgaccagcgtgtcgtactgggacaggctcgtccggctgatgaacctaaccaaggtggtcgaagcttttcctacgtggaatctgttgtgggtgctggtgatgctggtcgcgtgccccgtgaactacgatgtgaacacgttcaaggtcatggacgccatggcgcccatcgcgttgatccatggattcttccggaccctgaacttgattaaggggttgctgtggttctatcaggtgctatcagggaccgctgctgccagctctatggatacatggttgataccaatcatgctttcgtacatggacgccttctatgaagcgatgggc

SEQ ID NO: 34959 - DNA, 333 bp, Zea mays
  Clone ID: MRT4577_131885C.1
attcccgtgtgtcgacccactcttcctaaaaaaaataaaaaaaaaaatctataaaaaaacttaaaaaaaaaaaaaaaaaaagggacccttagcgtatctttttccccaagttcgcacactctttctctgctaccttatatcttttctatagtttcatctattttcttttctgtccccgtttttaaacaacgtcccctctgttaaccccctctcttccccttttttaatccttttacttcatatacccttttcctaatctctctttatccctaagagcccctcccttttctctctcccaaacttattctcaccttgtatctaatgtttcaccct

SEQ ID NO: 34960 - DNA, 430 bp, Zea mays
  Clone ID: MRT4577_131886C.1
ggcaaaaaagtaaaaaaaaataagcaggcccccaagaacaaacggggctaacataacaggcaggaggggacaagggccccccccttttgaaaacaaagggctactaggggggcaaacaaaaacagggaagggggggggggaaggggaagggaataaaaacaggggggggaaacaaaaaatcagggatcgggggcagcacccaaaaacccccccccccggaaccaaaaaaaagccaaatcattggtccggggggtcgcaccccccaccaaaaaggcccttctctctcgggcaaccctttccaagcagggaaacaacggacccagggcccacacaggcggaaaaattgggggggggcaaaaccaatcacgggtttggggggccagccctgaaaacccacccacctgcaacggggttgaaaccacaaaacagg

SEQ ID NO: 34961 - DNA, 874 bp, Zea mays
  Clone ID: MRT4577_131887C.1
gccggccggccggccgggcacgtcttctccctcctatcgcgcactaagtacttgcttcgatcgccatgaataccttctcctcccacaatgcaaggacggcgctgctgctccttgcactgtccttttcattggccgtggcgagcgaccccatgttctcgtgcggcccgtcatctgcgtcgcgggcctaccctttctgcgaccgttcgctccccgcggcgcggcgcgcggcggacctggtgtcgcggctgacggtggcggagaaggtgtcgcagcttggggacgaagcggcgggagtgccgcggctgggcgtgcctccgtacaagtggtggtcggagggcctgcacgggctcgccttctggggccacggcatgcggttcaatggcaccgtcagcgccgtgaccagcttcccgcaggtgctgctcaccaccgcctccttcgatgagagcctctggtttcgcatcggccaggccatcggccgggaggcccgggcgctgtacaacctgggacaggcggaggggctcactatctggtcacccaacgtgaatatcttccgtgacccgcgctggggccgcgggcaagagacacccggcgaggacccggccgtggccagcaagtacgccgtcgccttcgtccggggcatccaggggagcacccccgccggcgtggcggccgcgccgctccaggcctccgcttgctgcaagcacgccacggcctacgacctcgaggactggaacggcgtggcgcgctacaacttcgacgcccgggtgacgctgcaggacctggccgacacgttcaacccgccgttccagagctgcgtcgtcgacggcaagggcagctgcgtcatgtgcgcctacactgtgatcaacggcgtccc

SEQ ID NO: 34962 - DNA, 572 bp, Zea mays
  Clone ID: MRT4577_131888C.1
aggggggaggggacgggaccggtggacggacttgacggtagacacagtcacagtaacaaacgttgtcgtatgtcacacggcggcagaccgacgataatagcccgtcagaccagctagctagctaactattagcgcagcactacacgctgggaggactgtttttcacaataattactactatgcttttacgttctgattagtagtacttaatacacgataatgactggtagtatagcgagtataataaccactaaaatatcaagttaatagggtattagtagtagtacttcgttcagttcttcaacctaatcctcgataagttgcaattgtagtattagaacaagtaagtctagtagttaccacagtagtaataccatcagttacagtcttatctactgctttatgataatgatttagtacagtcgtaagacccccagatcatacagttaaacttcgattttgtagtaaccataatacttggaaagtactagttacatttaggttcgtattagtggttacatttacgtttgtgttagttttcgtcttagtcttaattttattggtcgctttgc

SEQ ID NO: 34963 - DNA, 290 bp, Zea mays
  Clone ID: MRT4577_131889C.1
ggacagaaaattgtatgtgttaaaaaacaaatttccagatcggtcttgttttattgatctctattcctgcctgttaacgggataaagggccaaaccaaaccctttttaaggttcttgactttggtggatctaagaaaaaatttaaaatccttccaaaaacaaaaattttgttcctgaggcctttcccattaaaaaattgggaaagtttttcttccgagggtggaatttgaaaaacatcctcctccaaacaggctttggcaaaaaggaggggccccctggggtttccattg

SEQ ID NO: 34964 - DNA, 440 bp, Zea mays
  Clone ID: MRT4577_13188C.1
agtcctgcctcttttatttgtttttattttagtgtactttattctattatttatttcttttagtgggtggggcactctataatgtaagtggtgttgttcattctttattttctttatcattttatatattttttcttttaatttttaatgacgctaaaaatctacctgtttttgaaagaaatttattttttattctattcaaaaacaaaaaaaggggggaataaaccttcaaactttaacacaaaacccttttttttcaaaaaagccggaagtggaattaaaattttacccaaccataactgtcataaccacatatgggggttttaaatcaatgaaccctctcctcccttaaatatatgcgtctgacaccttcaacattgtatgacatttcattgtaaatcccacatccctgatatatcttatgacttgaattgactttt

SEQ ID NO: 34965 - DNA, 206 bp, Zea mays
  Clone ID: MRT4577_131890C.1
ttattttatagtttttaaaaaaaaaaaaaaaaaaaaaagcaataaaagccctaaaaaatgcaccgttgggtccctcttgacccagcgttatcttgccgcttctttggcggaataaaggggacataccttgcctcgctgtgtggaaattagcattcctctctcgctgaccgcgcaatatacgacaccgcacgcacaaacagacaata

SEQ ID NO: 34966 - DNA, 731 bp, Zea mays
  Clone ID: MRT4577_131891C.1
caacaaacaaaaaatggttgcgagaaaaaaattctatgggccgggtaataatatcgcccaattctgcgagctgaagactaaaacctcacctgaaacaaccaaaaacaaagaaagatactatccacaccgctttggccgaccaaaaatacattcagggctggtttaatgaccacatggagacattggggaggaatccccttgctattctccccatggatcaatttatttcactggtcaccaaatcagcactcggcggcttaactagtaagtcttcagaatacccttctacactctgtcgttcaaattgggggatcatatcgagcgttcagcattttgtatcccgtatttgctgtgacctgtgatcttgcgtacaacaatgtttgccagtccatacaaggccatttgcaccgagcatgtctccctccaactgttccctaccaatgcaatgtatgaccaaccagtgggcacctgtatattggaaatccagcacaactgctcatcaagccccacaggctccccttgcgacgctcttttgccctcggaatttcagtgacgggctgacggcgttctccaaccaaatgataaagccctatcagtattgaggggggaaaatatttagtgcgcaaagatacgattcccgttccccacagcagctttttagcaagaagcacttccaccagacgcttagatacttccaggcaacccaggctgtcagaatcgcagggcatttg

SEQ ID NO: 34967 - DNA, 332 bp, Zea mays
  unsure (1)..(332): unsure at all n locations
  Clone ID: MRT4577_131892C.1
ggcttgngacctttgggctgatttatgtgcttgtcccccccccccccccccccccccgcccccccccccccccaaaataaagggggacagggaccccaggaggagtagcagggacggatcttacgagggaacctaaggaaccgcgggacgacgatatattcacattcggacacacccagcccctaaattcaacccggcggacccgctcgaaaaccgctcgtcccgctccgagcgtcatcgaaccgacggtctatacagccgacaatttgaagcagtgccgtcggattagcggagtacgattcgatacgtccgaaaccggatccagacgcagg

SEQ ID NO: 34968 - DNA, 583 bp, Zea mays
  Clone ID: MRT4577_131893C.1
ccggccgggagcagcagaagcaaaccgagaggtgaaccagcagcctccaataaaagccagcacatccaaataaaaccgagagacctcagccctcaggcaagccgaccgccgacgtaccaccgcgccaacccgagagaaagatggagatgatcaagaggatcctcatcgccgcgctcctcgtagtcgccgtctcggccaccgcagtgctggcctccaccgaggccgccgccgccggcgccgcgcccgccctcgccgccgcgcccgccgcgctcctcttctccctcctcgcctactacctgcactaagcggacggacggacggacgcgcgcatggcattggcatgcatggactgttgaacatctatgcatgcatggacgacgtcacttgcaacgctgttcccatatagtactactggtctgctatgaatatctatgcatgcatggtaacgggttgtgttatttaattattattattacgtagacattactatttaaaattcatgtgttcgcgtcaagtcgttctgtaatcttgtgatggaatatatatgatatttccttttaaaaaaaaaaaaaaaaaagcggcc

SEQ ID NO: 34969 - DNA, 490 bp, Zea mays
  Clone ID: MRT4577_131894C.1
gtttacgccggattttccgacgcactagaccgacccgcgaatcccccgcgcgcgcgccgtgcggtcaccgtccgaggccacggcaccgccggcccccgcccccgccccgggcgccaagagcaaaggcaagggcgacgcttcctcctcggcgtcctccttctccacttcaacgaaggtgggccccgcgcttggcggcctggagggcggcgcgctgcttggggtccgcgggggggtcttgggtgggtttgggttccgggggaatcaaggggggggaacgggttcccgccaaggggaagggaaccaagggggctaacggaagtgggatcaacttgaggcccaaaaaaacaaacaaccgctggacttcgaacgaggggcctaacggttaaggaaggggtaagaagctggtaacggggtttcttgaaggcgaggattcaaaaacttatggaatcttaaggccacctccaaattcttcgctaaagaaaggggaggc

SEQ ID NO: 34970 - DNA, 787 bp, Zea mays
  Clone ID: MRT4577_131895C.1
ggaacccacgcgtccgcccacgcgtccgcccacgcgtccgcccggggcaaaccgagaggtgaaccagcagcctccaataaaagccagcacatccaaataaaaccgagagacctcagccctcaggcaagccgaccgccgacgtaccaccgcgccaacccgagagaaagatggagatgatcaagaggatcctcatcgccgcgctcctcgtagtcgccgtctcggccaccgcagtgctggcctccaccgaggccgccgccgccggcgccccagccgcctccgagtcgtcggcgtccgccgaagcccccgctggcgccgccggcgccggcgccggcaccggcaccgccgcggggccctccgccagcggcgccgcgcccgccctcgccgccgcgcccgccgcgctcctcttctccctcctcgcctactacctgcactaagcggacggacggacggacgcgcgcatggcattggcatgcatggactgttgaacatctatgcatgcatggacgacgtcacttgcaacgctgttcccatatagtactactggtctgctatgaatatctatgcatgcatggtaacgggttgtgttatttaattattattattacgtagacattactatttaaaattcatgtgttcgcgtcaagtcgttctgtaatcttgtgatggaatatatatgatatttccttttaaaatcattcgtttgaaatgcaatgtgtccagtcctcaaactgttactaccattatattgacggaatatatatgatttcctttttatgtggtataaccg

SEQ ID NO: 34971 - DNA, 235 bp, Zea mays
  Clone ID: MRT4577_131896C.1
agagtgagctaagcttttttatatgatacaagggcggggacaccaagaaacattgttttggaaacctgcaaccattaaaagcaccaacactactgtgctgaagaagcttaagcattcttaggggggatttcaaaaataggggggaaagttatgaattaaaattaaccagtggaaccacagcaatggaaaggggcatactcaccccccaatgaggcatttttcatactatttctaa

SEQ ID NO: 34972 - DNA, 367 bp, Zea mays
  unsure (1)..(367): unsure at all n locations
  Clone ID: MRT4577_131897C.1
accaccaccccttttttcactttttaccacccccccaaaaaaagagagccgggganaaagcctttatattataaccccctcaacaccaaaaaaaaacacatttgcctgacaatacatttggagttccatccacggtatatttggaaaaaaacaattactttaaaaaaagccccattaatatgaaaacaatatattcttccccccaaaataaaaggttatcgcattgctggccaacccgagacaacatacctataaacatttttaacgcctgagataaaacccactttaccccggtgcaatcaaacaagcatggaggcatgggttaattcatttcaaagggctttctttaaaaaaagaagaggggatc

SEQ ID NO: 34973 - DNA, 1779 bp, Zea mays
  Clone ID: MRT4577_131898C.1
ctgccctcctttttctttgttttaggtcaacggtttttctgtgatttatgtgggaggtcttacaagtacaagcagaatatgaccgctcataaaaaatacgagtgcggacgcgagcctaaatttcaatgtgtcgtctgctttaaaaaatttaaagtcaaaagcaatttaaaagcccatttagccgttcatggattagcttcttattctttttgattcctaattttttaaaaaattatgttcctgacattttgcttccgtttactccgaaataagcaaaaaaatttttcgtcccaagggtctaatttacgaaaaaaccaaattttatcgtccaatgtatataaagactgtaaataaaaaacattttttaatgaatttgtttaaaaaatacattttttctaacattgtaaataaaccatattttccttcctccctttccttatttgtttatctttattattatttttttttattatttattattttttttaggtctctttgtatgccctcagtgtggaaggtcttatcgaaagttgggcactttgagccgccatgttaaattcgaatgtgggcgcgaacgtcaatttaaatgccacatatgttctaagccttttcacaggagagacgtacttaagcgtcatatggtcatacacagcataaatatttttccttagtttttgttttttttttctgttatattttttctgtatattttatttctattatattttatttttatttattttgttttctaatctatttttgactcctcacttttttcggagactgtcgacctgagaatccatggaaatatggggaaagccccccgcctaggtccctccctgttacaacaaaatagggctttcgcttttatgtcgctgtactcatgattttataacctgaaaattttgtttctttttttattgatctatgttgtttttagggttttattgtgaatgcggtaaaagatatttacgtttgaacacgttgaaccgtcacaggcggtacgagtgtgggaaagaaagacgtttcatatgtactttttgtaataaagcttttaaaagaaaggaccacctacaggtccacctgttatccgctcgtcattaaatatcaagtaagcgttgtttttcttgatgggcccatggcgggggctttaccgttaggccaaaaggttattccattttttttctgttatgtttttgttttaaatcaaatatttgacatttttcttttgtttttagttaagccaccatttctgtgtgtctgcgggaggaaatatcaccatctcggcaatttgactcgccataaaaaattcgagtgcggtcaagaaaaacgtttcgtctgctcaacctgtgggaaagcctttaaaagaaaagaccaacttactgcccactctattcaacactatcctcaccaataaattattttgaacattttcattttttttaaaccctctcattttttccattgattttcagcaaacaaaaattagttttaattaaaattttgtttttaatttttttccttctttttttatagatgggttattcatgtgcttccgttgtggtaaaaagttgaagaacagcaccgtcctttaccatcatgttaactacacttgtggtgtcgagccgaaatttcgatgtgaagtttgcagcaaaatgtttaaaaggaagacaaatcttaaatctcattatattgccatacatggacaagatacttaaattgtccagataattaattaattattggtttaattaaataataaataattatttttaaaaa

SEQ ID NO: 34974 - DNA, 308 bp, Zea mays
  Clone ID: MRT4577_131899C.1
gggccgggttttccactcggcggctgccttctgcgcctctctctcggcctctgtcccttgcaagttcaatctcacctccaaccatggcctaaagagaagtcccacatcaacattgtggctattgcccacgttgactctggcaagtcgaccaccacaggacacctgatctacaagcttggaggcattgacaagcgtgtgatcgacaggtttgagaaggacgctgataaaatgaacaagcgattcttcaagtacgcatgagagctcgacaaactcaaggctgacccccacagagtgatcaccattgatat

SEQ ID NO: 34975 - DNA, 306 bp, Zea mays
  Clone ID: MRT4577_13189C.1
aagagcagttctaatctatcagcagattgcacaagtgacaacatagctggttctggattgacatcacgtaaaccgactacacatcgaaagatcatcggcgattgaatatagctcacctatcaagaccctgcgacaggcttatatctcgatgccaactctgtcaatcattgtgctcaaccttgacactctgcagataaaaattcagctcgtcctcattatgctgaacctgtccatggtcatcataaggctctacataaggctcattatcatctagcgggtccagtactttgaggggatacttaccag

SEQ ID NO: 34976 - DNA, 338 bp, Zea mays
  Clone ID: MRT4577_1318C.1
taaaagatggtgatatagcgtataagtatttctgttagaaaattctctcgtaagtatctgaacacttaccaataccgaaagtaaacaaaattgttgaaattggaaaggaagtggtcgaacattcagaaaaatcaacgaatacattccttatccatcttttagttatgaacgcctaaggaactaaaaaagaatccttaacggggaaactatcgtcatgacacgaagaatactatctctcgcataggaataactagccataaaagaaggggagtgactgagcatcggcgaataaacgatagaccgctatcaatagacctgctaaagccccgaaccataga

SEQ ID NO: 34977 - DNA, 188 bp, Zea mays
  Clone ID: MRT4577_131900C.1
accacaggacgacatgagtcgcgacctgcgacgacagagacgcgtggactgacgcgtgggcgcgtgcgaaccaagcagacgccagcagacgaagcgaagtcgtcgccggagcaagaggaagagcgatgagcaacatgtcgtagcaggcgtacgtcgatgaccacctgctgtgcgacatcgaaggccag

SEQ ID NO: 34978 - DNA, 266 bp, Zea mays
  Clone ID: MRT4577_131901C.1
aaagccaaacatcccgttttggaattatcctaaggggcccagaaaggccctcccccattttcaaggggggaggaccccttttttcaaaaggctggtgaaaaaaaacttgggctccatgaaaaataagacggccccaattaaacccacgaaattgcggggttctttgggtggaaaacacgcgtggagccctcagggggggggcatggggaactctgatgccgaagaactatgcttttgcctaggggcaaggaatttgggtttttaaa

SEQ ID NO: 34979 - DNA, 439 bp, Zea mays
  Clone ID: MRT4577_131902C.1
gacccatcgcgtccgacttaaaggtgatccgagagatgacttttcctttccttggttattccctgctggcatgagacctggtgcggaccgtgtggccaacctgtgggataggctgctgtgtgcaaggcccagcactttggatgtcgccctcccgatatcagatcctaccaaggcttctagaagaaaggtgcgcggcgagagggctcttgaggaatggttggctgccgacaatgctggtgacacagaggcctggcctcgtggccatggctaccgggaagactgagaacgttgttgggaccatgagctcctgttttaggagccatggctgtgctcgctccagcgatgatagctctgcacttttgccttctggagatggagatcttctgtgcacagcgaacgattgacacggtgctcgtaggtcctttttttttgcccgctt

SEQ ID NO: 34980 - DNA, 231 bp, Zea mays
  Clone ID: MRT4577_131903C.1
attcggctcgagggcacaagcaatcctatatctatgcgaattgtctagatcttcactaccccccattagtcaggggcacctccgatcaatcgagagagactgactctgatggcaatggctacagagcgaggctccggcgaaggctatcgtcttatgcaccatctactcatgcctcttggtgaggcaactggaccctttatcgatgcttcccaatatccaagggaacctatc

SEQ ID NO: 34981 - DNA, 674 bp, Zea mays
  unsure (1)..(674): unsure at all n locations
  Clone ID: MRT4577_131904C.1
ngatacttatgtaatgtgggcacaataatggtaagaaaatttgattttaccaatattgactcatctgttggtcggtcacctggagtaccctgatttatggacaacaatatcgaattagtaaagtggatttaagaatatgaatgtacacaaatttttgagtcaccttttgtttcatgcaccataacctataactaatacatattagtaatgaaaacaattcgatatacttagcaagaaagttgattttcactgtcacctttgatgtggtagcacacttggttttatcaaaggtagttgcagattgcatatctttcctttttacctgtcattacatcacaatgagtattcaatattttaatatttttggatgattacgaaatagttaattttgtacatactattaacttcaatttagttatgcaacaccctagtgtactgccaattaaaatgcatctccattcaagaatgagtagtatgtgagatactactacttactaatgaacaatgaatacaatacatgggtcatgtgtagaagtacctggttcttagatgcttcttcatttaaggaagtagaagttggttccttgggcatactctgtatgtgcgagacatcaatgtaaagataagcaatcatgattatgtatgttgaataaatttattgcattcccaccttc

SEQ ID NO: 34982 - DNA, 1194 bp, Zea mays
  Clone ID: MRT4577_131905C.1
accctcgggccggccgggaggggctgctttctgaaatagaaatcggcccagtagcgcgcgccgagagaacccagccccgggccacgagccgacgaccgccgccgccttgctgcgccagggcttcgtcgggcattttttccggtgccagcgacgaggacccaccgcaccaggattctgattactcttcattaggttataaatgacagagaggcatcgtgcatctcggcaatatcatgacgaccctcgggggtatcgtgaagctccacctcctccacttgcacgaacaaggcttctctctccgcgacgcttggaagctccacctcctccacttgcacgaacgaggcttctctctccgcgacacttggacgaggaattgtctagtcgccatgccgagatgcgcagaatccgtggagacaatcagcgtctggcagatgaaattgtcagtctcaggcaaaccatgcctcgtttgaaagaagacctccaagtctcaagtcaagctgtaccaaagctccgggcagagaaagagcttgaatcgagggagctgactcagaggaatctgaagctggaagctgagctacgtgccttagaaccccttaggcaagatgctttgcatctgcgatctgaagcaagtaaactacaatctttgaagcaagagttggctgcaaaggttcaaggtctatcaaaagagcttgaacatcagaaatctgaaagccagaaaatgactgctatggtagctgaacgtgatgctctgtgtcaagaattgttgcaggccagggctaatcttgagtttgagaagaaggcaaaccagagcttactgcacaggttcaggcatggagaaggatcttgtagctatggctcaagaggctgagaagctaagggctgatatttcgaagagaaacacccctagtttcagcggccgtggagcttatggaacttctttgtcgacgcctgggatgggtttgcaaggcatgtatgatggcggctatgctacggccgggagccgctatggcagtggcgctggggcttggagctcgcatgatccccatggttacccgcatctgtaattgtgcttctgacccgtattcactcctgaacagctcctagagtactttggcaattttctgtagtagtatataacttgtgctttttggtgcaccacattgctaccctttctggtcaatgaaatgcagtgta

SEQ ID NO: 34983 - DNA, 342 bp, Zea mays
  Clone ID: MRT4577_131906C.1
tcgatgtttcggagttgcgcgtacgatttcggacgctgctacagtcactcagggagcacttcattggtagctggtacctccatgcacggtcgatcccggacaggcacgaggaaccatggcggcgaaagggaaggaggtttatgttggcgcaattgacgagggtaccacacgcacccgggttatcgaatacgaccaactcgtacaagctgtcggatcgcaccaggtccagttcaagcaacactaccaggtggaagactggtgtgagcatgatcataggcggagtatagagactgatggggtgtgtctgaaagaagccgaaggcaaaggccaagatggtagaca

SEQ ID NO: 34984 - DNA, 253 bp, Zea mays
  Clone ID: MRT4577_131907C.1
gacatcaagcggccggtcgttttattgaaaccaaaacttttttaaaaccatccctatataattggccataccaaacatgataatggggggcgagtacaccgcactttttcatttttaggtatgaccaagatggattgcggggatttcccaaattcttggatcaaatgaagggcggaatggctgggggggccccacaagggttggtgcggtagctgggcaactggtacctgcccgggcggccgcttgaaagggg

SEQ ID NO: 34985 - DNA, 561 bp, Zea mays
  Clone ID: MRT4577_131908C.1
gaggagccgccatcgaccgtgagcatgctggtggcagcgagcccacacctgctcacaggcttgctgctccccttgctgggtgacccccattctcaccacatgttatggatatcaatgatgggggatggtgaaccctcctgccgctcccctagttgcgtgacatctctcgctacacaggcttgcttatgaaaaaatgctatacgtccgccactttgggacatacccatacattaggtagatctttactcgtgagctttatgcatgctgactggactacatcacgctgcttggaaataccactgtcatcattgctggcctcaacacatttagacctgattgcacacactctctttgctatcacaacgggcttggcactcctcccttcactgggggtgagatggcaacaatcgcaaacatccacttcctcttccgggttggctcctgttcttcttaacggtggtgacgaccgcctatgccggaatcgccggcttaagggtttcgatgcttaggccacccaccctgtcacacttgactcttaacttgccacacgagaacatccca

SEQ ID NO: 34986 - DNA, 317 bp, Zea mays
  Clone ID: MRT4577_131909C.1
ccccccgcaaactatccatctcggggtcgcctggaacatcataggcggggcggaagaatggttcttgaaccgtgcgggggcctgattctacgacgacgccgaggcctacggcggcctaccgagtggacgggtgcacggacgaacggatctccggcgcctgacacattttacaagcgctgcctaccagaagaggacggatctccgttgcctgaagccctggcatctcctagacgaagtgactagctttttaactggcgccgaggtctgatgcttgaaaagcacggcgacctgccgggtttgatcaagcaggcagacgc

SEQ ID NO: 34987 - DNA, 465 bp, Zea mays
  Clone ID: MRT4577_13190C.1
aaacccgggtttttaagggttggctttaaacccggccgacggccccttaaacaaaaaaatttcgggggcccaattggttcaaacatacccttttgggttttttaagaaaaaggttttaatcccctaggccccccccaaaggcaaaagcttatttttaaccccgggcccaaataaagagtttcctggaacctgggcccccttttggggggattggacataccccggccttagggaagggccctaaaatttttccccggagcctttgacaacaacccgggagcagcctacacctttttttgctttgccctaaaagaaaattttgaaaagcccggcccactccccaagagttttgggggggggaacggggcccaggggaactttgggctcagcgcaaagggccttccccagttggacgtaatggggggggtcacagtcctaaaaaagcccccaaagttgggggggggg

SEQ ID NO: 34988 - DNA, 225 bp, Zea mays
  Clone ID: MRT4577_131910C.1
taaaaaaaaaaataatttataacaaaaacatataaaaaaaacttctaccgttctaaaaaaatccagggttacgtacacatacgggcgatgacataatttgtctttctttttaaacaaaccaaaattcactacccttcctttcacaaatatattttctttaaaaaccctcctaattccaaactcattccccttttatcacaaccccttttctccaaaaaccctttt

SEQ ID NO: 34989 - DNA, 942 bp, Zea mays
  Clone ID: MRT4577_131911C.1
atggccgacaaggtgaccgttgttccgtcgcgcgatccgtggcctttctccaccgtcacggtggacgatatgaaggccctcgtcgctgatggtttgctccgtcccctctccggtgacccgcaaccagagtggatggcccctgcgagcgaggccgacccgactccgctgcgggggggtcccgacgccttggaggaggggcgcgcagaaccgcgacccgtcttggggagcgacgaccttatccccgcacggcgcgaccccaatgagtggcatgggcaggcgctccggttctggacccgcggcgccttgaaacccctcttcgtccttgacgatgagcgggaggaggagtctcgggatgagctccgtgagtatgccgagcaagcgatggggtcgcttcggtcgactatggagatcctttccagggacgttcccagggtcctccagggttcgctgcggttcctgagggccgcgcttgccgaggctaatgaacgcctcgcccaacggagcactgaggtggcggacctttggctgctctgtgatgagctagaggtggaggcagcggtggcgtgggcagaggcggcgtcggcacggacggaggcgcggcagcgccagctggagcttggccaggtcattgagttcgagacaactcttaacgattctgtcaaggcacttgccctggcggctgagcagaaggaggccgaccgcgtggccatgtctgaggctatctcggccttctgccaggtctttggcctcgatgacgtcccctcgggtagctcccctagagtcgcctgcgggccctgggcggccatgtgcgcagcagactccgcagggcgctacatcacggcgttaggcgggccttcgccgtgctcgcttcccactacgacgtggatctggagcgggtcagcgaggggtactgtctacccgatgaagatgaggctgccttag

SEQ ID NO: 34990 - DNA, 993 bp, Zea mays
  Clone ID: MRT4577_131912C.1
atggcgcaccggacagtccggtgcgccaccggtgcgccaacggtgcgccaccggtgcgccaacggtcacttccaacggctagttctgacacagagccgttggactcatggcgcaccggacagtgaacagtccactgtccggtgcacaccggacagtccggtgcggtgtccggggcctagatgctttcacaccgccaagtcgctgttcatccgccgcgagaccgacgtctggggttcgctgtggttcctgagggccgcgcttgccgaggctaatgaacgcctcgcccaacggagcaccgaggtggcggaccttcggctgctctgtgatgagctggaggtggaggcagcggcggtggaggcagaggcggcgtcagcattgacggaggcgcaacaacgacagctggagcttggccaggtcattggcgagtgggaccaatctcggagccaggctgccgaggctgtaggccgggctgaggcccttgggggtcagctggccgaggtgtctgctcgggccggagcccttgcagaggacctgtccgtggtcgtcgggtctgctcagtccgcccaagccatagcctcggagctgcgtgcccgggctgaaggtacgtttcggccgctttgtgacttcgattcagcttcattcttcaactcgtgtctgaagaattatgttcggttgtctacagagttcgagacagctcttaacgagtccgtcaaggcacttgcccaggcgactgagcataaggaggccgaccgcgtggccatgtccgaggctatctcggctttctgccaggcctttggcctcaatgacgtcccctcgggtcgctcccccagagtcgcctgtgggccttgggcggccatgtgcgcagcagactccgcggggcgctacattaaagcgttaggcgggccttcgtcgtgctcgcttcccactatgacgtggatctggagcgggtcagcgaggggtactgtctacccaacgaagatgaggctgccttag

SEQ ID NO: 34991 - DNA, 354 bp, Zea mays
  Clone ID: MRT4577_131913C.1
acaagcaccggcgacgaagcatcctcctatacaactatctcacgcgtttgtcaaaaccagcaaagcattatcagccgccctttcttacaagttgtgttggggacaacgccaacgcaaccaagatcccatttatccttacatctcatattttacccacatacacgcccgcttctaatcctcctatctacatactactctccactcctatctcaccctgacttgataggtcaagatccatcttaccaaatctccaaaacattctacctaatttatcacacacctataccgttgatgagctcatacttactagagacatttatgaccatactttttcttttagtttttaacttaatg

SEQ ID NO: 34992 - DNA, 1622 bp, Zea mays
  unsure (1)..(1622): unsure at all n locations
  Clone ID: MRT4577_131914C.1
gcggggctcgggtgcncccttcgctgcccttccccctccgcgtccccggctccccggtggccgccgctccaccgctgcccacggcgcggcccgcccgggcctncccgctccctcctgccgcccgcgcgcgggctccagcccctcggcacgagagagggacatagtaagaactcaccgaagaccttcagctcatctggacactcgggggttagactaaacaacgaaggtttcgtcctcgaccggcccggaatagattgtggagaggatcaggattgtgtgctcggtggcatagttgccctgggaaagtttgatgctctccacattggtcatcgggaattggcaatgcatgcttctaaaacagggactccttttcttctttcttttgtgggaatggccgaagtacttggctggacatataggcctcctatagttgctcattgtgatcgcaagcgggtcctttcatcttgggctccatactgtaggaatgtggtacctcttgaatatcaagttgaattttcgaaggtcaggtccctgtctccacgacaatttgttgaaaggttatcaaaggatcttagaataaaaggtgtcgtggcaggtgaaaattacaggtttggttacaaagcatctggtgacgcaactgagttagtgaaactatgtgaggaatttggtttaagtgcattcattgtacgctctgtcatggacacagcaaaaagatctcttaatggattttcaggcgctataaattcgagtgataaaggacaggtttcttccagccgtgtccgccatgcattggctatgggtgacatggaatacgtctctgaattactagggaggaaacaccgtcttttgctaatggttaaccaacactgccttcatgaaaagaaaagcatggtactccctaattcatgcatgctgaacatgccaccagctgaaggtctctatgaaaactgcgaccttgttaatggagggtatcttggaccatgtagagtgatcatcaactctgataccatcatcattgagatgaaagatgataacagtttatctctaaatcctattcaagaagttcagttagggattgagtttggatgaagttatatactttttgcatctgccatcttgtggagattattgctgaaagaagacattggggggaatactgcaaggggaagtcgaagactttgttcaagcgtgcagtacgcctcatcgtgattgagttcaggagcattttgtggtctcacaagaatgctttattacagaaaaaaaaagtggagatcagtccagggttaccatacacacaaggacaatggagtcaaactggcattttttttggggtctgatgacaagttgtatctatcgaaacaaatgcacggaagggggtttatcttgcaatcacgcattctgtaacttatacaattgtttagtctttagttggtacagacaggtagcagtgtcaacattgtagtaatgcttcagccgtttaactagaccttgattcagacaacattcgagatcactctagatttctttgacgcaaaattgcttctaaggggatgtttgtctgtttgacatggctttaacttatatacggaatttttcctctctttatttttgcccaaaaaaaa

SEQ ID NO: 34993 - DNA, 332 bp, Zea mays
  Clone ID: MRT4577_131915C.1
gggaccaaccatataatctttccttacattggaggggagggttacaggaggacagttttttttagcacatttttgggggggggattacaactggggggggggggggcaagaacacaaaaagcaacggggggggggggggggaacaaagttgttagcctaggggggacacggattattaactcgccttgttcgaaccgacgggtttttatttaggcgggaaaacttagcttagttccagacgggcggttttgtttggggcttaaataatgcccaacgtccagggaattgggccctttttttttttcgccgcttttgggggcggcgttttgggg

SEQ ID NO: 34994 - DNA, 194 bp, Zea mays
  Clone ID: MRT4577_131916C.1
acggactctttgtttctatatcatgagcggatcttctagttgatcctagcttacgggcgggtgcttgctacctcataactctcatatagtgtcacctacattcaatccactgtccgtcgatttacaacattcttactggtaaaaccctggctatacccaacttattctactcgcagtactttccctttttgcca

SEQ ID NO: 34995 - DNA, 135 bp, Zea mays
  Clone ID: MRT4577_131917C.1
tccgcggaccctaggccggtgcggacgccgccaccaccctaaggaagctcgtgggcaagctcagacggaggcggaatgctgctgccctggccacggccgaagcaccgccggattaaaaccagccagggatcctac

SEQ ID NO: 34996 - DNA, 289 bp, Zea mays
  Clone ID: MRT4577_131918C.1
cccggatcgcccgggtcgtgctgcaacatgaggacatcaccaccaagattgagggtgactggaagcggctcaacacactgatgcattatcaggtgatagggggtgtcttttcccctcttcagcttcccagaatgttctcttcccgctaagccttgctctaaggcctcaaaagtctacaaaggattttcctctccctgctttcctcctcatgctggagcatagaacagggattcttagctatggctgcccattggaattactgagggaactgatagaaaacgtgagtgac

SEQ ID NO: 34997 - DNA, 251 bp, Zea mays
  Clone ID: MRT4577_131919C.1
gtgatggatatctgcagcattcggcttagcgtggtcgcagccgacgtacctacactacacgaatgaccccacattcaaagttggtataacagagggagacatgatctcaacgcagccacatcacagatgtggcaaactatacggaatgaacaatattctatacagggcacttatttcatagccagatgtgacaagcattttcagttcgtacctgatctgccgcctgtaagcgttcacagacttgaagttga

SEQ ID NO: 34998 - DNA, 358 bp, Zea mays
  Clone ID: MRT4577_13191C.1
actgagaacagaaagaaggagtcttcatactcacctatctccgcgacccaaagcgttcccccttgtcccattcttctcacatttctcaccaccgtgctccgctaccgcctttcgacaacaccatgagagaatagcatgctcgatccacatcgatcaggtgcgatatccaggtcagaaaactcgtgatggaagctgtactgtctcaagcatggcattcaggctgaaggttagatgcccggtgacaagaccattgaggaaggtgatgatgctttcagcaccttcttaagagggacaggagcatgaaagcacgtgacccgagcagattttggggagcttgatcccactggcatggatgagg

SEQ ID NO: 34999 - DNA, 817 bp, Zea mays
  unsure (1)..(817): unsure at all n locations
  Clone ID: MRT4577_131920C.1
ccggccggggagcgaatctttgcgacaagcttcattcatctctcaccgtttacgctcaataccattcgcatcatgtctccgcgaaacctgaatgttctcatcaccagcttttctggtctgggactgccaccgactctcgttcttcctctgtccccatcaacaacagttacagaattgcgcgaacacctagatgaccgactgccaacaacccagtcaagactcattcttaccactctttcgaacaagcaactccccaactcatcagattcgcccatttccgaatttctttccacaaccgatgatgaatttctttccttgcgactcgcagtgcccctttgtggtggcaagggtggtttcggatcacagctgagagccgcaggtggtcgcatgtcatcgcgcaagaagaagagccaagaggatcatggatccagtcgaaatttggatgggcgacgcttgcgcacagttaatgaggccaaggctttggcagaatatctggctatcaagcctgaaatggagaagaaagagaaagagaagcgccgtgagcgttgggagcagatcgtccaggcctctgaacaaagggaggctgagattaagtcaggcagtaaaagccggctggacggtcagtgggttgaggataaagaagagagcagtgaaaggactcgangaggcagttttggaggccatgaaggccggcaattacagagataacctactcggcacttctcatggttccagctctacacagccaagcaacgaaccaatctggctcagatgatgataaggaagcctcttcaagggaatcacaccaccacccgct

SEQ ID NO: 35000 - DNA, 200 bp, Zea mays
  Clone ID: MRT4577_131921C.1
agtcacgtagcttcacacggtagggttctgcttctaggtcgtagtatcggttgtttggtatatagtagctgctctgtctgcgcaagggatgtagcggcgagcggttgcgattgttgctgctgcagcgatgatggtctccggatgacgggcggcgctggtgttggtaggcgttctctgcgcggtggccggccatggcggcg

SEQ ID NO: 35001 - DNA, 186 bp, Zea mays
  Clone ID: MRT4577_131922C.1
gtgacttactctctcgtatcttgaactcctcaaactcacctactggctctgaggctgggtccatccctagcgtcgtcccagtgccaaggcgcagccggccatcgactcaatcgcacttgatgacccatgaatgaacattacaagtaccttctcaatctactgcttatacgcgctcctgatgtagct

SEQ ID NO: 35002 - DNA, 161 bp, Zea mays
  Clone ID: MRT4577_131923C.1
cgaggccctggcttatcttccatttggggcgcttggcttcacaataggggtggcttgcttcaacacccatgctctcaacgcttgttccttcgtcgccacatagacgcatgctagcggcgctccagcgccggtggcatcgacacccgatgacctacgcatcc

SEQ ID NO: 35003 - DNA, 172 bp, Zea mays
  Clone ID: MRT4577_131924C.1
ttcttatatcttgcacttacaaatgaccagatatagctgttagagctaatgttaatgagctttattgtctgtatatgcctaaagcagtatagcactccctaaaaccactatcatggatgttaagtggttcacaggcttgcagtgctataatgaaacctgataatgccgtcga

SEQ ID NO: 35004 - DNA, 475 bp, Zea mays
  Clone ID: MRT4577_131925C.1
atagtattaaatcatatgatcgagcaccaattaatatatggatacagattactcaatcgggtcaaccaacatgcatggggtaaccactgacatgaccacagagactgtcgccgaacatgctgagagagagatggcgaactgcataactgggtgcgtctgtttgttttacacaccacacaatacctatgtatgggatgacagttcgatctttcttattattgttgaaccaccaccacaagctatatatagaataattatatccatgaccacagatcgatgtgatcagatatttgctggggtatgcacttgcagctgctaccgattccgcatgcgtgggcggacttggcggacttcgccttggcctgaaccaactgggtcgcggtacttgttttgctggggcacaccaacgacaactgtggcctgcgcagaagagctaatctactccatggaagggaacttgttgccgcacttgcag

SEQ ID NO: 35005 - DNA, 230 bp, Zea mays
  Clone ID: MRT4577_131926C.1
ctcaattgtcgagaccttctaatccatgacttcgtaccattatgcattgcagagtttgcttgccctcatgcttttaacttaccaattttatttctgttagttatgtttccttttcgaaaactatgtctcattaagagtagagccgagccgatgacatgtgggcatttaatccaaaattttgtacaaactgttgatagggacgcaaaccgttattggttgggtttaggctt

SEQ ID NO: 35006 - DNA, 219 bp, Zea mays
  Clone ID: MRT4577_131927C.1
atgacgacgcttattttacaggcatattccagtgattaacatgacccaaataaacataacgaatctctcgaacctttatccacgccacgcatacatataattaacgaattaagagagtttgaagaacaagaacactgacaactcatgatttggacttaaaactgaagtggcggagaggattgtgttgtcgggcatgcatgcgaatgcaccttctagttg

SEQ ID NO: 35007 - DNA, 254 bp, Zea mays
  Clone ID: MRT4577_131928C.1
cccacgcgttcgcccacgcgtacgcggacgcgtgggtttttttttttttatacaagtgccaaacatgacacgtacaaactcttcgtcgttttgcctgtaggcttaaattcccttgactcagattacgtctacaccctggacccttgtgctacggatcgctgcacaggatttcggtgcagacggtgagtgcgttctgcaggtactacgacctgctctggctctgaactggagcgttgagcatctgtagaagacac

SEQ ID NO: 35008 - DNA, 457 bp, Zea mays
  Clone ID: MRT4577_131929C.1
cctcgacagctcgttgtacggtgagctgcctgtcatggggtcgatgcctgacctttcatcaatatgggttcgatgcggttgcctacctgaagaagagggagaggagtgtgtctgttccaaagaactggatagcgaccctccgacagtcccttctacaatagactccccgactgccggtgtgacgcgagcaagttgaccgtttttaagagatctacaacatttgggaactgtagatttctgactacctacggtaagatcttggtgtttatgaagctcaaggcataaggcgctcggcctgcatattaaagtcccatttggcaaagtgataaaactgtcaaatctatggtggttacctgagcgtgcctaattttttgggtggataatttggtggcatgttgcggtcttgactggatttctctcacgctgaagacctattactgactatgcatgtgtgcat

SEQ ID NO: 35009 - DNA, 351 bp, Zea mays
  Clone ID: MRT4577_13192C.1
aaaaggggggggaagaaaaaccctgatgggtattacccgcacaggggaaaaacaattcgccccaaaaaaaaaatttaaaatccacgacatgcaaaagctcgaaaaggacgtaccggccaaaaaaaaaggggggcagtctaggccacccagagggcatgatttgaaaaaaaaaaattaagcaaaagtccctgcctccccgagggcaaaagcaccaagggacccccccaaccaaaaaaaaaaaccacggggacctccgaaacgaggaccaagcaagcaagcttgcatggggcacccatgcatttaattggggggacggggggacccgtattcacttgaaaaacccgaaggccc

SEQ ID NO: 35010 - DNA, 348 bp, Zea mays
  Clone ID: MRT4577_131930C.1
gggccctcgcatgtaagcccacattaattatggtcctaccccaaaatttgaagcaatacgattacactacccgacaaaacacaatgctgatggtaaacagatgcgacaaacacactctacaataaaacggccgaaagcgcagtagacagcccgtgggcaaggagctatgcacaaatctctcctggatcggttaacgggaaccgctggctggccagaaagggggggctacgtaatctgggatcagaggcctactatcaagaaaataaccatgagcaggctatgttagccggacggataggacacaaccctaccatggatccagaccacctaaaggctccatagactgac

SEQ ID NO: 35011 - DNA, 597 bp, Zea mays
  Clone ID: MRT4577_131931C.1
tgtcagtgtgagcaatgacctgaatgaacaattgaaatgaaaagaaaaaagtattgttccaaaaaaaaaaaaaaaaaaaaaaaaaaaaaaaaaaaaaaaaaaaaaaaaaaaaaaaaaaaaaaaaaaaaaaaaaaaaaaaaaaaaaaattaaaaaaaaaaaaaaaaaaccaaaaaaaaaaaaaaaaaaaaaaaaaaaaaaagttttttccttccccgggggccctttaaaaagggaaatttttgaaaatttccttaaaattgggggccgttgaaaatttttttaaaaggccccatttccccttttagggagccttttaaaaataaatgggccgggttttaaaaaattgggaattggaaaaaccctggtttacccaaattaaatccctttgaaaaaaatccccttttcccaagttggcaaaaaaaaaaaaaggccccaaccaatcccctttccaaaaatttcccaaccttaaagggaaaaggacccccccttttaccgccccttaaagcccggggtttgggggggttaccccaagggtaacccttaaatttgcaagggccttagcccccgtttttttggttttttccctttcttttttc

SEQ ID NO: 35012 - DNA, 161 bp, Zea mays
  unsure (1)..(161): unsure at all n locations
  Clone ID: MRT4577_131932C.1
tttgttttctctatactgtcccactttatggttgaggtaaggaataagagtgagtgaggggggancccgcgcagtatttctaatgtctcataaagcatacatgctttgataacctgagtgacagaatgacatttttgctaaaaattttaaatattaatgtt

SEQ ID NO: 35013 - DNA, 528 bp, Zea mays
  Clone ID: MRT4577_131933C.1
cattgggaccctcgaggccggccgggatctctgtctctctagggcttttgattgtagacgtcgacgctgatcatctcacatgccctgcgagaagacatcctgctagtcgccgatcgatacgatgtgcccgcttctccgaccaccacgccgcgcagacggactcaaggcacgcgaggctcacactgaacgctcaaagcgtatgtgactagtgggcgttcgactaggcatagatgagatctaaaggaggatgctccatgcggtttaccgcggtgggtatctggaccgcacaatccagcagtacacagaatgctttgggatgagaatgctgaagaaaaggtgtgaacgttgttagaagtacaccaactgcttccttggcttttgggcaaagaacaccaactttggaggtggattgacatacaactatgtggttgtcaagtatgacattggaacgaggtttgggcatttctcaattgctaatgatggtgtgtacaagctacctgaaaaaatcaaatcaaggggggcaagatc

SEQ ID NO: 35014 - DNA, 469 bp, Zea mays
  Clone ID: MRT4577_131934C.1
gtaagatcagaaaggggtatcgggttaactcaagtacacatgtaccaagttgatgagacttgaacttctgacgagtttctgacctaacactgaatccgtctatattattttgaaacagctcatcacgagcttagatgctggcctcggaggctattacttaagacacccgagtggtattacgggttgagttggactaccagggggaggaccaattcaacacttggtgaattctcgttgacaatgaccgtaaaaacccccataccgggatcaaataggaacgcactctttgaacgcttgggtgaccttggccgttatccctgtcaccacttttattacacctctagctgcaaaatcctatggctaaaggaccgaaaggtcttgctctcacggttcgtattcttactggacatcttgaatccaaccagcttttacccttatgttgcacacggcgagtactgttctgcaaggt

SEQ ID NO: 35015 - DNA, 1208 bp, Zea mays
  Clone ID: MRT4577_131935C.1
tgataagtcattgattattgaattgaaggctcaacttagtcatgaatttgataggaaagatttcagaccagcaaagaagattcttatgatggaattttagcgtgatcgtcatgctgatattccttttctatctcaaaaagttatattgagaaagttcttgaaaagtataatctcagtagttgcaaatctgttgctacaccatttgcttaacattttaaattgtcatcgaggcaatatccacttattgaagatgagaaagaacacatgtctcacataccgtattctaatgctgttggaaatcttatgtatgttgtgatctgtacaagacccgatttggctcatgttgttagtgtggttagcagatttatgcacaatcctggtaaagaacattggaatgcagtaaagtggattcttcgctacttgaaaggtacttctcattttggattattatttgacaagaattcagtgaatgaaattggtgttatgggatttgttgagggaattattgattttgactttgctggtgatcttgataaaagacggtccatatctggctatgtattttcattatgcggttctgtaatgagttggagggctttacttcagtctattactgctctttccactactgaagcaaaatatgtctcaactactaaacgggttaaagaagctatttggatgcaaggtcttatttctgaacttggtgttactcaggatgtcattaatgtttattgtgatagtcatagtgctatttgtctgaccaagaatgacatgtatcaattcaataccaagcatattgatatcaagtaccatttcattcgtgatattgttgttgaaggcaagattaaagtggacaaaatacatactgatgcaaattctgcagacatgcttacaaagccattatctaataccaagttcaagcattgtcttgacttagtaggtgttcgtggaggttagcaccctagtggtgtttggggaaaccattttataaatttagcgtcaaagggagatttattggataagatgatatgactctatctctatctcctttgcctataaaaataggtccccttgtaccctgtacaacacaccacataatagatccgttttctcgtgttttttcctccacattgggggacgtttttgtacgtttaactctgtgtctcctttttaccatctacaatcctaacagtactattatgcactgt

SEQ ID NO: 35016 - DNA, 675 bp, Zea mays
  unsure (1)..(675): unsure at all n locations
  Clone ID: MRT4577_131936C.1
acaaggttatattgatattccgtaaatcgtgaatgcatacatcaataggtattgttgcttgataacttcatgtgtgtgagatctaccatttctctagctcatatatgtatttttcaatagcaaacctctccgtttattgatttcagaacgacatttcgacggtattcaaatgattaacatttgtaaaaggtcctacatcacacatcaaggtaatatttagtgaaaattttgaatactatttcaatatttgttagtgtttaacgcattgctgacaagtaaataatatgagtatatgacaagaatgtgcttgttgatagtggtaaataatatgagtatatgagaatattaaattcatgtgatagcaaagaattactaaagtatgtacctagagctttttggttctttattgcttagggttgttacctttttttgttacagatatactcctctatttgatttttttcattgaacttcaagagagtgcctttagagtgattgcagataactatgtcacggatcattgtgtttgccttgctgttgggatttntgaggtttggatttattcttctttaattcatttacatcctcactaactgatgtgccgcttatgctaagtattcacaggttgagagaaatgggnaggatcagtaaaccagtaatatactaatctccttt

SEQ ID NO: 35017 - DNA, 3061 bp, Zea mays
  Clone ID: MRT4577_131937C.1
cccacgcgtccggaaaaaaaaaagaaacatttcctctctctctctgacgtcttaactcggatcacgagttgaaatttgtgtcggggacaagccatgaacaacgcaaccaccagttgttaactaaccctcttttaaacttcaagcaaccaaagccaagagcagaaatggttttccaaaagaggtcgtcgtcgtcagagatggagtcgtgcggtggaggccaagtcccggagatgccacgcgttcccaagtccgcgaggggcaagagatcggtcaggaagaaggaggcccagagcccggcccagatgtctgcattcgaccttctcgcgaccgtggcagggaagctgtttgacgagggggcggggtcgctggggaacacgagcgccggtgccccggccttggctgcgtgcgcaaaggatgccctggtgaagcaggagcagtgtgatgagcaaatgaagctgttcaagcatgaggcgacggatcaggatagctgcaatgagagtgcaatcctcccccacattgtgctccagcgggtggtgaataatgctaggaatgaggatcctaaggcgaagtctgaggtccaggacaaggaatcctccatgatcagctatacgaaggctgaattgggttgtaattttggtgtgatcgcagacaggtggtcgcctgaatccgtggaatcaggagcctgcacaggagatgcagtggcgagactgatgatgacggccccggcaggatttcataagaatgcacccgaaatgtatagtttgcttgattcaatggatgtggatgtcaagccgcctcctttggtcagctctgacagcaccggcgagatgccattgcatggcgataaaattcaccgctcaacctccttaccgaggggcccaaagggggtggggttttttgctgtagatagagatgatgacgacgacaagtcctcagggtgcactcatccgagcaccgccactaacaaggatttcacatccaattgtaaagctgagtataatagggtaaggaagctgctcactagtaagcacaggaaagttgctccagcgaggattcacaaatctgatctttcctatagtgatgtcgagcggaagccttctttccggtacaaaaaaatgcatacacgacagaggacacaaaggagtacattcaagcggaggaagctctttgatcgccatttagctctagcatctgaatttggtacagcaaatggaaagggaaacacaaaggttgccggaagaaactccaatgctgtgtctttggaagcaaacaaggggactaattcaatgccattccagaaatcttgtgggtcaaatgattgctatgtgaaacttagaattaagtcttttaacgtgcctgaacttcttgttgaaatcccagacagtgcaactgttggctcactaaagaaaactgttctcgaggcagtgactgcgattcttggaggtggcctacgtgttggtgttcttcaccatggaaagaaagtcagagatgatagtaaaacgttaattcaggctgggattggtcaggatgatatgctggacaaccttggcttttcacttgaacccaactgtactcaaaacccacaagtccaagctcctgaagatgtcaatttcctcgaaaacattgatactaccgaacccctcgcaaggatcacacctgctgactcgtcttctaagcttggtgaagttgacgtatcacaggagcttgcattaaccccattagcaatgaactaccagggcagtgatcatgattccgtgcactcccctggggctgtctcgtcgcgcgataaagactcgcgagccttatttctggttccagctgcagatcccaatgcaggagctgtagttccagcaaataagactaagaggtcaccagagcagggacaccgcagaatcaggcggccgttctctgttgctgaagtagaagcacttgtgctcgcagtcgaaaagcttggaaccggaaggtggcgagatgttaaacttcgcgcttttgacaatgcaaagcaccgtacctacgttgaccttaaggacaaatggaagacgctggtacacacagcgagcatctcgccgcagcagcggcgtggcgagccggtgcctcaggagctgctcgaccgggtcctggcggcccaggcctactggtcccagcagcaagccaagctccagccgaagacgccctcgctggctgaggctcgcttgctcacccaataattcgatgatcccggctgatggcctcctctgaggccgttgcagcctttgtataaagtcagtaagtcaagtcagtcccttcacaggaggtttaatgaaaatataatattaggggaaaaaaagaatgcatatataaggtacaagaagcattgaccgatttgttgtaatatctactcaccaccggttattctttaagccaggattctctctccttgtgaatttaaccaaaggaaagggcatttctttggcaattgtacattttgatgatggaagaagaagatgatccatgaactgagatctgcagtgtctacctactaatggctcacaatttttgcaatgtgattaagaaattcaaggtgctgcttgaccaagctcggctccggcttccagtttttggattctcttgtgaagaagttgctgcctcttttttatacagcagaagctgagagccgaacagtgtatttggcttgaattgcagcctatatagtttcatccactcatacagacggccacaaatgccgtaaaaggagggtagcttcttttgctgagtctagtcttgggagcaaagctcaggaccgaagtctagacttgagacggagcgggggccaaagcggcacccgaatgaaagcttcagattcttttgttcagttaaattcattctttggtagtggagactgacggaaggataggagattaggtggggtggatctttggttccctttttctttttttcttctattattacattattagttgtattaatgtactatattattttaccaatcttgtagttaccctcaaatttgtaattggtgaaattaacaaaattgaaggaaatacatttctaccccttcgct

SEQ ID NO: 35018 - DNA, 121 bp, Zea mays
  Clone ID: MRT4577_131938C.1
tttggggttgttttaacgagaggcgccgttaccctccaaagcaaaaaacacacgtggaataacccacaggggagagcaccacacttacgcgagagaccatgcggagggaccatggggtact

SEQ ID NO: 35019 - DNA, 566 bp, Zea mays
  Clone ID: MRT4577_131939C.1
gggggggggggggttttttttttttttttttttttttttttttttttttttttttttttttttttttttttttttttttttttttttttttttttcccaaaagggggcggaaaatcaaaagggcccattacaacccggcccgatttaggaggggggggggcgggccccgggcctttggcccccccccgggaacataaacaatttcccagcccaaccataggcgggggggggggggggtaaaggcccccacaaaaaaccctgggaagagggggggccctaacaaatccggggcccccgcaggcggctaaatggggggggaactgggggacggccttggtccccccggaaacggggggtttggcaaccccccctgggaggaccaggcccccgggggtctggatcccccgggaggggagggggggctttttggggacccgggcgagcttaacggcccccccgggaagcttttaaaaaaacccttaaaaaaggggttcatgagggacatggccctggaggaaaaccccatgtcggggggcccccgctttaggaccctaaaaagaaaattt

SEQ ID NO: 35020 - DNA, 500 bp, Zea mays
  unsure (1)..(500): unsure at all n locations
  Clone ID: MRT4577_13193C.1
aattcggcacgaggtggagatggagtctctcttcttctccttccctccgccgcgccgcgaatacgatgccgccgcggtcaccgccgctagcagctgccgccgatgtagcctccgtagtcacccgctgccctcacgcggaaccctcttcagaactcaccgcctccacgattcccgcctaccgcgcgctcatccgcgagctcgtctctgccggccgcctcgacgacgtcgacgccgccctcgcttctgctcgctcccacctcgccccagactccctccaaccactctacgtagcctccattcaagcctacgcccgcgccggccgcctccgtgccgccgtcgacgccttcgagcgcatggacctcttcgcctgcccgcccgccgctcccgcctataacgccatcatggacgccctcgtcaacgccgcctatcacgaccaagctcacaaggtctacgtcaggatgcttgccgncggcgttgcttccgatgctcgcacccacacc

SEQ ID NO: 35021 - DNA, 3614 bp, Zea mays
  Clone ID: MRT4577_131940C.1
caccccttacgcttcgcctgacgcgtcgcctgacccgtgggtgacagaatctcatggcttctgtattctcctgcctggttatggatatcatgtacgtggcgagatgttaaacttcgcgcgtttgacaatgcgaagcaccgtacctatgttgatcttaaggtttgatctgacaaaagcttggctttgacttaaacgctatcgtagaaaaagaatatattctcttttggcaaaaccccccaaaaatggaaacacacaccaagctactgtcctttcctgatttatttattgaccctctcgattgccgccctttttttttttttttcctaaatatcttccttaaacgagtataaattcggcacgagggaaaaaaattggcggagggcggagaggatagcaaggagggtgaagggggaaaagggtaataaaaataaaggaggaggggagaagcaagacgaggaggaagagggagcaccccaaagtaggggagggggaataattccgcaggggctgagggatctcggcgagtccggccgcggagcagcgcagcgaggcggcgatccgagggcgatcggaggcgggcgggcgtagacgccggcgagatttgtgttggtgacaagccatgaacagcgcaaccaccagttgttaagtaaccctcctgtaaacttgaagcaaccgaagcggagagcagaaatggtgttccaaaagaggtcctcgtcagagttggaggcgtccggtggaggccaagtcgcggagatgccgcgcgttcccaagtctgcgaggggcaagagatcggtcaggaagaaggaggcccagaacccgccccagatgtcagcattcgaccttctcgcgacggtggcagggaagctgcttgatgagggggtgggctcgctggggaacatgagcgctggtgccccagctttgactgcatgcgcgaaggatgtccgtgtgaagaaggagcagtgtgacgaggaaatgaagcagttcaagcatgaggtgacagatcaggatagctgcaatgagagtgcaattctcccgcacattgtgttccagcgggcggtgaataatgctcggaatgaggatcctaaggcgaagtctgaggcccaggacaaggaatcctccatgatcagctgtaccaaggctgaactgggttgtaattttggtgtgattgcagataggtggtcgcctgaatccgtggaatcaggagccttcacaggagatgcagtggcgagcctgatgccacctgccccagcaggatttcataagaatgcacccgaaatgtataatttgcttgattcaatggatgtggatgtcaagcctcctcctttggtcagctctgacagcaccggcgagatgccattgtatggcgataaagttcaccgctcaacctccttaccaagggtctcgaagggagtggggtttttttgctgtagatagagatgatgacgacgataagtcctctgggtgcactcatcccagcaccaccactaacaaggatttcaggtccaattgtacagctgagtatagtagggtaaggaagttgctcaccagtaagtacaggaaagttgctccagcgagggtttacaaatctgatctttcctatagtgatgttgatcggaagccttctttccggaacaaaaaaatgcattatacacgacagaggacacaaaggagtacattcaagcgtaggaagctctttgatcgccattcagttctagcatctgaatttggtaccgcacatggaaagggaaacacgaagaaggttaccggaagagactcccatgctgtgtctttggaagcaaacaaggggactagttcaacgccattccagaaatctcgtgggtcaaatgattgccatgtgaaacttaaaattaagtcttttaaggtgcctgaacttcttgttgaaatcccagaaagtgcaactgttggctcactaaagaaaactgttctcgaggcagtgactgcgattctcggaggtggtctacgtgttggtgttcttcaccatggaaagaaagttagagatgataataaaacgttgattcaggctggtattggtcaggaggatatgctggacaaccttggcttttcacttgaacccaactgtacacaaaacccacaagtccaagctcctgaagatatcagtttcctggaaaccattgatactgctgaacccctcgcaaggattgcacctgctgactcgtcttctaagcatggtgaagttgacctatcacaggagtttgcattaaccccattagcaatgaactaccagggcagtgatcatgattctgtgcactcccctgggggcgtctcatcgcccgataaagtctccacaaactcgcgagctttagttccagttccagctgcagatcccaatgcaggagctatagttccagcgaataagtctaagaggtcaccagagcaggggcaacgcagaatcaggcgcccgttctctgttgctgaagtagaagcacttgtgctcgcagtcgaaaagcttggaaccggaaggtggcgagatgttaaacttcgcgcgtttgacaatgcgaagcaccgtacctatgttgatcttaaggacaaatggaagacgctggtgcacaccgcgagcatctcgccgcagcagcggcgtggcgagccggtgcctcaggagctgctcgaccgggtcctggcggcccaggcctactggtcccagcagcaagccaagctccagcctaagacgcccccgctgctggctgaggctcgcttgctcacctaataaattcgatgatcctggctgatggcctcctccgaggccgttgcagcctttgtataaagtcagtaagtcagtcagtcccttcacaggaggtttaaggaagatatattattaggaaaaaaaaagaatacacatataaggtacaagaagcattgaccgatttgttgtaatatctactcaccaacagatattctttaagccaggattctctctccttgtgaatttaaccaaaggaaagggtatttctttggcaaattgtacatgttgatggtggaagaagaagatgatccatgaactgagatctggggtgccattgctcacaatttttgcagttgtgactgagaaattgaaggtcctgcttgaccaagctcggctccggctccggcttttggattctcctgcgaagaagttgttgcctcctcgcagaagctgagagccgaacagtgtatttggtttgaattgcagcctatagtataatttgattcacccgtacagacggccacaaaaagccgtaaagggagggtagcttcttttgttgagtctaggcttgcgagctgggccaaagcggcaccgaaagaaagcttcagattcttttgttcaattaaattcattcttttgttagtggacagtgacggaaggataggacattaggagggatggatctttggttctcttttccttttttttcttctattaaattagttgtactatgttatgtcaccaatcttgtagttaccctcaaatttgtaattgatgaaattaagaaattggaaggaaatgctttcgtacccaaaaaaaaaaaaaaaaaaaaaaaaaaaaaaaaaaaaaaaaaaaaaaaaaaaaaaaaactcgagagggggccgcgggtacc

SEQ ID NO: 35022 - DNA, 846 bp, Zea mays
  Clone ID: MRT4577_131941C.1
cattgggtacctcgaggccggccgggacgcagatcaacacacggccacggggggtctgtaaaatccgtaggcgattgagcgagcaaaagaatctgccctctccccttccctttctacaggcgctgtcccgcaagcggcgcatcgcaggaggcggtgaactggtggcgaggcgagaggtctcgatcttcccggccccacacacaacaaagcggggcgatggaccagcatgaccacgagatggagcagaaggggtgcctctgccggatcaagaactgcgccattgaactcttgtcgatggaggaggacctggagacggacgacgaggagtcgtgggacctcgttgggagggacctccggctcaaggccaccttcctgtgcatcgacctcagccgcttgatcgccttctgccagggcgaagagcacaagaaggcgctcactgtcgtcgccaacaagttcttctactccatggatgagcttggcgacgcagtggagagcagaagcctcccgctgacacaggtgcgctacggcgacaccgccgacgcgctccgcgaggtggtcgccgtcctcgggccgtccctgtagctgggcggcctgcacgaagcggaggaatagagaaatccagatgagatcacagatgcgtcccccaccccagcacatcttattataggataggattaggatatagacagacaagacagtacggtgaggcgggaaggatgatgagccagcgcggcagaaatgctgtgtgcgatcatcttcacctgtgtggctgtgtatacatgtctcaaatttctggtgccgtcttgctcgctcctttgcgtcaaaaaaaaaaaaaaaaaccgcggc

SEQ ID NO: 35023 - DNA, 176 bp, Zea mays
  Clone ID: MRT4577_131942C.1
ggggcacgcgggccggtgatgggaaggggagggagaaggagtgcgagggcgctcccgacgaggactagtgcgtgatgaggcgcacgctgtgcgcgcacaccgactgcatctacagccagcagcaccacggcatggtccgatactgtccgttctagggaggggggggtgctctccct

SEQ ID NO: 35024 - DNA, 526 bp, Zea mays
  Clone ID: MRT4577_131943C.1
tagggaggctccgcgacgagctggtccacctcccggtggtgctcgccgccggcccactccacaagctctcctcctccaggggcgccgggagcagcttgctcgccccggaccacagctgcatcgagtggctggacgcgcagcgccccaggtcagtgctgtacgtgagcttcgggagcctggcggccatggactcgagcgagctccgggaggtggcatggggtctggcggagtgcggccaccccttcctatgggtcgtccggcccaaacatggtacgaggctgcgacgtcgacagcgcgcggcagctcccggatggcttcgaggacgccgtcaagggcagaggcgtggtggtccgctgggccccgcagcaggaggtgctggcccaccgcgcagtgggtgggttctggagccactgcgggtggaactcgactctggaggcagtcagcgagggggtcccgatgatcttgaggccggactccgtggaccagatgatgaacacgaggtacttgcatgacgtatggggcgttc

SEQ ID NO: 35025 - DNA, 310 bp, Zea mays
  Clone ID: MRT4577_131944C.1
aaaaatgagatttcacatcaaccctcctaaagggtgcagtttattttaaaaaccccccccccgattcaatttaccaaactaaataggggtaacaattggctcaccctaggactttttttgcagggggggccatacatactacaaagttagcctccacaaaggggatttcccccgcaaaaaagggggggggaaacaaacccctggagcaacaaggggcacaaagctaaaaattctacaactctccccttatttacaaagcccggcttcttataaaatcttcttagcgggcaaatgggaacccatttgcctc

SEQ ID NO: 35026 - DNA, 2229 bp, Zea mays
  Clone ID: MRT4577_131945C.1
ctccgctcgattccagtggccctgctgccctcgtcgtccctctcccgagcgagagcagcaccggcagttcggacaggttgagaatctgcttctcaattgcctcttctgctctgagatctcgccttttcttccggggatttgagcccttttgcttttatcgggatggaaacctacgcatcgtgaactcctttcttgtggaggtgcagtgaagtgggttctcgaggtacttcagcagctgcgtggttgcgttgaatcgagtatgagtaggaggaatccccctcatcacgagtctgttcaataagcttgtggagctagtgcgcacctccctccggttagtctgtctcggcgcggcgcactgtactgtagtacgtagctagtaaggatctgccgacagtttcgcttcacctacttctcggatttggactatgcagctgcccctcccacaccggcgcagaattccgtagaagaatatgcatgatatttttttactattattatgggtttcgtctgtctgatttgttgtttcccctttgctgtggacgcagagctgaagccttggaggagtaaaggtgtggtcttgccatggagcagccgcagcagcacaagggaggagcggttccggcgcctgcagcggcggccgcgaacggggccggggccggggccgagggcgcggagctgatcgggtacgtcgacgtgctcgtgcggagcgcgcgggacatccagaacatctgcatctaccacaagcaggacgtgtacgcgcggctctcgctgcccggggacggcgcgccggcggcgtccacgcaggtggtcaacggcgggggccgcaacccggtgttcgaccagtcgctgcgcctcggcgtgcgcgcgggggacgtcgacgccgcgatccggtgcgaggtctggatgctcagccgcgtcaagaactacctgcaggaccagctgctggggttcgcgctcgtgccgctcccggaggtcgtcgccgccgacggcggcacgctcgcccgcgactttccgctcaccaccagcgacctcttccagaccccctcggggttcctgcagctcgagctctcctacatcggggtcgtgccggaggtcgtgcccatctcgccgacgcccaagccggcgctggccgacccggaggaggaggaggagccggggaacaacgccgccgacggcgtcgggaacgggaaggagtacgagaagatcgagttcccggacctgaatctcgtggaggagaaccagatcatggtctccgagtacaccaggctgccgtgcgcggccgtggaaacgcagagctgcgacagcctcctgacctcggagcacgatgacggcgccacggccctgagccgggacgccgccgtgcgcctcgtagatagcttctcgacggacaacagcaccgccgactcggtgggcgccttccagagcgacacgccggtcagcagcgtgtctaccacggagttcccggccacccctcagtctaactccagctcggagccgtccgggaacgcccactcgtcggctgaccacaaggcgaaggcagcgtcggagaccgccgacgcggaggtcgactcgtcccgcaccgtccaggaggtcccgccggcgaactcgccctgcgccgcgtcggaggctgccgtgcacaagccggtgatcagcgtcaacatcgagcaggaggtgaaggtggacgggaaccaaatcatggacatgtacatgaagagtatgcagcaattcacggattccctggccaaaatgaagcttccagccttggacatagacaacggtagcagcgggaagagcagtcccgcagcagccacacccagcgcagactccactggtgccgactcgaccgcggtgaagaagccgaccgccgccgggcagcaggagaagccctctcccaaggtgttctacggcagccgggcgttcttctgatctcctgtccgcttgagcactggaagcacagcgctccagccgccgagtaacgaagcaaagagacggcatttgcagtcgcctcagctgaatcttactagcgcagaggaataacaccttctcaggctcttgttctaggtttgtcagatcggggatgagttactgtctttaatgtatccgtcagtacttatgaaaaatggtttggtttctctgttttagtaatgatatttagatctttttttcctgtaaaaaaaaaaaaaaaaaaaaaaaaaaaaaaaaaaaaaaaaaaaaaaaaaaaaaaaaaaa

SEQ ID NO: 35027 - DNA, 381 bp, Zea mays
  unsure (1)..(381): unsure at all n locations
  Clone ID: MRT4577_131946C.1
ggggggtggggtttttttttttttaaatcgaattggcgccgcgataaaaaaaaacagagtccccgccgcgcgtccgcaagtttttgcagcggggctgccgggttccaccaccaccaccacccattttttttttttcttntgacacaattttttgggggggcggggaaagggtgcgtcngnttccctttcttttgttgggcgtggggcggaaaagaaaggtgaaactgtttattcttcttttccagagcctgagcgtccgttgctggggtccggtccctttcgccaaaagggacgtgttcgggtgttcgctcacgggttggccggttctctgcgcgcacgctgcggttgtgggttgggcgtaacacgcgggcggcgtgcacc

SEQ ID NO: 35028 - DNA, 1418 bp, Zea mays
  unsure (1)..(1418): unsure at all n locations
  Clone ID: MRT4577_131947C.1
ttgggaccctcgaggccggccgggggcccgcgcgggggacgtcgacgccgcgatccggtgcgaggtctggatgctcagccgcgtcaagaactacctgcaggaccagctgctggggttcgcgctcgtgccgctcccggaggtcgtcgccgccgacggcggcacgctcgcccgcgactttccgctcaccaccagcgacctcttccagaccccctcggggttcctgcagctcgagctctcctacatcggggtcgtgccggaggtcgtgcccatctcgccgacgcccaagcnggcgctggccgacccggaggagccggagagcaacgccgccgggaacgggaaagagtacgagaagatcgagttccctgacctcaatctcgtggaggagaaccagatcatggtctccgagtacaccaggctgccgtgcgcggccgtggaaacgcagagctccgacagcctcctcacctcggagcacggggacggcgccacgaccctgggccacgacgccggcgtgcgcctcgtggagagcttctcgacggacaacagcaccgccgactcggtgagcaccttccggagcgacacgccggtcagcagcgtgtccaccacggagtcccccgctgccgcggcgttcccggccacccctcagtccaacttcagctcggagccgtctgggaacgcccactcgtcggctgaccgcaaggagaagccggcgttggagaccaccgacgcggaggtcgcctcgtcccgcaccgtccaggaggtcccggcggcgaactcacccggcgccgcgtcggaggccgccgtggacaagccggtgatcagcgtcaacatcgagcaggaggtgaaggtggacgggaaccagatcatggacatgtacatgaagagcatgcagcaattcacggattccctggctaaaatgaagctccctgccttggacttggacatagacaatggtagcagcgggaggagtagtcctgcagcagccacaaccgacgcagactccactggtgccgactcgatcgcggtgaagaagccagccgccgccgggaagcaggataagccatctcccaaggtgttctatggcagccgggcgttcttctgatctcctgtccgcttgagcactggaagcacagcgctccagccgccgagtaacgaagcaaagagacggcatttgcagtcgcctcagctgaatcttactagcgcagaggaataacaccttctcatgctcttgctctagatttgccagatagggaattaattgctcgtttcaatgtattagttgctcgtttcaatgtatcggtcagtacttatgaaaaatcgtctggtttccctcttttagggctagtttatggactctactttttcaagaaatttctgtttttcttatcttcggtgctggtggcgattgtgctgcctctttt

SEQ ID NO: 35029 - DNA, 569 bp, Zea mays
  unsure (1)..(569): unsure at all n locations
  Clone ID: MRT4577_131948C.1
ccggtcgaccccgcgttttttatcacataactcttgtccgatcgagctaatgtgggacttaggtattgaggtgcttgaaatggttgataaggatatgtgtgatccttctctagctaaggggttgcttgagaaaatggagccttttgagtttgttttcattatgaatcttatgtaaaaattgtttgctatcacaaatgagcttttgcatattttgcaaagacaagatataaatatagttcatgctatagaactaacctaagatgtaaaagatcaactagccacattgggggatattgggtgggatcatgtgtttgatgaggctaagcaatattttgagcaaaaaattggtgtcaaatatggtgaatgacatacctgaaaggatcacgatgcccaagagggaggtgaattgggcttttctaaaaatcaacactgattganacatttaccagagaccaacttcaccccaacatctagcactttgagaataatatttgaaatacattaatgcttagacaattcttcaaatacttgcttaacaaattcacaatgtgaaatgctttctttttttt

SEQ ID NO: 35030 - DNA, 369 bp, Zea mays
  Clone ID: MRT4577_131949C.1
ggaagcccggatcaaaaaagtcgttagccaaaactagggacttgttgtcaaaaaacccgggttttgaattaccccgaaaactcaggattacatcccgagggcttatttattttttttaagggaaaataacggccccagaaaaacactccgacacatgcctggacagggcacacccctttccccaaaattatttactttccaaaaatcgcctgcgggaaagccaactcaaaaggctttctttgggggaggcccccccaagcagaaacatggggggggccctgaaaacgggggggattgcccttgaaagttgttttttgcttgcattgacagcaggggttaaaaggggatgcctgcgccttgggccaaatt

SEQ ID NO: 35031 - DNA, 1214 bp, Zea mays
  Clone ID: MRT4577_13194C.1
cattgggtacctcgaggccggccgggctttttgactctctcaccagggcttgctgctgcttgcaacctcaccctcctctccgggagagcctctcgcctacagctccccagctgcccttccacgccacgccgaccaaggcgccaaaagcaaacgctacgccagtacgtggtgagggagcttgtcacggctgcgttgcttgccacctcgtcttcgcggaggtcctcgccgcgacgacgacgatggaggttgccgaggcgcccgacgaggacggcctggacgagcgtggcgtggcgctgcacctgcacctcccgaggctgctggccggcgtcgtctccggtgccctcactggcctcttcgctctcgctggagctctgacgggggcggtcaccggcgcggtggcgggcagagcttccgacagcggcgcgttctgcggggagctgggctgggggcggtcgccggagccgtcctctccatcgaggttctcgaggcttctcgcgcctactggtgctcggaccggctgcggctgggctcgcacggcgcgtcgtccatggctaatttcattgagcagcttcttcgtgcccggtttgtgcaagagcagtttacaacttcaggatatgcatcatatcgctggcaggtgagcatatcggattttggtcacgatgacctatacgacatattcggggacatctcatcgaaagggctcccacaagagtcgctgaagaaactaccacactatgtggtcactgaccagacgcgcgcggactcgttcggccagatcctgtcctgccctatctgtctacaggacatcgtagccggcgacacagcgaggaggctgcccagttgctcccacactttccaccagccttgcgtggatagatggctcgtggatcgcggatcgtgccccgtctgcaggcaggacgtgtgagatagccagataggtgatcgacctgagtagatggagcaatagctgggtgatgcgaaatgtttgctcctacactaagttcatatatatagctactagagagaagatgcgtactgtggtgtaaattagcagagaatctgcctgtcctgttccactaccagccagcgtaaacggccgtgcgcatcggacttcgtttcttgcacccggttccaacgtgtaatgaaataataacactgctgttgggaagcagtactacctgtttctgtaaaaaaaaaaaaaaaaaaggccccta

SEQ ID NO: 35032 - DNA, 477 bp, Zea mays
  unsure (1)..(477): unsure at all n locations
  Clone ID: MRT4577_131950C.1
tttgggctgatttatgtgcttgggaggaagcgactctttcctggttcgttcccaggcacatatagggttggtagtgttgttttcgcgtcggtaccctctccaagccccaatatttagcacggaattacagtgttacggacggacggacggctctcctcctcctcttggcccgagccccctcggcgccgggcaggtacattcgctgctcgctagtgcagatacaaaacaaaaggctctcgggatgtctgtttacgcacgcacgcacacgacgcgaagcgacttaaggcggcctgtgcatcacggtaacaaatgcgcgggaaagtgacgcactgctgacgatcgctgttgttcgtacggacggtatgggaacccatctctcgggccaccacataacgtggtagtcggtcacgtcgacgtcgcgttaatcgttactacccatcttaaaaaaaacanaaataccgnggcacgcgcgcgaag

SEQ ID NO: 35033 - DNA, 491 bp, Zea mays
  Clone ID: MRT4577_131951C.1
agttttttttttttttttttgcttggctttattgtgaatacacaatattatcacacgtattatatatttgatgattaataataaacataacaatactcacaacgaaatccaaagttattaataaccgcatcaatcctttagatgaggttagacactgcacgacgagctctagatgatgagtatgatagaggtggccactgacattggtgccgttggcctggatttatcagctcttccattttgttctccttttctgttatcagaaactttaggacattgttaagaagctgagggacagtatgggtcgtagcgcttagtcatttttcccattaaaatcgatagcactgcaggaagatcttttcccacaattgttatatttcatcctgatgttagatgtcagctgtgttagtttattgagaactgtttaattagtcaaaaaagaagaataatccaagcatttggttcaaaaaaaaaaaaaaaaaactcctcgg

SEQ ID NO: 35034 - DNA, 304 bp, Zea mays
  Clone ID: MRT4577_131952C.1
gcgaagagcaaccctactgcaaacccatgtaccgggggcgatcatagaggcggtgtgtctaccgaccagggtgccacaattaacggcgcagaaccaaccaagggataaacagtagatgctgtcgcaaaaggagcccaagctacgaccctctgagaaaaccagcaggcctaactgaagcgagccagatcataacaagctgcctggaccccagcggattcgcagaccctcagcagaacgcaatgactggaataagggacccactcaaccacaacaagccggtgcacaaggcacttgctcagactac

SEQ ID NO: 35035 - DNA, 635 bp, Zea mays
  Clone ID: MRT4577_131953C.1
gcggcgcccgccggccaggccaaccatgctggcgagggctcctccgccgcggccgtgctccagcggcgtttgcatcgcccgcgcacatccaagagccgccgccgtcgcggccaggccggggacgacgaggacgacgacgacggtcgcggcggcggcggcagaggccgcttctaacgggtcagcggcggcggccgtcgcagggatcagcagcagcagcagcgcgctggtgacctcgaccgtcgggaaatcgacgaacatcctgtggcatgagtgcgccatcgggcagaaggagcgacagggtctgctgaaccagaagggctgcgtcgtgtggatcactggcctaagcggttcagggaaaagcacgctcgcgtgcgcgctgagccgcgagctgcacggcagaggccacctcacgtacgtcctcgacggcgacaacctcaggcacgggctgaacagggacctcagcttcggagcagaggaccgcgccgagaacatccgcagagtaggggaagtagcgaagctgttcgccgacgctggcctcgtctgcatcgccagcctcatatcgccctacagaagcgaccgaagcgcgtgtcgcgatctgctgcgcaagcactcgtttatcgacgtgttcctggacg

SEQ ID NO: 35036 - DNA, 1821 bp, Zea mays
  unsure (1)..(1821): unsure at all n locations
  Clone ID: MRT4577_131954C.1
gcgcgcggcgcccgccggccaaggccaaccatgctggcgagggctcctccgccgcggccgggctccagcggcgtttgcatcgcccgcgcacatgcaagaggcgncgccgtcgcggccaggccggggacgacgaggacgacgacgacggtcgcggcggcggcggcagaggccgcttcgcacgagggtcagcggcggcggccgtcgcagggatcagcagcagcagcagcgcgctggtgacctcgaccgtcgggaaatcgacgaacatcctgtggcatgagtgcgccatcgggcagaaggagcgacagggtctgctgaaccagaagggctgcgtcgtgtggatcactggcctaagcggttcaggtgaggtctgcaagagctgatctcttcacatttaattacgaacaaaggtccttccctttatatatatatacgtaggaattcggctcgaggtatctctggcttgacttgatcagggaaaagcacgctcgcgtgcgcgctgagccgcgagctgcacggcagaggccacctcacgtacgtcctcgacggcgacaacctcaggcacgggctgaacagggacctcagcttcggagcagaggaccgcgccgagaacatccgcagagtaggggaagtagcgaagctgttcgccgacgctggcctcgtctgcatcgccagcctcatatcgccctacagaagcgaccgaagcgcgtgtcgcgatctgctgcccaagcactcgtttatcgaggtgttcctggacgtgccgcttcaagtgtgcgaagccagggaccccaaaggcctctacaagctcgcacgcgccggcaaaatcaaaggtgctcactcactcgatcactcactcactcaagatctacgaactggccgtcctgcttgtatctgcttactagctaaccgcgaagcttaaacgacgacgccctgcatgcagggttcaccggcatcgacgatccttacgaaccgccgtcggactgtggggttgttagcagagctctagcttcctctactataccagattctattcagtgtcgtctctgtagattatcaaaaggactagctagctagctagctaatggaagatgacgattctttttgcagatagtgatccagtgtaaagtcggcgactgcccttcgcctgaatcgatggctggtcacgttgtgtcgtaccttgagacgaatggtttcctccaggactagacatggaatgcgatcgatgcgtctgatgtgtatatatgtagcagcagccggagcggcattgccaaggctgtgtaatctcatggctgtctttctctttaagaccaaaacaaacaagagatggcagtgtaaaaaggaaaaaaaaactgcgtctgacagagtcgctgaatcaaccatgcttctgataaaagctattgtttgtaggtacggcgttgattcttacgacatttatgacaatgctttcgaaaggtcggttccaaaaaaaaaacaaattccatttattgcaatgatggagatggcccatacatgtagtaaagaacagccgtcctgaagattgaaaacaagggcaattttgatgcaaaatggccaggtctatttaatgtcatcactcagggtctagaccaaggcaatagaaatgtttggttgctactggtaccatcacggaaggttgcgtgcgtcaaggtgaatcaaatctgtgaagggaacgtggccgtcagatctacgggttgggagttagatcaattatatcttttgctaaatggtttagctctaaaacatctagcggaaaatgttgacaatgtttaatggacaacataaataagaggagggttggctccaact

SEQ ID NO: 35037 - DNA, 216 bp, Zea mays
  Clone ID: MRT4577_131955C.1
tggggactgtttttgtgtttaggggaaaaaattctgctgcactctgcttgggccttgaggtctgtggcagggctcctctggcccgcagtggcctggatctatctgtcgccatgagtgacgggcagtgaccagagggactggaggccagcggtgtccacccttgcctcagcaagagggattgcattcttaaacgaaagctgtacatgtatatatatg

SEQ ID NO: 35038 - DNA, 244 bp, Zea mays
  Clone ID: MRT4577_131956C.1
ccatggcgtcctccccttcttcctcccgcatcacggcagcaagcagtcattcccatggccgagctcacctccctgccgcgagctcgccaacaatctcccccactcagatctccattccccttgctgctgctcgccgcgagctctctctggctttttccccagtcggcgccctgttcccctgcggctcccatggcgccggcgaactcgagcagccgcgcacccaaccatggcgccctgtttttcc

SEQ ID NO: 35039 - DNA, 762 bp, Zea mays
  Clone ID: MRT4577_131957C.1
gtaccctcgggctcggccggaaaaagttgtgcttaccacagcacagtagtgtactcgttcgacagatccctatagctgctagctaggtatagtccttttgtttgtacgatagaaaagctagcatcgatctagcgtagcatcaacatcaacatgggttcctgggtgcgcaccatcacgtcgcccttccggaagatgctcagcccgcaacagcgcgacggcaagaagacgccgcgccgccgccaccaccaccaccaacgacgccagcagcaatctccttctccttctccttcttcttcatcagccatggaggaggagcacagcggcgagatggagataagcaggtcgcagctctacggcgaggtgatggcgtgcacgtacgaggacgtgcaggtcatgtggtccatgctcgacaaggccaggatctgcagcgcgtcgtgaccggaccgccacacacggaccttcacatccgctcgatccgccgtccatggccgatccaatgcaccagtacataatatatactctcccagcagctgggcactgggcttcttcttcattcatggcaaagcaagctctcttggcgcgagacaactcgatctgccgagacgcgcggcatgcaacctgctatgatccatcactacatatactagccctgaaacctttttttttttgcagttggttttgtgtgtggtggcgtcgcatagcatgtacggttgagtctgatgaatcccggttgctggcagtggcacacagacacatggatgt

SEQ ID NO: 35040 - DNA, 486 bp, Zea mays
  Clone ID: MRT4577_131958C.1
tgggaccctcgaggccggccggggtctgtgcgtatctatgagagtggagtatacgcgccggcgctgcatgtctcacacgcctcaataagacggctgttcttcggcgatcgatactgatgggcggccttcctccatctacacaccgagcgagggcctccaccacctccaggttcaccacgccgcgaagatgtatgcgctggacgacgccattactaatgacgacatatacggccttctccgcggtgccgtagaacactgaagatcacattcctaatgccgaccgctgtgacgacaccgccatctgcgctctcgtggcctcaagattccctggcaacgctgtaggggtgaatctggctgccggatcagctcctgcgccagctgctcctgtcccatgagagctgaggacgtatgatgacctctgatcatcttctggtgatgaaactgaccgatacaacatacgtaactgatgaacgagacacctgtgcc

SEQ ID NO: 35041 - DNA, 281 bp, Zea mays
  Clone ID: MRT4577_131959C.1
cgcgggggctcattgatctgtcgcgatatttcacggcacaaaacttggattgcaggggtggatctaggggtgttcgtcacccggataaaatttataaattctttagaaaaacacagttaaagttcaagaaaatttgtatcatgtagcaaaaaaaaaaaaaaaaaaaaaaaaaaaaaaaaaaaaaaagaaaaaaaaaaaaaaaaaaaaaaaaaaaaaaaaacggtggaaaaaaaaaaaaaaaaaaaaataccaaaccccttcctcgcgggccggtcgttaag

SEQ ID NO: 35042 - DNA, 465 bp, Zea mays
  Clone ID: MRT4577_13195C.1
tatttctgccatcaaacataatacatatacaaatatttacttgtatgtccatgtaatgtatttgtatacccattaatatgcacacgtacatcctaagggcacgtattctccgggagcgcttctatcttatcttctatattgaactccacactataaacaatgctatctacagtataaaacatagatactgccaccttatgtgctggccatagcctaacatcgtctcccctccctaagtttttaaattaaaaaaacaaaaacaaattacaagcagcttatagaaacgtgtggagtttgttgactacacacaatgctaaaaggaaaaaaaaagataactcaatctatatgtataacatagaacctatttggctgcactgagtaattagaaagtgaagatgcagctcccatgactataattaaaagactgcactgatgctgtcgggtcggcacacacagctgatgatg

SEQ ID NO: 35043 - DNA, 137 bp, Zea mays
  Clone ID: MRT4577_131960C.1
tttgggttttaaaactacaccggggtttctacattggataccaagagatgagcaaaacttgtgctcggatcatacacattgtttttccaagaagcgacaaacagaaagcctttttgagtgaccacctgctagggata

SEQ ID NO: 35044 - DNA, 168 bp, Zea mays
  Clone ID: MRT4577_131961C.1
gaaaggcaatgcatgtcctcattgtataaaagggaagggagtgttacagtacatcaacagaaagaatatagattccattcaaaaaccagaaagaacattgaactcattttttatttgcaaggctttacagattatccaaatggaaattatttcggacgcgtggccccc

SEQ ID NO: 35045 - DNA, 233 bp, Zea mays
  Clone ID: MRT4577_131962C.1
cccacgcgtccggttgcgctctcttctttgcatttgtgcgtgttgctgctacattgtgctcttgtatgtgtattttattctttcccttactcctgttttgattgtgatcatttgtgtaaggcgtgagagacttcaacttatgaagattcctcacaaccaggatactgtgagatataaggaagaattgtggtactcaagtttgatttttggatcacttgagagtggttgagtgt

SEQ ID NO: 35046 - DNA, 264 bp, Zea mays
  Clone ID: MRT4577_131963C.1
agttcagctcgctagcaacggggtggatcatggctccgcttctcgctgctgccatgaagcacgctggagcccatcctggccttaggagccacctagtaggacccaacaataagagtttctcacggcaccaccttccgtcttcttctcgatagatcagcaagcgcaggtgtaaccttagctttactacacgatctgccagagtaggcagctcaacatggactccaaatgtttcgaccctcggaaatcgcacaacgggactggttc

SEQ ID NO: 35047 - DNA, 354 bp, Zea mays
  Clone ID: MRT4577_131964C.1
aaacaaaatttcgggggtttattattggcaaaaaagccccaggggcatggcaaggggggttcttaatttcggaaaaaaacacgggttctttctcaaccgcaacccgaatcggctcaaaagtttttggtttgatttgcggccccaattccccaaattacccatggttagatatagctggggcaatacccccacccatatttttgggggggctagcgaaattaatttgatcccccaaaaaaaaacccccagatatatgaccctgggacctacatgcccccccgggagaaggatacattttcgggccccagctagctagctagctcaactagggcccgccaaaaattaaaccccccg

SEQ ID NO: 35048 - DNA, 269 bp, Zea mays
  Clone ID: MRT4577_131965C.1
acggcccagggagaaagcatgtcaggacagagctgttggattggctttgatagaggaatggggatgatgtaagtttacagtattcctggggtttaattgttgtgcagtttcatagatgggtcaggaggtggacaagttggggccagagatgatggcagtccagcagcaactccctgtgctcccttctctttgggcagagattctatttttgacatttgcacaagacaggtagggaaaggggacttgtggtagtggaccatacctgggga

SEQ ID NO: 35049 - DNA, 405 bp, Zea mays
  Clone ID: MRT4577_131966C.1
cccacgcgtccgccgacgctcaacctgcacttcgccacttcacacgccttctgaccgggagtgagatctctctagcgctccttgtcctgcttgacttgccttactcagcatcatccaagaccactagccacctagatctctacctgagcttcctatcctctggagaccgaccgacatagtgccccaatacgaaagactattgccttagagacaaatcagattacgagagccttgtcctgacctgatcccaccgtcgtacgctatacagcctcgagtacatcaactactgcgcgcttcaacggaacaacgtgccctgctcccaaacggatccagctactacaactgtcaccccggcggccagaccaacccctaccactcgagaatgctcccgcatcacccgatgcc

SEQ ID NO: 35050 - DNA, 1260 bp, Zea mays
  Clone ID: MRT4577_131967C.1
atggatcctaagggcaaggggattgtgatcgatgacaaggagaaggagatcgtcaacaacaatgagccaaagggggaacccatcgactcaagcttaaacaacaagaagaaggacggcaagaagaagaggcgcatcaagaagatagtctaccacgacggtgatgcctcctcattttcaccaaaggatgacgacgacgactcttcttcaaagaaaaaggcggtcaaccaaaactattcctttgattattcccgcattccgtacaactccaatgctcatttattgtctattcctcttgacaagcccttcactttgatggggaagatcattctctttggagtcataaaatgcgtagtcatctattctctttttcatcctagcatttgggaagtagtagaaaatggagtgcatttttgtagtaacgataatgttatattcattcatgaacaaaatcataagaatgctcaggctactaccgttcttttagcatctatatgtagggatgaatataacaaagtcagtggcttggacaatgccaaggaaatatgggacaccctcaaaattgctcatgagggaaatgacgccacaatgatcaccaagatggaattcgtgtataccaaaatgacgcccgaagaaattcttggtaagtttgtaagaggtcacattatggtaaaagaagcaaggtatgtcaacgacattgccaacggacctcttcctcaatacgagctgcaatgtgttgcactcaaagcaacaaccaacaaggaggcgctcctaaacaaggtggcacaagttgaggcggccaaccttaatgagaaagaaatgacgcttgtaatcaagcacttcaagaccgctttgaagggatgcaaggacaaccccaacaagaataaatcaatgagaaagtgttcatgcttcaagtgcgacatggatgactttaagcttctagagcttgtggggcttgaaatggacctctgtgtcactaaagtacaacaatttcagggaggcaagacaaaccaaacgcaacagattcaaatgctgcaagtgaacaccctcaccgcaaggtcctacaacacctttttactcaaccctgctcaagagttcattagagcaaaagcatgtcaagtaatttctttaggggatttgatgaggacattttcgaagcatgttgtgttgcttgctttccacaaggcccatcaaatggttgaacacacactatatccacctccaacattgtctcacattacaaggagcatccttggtgtttaa

SEQ ID NO: 35051 - DNA, 737 bp, Zea mays
  unsure (1)..(737): unsure at all n locations
  Clone ID: MRT4577_131968C.1
gtacgcctgcaggtaccggtccggaattcccgggtcgacccacgcgtccgaggaattcctcagaacaggataaaggctactttatatacacctctctcatttgtttttctttcagttcatttcccaaattggctttagaagagtttgaggagagaaagtgcagcctgatgatgcagccaggaccgagtgttagggagaagacagagggtttcttacctcctatatcatgacttccagtgctgggctgtcagacttcaacaagggttgctagtttctttatattaagtcctttaagattatacagtaaatagttaaaaagagtaaaatcctatttttttatatttgctctttgtttttataaacaacagtaggcaggcaaattattagtacagtttggtcaccatgaattgaaagagtagagtataagaataatctttaggccctgactttcgacagcaaataggcctgggagccgtaagtcactgcttgagaacagggcattgcncgcagtacatcagagcttgagaagctcagaacttacagtgtgttggagacattatgttaaagctttagccaagaggacagactttgtgtatcattcggaggaaatgtgttntaaggaaaggaacatttaatatttgttctaggtccctacaatcaaacatttccaaatcctgtacaaaacaaaacaaaacacacanaaacgtgttgtatagcctctgcttcctttggaagct

SEQ ID NO: 35052 - DNA, 606 bp, Zea mays
  Clone ID: MRT4577_131969C.1
atggctgtggaacaatatcgcttactcgatgatatgagccttgatgatcagcacgtgcaagaggtgtttaacatcactggacaaagagttgtgaagggcatgatgtatgatgctcgagtaaagacatattttgtggggcacaagggtccagatacagatcaccctgatgttctgtgcgacaagaatgcgatacaaaatttgggtcgctatattgaaaccatgcaaaagaaacatggaccagaagtcgactggatgacaactgactttgacatggcgatagcttatgcagctggtggagaagtgcgacatggaagtgacgacattgtggaacatcgaagttatagtaggtggtcatcctcctcggtcgggactagtcggcctcgacgaccatctgcacagaatgaggagctaatggaggatcaacagaagttgcgggaggagatgcaacaaatgcgtcaaaagatgcaaatgatgaaatcacaacatatgtatatgtggatgcatcaacagacgtatggtagcggagtacctcagccaggcattacttcaaccccgccagtgaaccccacatcttcgcatgttgatgcaccacatattctgggatag

SEQ ID NO: 35053 - DNA, 282 bp, Zea mays
  Clone ID: MRT4577_13196C.1
aacccgccaaatttgggtttttttatagcccagacaactttttaaaaaagaacttttcatgggccaaattgccccactgaaaaaaagggtccaaatttttatgccgggatgcccctggtttttttatgaaaattggccccaagggggttaaggagaaaaaaaaatccatccttatattggattattggtcaaatttcccaaagaaggaaactgccgcttcccctaccgggggaatggccccttgggaaaaacaaggtgttgggccacctgaagggagggggg

SEQ ID NO: 35054 - DNA, 277 bp, Zea mays
  Clone ID: MRT4577_131970C.1
tgttggacgcatccggctaccaagtaccacgggggggttttaaaaacaccgggggtaccaacaaaccactgatggagcttaactggactgcagcatgcggggaggggaagatggtagctggcctgcacccggtcagcaagccaagggcgaactcagggctgatgctcgggtgcgccggacttccgtttctccggggggatcatggagccctcctagaataaagaccgctacgcgcaatacgcatggaccgctgccagagcattaccttcttgctgtt

SEQ ID NO: 35055 - DNA, 640 bp, Zea mays
  Clone ID: MRT4577_131971C.1
ccggccggggaaaaaaaaaatttaaaaaaaaaaaaaaaaaaaaaaaaaaaaaaaaaaaaaaaaaaaaaaaaaaaaaaaaaaaaaaaaaaaaaaaaaaaaaaaaaaaaaaaaaaaaaaaaaaaaaaaaaaaagggggcattcaaaaaaatggggaaattcaaatccacaaaattccgaatccctttctcctgggtttcctctcccaccacaaacccccaaatcgaagggttttcccccgcccccctttaagggattccgggggaaaaagtcaggggaaaaggctccagaaggaggggggaggcccaccaggggggggggggaaaatgttcctttggaatgggttctacggggggggggcccccctcggcctggggaaaaaggaggcaaaaatccttttctttggcctcaaaaacgccggaaaaaccacgttgttccaattgttaaagaaaaagggtttggggaaaaaccacccaaggaaaaacccgaggtgggaggagctcaaaatcggaaaaataaagttaaaggctttcaacctcgggggccaccaaatcgcgcgccgggggggaaagaattactaccaaaaggtggaggctgaaaaataccgggaaaaggcatatgaaaaggagggttttgttgaatc

SEQ ID NO: 35056 - DNA, 604 bp, Zea mays
  unsure (1)..(604): unsure at all n locations
  Clone ID: MRT4577_131972C.1
gcgggggggggggggggggaaaactcaaatccagggggcagtcatcgtaatttccctctcaaaagatccaacagttccagttacaagattgaaacagattcatttcaggaaagtggatcccagaaacaagaaaatgtaagcaactagtgagggggtntagtctggggaccatgaaggtgggatgatgaatgttgggaccagtggaaccagtagagaaccaatgatccaaccgccaacaagtattccaaacccagtggttgatgcccttagaaggttcttcatcttttcgttgaggaaatatatgcatgagaatagcgatatcgcgagctgaaacgcaggtccattctctgcagaagttgctatgctccatccagcaatgaaagcaaagaaaaacaatcttctggagataatatccatcgatggcacctcaaagcaaccaagaagtgctttgacccatgaaggggattcctctactctcttctttaacttggttttcaagttaatttttgtcttcttccgctgctggtagctcttcataattatcttctcataagcaccttcaatagcttcttcactcggttcatgcccagcatactgttgaata

SEQ ID NO: 35057 - DNA, 270 bp, Zea mays
  Clone ID: MRT4577_131973C.1
actttatggactttcttttcgtcttctttttcattgacaatccgacagatcgttttcttttctgtgaccgtacctttatgttgtgcaacacccttcgtcgtgttctcgtgcatcatgggacaagatcttgggagaggcgaagcccacaccggttgggttttccgcgtacgtatgtcacgcgataacacccccctggcgtatttaatcggactcaccggagcgttttttcacggtctggaaccttaaaaaatgaaagttcccctgcccttt

SEQ ID NO: 35058 - DNA, 1096 bp, Zea mays
  Clone ID: MRT4577_131974C.1
cagtcatcctaattcccctctccagagatccgtcagcgccagttccctctctgaagctccttcagttccggttactggatcccagcagcttcatttcgggagcgtcgagcccggtaactagctcttgtgaccatctaggggggttgaggagcgctggggcccgtggagccgggaggaagccaattagccacgtaagaaccagtagagaacacctagtcgaaatggaaagtgggataacaggcacacgtgtagagccccttagagccttcctgcaacaagtattccaaacccagtggttgatgcccttagaaggttcttcatcttttcgttgaggaaatatatgcatgagaatagcgatatcgcgagctgaaatgcaggtccattctctgcagaagttgctatgctccatccagcaatgaaagcaaagaaaaacaatcttctggagataatatccatcgatggcacctcaaagcaaccaagaagtgctttgacccatgaaggggattcctctactctcttctttaacttggttttcaagttaatttttgtcttcttccgctgctggtagctcttcataattatcttctcataagcaccttcaatagcttcttcactcggttcatgcccagcatactgttgaataaggaaattcctcgcacctcggatctcttcttcagatgcatcacgatcaacaccaagaagcttgtagggatctcgtattcggtatctagggaacaccggaacatgctcgtagctgaactcgtggtcagcttcggcgccagcgccggcgccggcgccgatggagaggctaatggagcaccgcggcccccgcagccgcagagggagcgcgataacgccctcacgcaccaccgccgcatccgctccccagctgccaatgcggcgaagccgcgggagtgggcgggcgaggaaggaggcggcagtcgcctgcatctccagcacctgcggcggggagagggaggcagggagcggcgaggtcgtcttgccgcgacgcgggggagggagggaggagaagattggtagggagcgacgcggagacggagacaggaaccccggcccggccggcctcgaggtaccc

SEQ ID NO: 35059 - DNA, 483 bp, Zea mays
  Clone ID: MRT4577_131975C.1
ggggcgggggggggcatccaaaaaaaaagggcccggctgaaaacagggggggccaaaacatcgataaagcataggattggacattgggttttacaaaaaaaacccgaaaacacacggaatttttcaaaaacaaaaaacatttttaagctttccaaagcattgattggtccattaaaaacgggggcatccttggagaaaccaaaaagggctttataaattggcacggaaatttcactttattggggccaaacaattgaaaaaaacattgaagggtggggctggggaaaccaaaaaaactttgaaagcccttggatccactcaaaaccttgggccacccggagggaaaaattttttttcgaggaggaagggccccaaaacttaaaaaaaatccttgggggagcaaaaccctgcaaaagggggatggggggggacagtctctttggaaaagctcaatacccaaatagcttataagggaaagaaaaa

SEQ ID NO: 35060 - DNA, 767 bp, Zea mays
  unsure (1)..(767): unsure at all n locations
  Clone ID: MRT4577_131976C.1
gggtacccctcgcggggccggccgggnaaaaaaaaaaaaaaaaaaaaagcctcccccactcattcttctccctgcttctctttctcactcatcgctcgtggagttgcagccatggctgctccggtcgccgcatactccccggcgctgcgggtccaagtgaaagcagccatggatgcagcgtcgtcgttccgggtattggcatctctcagtttccccgggcaaagagcaagctttccatcgattcggatgcagaagcgctctcaagtgtcctgttcgctggcaaaacaagaaacagttgagaaggtcagcgagatcgtgaagaatcagttagctctacccgaagacaccggagtaacaggagagacaaagtttgtagacattggagccgactcactggacacggttgaaatcgtgatggggcttgaggaagcgttccaaatcagcgtggacgaatcgagcgctcaagagatccagacggtggaggacgctgctgctctcatcgacaagcttatcgcggagaaggacgcttgaaacgctgtccggaggagggatgacgatgggtggttttgatttgaggccatagtgctccttattgcaattattagtcagaaaaaaaaattacccagtttcttttctttcttcttcttcttctatcataatatgaaatatgtatgcatatgcatgccttttggtggtttgggattattataataaataaaactgccgccgagagatgagagacggtacccaattctcttcgattcggg

SEQ ID NO: 35061 - DNA, 474 bp, Zea mays
  Clone ID: MRT4577_131977C.1
ccggccgggacctccatttcttgccaatttgcgtgccgccccctcgccgtctccgcccaatcgaccagccccagcccccaagccatcttgcagttgaccgacgcgcgtgtcgcccacccgctgtctccacccaatccaatccaccagcctcccgagctgtcttgaggggtggaggagtccggctgcgcacgagggcagactggcagagcagacgaggttacactgcaacctgcgtgcgagcaagcggcgtccagcacacgcaagatgtgcaacgggaagtaagcgggagggtgtgcggcgacggctggccagctggtccactcacacactacgcaccttgtttgatattgcaccaaattaccaggccagatggaactaccactgaactaccatatcctttgtatgccattcagaacaaatgatggaatcagatttcgccatttgaagtctaaaaaaaaaaaaaaaaaagcggcc

SEQ ID NO: 35062 - DNA, 857 bp, Zea mays
  Clone ID: MRT4577_131978C.1
aattggagttgattcctcgacggtcgtcgatggacacgaggcaacgccgccgcggcctcccctcatcgccgtaataacaaagcgcccgcgccgcagcccgcagccctcagttcccactcattcttctccctgcttctctttctcactcatcgctcgtggagttgcagccatggctgctccggtcgccgcatactccccggcgctgcgggtccaagtgaaagcagccatggatgcaacgtcgtcgttccgggtattggcatctctcagtttccccgggcaaagagcaagctttccatcgattcggatgcagaagcgctctcaagtgtcctgttcgctggcaaaacaagaaacagttgagaaggtcagcgagatcgtgaagaatcagttagctctacccgaagacaccggagtaacaggagagacaaagtttgtagacattggagccgactcactggacacggtaacagtactctgtctgtttgtctgatgatctcaaacaaacaaacaaacaaacaaagaatctggtgtgttgttactaggttgaaatcgtgatggggcttgaggaagcgttccaaatcagcgtggacgaatcgagcgctcaagagatccagacggtggaggacgctgctgctctcatcgacaagcttatcgcggagaaggacgcttgaaacgctgtccggaggagggatgacgatgggtggttttgatttgaggccatagtgctccttattgcaattattagtcagaaaaaaaaaattacccagtttcttttctttcttcttcttcttctatcataatatgaaatatgtatgcatatgcatgccttttggtggtttgggattattataataaataaa

SEQ ID NO: 35063 - DNA, 625 bp, Zea mays
  Clone ID: MRT4577_131979C.1
attgggtacctcgaggccggccgggaacaacgttagaagatagcgcttataacttgtcagacatggccagcgtcgatgcgtgtaggctgctcagagctctttctggggatcccggttgcggacggacgcccacaacacgcgcatccctcgcggtgtccaccgtcccgtgcggcgccagggcaaggctgatctgaacaacgatgtccatgcattcatctcatctgacctaccacttgacgtccttccggttcaggcccatcaactaactgcatcgggtcgcctggtagatgacccacgcgctacatgacggacatgatcacctacgccgagaacgacgtgcacatcgaggtggactcgctgcgaccagaatgtgctgaacaaagaagctctccaaagactccgcagcgagcatcagcattccgaagcaaactgcgcccccgtgcagccctacagtggatggttcggcatctgttctctgccatgagtggtgcgctatccaccgcacctgttcctggactcagctgcctgtggcgtactcatccaggccagaggactcacctggtgatccatgacaggacgcctcttcacgtgcacgtgcatgacgctgcttctgacgtgccccaac

SEQ ID NO: 35064 - DNA, 310 bp, Zea mays
  Clone ID: MRT4577_13197C.1
gagctcatttgtcggcggccgcccttgttctttttcttgacggggaatagatgcttggtctacttactaagacttgctaggatttgagaatggtatggtgaaacctcaagtcatgccactgcccataggcaaacaacggaatgactggtggagctgtacaattaccgacatttttcacagaggacaggatccatgtttcttctgtaaacgttgtacagatgggataaacacttaccttaacaagcaacagcggcgctgccttaaacggaactgccattctccctgtagaggctcattatgaactgtgcaa

SEQ ID NO: 35065 - DNA, 278 bp, Zea mays
  unsure (1)..(278): unsure at all n locations
  Clone ID: MRT4577_131980C.1
tttttgtttttaaaaaagtcaaatactatcacaatccattacatcacagaactataattcccccatatatataatgtactactactgatacaataacagtacctagcctctattcggctcattttcattggcatggcttattctagtgggggggtagcnaaacacactntctactctctccctcacaacatactantatactactatangtccatannaacannnanaancattattataataatanaaacaataataanattanctcnacacntaat

SEQ ID NO: 35066 - DNA, 366 bp, Zea mays
  Clone ID: MRT4577_131981C.1
tctcatcgcctaatgtcttggacccttgccccgcctcctgcaagttgcaggcaaccgagaagctaccactactagctgctcaggctctgctcagctcaaaaggcgttcaggtttagtgcacgaaatgagcagcgcgctgcccgcggcagatcgggcgacagggagaaggaggagggagagatgttgctgctaggattagccacgggctgctgcgtcctcgccgtcgccggggaagccgagaagcaggacggcggcggggcgtcgtcctccgggggcggtcatggtcttggttccaagattagccccgccgtgctgttcgccgtggtgatagcggccgtggtgctgttcgtctcctgcctgctgcat

SEQ ID NO: 35067 - DNA, 839 bp, Zea mays
  Clone ID: MRT4577_131982C.1
cctggatggaatcatggaaccgcgtgctttttagctaccgaacggcggcgatgcgtcttttctccggcgtcctcgattcttcgtccgcgcttgcctccgccgtcctgggctccgtgtccgaccgcctcggattctcgcgcatagtttgcggtcgagcgagcccttcgaacatgccggctctcgcttgttctgccgcttcctcgtcttctgccgctaccggcgcccagaaaccgtggctcttcgtcggtctggggaaccccgggcggatgtacaaaggcactcggcataacgttgggtttgagatgattgatgctattgcggaagctgagggcatatcattcagcagtaagcaatttaaggcagttgtcggaaaaggcctcattggtgatgtccctgtaatgcttgccaagccacagacttttatgaatgcaagtggtgagtctgtcggacagctggtttcatacttcaagataccactcgatcaattagttgtgatctacgatgatcttgatctaccctttgcgaaattgcgtctgctaccaaaggggggacatggtggccacaatgggatgaggagtattgttgaccatttgaatcagagccgtgattttgcacgcctaaggatcggcattggacggccacctgaggagctgggtgctatcaattttgttctgcggtcattcaccaaagcgacaagccaacatgtatgtgccctaattgattagtagaggttttcatttgatcacacatcaagtcatgtaaattggattcacatattgttttcagattattatggggattatttggatttaaaaaaaaaaaaaaaaaaaaaaaaaaaa

SEQ ID NO: 35068 - DNA, 345 bp, Zea mays
  Clone ID: MRT4577_131983C.1
accacgcgtatgtccacgcatcctgaggttttgctgttatacgatctcgatctattatgggtgctatactatgcggggagtgcctgtgcgtgaacgccatggtctgtctagaatatcagacctggataggaccgcagatgtaggcatgcatttgatagtcatagtacacatgtttgtacttctaaggtgtcaagacattatactggccagatttagtacacagacgctgcactcactggtgtagtacactaagcgagggattttacgactaacggcggtgagactatgctatactgctgggatcccgtatggtatgacaagcttgatggcctcacggtatgatac

SEQ ID NO: 35069 - DNA, 610 bp, Zea mays
  Clone ID: MRT4577_131984C.1
aaaaaaaaaaacccttggctttaatcggggatttaccccggggctaaacccccccgttccctactttgggaaagcccataaaagcccgggggatcataaaccccaaccccctattttaaacaaaattttttgcccggggcaaaaaaggtttcaccaaatatttccgggggaaagcaaccaaaatcctttgtttttaccagaaacccctttggaaaaatcggggggaaaacggtttttgctttccctttgcccggcaggaggagtgggagggcccccccccttggcaccccagggatttcctccaaccggaaaaagggaaaaaaaccatttaaattcattcccccgggttggcccttttaggggaggccaaaaaaattttcgggggatccgaaaccaaggggccaaaaggggcaataatttttactagggccccctcagccctgggcaatccccatttggaaaggggatttccaaacccctccacctggtttgaaacttttgcccaaaacctatcccctgggtccccgctggccgaccctcccttattttgccccctgggcccacccaacccccccgggaaccccgcctgggggtttcaaggggaaccccc

SEQ ID NO: 35070 - DNA, 628 bp, Zea mays
  Clone ID: MRT4577_131985C.1
aattcggcacgagccagctaaccacttccccaacccccaatccatatctagcattctactgtagtggcaacgatgatggccgtgtctctgcagctgcgcccaatccctcgtctccctccgtcgagaaatcgctgcgcaggcacaagtccgcggatggccgccttgagctgcagatacaaccagcctaccaatgtgcaagggcgaacaaggctcacaagccacataacacgcagagatgccctgtcgttcatgtcatccggcgtgctggccgcattcgtgctcgtggtggccagtccggcagaagctagaccttcgagattggagaacaaaaggaaagccctggagaagcttgagaagctccgggagaaggcgttaggcccgaaggagaagagcggagccaccggtaacggtaaggagatgccccctccggcgaacttgctaatccctcctgccgccgtggaggctttcttgtgaaaggcagtctgccgatggacccttcccttgtgttaaatggcgaggctagtctgagtttgtacgttgttggagtcttgtatgactatgccaactggaaaatgaaatgaaagtgagcttgcatgcttagctgaaaataaaaaaaaaaaaaaaaaaa

SEQ ID NO: 35071 - DNA, 588 bp, Zea mays
  Clone ID: MRT4577_131986C.1
aggcaaaatagctttaaatgaatatctacactatattctttaatactggggttcctactatttttaaacagtgcttgagtgaggtttgaatgtgacaccccagcgtcacctagggtttctcttgtaaaagcccaaccaagaaccattatttcatgtaaatccaagtaagcatgagcatcaaattaacttaagtaataaagaattcaccaagtatatacttaaaagtgtcatgatcaaaacaattgagtctttgaaaagataagaatgtgcaaccctaattaagaactctaagtgaaccccatgagcaaaattcaaaagaataagcaaaagggaatgaaaagtttaaaattttgagttgagccaattatataagttaaagtatatttaataagcaacaagaaagattgagaaagcttagccaaaataattcaagaaaacccccaaatcaaacttcttttgttgggactcattgggaattctgaatttcagaattctgaaattcagaccttgagccaaagatcagggatgttcacctttgatccctaactcgaatcctaatggccccattgacaaaattgtggctaacta

SEQ ID NO: 35072 - DNA, 794 bp, Zea mays
  Clone ID: MRT4577_131987C.1
ggctcgacttggctaacagggagaggcacatagcctagcacaaccaacaatcctctttttctttggcaggggtcttaatggctttgttgcttttctcctcaaataaatctccaaagataattcggcacgagttcactatgcaggggaggctaggcaatgcctctttgagcttgtcgcctgatgtatcctcctaggcgggctttttctcgacctacttcgacatagaatcaaagttaacaaggtcgaccccgaaaggacttaaaaataccatgatgtttgttttgtcattacctcaattttctgagcgttcagaacaagactcttcaacaacagctcgtacatgttcttcagtggtaggggtctttgcaatgccagcaggcttctctgaggcaaccttagaggcctcgacctagaccttctacttctcaccttcatggtgtttcctttcaaagcgcttgggtgctagcaacttttcctttgccacaatctcactacccttgtattttgcctttggcttcaaggactttgtcggagggccccctctagcctccttttcactaatcactcaacccctatctataattcttactttgcatttcctctgcaatctagcatcatgatcgacaatgaggttggggtagtctagatattctaagtcatatgctttgatcacacgattatgtattctctttattgccactcactatcgcactaagtagatgatctctttcacaatatagttgcataaaactttgttagcaactgtctccaccatattttttttttttttttct

SEQ ID NO: 35073 - DNA, 1190 bp, Zea mays
  Clone ID: MRT4577_131988C.1
ggccgggctctcccctgccgcgctgtttacgcacaatctccttccgtttctcggcatcgtcgacacctccatcggcctccgatctctccacgagcctccgctccaatccgaggatccgcggcggcgggcagtggtcggccggcgatggcgcaccgagtggacaacgagtacgactacctcttcaagatcgtgctcatcggcgactccggcgtcggcaagtccaacatcctttcccggttcacccgcaacgagttctgcctcgagtccaagtccaccatcggcgtcgagttcgccacccgcaccctccagatcgaagggaaaaccatcaaagctcaaatatgggatactgcggggcaagagaggtaccgtgcaatcacaagtgcttactacagaggagccgtgggtgcacttctagtctacgacatcacgaagaagcagacatttgaaaacatacagaggtggctccgcgagctccgtgaccacgcggactccaacatcgtgatcatgatggtcggcaacaagtccgacctgaaccacctgaggtcggttccagaggaagacgggcagacgttagcggagaaggaaggcctatccttcctcgagacatccgccctcggagcccttaacgtcgagaaggcgtttcagaccgtcctctccgacatccatcagatcataagcaagaaggcgcttgcagcccaggaggcagcaggcagtggacctccaggtcaaggaaccaccatcaacgttgcggattcgtctgccaacacgaagggagggtgctgctcttcctaggtgcagacaaagacatgctgctgctgctgctgctgctgctgctgctgctgcaaagaagagagagagagaaacctcatggatcgtacgatactttaggtgttatgtaggtgacgactccttttggcctgtaactccggtgggttgtaatcacagttcatacttgtgcaaagaaatcctcctctcaggtagatatggcgtgtagtttttgaaattttggtagagagcgatggttggcagacttgcgtggagcccagcttggtgttttccttcagtgttctatcttaagtagccctctgctggaaaaaaaggacccagatatttcttgtatttgtactcgagtttgcggtgttaccagatatactttgattcctgtgctagaacaaaaccccccacccccc

SEQ ID NO: 35074 - DNA, 1524 bp, Zea mays
  unsure (1)..(1524): unsure at all n locations
  Clone ID: MRT4577_131989C.1
cgggaaaaaaatagagcccgagcgccgagggaggagggcaaaccgggagagagagagagagacacctcctcctttttccccctttgcattgggttgccgcaagcccgcaacactacagacacaaacacagtctaggaggaggcttcttccgctcgctcagggagaggaagcggaaggcttggaaggagaagagaatggcggggcggcgcgcggaggaggagtacgactacctgttcaaggcggtgctgatcggggactcgggcgtcggcaagtccaacctcctctcccgcttcacccgcaacgagttctgcctcgagtccaagtccaccatcggcgtcgagttcgccacacggacactccatgttgagggcaagatcatcaaggcgcagatctgggacacggcaggccaggagcggtaccgggcgatcaccagcgcctactatcgcggggcgctgggcgcggtcctggtctacgacgtgagcaagcccaccaccttcgagaacatcagccggtggctcaaggagctaggcgggacgcccgcgtccccttccgtttccatgctattcggctaccgtacccctctccgtctctcgtcatccgccggccgtgacgaccacctctatcggcctccgatccctccacgagcctccggtcgaatccgaggagcaggatccgcggcggcggtcgggggtcgcccggtgatggtgcaccgtatgacaacgagtacgactacctcttcaagatcgtgctcatcggcgactccggcgtcggcaagtccaacatcctctcccgattcacccgcaacgagttctgcctcgagtccaagtccaccatcggcgtcgagttcgccacccgcaccctgcaggttgaagggaaaaccatcaaagcccaaatatgggatactgctgggcaagagaggtaccgtgcaatcacaagtgcgtactacagaggagctgtgggtgcacttctagtctacgacatcacgaagaagcagacattcgaaaacatacagaggtggcttcgtgagctccgcgaccacgccgactccaacattgtgatcatgatggttggtaacaagtcggacctgaaccacctgaggtcggttgcagaggaagacgggcaggcattggcagagaaggaaggcctatccttcctcgagacatccgccctcgaagcgctcaatgtcgagaaggcgttccagaccgtcctctctgatattcaccaaatcataagcaagaaggcacttgcagcccaagaggcagcaggcagtgggcctccaggtcaaggaaccaccatcaacatcgcagacccatctgccaacacgaagagagggtgctgctcttcataagtaggtgcaaacaaagacatgctgctgcttctgcgaaaagaaaacccccggtggatcatacaacacttttgttatgtagttgaccccttttggnctgtaactctggtgnngtgtaatcacaattcatactcctgcaaagaaattctcctctcgggtagatacgatgtgtagtttct

SEQ ID NO: 35075 - DNA, 943 bp, Zea mays
  Clone ID: MRT4577_13198C.1
atcactcctatgggcgattgggtccctcgaggccggccgggaccaccagaagcttctaggaaggaggaactcgaacggccggcagcattccgacgagacgagtcacgaatccggatagagcgccgccccccaacctgctgcgccgaccctgctcgccgccggcccgagtagagagagagagagaggagagaaggaagcatgacgacaatccgtcggttctgctgcgacgacctcctccgcttcgcctccgtcaacctggaccacctcaccgagacgttcaacatgtcgttctacatgacgtacctggcgcgctggcccgactacttccacgccgccgtcagccctggcggccgcgtcatgggttacatcatgggtaaagttgaaggccaaggtgaatcttggcatggacatgtcacagcggtttctgttgcctctgaatttcgtaggcagaagttagccaaaaaacttatgaacttactggaggaaatcagtgataagatggataaggcctacttcgtggatctctttgtaagggcatctaacatgccagcgataaggatgtatgaaaagcttggttatgtggtttatcgaagggtgctccggtactactcaggggaagaagatggcctcgatatgagaaaagcattatcacaagatgttgagaagaagtccatcataccactcaagaggccaattacgcctgatgaacttgaatatgattgatgttagctacctggtgcttacgttggatgctccggtggggaatttgacaggctttgaaaatctggtagtgagtgtattgttgtcgtttttacgcctgctaggggacaggttttgatggtgaattctgcagtttttgtatttgagaatagcaagaactatgacttggcatggaatcaaattgctttgttgtgatgtcgtatttgcccaaaaaaaaaaaaaa

SEQ ID NO: 35076 - DNA, 1607 bp, Zea mays
  Clone ID: MRT4577_131990C.1
gcggcatcgtcaacacctccatcggcctccgatctctccacgagcctccgctccaatccgaggatccgcggcggcgggcagtggtcggccggcgatggcgcaccgagtggacaacgagtacgactacctcttcaagatcgtgctcatcggcgactccggcgtcggcaagtccaacatcctttcccggttcacccgcaacgagttctgcctcgagtccaagtccaccatcggcgtcgagttcgccacccgcaccctccagattgaagggaaaaccatcaaagctcaaatatgggatactgcggggcaagagaggtaccgtgcaatcacaagtgcttactacagaggagccgtgggtgcacttctagtctacgacatcacgaagaagcagacatttgaaaacatacagaggtggctccgcgagctccgtgaccacgcggactccaacatcgcttccatgatcggtggcgcgctgtttacgcccgcgtccccttccgtttccgttccattcgcctatcgtaccccctctccgtctctcgtcaatcgtcatcgtcggcccgtcgcagccacctccatcggcctccgatccctccacgagcctccggtcgaatccgaggagcaggatccgcggcggcgggcggcggtcgcccggcgatggcgcaccgtatggacaacgagtacgactacctcttcaagatcgtgctcatcggcgactccggcgtcggcaagtccaacatcctctcccgattcacccgcaacgagttctgcctcgagtccaagtccaccatcggcgtcgagttcgccacccgcaccctgcaggttgaagggaaaaccatcaaagcccaaatatgggatactgctgggcaagagaggtaccgtgcaatcacaagtgcgtactacagaggagctgtgggtgcacttctagtctacgacatcacgaagaagcagacattcgaaaacatacagaggtggcttcgtgagctccgcgaccacgccgactccaacattgtgatcatgatggttggtaacaagtcggacctgaaccacctgaggtcggttgcagaggaagacgggcaggcattggcagagaaggaaggcctatccttcctcgagacatccgccctcgaagcgctcaatgtcgagaaggcgttccagaccgtcctctctgatattcaccaaatcataagcaagaaggcacttgcagctcaagaggcagcaggcagtgggcctccaggtcaaggaaccaccatcaacatcgcagacccatctgccaacacgaagagaggatgctgctcttcataagtaggtgcaaacaaagagacatgctgctgcttctgcgaaaaagaaacccccccggatctcatacactacttttgttatgtagttgaccccttttggcctgtaactctggtgggttgtaatcacaattcatactcctgcaaagaaattctcctctcgggtagatacgatgtgtagtttcgagattttggtagaggccaatgtttggctggcagacttcgggtggagtccagcctcgtgttttctttcaatgttcttctacctcggtagtcttctgctggaaaaaaaaacatgatcagatacgttcttgt

SEQ ID NO: 35077 - DNA, 350 bp, Zea mays
  Clone ID: MRT4577_131991C.1
attcggctcgagcgaagatgccgatgtttgatgtggatggtatcaattcaaggtagggggcgctgatgaccgtcctgggcctggaatcatcagattgaaggctgcctcgtgtggctaccctggagggcccaccttgggtaaacagttgtatagtgctatcgaccaggacagccgcatatgaccggttggatctaatggaatgggtgcgttcactttacagacaggatgggaaggggctctgcagccgacttgtggaacagtatttagatgtctcgaggcctgcacggttgcgttaagtcatactcatggtgctcgccgagatgaggctgggaagcctgtagggcacatga

SEQ ID NO: 35078 - DNA, 1757 bp, Zea mays
  Clone ID: MRT4577_131992C.1
cgctggggagtactgcggttccgcgggatgaattaagtattccctaccatttcccatcccctgccgcgctgtttacgcccacatctccttccgtttctcggcatcgtcgacacctccatcggcctccgatctctccacgagcctccgctccaatccgaggatctgcggcggtgggcagtggtcggccggcgatggcgcaccgagtggacaacgagtacgactacctcttcaagatcgtgctcatcggcgactccggcgtcggcaagtccaacatcctttcccggttcacccgcaacgagttctgcctcgagtccaagtccaccatcggcgtcgagttcgccacccgcaccctccagatcgaagggaaaaccatcaaagctcaaatatgggatactgcggggcaagagaggtaccgtgcaatcacaagtgcttactacagaggagccgtgggtgcacttctagtctatgacatcacgaagaagcagacatttgaaaacatacagaggtggctccgcgagctccgtgaccacgcggactccaacatcgtgatcatgatggtcggcaacaagtccgacctgaaccacctgaggtcggttccagaggaagatgggcaggcgttagcggagaaggaaggcctatccttcctcgagacatccgccctcgaagcccttaacgtcgagaaggcgtttcagaccgtcctctccgacatccatcagatcataagcaagaaggcgcttgcagcccaagaggcagcaggtagtggacctccaggtcaaggaaccaccatcaacgttgcggattcgtctgccaacatgaagggagggtgctgctcttcctaggtgtgcagacaaagacatgctgctgctgctgctgatgcaagaagagagagagaaacctcatggatcgtacgatactttaggtgttatgtaggtgacgactccttttggcctgtaactccggtgggttgtaatcacagttcatacttctgcaaagaaatcctcctctcaggtagatatggcgtgtagtttttgaaattttggtagagagcgatggttggcagacttgcgtggagcccagcttggtgttttctttcagtgttctatcttaagtagccctctgctggaaaaaggacccagatatttcttgtatttgtactcgagtttgcggtgttaccagatatactttgattcctgtgcccaaatcataagcaagaaaaaacaaaaaaaaaaagaggcagcaggcagtgggcctccaggtcaaggaaccaccatcaacatcgcagacccatctgccaacacgaagagagggtgctgctcttcataagtaggtgcaaacaaagacatgctgctgcttctgcgaaaagaaaaccccccggtggatcatacaacacttttgttatgtagttgaccccttttggcctgtaactctggtgggttgtaatcacaattcatactcctgcaaagaaattctcctctcgggtagatacgatgtgtagtttcgagattttggtagaggccaatgtttggctggcagacttcgggtggagtccagcctcgtgttttctttcaatgttcttctacctcggtagtcttctgctgggaaaaaaaacatgatcagatacgttcttgtatttctacctgagtttgttgtattgtctccggtatattatatatacactaaaaactttgattcctgtgctacaactgttatcactattaaaattatgaatattttttttctagcgatttgtatacaat

SEQ ID NO: 35079 - DNA, 307 bp, Zea mays
  Clone ID: MRT4577_131993C.1
gtctgcaagtggctcacctacaacgaggaccgcttgtacatggccggcctcacgctcatgagccaagacaaggtggtaatggagagctgttactatctcaaggacgcagtgctgtactgcggcatcccatacaacaaggcgtaccggatgactgcgttcgagtaccactgcacggactcgcgcttcaaccgcgtattcaacgaacgcatgaagaaccactcattgatcatcaccaagaagatgctggacttctacacaggcttacaaggcgtgtcaacgctagtagacataggctgtggcttgggca

SEQ ID NO: 35080 - DNA, 383 bp, Zea mays
  Clone ID: MRT4577_131994C.1
ctggaaaacggggagatccacggcctcctcaactgtaccagggatgccgttgaggctacattctgcctcgaccatgatcgagcctagccctcatgacaggttgctgactttctcaagcctaacagtcaagtcaacaacagaaacctcgacggttgctacacggaacgcaattccagccaactctcccttaaggtcaggaagcactttgccaacagccttaacagctccagagctgcagggaatgacgtcgaaactagcagacctctcaccacttcaatccttagacgagggcccatcagacagcctcctgagtagcaaagatggcatggacagcggtcatcacaccctaaacgataccgaacttgtaattgatgaccttagca

SEQ ID NO: 35081 - DNA, 458 bp, Zea mays
  Clone ID: MRT4577_131995C.1
attttgggttgccacccgtccgctatcgagtcctagatcttacatgggaagcattgcgtgttgtggatctcccaaccaacccgccttctggatctgggtcacaccctccagagatctctcgggacattggttcacaatctttgacttatggaatggcatttggaggaccaggtggtctatggacttttatatattaaaacattaaccttgaccagtttgtgccctcataattggcctcacccataagtaacaaaacgcataagaagggattgtacaaagctttcccaacattgtatgcatccatgcacgatcaagcaactggtccacacaaaactcaattcacaatagatgaggactatgttccctcctgctgggtaacccacaatttccaactatatgcagccttttatccactggttgttaagactcaagcaatctttacgtgccatagactatgc

SEQ ID NO: 35082 - DNA, 303 bp, Zea mays
  Clone ID: MRT4577_131996C.1
ataaaatatttttttttttttttggcacactgggggggggggaatactacttatgttcttatataattaagcaatgactagtaaattgtttttgtttaaagtttctaaatatgtggaggcacactttataggggacaatcttttacaggtaccttaaaacccgagaatcttaaagttctatttattaccaataacagcctgaatttggaaagttccattttttttgcgctcatcaccttggagctgaatgacctggatttgctctgggtcctgatatacaggatctttgtttcttaatttctc

SEQ ID NO: 35083 - DNA, 845 bp, Zea mays
  Clone ID: MRT4577_131997C.1
tgggacctcgagccggccatggaatttgctgatccagcaagctttacctccttccttacaagatctatcggcacattggccctcatcttaagctctgtcaagtcctcgacaatccgtttctcatattgttcctcttcttcctcctcagctagaatctcctcttcttctgtcaggtcatgacctttcatgggcatcaaaaacttgtcgattgtctcttgaaatttatcatatgagtccaccaaagcaggtggcaattgatctctcaccctgttcaatgacaagaaatcacctgatgctagcagtcggtgccaatatcggcaatgctcacgtgattcgaagtattcggccactgtctcctctgcccagtccctgaacacttgctgcacctctttctcgatccggaaatcaaattcaaactcctcgcccctcctcatcctcttggacaagtggttcagtatcttcaagccaagcttcttccgcctcgtctcccgtgcatttttcagctcctgcgccttttccgccttcatcttcagatacttcttccttgctctctttgctttctctgacatgggtgggtgcaacactgacggtggcacagcttggaattctatccccaggaactcaatcttctctgatacagcgctgtggattgagctccccaatctgtccaccctcacctctaaatccctctccaagactgcaattatcctgttcctgatctcaattgtgagcatcttcgacccggacgtcacaaccagaatatcatctagatatcgaatcgcatatactctcacaggtgtatgccgaacgctgtcatctttcattctaggatgttttttgtgcac

SEQ ID NO: 35084 - DNA, 325 bp, Zea mays
  Clone ID: MRT4577_131998C.1
cccacgcgttcggtcacaaactcacattgtgagtcttgtacagtgtatctacaggaccatgcgtacttgcatgcccatgcattgattcgtacgcgcgccatgattggtagtctacgatcgatgactactgtaggttagcggacgggcgcactatgaaagctagcgcggaccattaacgggaggccgcgctccatggtgagctcgagctcctcctccatgatgaggtcggcgacgatcatgcccacggcgagcacccaagtcagcgtgatgagcagcatgatcggtatgagcgagacgatgcccagaccccttctgaggcccgcgc

SEQ ID NO: 35085 - DNA, 434 bp, Zea mays
  Clone ID: MRT4577_131999C.1
cgaaccataaaattgcattattcacgttcatcaacctgagtatttaaaaatggggggctttttatttaatttcagcttggaaataagtaagctgaaaataattggaaagatctgccctacatcccaatagctaaacactaccccccccccacacttggatgctctgttattccgtgcttaaaacttctttgaaggattggaggctttcccccaccttgggggttttttctctggaggggtgggcttgttgcccaccacatggctttgatatccctttggggatcgtccttttataaacaattttttgttccaaacaatccaagtttcctaactcataacttttggggctgagggaaaaaaaaaataaccttttggccacacttgaagagtcccaaagcccacataatttttcaaaccatatccttttgagggcc

SEQ ID NO: 35086 - DNA, 161 bp, Zea mays
  Clone ID: MRT4577_13199C.1
gcgtccaggtgtctttggagtctgcggaggtgctcactctgctggggatacataactagactatcaaccatgcagaatcacgtgatctgagctagcagggcactggctctgctcgcgcgagtttgagtagcgctcgtggcacctgcagtgccacctcaagt

SEQ ID NO: 35087 - DNA, 536 bp, Zea mays
  unsure (1)..(536): unsure at all n locations
  Clone ID: MRT4577_1319C.1
gggtacccctccgnggtctcggccggggaaatactatgtgccacccattgctgcgcctcgccagagttcttgcttgttaggtcagggcgcagagcagaagcgataaatagtaaggcaaaggtcttgttgccgatggggagctcacgggttatcgtggacgctttcggcccaccccaagctacccaaggggaaaccgcggtgtgtcgctgtgctggacggatggggcgaggccaacctcgaccagtacagctgtgggcgtggctctcacactcctggaatggactcggtgaagaaaggcgctcctgagaaatggagactagtgaaggcttatggaacaggtgagggtctgccatcatgatgatgacatgggcaacatgggaaggagggcacaaagcactcggtgctggtcgaattttcacaccaacgtgctaagacttgtcaatcatagctcttgcctcaggaaagatttatgatggagtagggttcaactacatcaaaaaatgtttggaaaggggtactcttcaccgtattggaat

SEQ ID NO: 35088 - DNA, 350 bp, Zea mays
  Clone ID: MRT4577_131C.1
gcctttttgttctccccgcgagcgctctctttctctatcgactggcgacgactccggcaccggcgccgctctacgcgagacgcccaggtcttcgccaacgacgagcatccggtacgctcacccaatctcttcccttacttactgctatgcggaaacaagcgcccaaaccctaaacttggttatttgtaatcggatctgatgtgatctacaagtttatatacaatcgcccaccccagattacgagctacaggtgctaaacccggtcaaactcagtatatccgtgcgatccatacacatctgacgcttaattaatgatattatcgtggtatccatagagatgtcatggttga

SEQ ID NO: 35089 - DNA, 150 bp, Zea mays
  Clone ID: MRT4577_132000C.1
gagacgcataggagtaaatatctatggttcttacactaccatacattactgaggtagggctaattgccatcctgagtcgacttcctatttctcagcgctatgatcacacgtcatgccatcacaatcctctatctattagctagaatgcta

SEQ ID NO: 35090 - DNA, 427 bp, Zea mays
  unsure (1)..(427): unsure at all n locations
  Clone ID: MRT4577_132001C.1
nttttctatatttttttttttttttaagagataagtattaatgtactcaaatatgataatggcgggtttacattttaactgtcggttcatacacacaaaaatttggtgaaccataacaccactggtggcaaaaaactgcattcaaaaggctattccaacttttgtaatgtaaaaaaaaccaccgaggtccatatttgcaaacgttacatgaacagctaatatgatctttcttaggtaatatgtcttttgaagcttggtatgactaacataacctaaagtttaaatcgaatggaaatttaagctatacgatcattttaccaaaagaaaaaaatctcgagataaaagatcaggacccatttgaggtagcttaaaaacgatttcaaaggctataaatatattccataacagttattccatgggaacccaa

SEQ ID NO: 35091 - DNA, 188 bp, Zea mays
  Clone ID: MRT4577_132002C.1
cactcactcaactcgaggccatggcgacttgattagtgttagcaccacagggggagcggcagggaattcaagcaagtggtgtgaggagttatggactgttgcatatgcagacccacggcttacgtgtacaggctttcgaggaactccatctgtgctccatgccacgagggcaccaaggcactcacctc

SEQ ID NO: 35092 - DNA, 795 bp, Zea mays
  unsure (1)..(795): unsure at all n locations
  Clone ID: MRT4577_132003C.1
atctgagnagacatcattcgagccacatctccatagccacaagtacagaagaaaccacgtacggctgttcagaggaaactgatcgactggtggtaggccatggccggagcctacgtgcgcacggcggtcgcgctcgcgctcggctgcgcgctggccatcgccgcggacgccctggagccgagcgggtgggtgagggcgcacgccaccttctacggcggcagcgacgcctccggcaccatgggcggggcgtgcgggtacgggaacctgtatgcgcaggggtacggcacgcggacgacggcgctgagcacggcgctcttcagcgacggcggcgcgtgcgggcagtgctacaaggtggtgtgcgaccgcaagacggacaagacgtggtgcaagcccggcgtgtccgtcaccgtcaccgccaccaacttctgcccgcccaactgggacctccccagcgacaagggcggctggtgcaacccgccgcgcccccacttcgacatggcgcagcccgcctgggagaagatcggcgtctaccgcggcggcatcatccccatcatctaccaaagggtgccgtgcgtgaagaagggcggggtgcggttcaccatcagcggccacgactacttcgagctggtgctgccgaccaacgtggcggcggccggctccatcggggccatgggacgtcaggggctccaagtccggccgactggatgggcagggcgcacaactggggcgccaactggcactcgctcgcctacctcaacggncagggggctctccttcagggcanccatcaccgac

SEQ ID NO: 35093 - DNA, 286 bp, Zea mays
  Clone ID: MRT4577_132004C.1
gctatgagctatgatgccgcatgcctgcgcttggatgctctagagcctgtcagagcttggcggcctttgttttatttttttgttttattagtcctccaaacctctcatatttcaatgccaaagggcgtccgactccaaggctaaaaaagtccagatatagacggtaccacacgcccaactccgaaggtcaaccaccatcctaactgatagaaaccagcataagataggctcccactgagcggaaaattaagcccaaagggtacatggcatgcgaatctggcaagtt

SEQ ID NO: 35094 - DNA, 861 bp, Zea mays
  Clone ID: MRT4577_132005C.1
tcgggtacgaatcacgttccggcgacattctactccgtccttgacacaccacaagaatcgcccaacgctatgaccatttgcatgggcacctccaacagctgatgagaaagacgcccgcgaagaggatcaatccttaccctgacaaatactccagcccttcaaaacctaagcaaattctttttgacagtccttatcaatcggccgatcataagttgttcaggctttttgagagtcaaaatacgggaatcttgacaatgacgtcactggattttacaggtaaggttgccattgtcagtgggtgtgcatcaggaatcggtcttgcaaccactcggctactcctgagcttcggtgcgaaggtcttcgggctggatgtcaacaatgcagacctgatccacagcgctttcacgtttcatcgatgtgatgttaccactaacgaagctgtctcggaagccatccaaaactgcttggaactatatggtgcacgaattgacatattagcaaatgtggctggggtcatggatgcattttcaagtgccgatactgttacggaaagcgaatggcatcgtgttttaagcatcaatctcaccgcttgcatgtacctgaccaaggccgttttgccacatatgctgccatacaccagcggcgccattgtcaatattggaagtcgtgcatctctcgggggaggagctgctggtatagcatatacggccagcaaacatggcttgattgggttgaccaaaaacatagcatggaggttccataagcaggggatcagatgcaatgctgtctgcccctggaaatacccaaagcaacatctcccaatccatgcacatgcatgagctggatcaagtagcctatgag

SEQ ID NO: 35095 - DNA, 411 bp, Zea mays
  Clone ID: MRT4577_132006C.1
cctcgaggccggccgggcgaccgttaccggcgatgagagagcggtagcctgagtctctgatcacggcgacgggagaggatccggatacgcagctgtgagcggtgttgcaggagcacatgcgatcgccgcaggcgacgacaccgtgagatagaggaccacagataccctgcgcgacacgctcggcctacaccggccaaattcatggttgccaagtgcactgcctcctacatgttcttcctcttcaagagcacatgcccgtcgatgataccattatccgaccccaagatgatttcgacaccctcctgagggataacggcggtgggatgcaccgcccctcgtcgcgaggacatggagatgttgaaactaccgtgatcgaagaggcgcggaccggtacctacaggctgctcctac

SEQ ID NO: 35096 - DNA, 144 bp, Zea mays
  unsure (1)..(144): unsure at all n locations
  Clone ID: MRT4577_132007C.1
caccgacggaagggggggccacagacagaccanggaggganacacgacaccggaganaaaagaacaaagagcgcgggaaggacccgnngccgtatgaatacaaagggacggaaannaagggagctacggaaangggcacgaaaa

SEQ ID NO: 35097 - DNA, 1314 bp, Zea mays
  Clone ID: MRT4577_132008C.1
aaaaaaacagtggcagattatcattgctctgaaacggcgtagaagacacttttgagtgctatggacagacggtgcccaaagtcgacacgcttccccagaagcagagagctacacagaactaccgaagtacttgtacagaaggactacctgcacctgacgcgaaaaaaagcatgagatccctaagctgtcaataaaacagagttcatgtacaccaacgggacgtgtcagcttcgcaaagagcacttcttttgagaatgcccaagaagatggcatcggccacactggacgatccgcttcggccgcttcatgctctcgatctttagaatcttcatcttgggtcggccaggaggcctccggatattgggcgggccaagcaccacatcggccttgctgaccgcaccttgtgacccgggagacgaatcgttccagtggctcctgtccgggattggatatattggctgggagtaggtttctcggtacttcatcacactgaagcagtcatcagcatagaagcgggggtcttcaccacacgaaagcagcgcggcggtagcatgtgcgcatggaatgccgtaaatttgccatcggcggcatgagcaggacctagcttcagtgtccacgatgtttgtccgctccgacgacacgatctcaaactccaccttgtttgctcgaaggacctggtagcactgcgagtcatggatggcttctgaaacaagtttctcagctgacggaacaagaactgagttgtatgactgtgccaagttctgacgctcagcaaaccagcaagtcagttggtgccttatgtgctcgatggcctgcacgatgggaagttcgtgacagtcaagcgacaagttgtacaatatctcggttatcccaagactaaaatggccgtatctgataccctgaaagcaagaaactgcccacaggtttggtgggaaacgctgtaaccatggcatgacatcttgaactcgcatcatttcatttacctttgcatcaaattctgatgctgtgagagcataaacagcactccagaaaaggttaagcagtttagtattcttgaactcgtcaaggaaactctcgctcacgtatctcaggcaaaaaccatgaaaagcagtggggaaattagatccaactgctttaaccacttgccgctttctctcagaaagtatagtcaagaccggcatcttatctgtgttaactccaagcatcttcctcaattccgatataaaccaattccagttatcatcactctcagaatcaacaacaccaaatgctagagggaacatcatgtgatcagcatcaatagctgaagaacac

SEQ ID NO: 35098 - DNA, 532 bp, Zea mays
  unsure (1)..(532): unsure at all n locations
  Clone ID: MRT4577_132009C.1
gacgtcgcatgcacgcgccacgcaagacttgggagtccttttatagaggcgcgccctccccttttttttttttttttttttttttnttttttttttttttttttttttttttttttttttttgggggggggcgcccccaacaaaaaataacccctccttttttcgcccccccacggaagtttaaataaacacccccccccctctggttcggtgccccggccggggaaaaaaaaaacccctttttttttttttgttgggggggccccggcataacctgacctgaaacaaaaaaaaggcaagggggggcgccgtcggccggggccggcctattgcaatatttgggggttgggggtttggcccaaggcccccggccccaagggggggtttcatgggcgatcactataactcctttatcccgcgggaaagagggagccaagggattcccttgttttctttgtgttcccccggggggacaaaaggggcgccaccttgggcccctttgggagggagccataggggaagaatccccccg

SEQ ID NO: 35099 - DNA, 742 bp, Zea mays
  Clone ID: MRT4577_13200C.1
ccggccgggccccctcaggtcctccgccgaaggcaggtgaaggaagtacaagccggccttacgatgaatctgccgagaacccattcgcggaccctcaaccaggcggttctgcccccacgacggcggcgtaccagtattctgaggaacagcgtcttgctactgagccctttcaccctggctttaggccaacagaaagttatctaggccgccaggacagcgccattggcaaggttcatatgcacggcgccggtgcttcgaccccatcagcccaaccacctgcacagcaacgactcgacgaggtctcggatgacgatgacatctacgatgcacccagcggccctccgcctaagagtaaggagcccatgtaccgatattgacggacagctgaggtgtgagacgaccggcttggtagcagttctcaaaatgtgcgttccgtttatcgaatttgctagagtatgccgcattgctttatttcaagatatcaatggttcgggccggggaagccccaggtcagtgagaagacgtgcctctattgaaggtggatgttttattttattttgggtaggcttatcttggtacggccgtgcatgcatgaatgggctggcacggcgaaagggcagattcccatagcgttgtcttctggttgtgttacacctaatgtgttattcagggctagagcatcaataccatcttcagcctctaaaggcgtttcaccaaaaaaaaaaaaaaaaaacccgcggcc

SEQ ID NO: 35100 - DNA, 2158 bp, Zea mays
  Clone ID: MRT4577_132010C.1
cccacgcgtccgtattaatgcgagcacgcaaagccagcaactggaccgcgtcgggcatcggttcctgctctgtgctatactgctaatctgctatcccctcccccaagccgccaccaccagcagcagcggaacccaccgccctcgttcctcccccgccggcgagagatctacgagatggtgctgtcacacggcgtcggtggctccgatgagtccgtccactcgacgttcgcgtcccgctacgtccgcacctcccttcctaggtaccggatgccggagcagtcgatccccaaggaggcggcgtaccagatcatcaacgacgagctgatgctggacgggaacccgcggctgaacctggcgtccttcgtcaccacgtggatggagcccgagtgcgacaagctcatccaggcctccgtcaacaagaactacgtcgacatggacgagtaccccgtcaccaccgagctgcagaaccggtgcgtgaacatgatcgcgcatctcttcaatgcccctctcggggacgctgaaacggctgttggagtgggcaccgtcggctcgtccgaggccatcatgctggctgggctggcgttcaagaggcgctggcagaacaagatgaaggccgccggcaagccctgcgacaagccaaacattgtcaccggcgccaacgtccaagtttgctgggagaagttcgcgcgctacttcgaggtcgagctgaaggaagtgaagctgagcgacggctactacgtcatggacccgcagaaggccgtggacatggtggacgagaacaccatctgtgtggcggccatcctctcggctccacgctgaacggcgagttcgaggacgtgaagctgctcaacgacctgctcaccaagaagaacgcggagacaggctgggacacgccgatccacgtggacgcggcgagcggcgggttcatcgcgccgttcctgtacccggaactggagtgggacttccggctgccgctcgtgaagagcatcaacgtcagtggacacaagtatggtctggtctacgccggcatcgggtggtgcatctggaggaccaaggcggacctgccggaggagctcatcttccacatcaactacctcggcgccgaccagcctaccttcaccctcaacttctccaaaggttccagccaggttattgcacagtactaccagctgatccgccttggctttgaagtgagttacttcagctcattgcttatatgtaacatttatttcctgaattgtttgtgtacccacttacccacacacacacacaccactgaggaaaatgaataagctttggattgttaagaagccagcatggttgtgatgcagggttacaagaacatcatggagaactgccaggagaacgcgacggttctgaagcaaggtctggagaagacggggaagttcaacatcgtgtccaaggacaacggcgtgccgctggtggccttctccctcaaggacaacagccggcacaacgagttcgagatctccgacttcctgcgccgcttcgggtggatcgtgccggcctacacgatgccccccgacgcgcagcacgtgaccgtgctccgcgtggtcatccgcgaggatttcagccgcaccctcgccgagcgcctggtgctcgacatcgagaaggtgctgcacgagctggacgcgcttcccgcccgtgtccccagcggcgacctagccgcgctcgccgcggccgagtccagcgagagggagatggagaagaagcgccaggtgatctcgctctggaagagggccgtcctcgccaagaagaagaccaacggcgtctgctaagcagccgagccgacgcatttctggccgtattggcatggggtgaaatttgtctgagtacggtttgcagtttttatccggatgaagactgctatgtgtcgaggttgagttttagaggacggaattgctccggctcggtgtatgtagcgagtgttttacgtgctcaacaattctcagacttccctcccctcttgcatgtaagctgtaagtcgatgcaaataatgttgcgtgtcgagcgacgattaatagtatctgattgggtacttgtattagtattgatatttgaattacactatacattatgtgacatactattaatattgctcgacaaggtaatattatcggctcctgtttgattttct

SEQ ID NO: 35101 - DNA, 290 bp, Zea mays
  Clone ID: MRT4577_132011C.1
ccgaattcccaggcaggcaggacgcgcgaggagggcagagaagaccgatagaccgatctcgagcgggaggctcgggacgggaacgtgataggacctcaaaatctcatatccgtcctgtgcgcccgcccgtgccctacgatgcttcgatcgtgccggccgttcccctcctccgcgctctcctcctccagggggttcggatacgccacaggctgcgcgacggtgctgcgggtcgacggctactgatccctcatcttgaaccctggcgtcgacttcgacgtcaaaatcctcgg

SEQ ID NO: 35102 - DNA, 3093 bp, Zea mays
  Clone ID: MRT4577_132013C.1
cgatcgccgaacagacccttgctctccttcaggcgggggcttcttcgaccacgttcggttttttttttttttttttttttttttttttttttttttaacgggaatttcagttctcatagcattatcatgaatctcaaaacataacagggtactttgctccgagccgggattcaggaagctgcccggcgacgcgccgctcccccgcctcttccttgccgccgccgccgccgccgccgcagacgcgcggcacggggcggtgcccgtgcaaggcgatcggggccgtaacgctcgactgcccctccacctcctcatcctcaccccagcggtgagtagaacaaggggcggtggtcttcactgacatcgcccaccatgctgcgccggtgcatgcgggatctgcgctcgccgcggtctctcgcgagggtctccagaccgatctccgtcgagagtccaacattccttaaatccagaagcaactctacaaaggcatctccaaagagttcacagaatgctgccccaggtcctcaaggacaaccttctcagtcgggaagtaatgtttcaaagattgttcttggaactcttgtggttggtgcagcagctatgggtgcacatcaacttggttatatagatcttcaatttagggacaagaaatttccttttagcttaaagaaggaagatgtcgtaaaggtgtatgaagatctgaagattccttctgagcagaaggttgaccagacacaaaacgtgtcaggacagaacaccgagattgttcaagagaacaataatgaggctcatactccaaagggcgttctaaatgacgggatgggggcactagaggttccaatcaatgaggatcagcttgttcctgcagaagaaaagaaatcagaaaccctagcccatgagacacatccagttccagatgaacctggatctgatactaaaatgccatctgaagattctctagctgttgagatagagacagttcccatcgatgctaatgaatctagtgaagttcctcatgaacaggaaactgataggatagacagcacaattcctcctgtacagtcaaccccaacaacagttagtacttacgatcaccccacagatccagatgcaccaaaggatctctcaatagctggtgctgttgagcagaaatctcttgctgagacatattttctgcaagatgaacctgatgtttcgaaagatgcaaccatcaagtaaaaaaaaaaggaggcagtggactggacataggggcgaaaagacggtatgctccgttgatgtcgaattgaggctattcatgccgccgaaaagaagctggcagatgtagatgctacatgtattcagaagagagaagaaagttgaaggagaagtatgaaaggagctgaaagacaccagggccagggaactgatgtatgcagaggaggcagcaattctggataaggagctaaagaaagagaaactgaagaatgctgctgcattaaaggaactgcaagaaaaagctgaacaaaaattgcaggatgagctgcagaggaaggatgaagaaacaagccaacaaattgagaaggcccaagagatagctaaagctgaacttgctgcagctgttgcaaaagagaaagcatcccagattgaacagattgctgaagcaaaccttaatattgatgcgctgtgtatggcattctatgcacgatctgaagaaactaggcagagtcattcagttcataagcttgctctgggcactcttgctttggaacacgctttatccagtggatcaccaatccgatcagaagtggagctattgcgtaaatctgttgaaggcatcgacaaagattcactgttagaactggctctttcatcactcccagaagatgttttagattatggatcagataccatgatggggttgaagcaaaagtttaactccttgaaggaaactatcagacacttcagccttctaccagcaggcggtggtggaatcctggcacatactgttgctcgagttgcttcttcaatcaagattaaaggcgataactctggagatggcattgagtctcttatcaacaaagtagaaaggttgattgtggatggagacttgattacagcggccgatgccttggagcaagggttacatggaactgaagcagaggagatagctaccgagtgggtgaagcaagccaggaaacgagcgatcgccgaacagacccttgctctccttcaggcgtgtgcttcttcgaccacgttctcatgattttggccagacttttttttttcttccttttgtttgcttggatttgccggtttcagtactctgtgaaaaagcttgtttttcccagaccatgttgaaaatgcgtggatggtgaacgagaaaaatcagatacaatactatagcagccagccagccactgggtctcaaagtgggggccctgcctaagtttttcatcgtgtaaacaaagctaataagttttgccctgtagctacttgctgttcgtgacattttagtgtccagttaaagcaatgtttttttaatgcaattgctgaaggattccttgcagatgtggtcatgtagcagttctacaaagggtcagtggacactgaataagtctaaagcaaggacacgatgagtcaagaccacgaaccgcgcggtcgctgagcgatgcagtcggagatggactgaacatggattagacgtcgtgcgaatagccacgtggtagaagagcgaatgccgagctggtgacacacctgacgccggcgcggtaaccggtgccacttccgctgcgctagaggaggcgccggagcaggaggcgggtttgctgccgttgaggaggtggacaccaggccatcatccgcagagtctcttgtcccgtcgagcagaggatgggccaaagggcgaccgcgaggctggcatgcgtgctgccatggatacggagacttttggaggggcgcggggcaagcgacccacagtgggcgaaaagacccttatgccccgtttggatgtcgatattgaaaaccgatattgaattgaaatgagaggtaattctaattctattaaaaaaaaaaaaaaaaaaaaaaaaaaaaaaaaaaaaaaaaaaaaaaaaaaaaaaa

SEQ ID NO: 35103 - DNA, 763 bp, Zea mays
  unsure (1)..(763): unsure at all n locations
  Clone ID: MRT4577_132014C.1
agatctcctcaatccccgcctcctttatgtagaagctaggtatgcgaggtccatctgatcaacaagatccgcatgccactgtctctaccggtggcgatcacagggaactgcacggacaacacaagagccaagaacctctacatcatctccgtcaagagcatcaagggccgcatcaaccgcctcccgaccgcctgagcctccgacatgtgcatgaccaccgcagagaagacaaagccctacctcatgaaaaaagtgatgcccgccgccttcgcccgccagcgcaagactggaacgacgcaaggactgtgtctacatgtacttcgaagataatgctggagcgattgcgaatcccaagggggagatcgtacacaggctctgcaatcactgcatcctatcgaggaacgagagagctgacctttggactacgatcgacagtgacacacaaatgccatcgtctgatacgcttgtgtgtaatgagtatatacttgactatgatcatactcaattcgtgacgctgcaggagtgtgtaatgacgctattggacttgaaggctcctttaaagtctggacactctacttctgcagtgaacacaaatttctggttgcctcagaggagatccgcagggagaaccagtgggccttcgagtaaggaggtgctggatctattgatgcctaagtttcgtggtgtctactactatgtctactttatgttgtcctaatggttgtcagtattttgngagtcactttgcttgcgaatgtctcgc

SEQ ID NO: 35104 - DNA, 1216 bp, Zea mays
  Clone ID: MRT4577_132015C.1
ccacgcgtccgggctgaacaaacgttgcaggatgagctgcagaggaagggtgaagaaacaatccaacagattgagaaggctcaagagatagcaaaagctgaactggctgcagctgttgcaaaagagaaagcatcccagattgaacagattggtgaagcaaatctcaatattgatgctctgtgtatggcattctatgcgcggtctgaagaagctaggcagagccattcagttcataaacttgctctgggcactcttgctttagaacacgctttatccagtggatcaccaatccgatcagaagtggggctattgcgaaaatctgttgaaggcattgacaaagattcactgttagaattggctttttcatcactcccagaagatgttttagattatggatcagataccaggatggggttgaagcaacagtttaactccttgaaggaaactatcagacatctcagccttctaccagcaggtggtggtggaatcctggcacacgctgttgcacgtgttgcttcttcaatcaagattaaaggcgataactctggagatggcattgagtcccttataaacaaagtagaaagcatgattgtcaatggagacttgagtacagcggccgatgccttggagcaagggctacatggaactgaagcagaggagatagctaccgagtgggtgaagcaagccaggaaacgcgctcttgcggagcagacacttgctctccttcgcgcttgtgcttcttcgaccacgttctcgtgattttgacaaccatttccccttccttttcttcgaccgcatttgccggtactccttgcaaccgcatattttttttccccagaccatgctgcaaatgtatggacggtgagcgagaagactagatacaatactgtatgagccactcggtctcaaagtgggcccctgcctagctttcctcctgtaaacagagctaataagttctggcgttctgccctgtatctacttgctgttcttaacattttagtggccagttaaagcaatgtttttggatccaattgctgaaggattctttgtatctgtagtcatgtacagttcaacaaggggtcagtggacactggacatagtgggcgaaaagaaccttatgctccgtttggatgtcgatattgaattgaaatgagatgtaattctaattctattatttggatgtcactgaattggagtttagaattgtgtggtccaa

SEQ ID NO: 35105 - DNA, 418 bp, Zea mays
  Clone ID: MRT4577_132016C.1
ggctagggagtaaaaaatggaataaagcaggacagcttgggttttacatccaaattattattatccatcaaatttggcaggttttttttttcagtaggactcaacaccaacagcaacagtaaatctgcagttgacgtcaaaccaaaccttattgacacggccaaagatgcgaaatggactgctttactgtgcaaccaaaaaaacgcttttgctggaataatctggggagttagcccatggggaccggctaaagctaatggaaagctttttggtttcctcaaacacgtttttgtcccgtgcacaaaccaaaaaactccttgttgcaaacaaatggcctggccaccgatctggatgcaagttcaactccgggaaaaaaacacggagggaaaacctggaaactttcccggcaggtacaacc

SEQ ID NO: 35106 - DNA, 497 bp, Zea mays
  unsure (1)..(497): unsure at all n locations
  Clone ID: MRT4577_132017C.1
cgcatgcaccgccgtacctaagcttggattcttctaaagcgggcggcccttggttttttttttttttttttttttttttccttttacccccagaaaaacattttccttcattaccaggcccaccacccctggtcccggacgagggttttctaaacaaccgcttgtcaagaaaacctaacccaaggttttgtactttccatttcattccgggcaaaacagagaatcaccagggcaggcgaatatcgtccactcagtaaagatatacaaaagcagggttccgattgttctcgtattggatcgcgtgccttttgggaacatttttttggtatctccggggaagatatgctccttcttttctaatggttaatattgaccgaggagtaccgagcccaccgctccttcggtttcaacatcatgcgggcctggttgcctcctgctggactccataacactacacttggagaggaaactaatcacttcttntcaagatgggacac

SEQ ID NO: 35107 - DNA, 251 bp, Zea mays
  Clone ID: MRT4577_132018C.1
gccagtgcacgtcgaccgacgaacgccatcatgcctttgctcaccataggcaacaccgtcgcgcaacctgtagctggagtccagcgcacccaagatcctcatccacgactacgttggcgacgtctacgccattatcttctctcacccagtcgacttgactcccatgtgcactactgttatcactgtccctgctgaatacaaactcttgtttccctaactctatgttcaccaatgaattattctttagtttt

SEQ ID NO: 35108 - DNA, 827 bp, Zea mays
  Clone ID: MRT4577_132019C.1
ggccgcgggtttttttttttttttttcgttttgaagtgacttttgttttgtccttgatgtgaatgcctggtatgtgaatcatccttacacgccgcaaccgaaatgcaagagccttgtgccaatccagcgactttaaaagtagtagataaaaagaacattccccgtttcaccctccccttgacccgggcagatgaaaaaagaataagagtcttggggaaggggggataatgtttctttaccgcgctctatctgatcgcattcgggacagaaacccaaccaccacgcaccgcacgcccttttgtctttccttgatttcctttcgcaagcaagcaccttacatgacgacaccagagttgctggcaatacggggccacaactcagcagcctccttaccgacggggccggtaatggcggagcccttcatctcacccttggggttgacgatgacaccagcgttgtcctcgaagtacaggaagacaccgtcgaatcgcttccagggcttggactgtcggacgataacggcggggtggaccttctttcggagttcgggctttcccttcttgacggtggccatgaccatgtcaccgacaccaccagcgggcaatcggttcaggcgagcaccaatacccttgacggcgatgatgtagaggtttcgggcaccggagttgtcagcgcagttcatgacggcaccgacagggagacccagggtcatcttgagcttgccaccaggggcaccacgcgagatcttggccattgtgtctgaagggttagtgtggcgttacttcgtgaagatgtcgtgtcgtcccgggtctcgagatcccggccgg

SEQ ID NO: 35109 - DNA, 280 bp, Zea mays
  Clone ID: MRT4577_13201C.1
aatagagagaagatatgaaaactacgaactcaaactcgggcttgaattaaacgcatcatgaactataacacagttaagataagaagacattaatcattgattttaaacaaaaaatatcggattaatactccatacaaaaaataacatcggctataaatcatactcagacttaaaactctatttatttttattgttaccatcaggggcggacttacgttcaacttattacgaagcttcacggctcttctttttttttttcttagggggagtatctgataaa

SEQ ID NO: 35110 - DNA, 175 bp, Zea mays
  Clone ID: MRT4577_132020C.1
gcgaagggggtgataaacaagctgcctgtctaaagtttcattgattgttttttaaagggcgggccatctgttacaaagataaaataggggtacatttcttatgaaattttcaaaatggggcctgaaaaccggcaaaaaaaggttacccaaatttagagggaattaaaagtatatc

SEQ ID NO: 35111 - DNA, 344 bp, Zea mays
  Clone ID: MRT4577_132021C.1
aaaaacggatatttcattcccattaagacagcaaacaacctttacagaggcgggaatgcaagataaactatttggttacccagcaactgaacaactttttttccctaaaattttaaaaacaagcacaagggtaccaaaatgcctctgcccccagaaaggaaaccaagagaagcacaagttctacaagcgggcccgaagcaacaaccaccccgtctggggggagaggagcttgccttgttaaggcccttttacccctgatgcggcgcgcgagcttggttttccttgggcatgatggagacccccttggcgtggatggcgcaaaggttagtgtccttaaagagccc

SEQ ID NO: 35112 - DNA, 253 bp, Zea mays
  Clone ID: MRT4577_132022C.1
tgcctatatgctgacactggcgggcgctgatggatgcctcaacaccagattctgttcactattaagcacaagaataacacctcctcctgaacgtatactcacgtgttcttgactgggcaagcttggccagcgacccattattgcgactgactcttaccgagattttctggagcgtggcatttgaaagcagcatttactgtatcggctgtatccaccaatatgctcgtccattgacgaacaccgtgcgcacagt

SEQ ID NO: 35113 - DNA, 141 bp, Zea mays
  Clone ID: MRT4577_132023C.1
gcgctgacccgatgcgtggctctggtctgcactaggggtgcgcctgttgcgcacgggagctgggcaaaccgtctgtgcgctagctaggtgcccaggccatacatcagtccactctgcgagccatcgtcggggggtcgagga

SEQ ID NO: 35114 - DNA, 815 bp, Zea mays
  Clone ID: MRT4577_132024C.1
agggggtatttttaaaaaaattttgccctttatacacacttaccaccatttcttacccaccccaaccccgaacccccctaatcggaacaagcttccccttttaaaaaaaaaacaccccccaaaaaccagtccaaaacaaacggaaaacccaaccccacccggaaaccacccaaaccccaaggccccaggcccccatgaagatatcacctcccaccaaccacctagccaaagcagccccccaaggaacaaacagccacgggcccaaaccccagcccacgtttcaaaccattcccgaacccccccaacgggccccgacccaaaccccaacctaacccacccccccaaccaaagacaaaaccccgaaaaagggccacccaaccccaaatccccaggccgccccccaccccaatcaaaaccaaaaaacccgttcttccccaaccctaaacccagaaaacaccaaaccccaaacaccggtttggccaaaacccaaaaaaacccggccccacccccttccaaaaacttcccccccaaatcccaaaaggacccccccccaaaaacacaaaccccccccccaaaaaaaaaacacccccaccttaccaagcttaaacaacccccaagccggacccaaaattcccctacattaacaaccccccaaaacccccaaacaaaaccggcccaaaaaaaccataaagctaagtcccccccaaaaagaaagaacgtccccagcccccccaaaaacccaccccaagggcccccaaaggtgtaccaacccccaccctggacttttaaataaaaaaggcccccccccccccccc

SEQ ID NO: 35115 - DNA, 777 bp, Zea mays
  Clone ID: MRT4577_132025C.1
cagcccaggatgcttttaactgtcgatgaggatctgaagcccctctcagtacctgtccgcgttgggcaagctgtggacgtggttggtcaggcaggaaggcctaagacaattaccggctttcagacacactccacaccagtcttgcttgcagcaggggagagagctgaactagcaactgaaaaatacatcccactgactccggtattagagggctttgtgattttgaagaagaacccggagtaccatgaagagtgaaacgctttagcatgccaaatagcatggtgtttcggaggctcgtgcacatggcagtcttcaagccctggcgcacccctcgtcgagaaatcgctcgccctttgctcaacccttcgcctggagttcatgttgaattcttaccagagttgtggctaactgaaagctgtcttcggttgtgctgatatacgattgtatctgtacgattgtagcaattactgggacagcttactctgtatggtgtggtgataacgtggcatagcatttttggcgctggtctaggttagtccttgtgttgacatggtgcaccatcattataagttttctgtattttatggatccgttctgttcgtgtgtactggaaacattgtacacatgatatgtaagtgtgcctccatgtgtatgtgtgccttcgtgtgtgttttggttttgtctttagcatggcttttgtccccttaaaaccaaaagacaaatcaaagcgctcgaagcaactttttccaaatatatatggaagaacttttagggctg

SEQ ID NO: 35116 - DNA, 431 bp, Zea mays
  Clone ID: MRT4577_132026C.1
gcctgcagtacctgttccttatttccatgagaggggggcgttcacttataatttatgggagtctactgggaacatacctactataattccggggggctcctgagctgggtgggcctccaagtgggggaggtctttcattattatagcgcttttgagggcggttgcctgctccaggctgagacacattctgcttttgtggggcattggggcctgacttctgcttggctttcttcttcggacattggataacccattgaccctggttttcacagtgaaaacatgccctgtttccaacctcagctttttcagcctgactgtttttctggtttgatatggcaggaagacgagatgctttatgatttttacttttaaactgacctcctgactgatgggtttgacggtattggtactgatgctgatgttacttcctt

SEQ ID NO: 35117 - DNA, 460 bp, Zea mays
  Clone ID: MRT4577_132027C.1
aaaaagaaaaaaccttgaaaaaatgggggggaaattagccctaaatggttttggggcatagcccgggggggggggtgcatattcaaaacgggcccggcctggtattggggtcttgaaacagggggaatttaaaaccaaaaattttttattgggcttttggggggggggcgaaaccgggggggggggccccggcaaaggggaacattttttaaaaaaaaaaactttggcattagaaattcgggggggggggcccccttttaaggggggcttttgcagaaggggcaaaatttttgggaaaaaaaaacccgcttgtgttgggggacaaagttttactcaggccttttttgggaaaaaattctttgttttccgcccctcccttaaaaaattggctgactaaaaaagggttattgggaccttttactggggaatcgggggcaaacttttctttttttttgggggg

SEQ ID NO: 35118 - DNA, 398 bp, Zea mays
  Clone ID: MRT4577_132028C.1
ttatttctaagactttttttttttttgtttttttttttttttttaaccgaacatgatcagtaacagcactgacagtttatgcgttgataaaaaaaacagttttccatcggggtacaaagatgcctttgaagcacagaaggaaaaaaaggcaacaacagatttggatgctaaccagttaaaacctttgaaacactgggtggggagggactgactccaggaccaaacgatggccaaaagaggggaacaaacagacctaaaaaaaaaaaccccgagacggacagaaacttaaaaaaaatacacaaggctttttttagttccgatgcaaaaaaaactggaggccccaggttcgctagcataacagcctggatattttggcgggcgttctgggtttcctaaaa

SEQ ID NO: 35119 - DNA, 407 bp, Zea mays
  Clone ID: MRT4577_132029C.1
gatcttagaaagacacgtttcaaatcaaactacaaaccatttgcagtgtcgcgtgatacatagaaacatgccaaattgccagtatacactgcacgtacttgttcttcctccgtaaaaagaatcccccaatttaatccgctatactgagacatagtcgtagtataaatgtacaggtacaaaactcacatagcagccagtatacataccaacgcgaattaaaactggacagtatcgttttccactcttgtatgcagtgctcggtcgccttgcctccgactccgacacccaacaatcgtagtgccaccgcgccagcctcctccgatcccccacattgtgaacaagctaagatgcatcctccggtccgatccccgggcgctcatgtgaacagatcgtacttgaccggcgtg

SEQ ID NO: 35120 - DNA, 444 bp, Zea mays
  unsure (1)..(444): unsure at all n locations
  Clone ID: MRT4577_13202C.1
cttggttcctggatcaccaaattttggtacctacgtccacagcaagccaagccaccataatcgagagagaaactgagcgagagagacaagccccaacaatctggccacgactgagggtggcgatcatcgtcattaaatggcgaaattgctgctaccttcaatttgacgtaagagaccgcggtcagggagaattcctcatcggaaacttttcctcgctgccattctacatcccactgcagactgggcacgacgtgcatcgttgccggtcaagaacaggtaccgcaagatgaggcgcatggaggatgttgcgatgagttcgtgagaggtctaggccgtcgtctcccagtcaactttgggttgctggatcggttcctcatatgatgtaactnattaattattntgtatagaacntcctgtatatagtaaagatgtgatattcgatcc

SEQ ID NO: 35121 - DNA, 279 bp, Zea mays
  Clone ID: MRT4577_132030C.1
aatcaggactcctgcagaagtcagctgtgtgagtgtgataaggctgctgccacctgttttgctagaaacaagacgacctacaatagaaagtaccagtactattccaataaacactgcagagggagcacccctctttgctgagtccctcttccctggaaaccttccacccagtgctgaatttccctctctcataccctccctccctaccctaaccaagttccttggccatgcaagaaagcatccctcacccatcctagaggccaggcaggagcccttcta

SEQ ID NO: 35122 - DNA, 471 bp, Zea mays
  Clone ID: MRT4577_132031C.1
ttgggtacctcgagccggccgggcctgtcttcagcgcgcagacggacaccaggttggcgttgctggaagagaaggagctgtcggcggtgcttaaaacctgtgctctacctactggcgtagccaggaaggtctctcccaaacttccctctctatctttcatccacctccttacttttgttctcctatcatgtatatgattagagataacaatagagactcgatcctcaactccccgcggggaatttctctattaggagacgggtattaaactaatttagtccccgcgagatctaaacgggagaaatttaatcaccatcgggttcgcggggacggagacagagaaccatcctgttcccgttctccgtgtacccgacccacgagacttttttatccaagttagtcaatttatttgttagaattataataataatttaatggataacatgttataaaatataaaattaaattcta

SEQ ID NO: 35123 - DNA, 575 bp, Zea mays
  Clone ID: MRT4577_132032C.1
ggccgcttttttttttttttttttcttttttttttttttttttttttttttttttttttttttttttttttttttttttttttttttttttttttttaaacaaaaaggccaaacggcaaaccaaaaaataggggtggtttacgttcacagaaaaaaccaacaaagaaaaccttgggccccccgacaggccattcccatgttaaaacaaaaaagcaacaattcctcaaaaatctaaggaggggggccctttcggtggaacgggaaagaccttacaaagaccccaaaacactgaatttttttaagcagagggggcaaaaaaacccttgacgggggaaaaaagtttggacctcctttgggccgagcttttgctccggggggccctttgttccttaaaccttggggaaaaaagctttgggaaccaaaaagcccaaaactttttttaagaaaccccctttttttgggaagggattttagcccccttccttggggggggcaggggggccacaagccgggggatcttaggggccttggtgacctttttgccgtttttggaaggaaatgccctgcggaatggg

SEQ ID NO: 35124 - DNA, 334 bp, Zea mays
  unsure (1)..(334): unsure at all n locations
  Clone ID: MRT4577_132033C.1
ggtgaaactatagaaaaactatgaaggtggaatgcaggggtcacggngacctgggatatccttatgaagagcggcggcgtgtgtgtgccgtgttcgtgtcccgttttccgacgttggcgagaaaggccttccgacgcgtgatactacgaatgttccctggcagtcagtaaggctgtgggagcagcagacgtacgtgtgataggatacattacataccnaacgtcctagtccatagtctcngtctggcttataatcgccatgcgnccttacaacggcacaaacacacgtgaagctgaacgtacacaccntacattctagcgtggcgttccgaatg

SEQ ID NO: 35125 - DNA, 231 bp, Zea mays
  Clone ID: MRT4577_132034C.1
tgtgcgatctttatgtgcgacgtgacagaggtgatgggtttttgagcgattttacgttactagtggggctggagtcattatttattgcctgttatttgtagggcagcacgatctgattttggtgactttgtatatggaccttgggagttcttttgaagagtcaaaactaaagatctatgtgcagtagtttcttgtggggtgtgattgggcctgagttcttggtgttgatta

SEQ ID NO: 35126 - DNA, 787 bp, Zea mays
  Clone ID: MRT4577_132035C.1
gaggttggccgggacttaatggcgttaatttattgttggtatcatataatagatgacccactcaagcgaaatgttaaagagttttttgaaccacctcgagtgttttttatggagacgacttcgtaatgaacatccgagcagatgtattggagaaattcaatcagataacgataacacaagctatgagggattatttagacatgaccatgacagatgaagccaaaacgggtgaatgtgttaaatctaggacactaaaagaagttaattttctcaaacgtgcctttcattataacacacttatccaagagtatactgcaccgttggaccttacagttattttagattctacgaattggtataaaatcggtaaatgttcagctgtaatagtggctcgtgacacgcttaaagcgtgtttacgcgaactagctttacatccagaacatatcgattcacaatatcgtagtaaaataacagatctaggtcttcgcgttaccaatttaattccaggagagttatttgtacctgatacaaggtattcaactcttcttgctattaaaaatatggaatgtgaaaatttaggtctggactgtgacgcttaagatagtctaattagaaaaccacgtaattgggtcaatccgttaataccggtctaccaagccctggaaatttctagtaatctaataagcgcaacaccgcatttactctaaaatcgatatttgatatcattagtctaattaacaaaccacgcaactatgtcaatccgttaataccggtccaataggcccct

SEQ ID NO: 35127 - DNA, 122 bp, Zea mays
  Clone ID: MRT4577_132036C.1
ctcgagccggccgtgactgataccaacctaaattgtcacttctctttctcataccttaagcaaggaccaatgtctcaagtccatgccccctcgttcctttgaccagtggaaagacgttaaat

SEQ ID NO: 35128 - DNA, 584 bp, Zea mays
  Clone ID: MRT4577_132037C.1
aagatggtgaacaacagaataccctcggtcttcagtaagacctatgtgactcccaggagaccctacgagaaggctcgtctcgaccaggagcttaagatcatcggagagtatggtctccgcaacaagcgtgaagtatggagagtcaagtacaccctggctaagatccgtaaagccgctcgagaacttctcaccctggaagagaaggaccagcgccgtcttttcgaaggtaatgctcttctgcgtcgtcttgtgcgcattggagtgttggatgagtctcgcatgaagcttgattacgttcttggtctcaagattgaagacttcttggagaggcgtctgcagacccaggttttcaaacttggacttgcaaagtcaattcatcacgcacgtgtgctgatccgtcaacgacacatcagagtccgcaaacaggtggtcaacatccccagcttcgttgtcagattggactcgcagaagcacatcgacttctccctcaagtcacccttcggtggcggcaggcctggccgtgtcaagaggaagaacccgcgtaaggctcagggaggcggcggcggcgccggagatgaggagga

SEQ ID NO: 35129 - DNA, 554 bp, Zea mays
  Clone ID: MRT4577_132038C.1
acatacacacgggcaagcacattgctagttatatggctactggcaatgacgaacaaggtgaagactaagggagacgtgacaggtccaagttggcagtctatgaccaggattacgaaaatggtagcgaggtaggatgaagatatattaccagtgctggacagctccatcgagacagtggacggcgattgatacaacaatcggaaccgctacacatggtcaagtcaccatcaaaaaaaacgatcctatcttcatgtactaaaattattgagactgactacaaatagaactgtgtgatttttactatcgtggtgctctaacagatagcgctcttctacagcacctctaggagatgcttatggctattgcctgcaatgcttgtgtctagggccactccccagctagctgaggcatctacttgtacatagattactaccagcatcgtgacccggatgtgataacattgacataatgcaagacgtggctaatagctagatctactacattcttgagtatctgggtggagcgacaacctggaaatggtccagtacagtaca

SEQ ID NO: 35130 - DNA, 336 bp, Zea mays
  Clone ID: MRT4577_132039C.1
ttttctagggaatcgggaccaatctatcaacatgcttaacacaccattccgaatcattacgggaataaacgattatttatcttacaataaaccttaaacagaattattcctatcaaccacttctctcattaatctataaactcaagatactacagacacaaagaatagattatagtcagacagatgctcaatatcacatgcatgttcacaagatatagacactcatgactgtaatgcctactctttatatacaccacagtaatgatagttgcacaactcttattgatatacatatgaagaactttaatgtcactgtattctcctatggatctaatt

SEQ ID NO: 35131 - DNA, 770 bp, Zea mays
  Clone ID: MRT4577_13203C.1
cattggtacctcgagccggcgggattcttataacccagtgtctgtactgctcgctccgtctcttctcccctgcgattactgggcgaccgccgatgcccagacggcactccgcacacactgctcgttcgagagaccccatatcagaaggcctgcgagtccagtccgttcccggaatgcgacctgccctgtcacaagaattgattcacgactcactatcggtgaacacgagcgtataaaaactttcccctgagaacaatatgaacgggccatgcacttgtctcgttacgatcttcctgcactacaagggcctcgtttccaatgcgagcatgacaccaagggccatgacccccatgaacactattgtttgaagccaggggcctcatgggattgagctgtatggatgcctctggccaaactgatataagattgtggaccgttccaggccattccatccatcggtggcaacgcaacgatagctggtctgcacctgggggaggagaaacagtttgcagacgaagagatctcctctatggatctcatcacgatgattgagatcgctgtgagcttaccttgttctgacgatcaataatgttgttgtcacggaccctgtctatttctacgactcgtagagtgaggcctcaaaggcatgctggggtgattgctggtcctcaatgtgctgcgtatcatcaatgagccaaccgctgctgctattgcctatggtcttgacacgaaggcaaccagtgtcggtgagaagaatgtcctcatctttg

SEQ ID NO: 35132 - DNA, 650 bp, Zea mays
  Clone ID: MRT4577_132040C.1
attgggtacctcgaggccggccgggaagttttctgcagcgctaccaggtctcagctgcaccacactcaagccagccacgagacagactcaaaatgcctagtgggagatcactcgtaagcccgatgaacccgaaagttctgcctcgaggatgtctcccgagatgaccgatgaacatgccgccacagccgatgacgtcgttgtcctctataagcccgtgacaaaggtatacatacaaatcctgtggagataatcagactactgctaacgttactggtgtgttctgactcaaggtatctgttcaaggtcagctaccttctatctcctgttagtcgagccttctgccctacgtgccgaagtaccaccgccgcatcctcgctgcgcaggcctgcatcctccgcgagatcgagccatgtacccgactgataaccgagccatgccatgagcctacataatcaactactccatctcccatcaggagaactaggaatatcagatgatggtgtacctggatgcgaacatcatattgaacaagaacatccacaagctgttcaaaatctagaaggcaaacctctacacgctgataaactgcttctgcaagaagactgaactcgcaccccgcagaacatgatcatctactgacagccgagaca

SEQ ID NO: 35133 - DNA, 185 bp, Zea mays
  Clone ID: MRT4577_132041C.1
cggatcgtcttcagggccttctacgcactctatagagggcctctctgggagcgcagtgggtgacgaccgtacgagtcgtagcagtgttgtttgatgtgactgctctccatacgcgtcggtacgcgcgatactcggtaatgccgggcatgtcttcctcgggaacatcgagaatatggagaaggata

SEQ ID NO: 35134 - DNA, 303 bp, Zea mays
  Clone ID: MRT4577_132042C.1
tcgagcggccgcccgggcaggtaaaaaaaaaaaaaaaaaaaaaaaacaaacaaaaaaaaaaaaaaaaaataaaaaaaaataaaacattaaaactttttaccttctgccgcaacactcctaagggtgtttttcccccggtctccaccaccctgggggccatttttgcatgtttttttccctctcagttccccttttgcttgcttttattgggacccattggccctttatttacaccaattccactgggaagaccctcttttttccccacttaaactgctttaaccccagccccccttaacaaaa

SEQ ID NO: 35135 - DNA, 275 bp, Zea mays
  unsure (1)..(275): unsure at all n locations
  Clone ID: MRT4577_132043C.1
acattgaggaatcaactcactcattattccttggaattcatgatcatttntgtatatctatgttcggaacagggaagatagcccatttgagaaatgcaatgctgacagatgtcctactgtgccatgacacaacggatagcggacgtaagcgaggaagggtgaaccctaccgaccgcatgccgaaatgcattatgctttgaatactcattgaagggaattcgaccggaaactttctaggagaagtcgaatccgtccgtcggaattgatcggctggt

SEQ ID NO: 35136 - DNA, 220 bp, Zea mays
  unsure (1)..(220): unsure at all n locations
  Clone ID: MRT4577_132044C.1
caaaaaacagggggggggnacaggccccggcagagacgggcaacaanaanggggggcaagggacagganncagaaccacccaaaggccccggaacggaaggagggcacgaaacaaagggggcncacgggnnagggacaaaccaacacnanaaggaagggggggngcggcaggcaanagcaacngcgggacaacaccaacnnccgccaaggnncaacgggg

SEQ ID NO: 35137 - DNA, 312 bp, Zea mays
  Clone ID: MRT4577_132045C.1
cgcagacgatcgagcagcaaaaaaatgcgactctggtctctgggtggggccgttcacgaaagaaaagaaaaaccaaagctgtcagttgagctcacgacgaagtccaaaatgggggcttctcggttgatcaaacaacgaggcaggaagccgcggtcaccagcactcagctgtcagccggtgttgcgcatgccggcggcgatgccgttgatgttgatgagcagcgcgtcgcggagcctgcggttgtcgtcgtcgcggcggagcctgcggagcacctccacctgcagtatgttgatggggctaaggtacgcgagc

SEQ ID NO: 35138 - DNA, 3162 bp, Zea mays
  Clone ID: MRT4577_132046C.1
atgtccgacggggatggacctcctcccgttttttatggtgacaattttccttattgtaaaattcgtatggaagcttatttagaggctatagacattggagtctataaagccaccacccatgggttccccgaacctagagatgtcacaaatcttgtaagtgatgagtacaactatgaaaagtggaatgctaagaccaaaaacactctttttaggggcctttgtaaggatgtattcaatagagtaagaaatcacaaaaatgctcatgatttgtggttagatatttgtgctctacatgaaggaaccaaaagtgaacgtgaggaaagatatcatattgctatgaaaaaattaaattcttttgaaatgcttgtcaatgagaatgcaaattatatgtactcacggcttaatattcttgtagaggaattcaatggtttgggactcactcaaatttcacaaccggatgttgtgagaaaaattctcattgtcttgccaattgagaagtatgaacacaatgttaccgtgctacaccaaatggatctttccatcactacaccaactcaaatattggaaaagatcaatgctcatggaatgtgtatgcacatcaatgacaaggatgagtcttccaccaagaagaaagatttggctctcaaagctagtcaagaaaaaaaggcaaggccaaaatgcaagttgtggaagaatactcaacccaagaaaaacaagttcaagggcaagaaagatgatgaaagtgatgatgagaagaaagaaaagaagttcttcaagaggaaagaaggcaaacacaaaaggtttcacaaaaagaagaatgaaaaagcatatattgttggtgattggctcactgacattaaatcctcaagcgagtcttcttcaggcttacggaaggtacaacataaaaatgatattgttgaagattatgatagtgatagtgatgatgaatatgcttctcctacttatgatgaattagcagacttgcttaaagaatatactcaaatcattagaaagtctaaagctaaatgtgacaagctaaaagatgaaaatgaattcataactgctaagtatgacatagttgttaaagctagtgaagaaatgaaggaagaaaacaaaactatgttatccaccaaaaatgagatcaagacctcccttaaagatgctaaagaaaaatgtgaaaaattaagtgaagcaaatagggagctaaaagataggattgttagaataaaggaaggttacacaaagattaaaattgattatgttaattttcttattgcaaatgagcttttatcttgtgacacacatgaggctattaaacctgttgttaagatcgatgtagcaacctcatgtgatgatctgagcgaagttgatcagtctagtctccatgatgaattgattgaaaaagttgaagtcatgatactagagaatcagaaattgaagaagtacttaataaatgcaaccactaaagaaaaaattgccatagaaagcaatgatgttaataatgagttggaagtggataatgaaaggcttagagatgaagttaagaaacttaaccttgagaaagaacatcttgctataagtgtacaaatgttcaacaaaggccaataccttcaaaatgagttactcatgaacactgtcatgaaaaataataagggtggtattggatacaattcttttgtgcaaaagaaagcaacaaatcaatacaaggcaaagcaaactcctaaaccaatcaagtgctatgagtgtggaaaagaaggacattttgcccacaactacaaaggcacaccaccaactcccttgccaaagcattcaaggccatttgctttcaatgctcattatgtactaaaaaaagttgcaaatggaaaagtcaaagtgaactataagaccggtgggagccattgggtaattgacagtggatgcactcaacatatgactggcaacccacggatgttcacctcactaaatgaagatattgatgaacaagataaaattacttttggggataattcaaaaggaaaagttcaagggcttggcaaggtggcaatttcaaatgatctttcaatttcaaatgttctcttggttacaccattaagcttcaacttgctatcaatgggtcaaatttgtgatcttggccttcagtgcctattcactcctacagaagttgttatgtttaagatagatgatgagtcagtgatattcaaaggatttagatacaacaacctatacttagtggatttctcttccgaagatgcaaacctaaggacctgcctctttaccaaagcatctcttggatggctatggcatagaaggcttgcacatgttagaatgagcacactcaagaagattctaaagaaagatatggctgggaagcaggttgctaacactcatcctacaaaagcttttatgtcaacatcaaggccactagagctatttcacatggacctatttggaccaaaaacttatgctagtgctggtgtcaacctctattgtctggttattgttgatgatttttcaagatacacttgggtgttctttcttcatgacaaatttgaggttgcatcaatattcaagaaatttgccaagaaagctcaaaatgaatttgactgtgatgaaccacttagggaagccatgaagaatatgccaattggagccatcaaaccaaaagaatatgaagaagaggtgcaaaatatcaacaacccttcttcatcaaatgtaccacaagatggtgaaaaagatgagaggcatgcaaatgaagatatatttgtctctcatgaacaagcaagggtacaagccgaagatgttgatgctccaaggtcttcttcccaagtggttgacaagaggaactcatcactactacaagcacatccacaagtatatgttgagcaaccacacaggtttgaagatcctagatatccaaatcatgcttacgggttgtccaaggcgctatatggtctaaagcaagcaacaagtgcttggtatgagtgtcttcgagaattcctcattaagaagggtttcaagatcaggaccgtcgacaccactatattcacaaagaaacataacgatgatattttaatttgtcaagtttatgttaatgatataatctttggcttgacaaatgatagtcattgcaacaaatttggtgagttgatgttaatgatataa

SEQ ID NO: 35139 - DNA, 577 bp, Zea mays
  Clone ID: MRT4577_132047C.1
ttctctcgcgtccgcggacgcgtgggagatacgcacgtacgctccggcggtttcgatcgagcgaggtgggcggaaggagaaggcatggcgaggctcctggtgatgatcttgctcgctctgtttctcctcgccgtcgcgcccgctcaagcggctcgcttcacaagtaattatctaccgatcacgcagggggcttgagagcgaggatcggcgaggctccggcgctagaggctgcgcaagtttcagcagaggagaactggagaagcaacgcggtggttgaagagatgtttggaaggatggctctacaggtaactgactacccgggctctggcccgaacgatcgtcacactcccaaagcaccggacccatgacgacgagacagagacaaagagacagcagacagtagctgcttacagagatttcaggctaatctgggggtcttttggtctggaaggaaatcgtagtagggacgacctgtgcaagtgtaaatatactgtacctgtgctgcctgaatgcccacgctttctgtttgtgtgaatgaaaaaaataagctgctgtaaaaaagtagtctttttagcat

SEQ ID NO: 35140 - DNA, 677 bp, Zea mays
  unsure (1)..(677): unsure at all n locations
  Clone ID: MRT4577_132048C.1
gtacgctccggcggtttcgacgacgggtgggcgngaggagaagcatggcgaggctcctggtgatgatcttgctcgctctgtttctcctcgccgtcgcgcccgctcaagcggctcgcttcacaagtaattatctaccggttgtcgtctcttgctcttgcttccatatatatgtctttcttccctgcatgcgcactggatatctgaacggcggccgtgtggtacgtgatttccatgtggacgacgcagatcacgcagggggcttgagagcgaggatcggcgaggctccggcgctagaggctgcgcaagtttcagcagaggagaactggagaagcaacgcggtggttgaagagatgtttggaaggatggctctacaggtaactgactacccgggctctggcccgaacgatcgtcacactcccaaagcaccggacccatgacgacgagacagagacaaagagacagcagacagtagctgcttacagagatttcaggctaatctgggggtcttttggtctggaaggaaatcgtagtagggacgacctgtgcaagtgtaaatatactgtacctgtgctgcctgaatgcccacgctttctgtttgtgtgaatgaaaaaaataagctgctgaaaattccttgaaaagacaccgagatgataagacccacagacctgagtttcttg

SEQ ID NO: 35141 - DNA, 495 bp, Zea mays
  Clone ID: MRT4577_132049C.1
gggttgggttttacggaatcgttatgcatttggattaaggacgacgcatgctgttgacatttggaatttacatgacgagaacaacaacaacaacagcacacagctaatatttcacaagaaccatcatcaggcaatagatggatcggtacaagtacaacattgcaatggtgatcaacttgctgttcagtagtggccccggtggacctcgaatccgacgagcgagcggcagtagccgacggtggccgcggtgagcacggagctggtcgagccgcactcgctgcccaccagcgacgcgctggaccggtccagcctgacgcccgcccacggctgcgccgggtacccgtacgcggccgtcgacggcacgccgacgtgcgacgacgagcgctgcatcttcctgggcgcgccctgctgggcgcggagcctgctgagctggcgctccagcgcccggtcggtgcgctggcgccgcgcgctctgggacccggaccttgcgcggga

SEQ ID NO: 35142 - DNA, 267 bp, Zea mays
  Clone ID: MRT4577_13204C.1
cccttccccgtcgttcgataggtgggcgaccaagcttgtggcgcgccgatctcccgatctggtggcccgcttcttccgcgatccgccgcggaccgacgcgtccggcccggatttggcgctgtgggaggatcaggagaggagtagcagttaaaatggtgtatgtatgggtaggaggcgaaaatgagagcagccagagtgttgactctgtcgatttgcaacacgtcactagtgatttgcttcatctaaagggcctcagcaattgtgctt

SEQ ID NO: 35143 - DNA, 449 bp, Zea mays
  Clone ID: MRT4577_132050C.1
agcaactagcaacacctcttctccttttacttcgcctcgcctcgcctcgccataacgacacgcgcatctccctacctcgatacgattcttcgtcttctcttccccgcgatcgcgccagcgcccccgaaaaaccctaactacctggagcctcgacggcacctgccgcaggcgacggcgagcgaccccaggcggtggtagacggcgcagcgggttgccccttgtggaggcggacggcacggcgcaggtccttgccttcccggctatgcgaattgcggtatgaagctcaagcggcgacgcgcggtagaagtgcctccaagtataaaatctttcatcaacagtgttaccactgttcctcttgaggatgtagaattgccgctgaaggattttgcatgggaatttgacaagggggattttcatcactggttggaccttttcaatcattttgattc

SEQ ID NO: 35144 - DNA, 831 bp, Zea mays
  Clone ID: MRT4577_132051C.1
tctctctcgcgcagacctctctcctcccctgcaaacagtggtcgagctccccttcttcctccaactgcggacggccgagctcctcgcgcggtgctcagagccccagcgccggccgcccctctgcgccctgtgccctgctcgtagagctcccttccatggcgtgccgtgaagtcccctggtgtttccccgccgcgctctgctcggattcctgctgaccatggcgccctgctctgttcgccatcccatcttctctgctccctgcacggctcttccttctctggtgccgcgcccctgctactcccttgttcctatggcggcgctggtcggatctcccagctcctctgcgcgtgtcgcccttgctccagtcctcatcctgtgccgcgccctgattgttttcctcgccctcggtgcttgcctggtcgagctccctgttctccatggcgccggatcctctgcaagctcgtccatgtcgccgccgttgaagctccttgcgcgtgccgcgtcctagctcggacccaactcggcgccttcctgcggctcgaactgcgcgcctagcgcctgctccagctcggccatggtcgctgcgttgcgttcctgcgctcgccgctggagcttccacgtgcttggccgcctccctggaacctccgcgctcggcgcccggatttcgttcagtcgcccagctcggctctgctcaatccctgtgtgtgctgtgcgcgcagccgagcttctccctgcgtacgcgtcgtcgttctcctgcgcgcagccgcgcagcctctctcttcgccggcgtcgttctctcttccggtgctctggtgggcgcgcgtttcccct

SEQ ID NO: 35145 - DNA, 272 bp, Zea mays
  Clone ID: MRT4577_132052C.1
ccagctcgccttgcgagagtgggagctattcagctaccggaggggcgagaagcgagacagcatggccacccagcagaagatggctgccgtggggaaagtgacgggaaggacctggtccaggggtcacgtgacccaggtcagagtgtactccttggctgacctgcaccagatcatcattaggaatgataagggcccggctctcgagggtgacatcctcaccctgctctattccaagagggaagccatgaggctgcgcagaagacctagcgttc

SEQ ID NO: 35146 - DNA, 249 bp, Zea mays
  Clone ID: MRT4577_132053C.1
gggaggggttaaaagaacatttggttggtctccgtccccaacacaaatggcgatcaaaaacctggcgcagcagtgtctcgtaaacaacaaatggggaagcaaccaaaacaaacgaaggggcatcccaccactacttcaagggtaatacaaagcctaacaaggagactgtagacaacggtaccacgagaacagcgaaagatatgctaactctggctcactcagccagagggggaacatcagtcccaccag

SEQ ID NO: 35147 - DNA, 862 bp, Zea mays
  Clone ID: MRT4577_132054C.1
ggccgccccttttttttttttttttttgttttttttacaacaagccgccatttcattccgactagtaagaaaaatattttcatggcgcggctctggctgctcttgttacattactattgctacatcaggacgccaaaaagaagaaaaaaaacaaacagaaaggtgaaaccaggacggccttcttccaaggtggtgcctgggacacaaaacactcccttttttctctctcccgaaaaccgggactcgacgtttacattcaaaactgcgcaaaaaaaaaaaaaaaactgtccattcatggtacttaattggtaaagagatcctctacttgtttgaaaatctaacctagcactgatggtctttgccgttcagcggatcatacctaatcttacagtcagaaagcacctcctcgaatatctatctgttagctagtacaaaacatgccgaccgatggaaccttgggagaaatgaacttcacccagccagagccagccatcagaaggtgaacccttggcttggctggctcctttcgtcctccatcgagacacgcgcagtcgatcagtaaaaattgatgtccatgtaactgcgtggataaggcagctcgtccagcgccagccccaggagggacgcggaacgagtaatgccgccgccgccgccgccgaactgagccgctgcctgctgctggctcggaatccgaacctccgccgtgaatacgctgtacacgggcctgtggtccgagaaccgagactcgccacgcacgtagcacagctgggacaggcctcgcccgtaccataggatccgatcacaccatgccggtgtcctccgcttctcgttaggccgcatgtcgtcgccggcgtcctgtaag

SEQ ID NO: 35148 - DNA, 1129 bp, Zea mays
  Clone ID: MRT4577_132055C.1
gccagcaaagcaagagccattcaattacttgccaatacgagggtgtccagaaggccttgcaaatactcccttgtacatgtgatttgtttttgggaactccaaatcaagcggcgatcatggagacagcacaacattatgaactgcagtacacctatcacctgtaaggttcacttctgatagaaggtgatgttgcaccaatagacgatgctctagatcttctcaaatactgcagtctgatagtccatacagaaggtcccaacaccttttagaactccagcagcagaattgaatccataattgggatctgagaccccatttgttcccttgccacgcaatttgttgggaacgaatctaagctaaattacgggaataggagcaaattggagtcattctgcaacaacaataagtgttgttaggggcatcacttattgatccatgtcaagaacttctgatagatttagccatccacgggaaacaaattgtgctggttttgtcttgtgaatgcattctatggatagagaattttctccttgttctgtgaaccgctcaaaggcaccaccgtgcttgtgggatggtttcacacgctgccgcttttgtcccaagctgaacgacagcttctccctattctccggcacgcctctcttgccattaccgtccatcaccgttaccacttgccctgtgtccttctcgtcatccgctgccacctggcagcgaacgcgcaaccgttcctcccacccctccgggaagcagggaagccaatgtggaacgtggttcagcggcggctgcctccccgccgcagcgaagctctcccacccgtcgacggagccgcaacccggatccctcctcggcaggggcttcgggaacgggacctccctcaccgcagcgacgaactgggcgagctccgcgagcgcgccggaacagagcaacggccgcgtggggtcggccgcgccggggaagccgccgagcgcgtgatcctcgagcgcgaggacggcgtcggtgacgttgggctccgtgcggccgcgggcctcggcgaaagctgcggcggcgtggcccagggacgcgatgtagcggccagcgatgtcggagagggcgcggagcgcggcaggttcagcggcggagtagccggaag

SEQ ID NO: 35149 - DNA, 1374 bp, Zea mays
  unsure (1)..(1374): unsure at all n locations
  Clone ID: MRT4577_132056C.1
gggnaagcccccttcccttgggtcagcttcgccctgcaggacagaccagaagcttactatgtgtcatccaattttcggcatggtgccgtgccaagtctctggacgatttggccgaagtgttcagagcgtattccttcggggaaatcatgtcgttggaagatctgtttgcacgagcttcaccaccaatctgtgcggagtggttccctaggcactcatctttggcctttgggcacctgctgaggctcctggagagaggccctctggattaccagcgggtggttcttctgatgcttaaatcgctgctgcagcaaacccctgtggatccgtcacagataccccaggtgtacaacttcgtgtcgcagctggtggagagcacattatgctcggaggcgctgaatgtgctggaggcgctgctgcggagctgcggcggcggcgggcaaggcgaggaggctgggtttggtgataacggcgggcatgggagcggggagaaggtcctccagagcatgctgcttcctcagtcgtctttcaaggcaaggagtgggccgctgcagtacgctgcggggtcggggttggggtccttgatggggcaaggcggcggtggcagcagcagcgccgcagatagcgggttggtggcacgggatgtagcgctgcagaacacccggctgctgcttgggcgagttcttgatacctgcgcgcttgggcgcaagagggatcacaagcggctggtgccatttgtggcgaacgtcgggtagaccttgccaacatatagcagcacaattttgagtgggcagggcagcagccgccagcagagcgcacgcagagtgcgtgcgtgcgtttgtgaccgggtcagtgtcgtgcaaaggtggccacgcacatagacgtagctgcagttcttgaaactatttatttatttgtttatttattttattgttttgttttgatgagtgaggccgtgtgtgatgtatgtatgcatgtaattcgaaaccaactatggccgtggatggcatttgtattgtggaaaggagagtagaaattgatgatgaaacacaacaaacaggaaaaaaggcaaaaaaaaaaaaaaaaaaaaaaagatcaaaaaaacacagtgtgggggggagagtgaaagttgctttcttgagtttcttccgtcgtgtgtccgggccccaaggttgtcttcagtggcccgtataacgcaagagatttgcacttagatgatactatttgtatagtaaagtttaaaatagggaatgagataggatccatgctgaggatagccaaagatgataggtgattcaaagtctcctacatagcatcctgactgactttgaatcatgaacaacatagcacaagattagttggttaaggctgtcccca

SEQ ID NO: 35150 - DNA, 466 bp, Zea mays
  Clone ID: MRT4577_132057C.1
aactatatgctgtgcaggttatatggacgtcctttaatcaacacgatatgtgcacaaagggccaaatgctgacatatttacagaccccgatgctgatgacgcagatgatgatcctagatgacagactactgcccactatgagatatatagaacaccacccatgccatgctctacctacatgcaaaaccttgactgctaagacccaacaaatgcttctccaccttgagaaaaagatccccccatgtcctgcatagctacttgtgaactgtggagaacttactgaacgactgccggtcttgttgcaatggccaaaacatgacggctgcgcgatcagctcatgatacccaaactcgagagcgacctgtggcaaaacatgttggctaacatgaaccacatatgggactctttcttctgcggctgcggcgggtcgacctgtactttaacctgcaggctgtggtctatggcc

SEQ ID NO: 35151 - DNA, 991 bp, Zea mays
  Clone ID: MRT4577_132058C.1
cctcgaggccggccgggactgtggcttgcattcggcagtggttgctagcatacatatccaatccaattatattgctacaatacaggcctacaccctcagctcaacgtcgacgtcggcgatgtgtctgccgttctcctgttgccaccgcggtgaccatgacacaaaggagtctgaagtggaaagccaaccttattatcatccgtctcctgtgaaagaagcacatgatggtcaccgtgcgagccaacgacatgcctcccgtcgtcgaggacaacagcaagaacggaggagggcacacgacgggtttcagcagccactcagacgacggcgttgtccgaggtggagagacgacgataactaccgagaagatcgtggcgccgcccaccactactccagcaccgcaagctgcttctagggatctggctgtgcagcaagctcctcagggtacgtatgtctctgctagtcgtcctcgccacaaccatggccgtgggtcgtcggcagcatcgcctcccagcgaggccgtcgtcaccaaagtcgtactaccgatggctcgtcgtggtggtgaagactactagctaccctactgcatgctagctgcggccaccacacagaggccgcctatatatccccaacaatttcgttccgttctactacgccattcgtgacccgtaataatgatcccctgtgcacatatatggcaaaacaaagatatatagcagcaacagcagtgaaggttcgaacatctccgcgggcaactttctccatcatcatttcttgaaatcaactgaggacgcggcatgaagagactcctgcgctcccgttgcgtggtgtgcagaacgtaggtctccctacgatagcagccaattaattccctcccaccccactatatatattgtcaattggacgagagtgaaaatatgtacctttcagttttaaattaataaatttggtgatgatgtattttcgttccaaaaaaaaaaaaaaaagcggccct

SEQ ID NO: 35152 - DNA, 1087 bp, Zea mays
  Clone ID: MRT4577_132059C.1
gccggccggttccgggaccccagcttgctcagtagtggttgctagcatacatatccaatccaattatattgctacaatacaggcctacaccctcagctcaacgtcgacgtcggcgatgtgtctgccgttctcctgttgccaccgcggtgaccatgacacaaaggagtctgaagtggaaagccaaccttattatcattatccgtctcctgtgaaagaagcacatgatggtcaccgtgcgagtgcgaccaacgacatgcctcccgtcgtcgaggacaacagcaagaacggaggagggcacacgacgggtttcagcagccactcagacgacggcgttgtccgaggtggagagacgacgataactaccgagaagatcgtggcgccgcccaccactactccagcaccgcaagctgcttctagggatctggctgtgcagcaagctcctcagggtacgtatgtctctgctagtcgtcctcgccacaaccatggccgtgggtcgtcggcagcatcgcctcccagcgaggccgtcgtcaccaaagtcgtactaccgattgctcgtcgtggtggtgaagactactagatagttaccctactgcatgctgcggccacagaagccgcctatatatccccaacaatttctcgttccgttctactctacgccattcgtgacccgtaataatgatctcctgtgcacatatatggcaaaacaaagatatatagcagcaacagcagtgaaggttcgaacatctccacgagcaactttctccatcgtcaaatgaggacaccagcaaaaccgagggcaccaccataaaaaaccttcctgaagggttttttatggtcccctttcctgaaatcaactgaggacgcggcatgaagagactcctgcgctcgcgttgcgtggtgtgcagaacgtaggtctcccaacgatagcagccaattaattccctcccaccctactatattatattgtcaattggacgagtgaaaatatgtacctttcagttttaaattaataagtttggtgatggtgtattttcgttcaaaaaaaaaaaaaaaaaaaaaaaaaaaaaaaaaaaaaaactcgaggggg

SEQ ID NO: 35153 - DNA, 351 bp, Zea mays
  Clone ID: MRT4577_13205C.1
accagcgcccacccaatccaccaaccccgacccctcaattccgtcgagcgccccgcgccgccacccaaaccctagctccccatggccaccgtctccttctcatccccggcgtccttcgccggcgacaacagcggtgcccttacctccgccaccatcctccgtttcccgcccaacttcgtccgccagctcagcaccaaggcccgccgcaactgtagcaacataggcgtcgcgcagatcgtcgccgccgcttggtccgatcgccgagccgtcacctcccactccggcggcggaagcagcgtccgcggcacctcctcccatgccgcggccgcatccgccgccacctctgcggcg

SEQ ID NO: 35154 - DNA, 268 bp, Zea mays
  Clone ID: MRT4577_132060C.1
ctttttaagatgcatgcactgcgggacttgcagtcagctggttgtctttattcatagccgcttggtatgcagtaacttggggtggaggcaaagcgctaaccaagggggcttctcttccctattcttacccgtataaataaacaagttgcccgttccagaagtctaacccctctgcttgtttaggagccctttctgtgcatgggtacggtgatttagccttggctgtgggctgtcttcctgttagctctggaccgtagcgggttttagg

SEQ ID NO: 35155 - DNA, 256 bp, Zea mays
  Clone ID: MRT4577_132061C.1
ggatgccgcagaaaccacaaataactcaccagggccaagactaggaagggatccgttttacatcctatattggcagggggggtccaacattggccaagcaacgggaatccaaaatgggtctagcaaaggtttaattgaccggaaccccgggggggcatggggcaaacattggtaaattacagaataagggcaaagccctttgaacctagcaaaggaattaaaacactggggcctacaaaaacaaacagggctgaac

SEQ ID NO: 35156 - DNA, 292 bp, Zea mays
  Clone ID: MRT4577_132062C.1
tgactgactgacacatgggaaagtagcactggaatactgctgcctatacacacacggcgcttggggaaaaaaatctgacgcaaaaaccgacccacagacatactcatgcatgatgcataaaacactactagtttgcattcgcaccgaacgaattctaacttgagagacactcctgtcggacaggacctggactaactacaaactggcagggaccatcctggtgcaagtatgacccacctggcttcctttactacttacagattatttaaagccatttccgatgcatacacca

SEQ ID NO: 35157 - DNA, 1024 bp, Zea mays
  unsure (1)..(1024): unsure at all n locations
  Clone ID: MRT4577_132063C.1
ctcgacgcctggtttcttctacccgcacacagccgttcttccccagccgatctcatccgcgtgcggggggaaaaaatcttctcgccgccggcgtcctatccttatccccttccacgcgcgcggttctatcctcaatttcctggccgccctgatctttatctacgtacagagttttcttcttcagtcggccagcactccagttcatttggtgcccgctctgctcgacatttctctgcgcatgcccagccactctcctttcttcctccctgccgtgccaatccccctgcttgtggagcttcttctccgcccggctccttgctcgcctggccgcacagctccctggtgccgtgcccagcccatctcctccctctcctccctggtgccttgcccagccacgctgctccaatcccctggtgtttccctatggcgcgttttcttctcggcgtccggctccagctcgccgcgcgcgctctgcttccagcgcgtgccctggagctctcgcgcgcccctgccttttgttggccgcgagctccctccagctccaacccggctccagccatggcgcctggtcggatgtgggttctctgccgcgtccatcccatggagttttctgctgtgtcgcgtcctgtttttctgctcagccatgggggtcgctgtttttctgctcagccatgggggtcgctgcccctggtggtcgtcttctctcctaacgcctagctcccctgtgcgcacctggccggatttcccagccgagcactttccccaaccgttcctccatccctacctcgcctccatggcgttgctgtggatttccttgctgcgctctgctctcatggcagcgcgtcctcgcgcttggcctgtccatctccctgcgtttgctcgcttggattcctccttctcggncatctccatcgcgccctgctcgcgtagacctccatgctatccgccgcccgtgctggccagctcaccgtcgatgcttcgtcgacgtcatcgtactgtccttgaccccactcgcctgtacctg

SEQ ID NO: 35158 - DNA, 339 bp, Zea mays
  unsure (1)..(339): unsure at all n locations
  Clone ID: MRT4577_132064C.1
tctcatccccaaccttaaacacctcttgtaaaccccccccaccnnannccaagggggggcgtgctaaaaaccaaatcaccccacccaaacaagacnaaaanncnccaaangggaaacccaaggccccaagcccgccccaagaacccgaaacacgccaacgacgagcaacaaacacaccnnccccgccaagctaacctgcacgagacaaaccacctcccacacctgtccctaaacaaacgcaagcccggaagccatcgacaccaccgccaccgcccattcagaacaacaaactaaaggctccaaggcctaaaccaacggacctcccagacagatcacacc

SEQ ID NO: 35159 - DNA, 716 bp, Zea mays
  Clone ID: MRT4577_132065C.1
cgggcttagtccaccatgtaaattatatatatgtcatatgagtatgaactataaactaaaccatccaattagggaatcaaagcaccaaaaaatataagcagctgcttataacagtggattatgcggacgtattgtataagccgttctattgttcataattggatacggggtgtattccaatttggtgcttttcatgtatgtgtatcatgcaggctccgacactttgacaggtcgacatacaaatccccgttccatgtagtatttctgcagggacaagtgccttctctcttgaactctgcagctgcagcgaggcccaagagttccatctggtccggaacatgctcattgctgccgtagaagaacgctacaaggatgctgctcaatacagaggccaacattccatgttccaggccgttattatgtacatccacatgtgtgccaagttaaacttgttagggaaacgtctaagaaaacaccatgtaaatatggaggcctttttttttttttgctgaagcgcatgaagcttcggcaaacatctaaagaacaccatgcaaatggctgtggtgtcctgcgattggtctacgcgatgtgtgcgcaagctgctttgaagagaatttaacgatcttgaattttaggtacccatacagttcgctcatgtattgatctggcgcaagcttcgatgaacattttttggtttcatgtggttgatatgttgc

SEQ ID NO: 35160 - DNA, 336 bp, Zea mays
  unsure (1)..(336): unsure at all n locations
  Clone ID: MRT4577_132066C.1
tatttgttttgttttttttttttttggttggtaccaaccccaaggatcttttcattgccaagtgtgtacaaattccnngggcaaaccaaaaagctgcttatccaaagcaaaatcttcaaacaatgcaaccaaaaccctaggatctgagcctgttttacatgcccaatacccaaccagcaacatttaacatttgaaccaaaaaactgaaccggttggtcataaaacagcctctatttcgtctgttctttatctacatttttatgctaaagtagtcaaaatcaaaatgatccacagttacatatccattttcaccaccacttgtaaagctccccccat

SEQ ID NO: 35161 - DNA, 418 bp, Zea mays
  Clone ID: MRT4577_132067C.1
accttctcgcccgtccccgaagttttatctctctgccagcccgtgctgccttcctgaccgccggagacggtacgcgaaaacccggactgccggtaccgtcagccgcgctcctttctgctcttcgtcgcccgcgccaaataccttcatctgccgcggctgcaccgacgaccgggagacaacaattgctcgagatccggagactgatctattccttcctcggttcactttgatagtctaacagaggctacattgctagactcccaaaaagcatgctaacattgacgccacaagcacgagctgtcaggccggctcttgactgtgtgagattggctccacttctgcttaacagagacctatatgggagtgggcctttgacggcatgcctttctctgtatgggagcctatgactgatcgtgca

SEQ ID NO: 35162 - DNA, 323 bp, Zea mays
  unsure (1)..(323): unsure at all n locations
  Clone ID: MRT4577_132068C.1
gccggacggnggtggcancgccaanncaacgggcggagcggagggggcacncgacagcgcgccagcggcggaggaggaganggcgcccacaagaagcggnccngcnggccccgcggncanggggcagaaccccgcccncaacanngcagagaaagggnnccccaccncngcgnacaacaggacaaccggcagggggggcgagaccgngcagcgngccaaggcagaaggaaacccccccgncgacggcgnccacgaccccgcgnccccngngaagcccanccacaagccacgggnggngaccacgccgcgcaaggccggcgcgc

SEQ ID NO: 35163 - DNA, 628 bp, Zea mays
  Clone ID: MRT4577_132069C.1
gccggccgggttccaaacaactcctttccattccaattgttaattccttcgcccctccatctccaactccgctaatgcttccaagctcgtcatctcgcactccaccgcctccacgctcaatagccagcacctaggaaggaccaaccaaatcacaaggtttctgttcatccgataccgcagctatagagactccatgcaaagatacccatacgaacactgaaagtgtttcacgcctgatctacgagccccggacgaccagccgatgacgtgcaaccatttcggacacctctatttctgctctgatttccatgccctccgccgcttcaattgcagcgtacaacatcagtaccccaccgatctagaacaaatcctctccatgctctcctttactgcacagacatggtaatgcccctcctcatcacaaggaatgacggtgctacaaaaccatactttcaaagactgtctatcctcttacgtaatgtacacccatgacaacaccaatgatgaccaactgagaaaccacattatgcatagcgatgtgctatcactatacccaggacacagaacatctgatctacctccctgggaaccagatgactagggtctccatagagaaaacaagagatct

SEQ ID NO: 35164 - DNA, 111 bp, Zea mays
  Clone ID: MRT4577_13206C.1
gcttgatgagcccaaagaggggtatggctcccgcagtgggtgtgatcgccgttacaacacattctccctgggtgcacaatgcacattttaaagggcattcttaataagctc

SEQ ID NO: 35165 - DNA, 529 bp, Zea mays
  unsure (1)..(529): unsure at all n locations
  Clone ID: MRT4577_132070C.1
ctcgcccctccccctcccctnctcccctcccctcgccgcccatctcctccgcccctttttgaccccggttacgaatccgcaccagggcctgcggcggtatactcggttccctgcccccccacgaccacgccgtcgactactccccacgcccgaccggcgctcccggaaccgccggaagtgggaaacaacggctacggaggacatcggatcttgataatcgctttaaggatgccatcgcccagattggtggaccagacagagctacacctaaaggggttctaactgagatggatgtaccaaggatcacaattaatcatgagaagagccatctgcagaagtatcgacttgcaaaatatatacccgacactagggatgaaggtcccaaggacgaaaagataaattatagtgattccctttcgaacacggattcggaacgagaatagcaaatcactgaggcactaaaaatgcaaaaggaggttaagaagctactacatgaacaaattgagggttaaagacaaatggaactaat

SEQ ID NO: 35166 - DNA, 400 bp, Zea mays
  Clone ID: MRT4577_132071C.1
gggggtaaaaatcaaaaaaatataatttgggaaaatataacataagggggcccaaaactttgggggaaacggaaacaactaaacatgggaggaaatcaggggggcatacattttttggggcctcggaccccgatcatacccaagcccatgcctacccccacgtttacctaccaaagattacggagccccccttatttgggcattaaacgagggcatacatacgtacccccccacaaaacggggggggctcgatatcactttcacacccccccgtagcacacggggggggaccaccatacgggaggatcaatcagcccaaaaaggggggcttttttttgccgccggcctcctcggcccccttgggggcctttttcttctcggggggcccggggaaggggaa

SEQ ID NO: 35167 - DNA, 1629 bp, Zea mays
  unsure (1)..(1629): unsure at all n locations
  Clone ID: MRT4577_132072C.1
cccagcgtccgaaaggaaccgttgctgcgtctggncagtccggtatcaatttaattatatatatatatacacttattagaataaaattaaaacgtgtgcatgcaaatgtcagcagtgtacgatggacgtggtacgtcccaaatgaaagcaaagcatgtggtgtggtgtgggtggttgaattggatggttggtttgcctaatctctagagcgaccccacctcactccttctatgaagacctggtggatgggaaaggatcggatgagaagcctaaaaacattccagacaagccactgaacaaaaagataaagtttgaggactctgattcctcagatgatgaggatgaagacaaccatggttaggaagccgctaatgggaatgtgaatgatgtggagaagggtgaaaccgctccatctgagaagcaacaggaggtgcttgatacctctaataccgcaagcaaggacaatactgctctatctgagaagaaagaggaggtgcttgatacctctgataccgtgagtaaggacaatgaggaacaagcagtcactgctgatgaaccaagagaaaagaagcaacgagtggaagatcctccagtttttgagcaggccgtgcaaaaagagactgctgatgaaccaaaggagtccactgataaaccaaaggagtccagtgaaaaaaatattgacgatttaattgatgaggacctgaaagaaataggggacaggaaaaagaggctctttgcaagcctcgagacaggctgcaatggatgcatattcattcaaatgcataaaagagcaggagaccctggtccagttgagattgtacaaaacatgatgtcatctgctgcattgactcgtaaacatatgtcaagatttattctgcgagttttgcctgttgaggtggcatgctatgcatctgaagaggaaataacaaaggcaattagtccccttattgaaaagtacttcccaaaagaatgctcctcaggtcataagtttgcagtgttatatgaagcaaggtcaaacacaggaattgatagaatgaaaatcataaacgcagcagcgaaatctgtaccacaacctcataaagttgacctgaagaacccagacaagactattgttgtccagattgcaaagaccatatgcatgattggagttgtggaaaggtacaaagagctctcgaagttcaacctaaggcagctgacctcaccggagtcggagaagtaagcctatgagtgacaaaatcttccaggcaaaacgtggaccaacttaaatcagcagcagcgtcaggtggttaggcgctagcgaattaaattaaggccggccgaacctcactgtcttgaaagattcagatgttctaatgtttaatgctttaccaccagtggttagtggttgctggttcatgcttcccaggttagagtcacgattttttttttttgaggctgtagaaagatctgacgatacttcatgtgtgctttctctctgacgatggttccatacaggggcttaccaaagacgtagaatctatcgttgcagctccattgctctgagcatttctatagcttgaataaatctgcgtgctaggtttctatgcatgagacctgaaatttaaaaaaaaaaaacaaaaaaaaaaaaaa

SEQ ID NO: 35168 - DNA, 180 bp, Zea mays
  Clone ID: MRT4577_132073C.1
ggcgagcaaatacaattactactactcgtagtacatgctattattgtctgtatgtgtgtgcatggttcagacttcagagcaagtacatggtattattgtcagtatgctactcgttttttttaaaaaaaatgtcagtatgcgacacagcagcaaggcatatatgatcaatactccggtttt

SEQ ID NO: 35169 - DNA, 422 bp, Zea mays
  Clone ID: MRT4577_132074C.1
cgtggatccttaaagcggccaaccataataaaaatttttttatattttaccaccaaacacacaatcggggtgcgccaattttttaattaaagtaccataccaaacccatatttataacataaaaatgacaatctaaaaaatccaaattccttttattaaatacatgaaaagagcgaaggctcattattgtatatttacaaattgaaacaacccttaaagaaccgttgactactattcaaagccatcaaaggccccccccttctaattatcgcccatgtcgtcaacctcctcctcctcttttgaagaaaaagatacaccctcaactgcagcctgtagcaactaaatcaagtaattctattttgtcctcattgtcctctgaaaaacctctttcaactgactgttgcctattttcccataccaaa

SEQ ID NO: 35170 - DNA, 253 bp, Zea mays
  Clone ID: MRT4577_132075C.1
cgttttctaagttacgttttttttttgtgttaatatgcccttatttcttaattattatatactctgctaaaaaaaaaaaaaaaaaaaaaaaaaaaaaaaaaaaaagggaaggaagaaaaagaggaaaaaagaaaaaagggggcgggcgtgctaggggatacaagtttaattgcgcgagctagggaagttaaatggctcgtagagggcaacgtaaatgaaagggaaaggccgggggttaacaaagttagagagg

SEQ ID NO: 35171 - DNA, 251 bp, Zea mays
  unsure (1)..(251): unsure at all n locations
  Clone ID: MRT4577_132076C.1
anangancnnnacnacagaaggaaggaganancacgggagccccangagnnnngccnggaccagagcgaggcagancgnaaccngancgcaaagnggaaaaagccagganacgagcgccnnngcngccnncggngcanacagacacgngaccacaacnnngcaacgacccgngncngccgagnccccaagcancngagggaggagcaaggganagaangngnccanngcggcngcaggggnggggccagcg

SEQ ID NO: 35172 - DNA, 318 bp, Zea mays
  unsure (1)..(318): unsure at all n locations
  Clone ID: MRT4577_132077C.1
gcgnncggctccngctcgtctccttctacaccgcgcatttctttgtgcttccggaaccctagcgccgggtctgtgtttacagaaacttaattcactaatcccctatcgaagctgtatgaccaccttaagctcgcgcggtactacactctctagggcctctacaacacctccttcttcttcttcgacggcgccattgtccatatcaacaagcatctaactacttcggacgatgctcttattcgtacgaaatgaatgaactgcatgaaagcaatttttgaagaagtggtaattgtgaaacagctggatgctcaattaaag

SEQ ID NO: 35173 - DNA, 509 bp, Zea mays
  unsure (1)..(509): unsure at all n locations
  Clone ID: MRT4577_132078C.1
ttgttgaatgcggacgcagctcgcattctctcctcccagtcccctagtccttactccttaccatcccatatnatccgctagctagcgctcntcggccgcatncgccggacgtctattaaacccgccgctcgctcctccnntcggcatgcgcgggtgtgttttttttgttgacatgagcgcctgcagncttccatgcctctcgcgccacccgccctgccgcctccgctcaagtctgcccggccccacttccgacgtctgnnatgagnnctcccgcaccgacgaccctcctccgnncgccccacccagcagangtgcaggggcgacgaggccgcgctgcaagtgtgccagcaacccgcggcatgcagctagctgngagtgcgccgcgncctgccgctccannccaacaccaagttctgctactacaacaactacagcacggcgcagccgcgccacttctgccgcgcgtgccgccgctactggacgcacgggggcacgctgcgcgacgtccc

SEQ ID NO: 35174 - DNA, 481 bp, Zea mays
  Clone ID: MRT4577_132079C.1
attcggctcgagggacacctgagatcttttttttctgcgattggcagatttgtttccgtgcttcgcattccttaacgaattctccatgctagtgctgccttagcccttcttcagtccacaatcccaggaggccggcatgcagtgcatgacgcatgtatcttgcaagaagcaggggcaggtcatccgttgcgcgcacaagtggtatagacaacaactcctatcgaagctaaaatctatggcagtattctactaaggaacttggagcaccatgagttagggatgtcaccatgaacacccagcacagtgtcatactacaataaacaaaggcctctggatagatcggctgtttggccaatgcataatcaaacagctcggccttcggagccttttgacattacacatgttttgctttgtgcgcacagtgactgcaggagctccaccgatggtttaacccacaactgttaggtgactgattgaaaac

SEQ ID NO: 35175 - DNA, 284 bp, Zea mays
  Clone ID: MRT4577_13207C.1
gttcaatgtggtcattgggccaggaatctagtggttgctgtcggtcgctcgttctagatggattatgggctatggaacctggagtgccgtggtgctgcaaacatctcatgtttcattctgaaatctttttagatgtataatacgtagtagttgaattttctgtaaaaaaaaaaaaaaaaaaataaaaaataaacaaaaaaaaaaaaaaataaaaaaaaaaaaatatataataaaaaataaaataaaaaatagtcgttctttttaaaagaaccaaaaattaaaag

SEQ ID NO: 35176 - DNA, 362 bp, Zea mays
  Clone ID: MRT4577_132080C.1
atgccggacgattacacatatataattaacattttacatttattttatttttatacttttaggatttcccttttaattggacaacaataaaaaaaggtacttaataaagagaaagccatttatatggaaacagaaaaatacatattccttaagacgaaaaaaatagtgcttccaaactaaaaagggaatttttacatttgatatactcatcacagaacaacacttttttgacggaagaattgataccatccaatttgatggccaaattcttggtaagcccctttattctttaggtgtggagaaaaagctagacatttttcttaaagacaaggcaggtttttatttttattttgaggaaatta

SEQ ID NO: 35177 - DNA, 275 bp, Zea mays
  Clone ID: MRT4577_132081C.1
tgccagccatgtctgccacccatcacaagacccctctgcctcagggtgtccgcctgggcaccgtcatgagaattcgaggcgtggtccctgaccaggctggcaggttccatgtaaacctgctatgcggcgaggagcaagaggcagacgccgccctgcactttaacccgaggctggacacatccgaggttgtcttcaacaccaaacagcaaggcaaatggggccgtgaggagcggggcaccggcatccccttccagcgtgggcagccctttgaagtg

SEQ ID NO: 35178 - DNA, 427 bp, Zea mays
  Clone ID: MRT4577_132082C.1
ggaaccaccaccgaaaccagccttattttttctaaaaacccggggaccaaggcggggaaataaacgcctttaacaacatcgggggtggaaacccacccatttttttttaccaaacccccttaacccgatagcgggaccacccccggggaaaccacggaataggggcaccacccgggcctgaggctgggtaataaaaaaatttttttagaactggaacccctgggggccttcctccccctaataaaactaagggccaacctcctggaattctttttggagcccccccgggccctaagggccctaaaaaaactaactttcttccataccctaacggacgtaccagggcaaaaaggccccctgggcgtacatgaggccaaacttggggccaagggggaaaaacacccccccaacacggggggggggggaa

SEQ ID NO: 35179 - DNA, 253 bp, Zea mays
  Clone ID: MRT4577_132083C.1
ctcggcggcatggggtgcagcgccgacctcatggccttcgtgcctcgctgaggacggtgctgaagcgaacacctcattggtccccctggggatcaacaaccagaacatcacccttaactggtacttacgtaaccaccgctccatgctcctttgcaactgcattttccgcatggtcggagccccatcgctaatatccaacaggcgcgcctactccgggtgcaccaagtacctgctgttacacacctttcgcacc

SEQ ID NO: 35180 - DNA, 1269 bp, Zea mays
  Clone ID: MRT4577_132085C.1
atggcgttgcaaaggcaaaaaggaggccaggagcgcgggcatatagcccatttctctgttattgcagtcattgacaagttcagcatgaaagccattttaaatcctggcccaagggatggcactcttaaatgtttcatcaggagaaatcgaactactcagacatattatctgtatattggattgacagaagcattggctgatgatgggaagtttctacttgctgcacgcaagtgtcgtaagcccacctgcacagactacctaatttctcttgataaggtcgatatgtcaaagggaagcagcacctatattggcaagctaagatcaaatttccttggaacaaagttcactgtctatgatgctcatccaccatatgatggtgctgcggtctcaaagagtcgctctgcacgtgtggttggtttgaagcaggtctcccctagagttccggctggaaattatcccgtttcacatatttcttacgagctaaatgttctgggctccagggttacgggggtcgtacgagtggtagatttagggtctagggttctaggaccaggacctcggcgcttgggcgctgtcgggctgttggtggagaaggtaaggaactgttcacgcgatgaaaaaggtccaagaaggatgaactgtgttatggattccatccctgcatcagctgttaaggaaggagggaaaactcctacacagactgaatttccacttagcagccttgactctttcccatcatttccattcttcagatctaaatcagctcggatagacagttcaacgtcgcaatcatccagtcagagggaagataggttggtgcttaagaacaagtctcctaggtggcacgaacagctgcagtgttggtgcctgaatttccgtgggcgggtcactgttgcctcggttaaaaacttccagttggtggcttctgaggacaatggaccagagaaccaagagagtgacaaggtgattctccaattcggaaagatcggaaaagacttgttcaccatggactacggttatccaatatcggcatttcaagcttttgcaatttgtctgagcagttttgatacaaaaattgcctgcgaatgaggcaagaagctggatagcggtggcggatagcatgacagcaatagggggatagcatgacagcaataggaaaacggtcgcaaacgtatatttattcggtttgactttttctttaattttgaataaataagatatataatgtgcaatacaaatttatatttttgtttttagcattgagtctgt

SEQ ID NO: 35181 - DNA, 567 bp, Zea mays
  unsure (1)..(567): unsure at all n locations
  Clone ID: MRT4577_132086C.1
gnttgacanaagcttggctgatgatgggaagtttctacttgctgcacgcaagtgtcgtaagcccacctgcacagactacctaatttctcttgataaggttgatatgtcaaagggaagcagcacctatattggcaagctaagatcaaacttccttggaacaaagttcactgtctatgatgctcatccaccatatgatggagctgcggtctcaaagagtcgctctgcacgtgtggttggtttgaagcaggtctcccctagagttccggctggaaattatcccgtttcacatatttcttacgagctgaatgttctgggctccaggtatggtcattgactgtcttggtgctacaaattacatctggacttctattttggtaaacataattagctaccctttactaggaataagctctttatatgtgaatcttggatccaaagattttgatggtgataattgcaactgcattggtaggtcaatggtctcaccggttaaactgtttatatgtaacagtctatggagctgcttagcttttagtttgcattcatggttaaagaactatatagaca

SEQ ID NO: 35182 - DNA, 1388 bp, Zea mays
  Clone ID: MRT4577_132087C.1
tgtagaatccagcaaaaaaaaagaagaataccccgaacacgaccagaaggcctactaaaccctgccgccgccgccgccgcgccatggccgacgagctcgacgagctgatcggcttcctctccgaccgcaacccccaggtgcggggcgcggcggcggacatcgtgcgcgggctgacgggtggggaggacggcctccgggcgctcacggcgcgcgccgatagcgcccttccggcgttgctccgcctgctggcctccgcgggcggaagtggctcgggagaggccgcggcggactcgctcgtcaacctcagccaggacgcggccctcgcagcgcgccttgtcgcgctcggggccgtcgatgccgccatggacgtcgtggccaagcgaggcggggagcagccagctctcgcgcgcagactcgtcatgctgctcgttaacctaacccacgttgagtccggcgtcgccgcgctcctccaggttggggatgagaaggtgcaaggcttgtatgttgcaaagcttgtgcgatcattctgtaggtcatccagtgattctgaagaggaagacatttttgagtacgttgcctccacacttgtcaatatatctaaggttgaagctggaaggagaatattgttggagcctaagagaggtcttctgaagcagattattcgacaatttgattcaacaaatcaacttagaaagaaaggggttgctggtacaattcgtaactgttgctttgaggctgatactcagcttctgagtttgctttctttagcagaatatctttggccagctctacttttgcctgtagccggaaagaagatatatagtgaagaagacagatcaaaaatgccacttgagctatcgagtgcactctctcatgaacgggaagttgttgaggattctgaaattcggcagcaggcattagaggctatttatatgatcgtattgcaggatggtggccgaaggtccttttggtcagttaatggcccacgaattctgcaggttggttatgaagatgaaaaggacccgaaagtgatggaagcatatgaacttattggttccctgcttgttgggaagggtgaagatgtacaagataacaagaaggaacaaggagagaagcctcaatgagccccgccgctgataaaaacggtgctgtatttttgtttgtctagaaaacatccctcgccgtgtgcaatagcaatagtatgatatcccaacttgtcaactgttgcaactgcaagagctctgcagtgttgcttttgtaattgacgaatgtatctggaaaatttgcaggtattggccgtcttttccgttgttttgagctctctgacgattattcgtttttttttgaatgcatctcttgacgagtctttcacaccgtcacttcagaac

SEQ ID NO: 35183 - DNA, 592 bp, Zea mays
  Clone ID: MRT4577_132088C.1
aagaagagaagatatataataaatttgagatttatcttttatgaacttttacagactcaatgctaaaaacaaaaatataaatttgtattgcacattatatatcttatttattcaaaattaaagaaaaaagtcaaaccgaataaatatacgtttgcgaccgttttcctattgctgtcatgctatccccctattgctgtcatgctatccgccaccgctatccagcttctgcagatagacgaggacaaaagcattgttgagttaaaggtggagagagggcagatgttttgcttgcacaagcaaatctgcacctatttttctcttgcctcattcgcaggcaatttttgtatcaaaactgctcagacaaattgcaaaagcttgaaatgccgatattggataaccgtagtccatggtgaacaagtcttttccgatctttccgaattggagaatcaccttgtcactctcttggttctctggtccattgtcctcagaagccaccaactggaagtttttaaccgaggcaacagtgacccgcccacggaaattcaggcaccaacactgcagctgttcgtgccacctaggagacttgttctta

SEQ ID NO: 35184 - DNA, 314 bp, Zea mays
  Clone ID: MRT4577_132089C.1
cacgcgcgggtttttcttgagcgctgagccaccaggcactacagactacatgacaggggttaccaggaccccagtgctcatttgagggccgcgataatgcccatcattatgatcgccctgagtagccacctggaggtattccacccgtgagcccctatggcggtcttcgctgaattcatttaaaccttcatcttcgatttcggcgggcacatcttcgtactagcacttagcaagctgaccggacggggtctgacaaccccacctggtctgatcgcggaggctgtggcacacgcaccgctgctcttcgtccgggc

SEQ ID NO: 35185 - DNA, 1152 bp, Zea mays
  Clone ID: MRT4577_13208C.1
ccggccgggagcctcagcctcagcctcacacggccgaagcagaacccgtgaacacctcaaacctcacggctcacgccaccgtcctccagccccgttctccggcgatcctgtcattccagacgcgtctccgcccctctcggtccaccaccccgacgccgccacatgtcgacgcagtccatttcgccggcctctgcgtccgcgcagttcacctacccggcggcagcggccccgtcctacttccccgtgcccttccacctccagaacgcgcaatacaccgcatggaccgcagccgcgccggcggtgcctgtgtacaacgccatctatcccatgccccaagtccagcaggcccaacagttgttccaaaaggactcgaagataattactcctgaagctctagctactgttaaggctgctattgcaaatagtgagaaagacaagaaggttgatgcaacaaaaaaggcagtgcctcgaaaggcagctgggcaaagttgggaggaccctaccttggctgattggcctgaaaatgatttccgtttgttctgcggtgatcttggaaatgaagtgaatgatgatgttcttgcaaaggcattctcaaaatatccatccttcaatatggccagggttatacgggacaagtggactggtaaaactaaaggatatggttttgttagttttgctgatgcgtctgatcttacttctgccttgaaagatatgaatggtaaatatgtaggaaatcggccaatcaaattacggaagagcacatggaagaacaggatagacttagaagctttggagaagggaaagacccaaccacagaagaaaatcaaactgcagaaaagaagtgttcttcacaaatgaaactgaaaaaatctgctcgttcatcgtctgtcagtatcgtttgggaaagctgtctgaagcattaacagttttacttaacgtcagatgtgtaggactgatggtcaccaagttcccggtgacactgtatacaatcgcagacgcgatgctatgttggtgattgaacaggtgtagccgaatagttggatccaataacttcacctgtagtgtaatggtccaattttatcatgggaactgtagttctaaatactccagtgaccagtgctattgtggtgaattattctgtgatctttatcc

SEQ ID NO: 35186 - DNA, 393 bp, Zea mays
  Clone ID: MRT4577_132090C.1
gtgtgctgggccttggaggaagggggccgagaccgggccttacttctgtagcgatactgtgaggcatcggaaggccagcctgttgtgtccgttttgaaggtcggtgggctagactggctggccttctaggggtgtggagacttcccaactctgcccttgtgctttcctggaatccccaatatgcccggaccccggtttactcctttgctgcgagcccttctctcccgtccagagttgctccgagcctatctgctcagtcctagcgattcctgtggggcttgggacgcgcggttcaagcaccccggaccatatggatgcagcacccatgggttctcgctccaatgcttctttcctccttggggcgtaactcataccctgggcacccctttccac

SEQ ID NO: 35187 - DNA, 1060 bp, Zea mays
  Clone ID: MRT4577_132091C.1
aaaaaaaaaaaaaaaaaaaaaaaaaaaaaaaaaccggttccccaattccatttctccatccatgacagctcgccatttccccacctgttcctacgctaccgccacctaaaaaaaattccaggcacctagtgcttcccattccaatcttgctcaaaggtgactcctttctgttccttttgttgcaattcttgcttcttctcttctccacaaaccaagaatctcttcaccggttatccgcaggtcatttcatttcggccggtgcctattttaggccgattggaaggaaagctggtctgtgttttgttttcctgctgcctcttgggcgagttgaatttgggcgcctcttgctccaggcagtattttatcgagctagagtctggtacccggcgattcttgcttggtccaggcgccaaggcgaggaattgggcctagctccagctcaaatctgtgccttgttgcagacagaaggatttctgcatgggcgaccataactaaggttggttcatctactctgtgtggtgaatcttatatacctgcatggttcgcccctgctttactttctggagatttattcggaatgttgacgacatctcggctggtgggtgattctcggtgcgtacacagacacatccctggagcctggaggcttgagctgatttggcgaggaggacagtgcaggagagagatgtctttcaggagcctgattcaggacatgaaggacgagttcgggagcatctcgcggcatagcctgcggtcccggtctcaccgctccgccgggaacgcggcgcgggcggcggccgcgggaccgtcggaggcgatggatcagagctgctggtcgcagctgccccccgagctcctgcgggaggtgctggtgaggatcgaggcatcggagagctggtggccagcgcgcaagaacgtggtgtcaggcgccggcgtctgccggacctggaggggcatcatgaaggaggccgtgcgcgtcccggaggtgtcagggaagctcacgttccccatctcacttaagcaggtttgtgctcttcggtcatcctcgttgtacaaatag

SEQ ID NO: 35188 - DNA, 285 bp, Zea mays
  unsure (1)..(285): unsure at all n locations
  Clone ID: MRT4577_132092C.1
aaatgaaggagctttgtaaatttttttaaaattatgaatcatatcaagtagttgtttacatttcttgaaaaaataggaactcgggcagcagaatcagattggcagaatctttagactacacaggcaataatcaagtctgctgttttgcctttcgtagtagaagtggttgtagtgtttagatatctgtttggtcttgcttcttgtattgcatttttttcaataaacaacaacaaaaaganaaacagaacacctgcagctgtaaaaaaaaaaagggggggccccccc

SEQ ID NO: 35189 - DNA, 272 bp, Zea mays
  Clone ID: MRT4577_132093C.1
cccaagacccccactttcccaagcagcgaaagcgccccaaacccgcgccgcgcagccgagcgcaaggaacttttagccacatgagctactacgggcagcagccccccgccggcgtcccgccgcagcaaggctacccgggcaaggacggctacccgccagcggggtacccgccggccggataccccccgccgacgcagggctaccctacgcagggctacccgccgaagcacgcgcggccgccgcctccacagcagcaacagagcagcgcgaac

SEQ ID NO: 35190 - DNA, 476 bp, Zea mays
  Clone ID: MRT4577_132094C.1
ccccaagccaaagccgggtcacacaaaagggaacacgttttcgcatcccatcagagttaacagttacagaggagcccaccccaaacgtttaaaaataaaaaaaaacctaaaaacggcccaaaatctattatctagggggaagaaaaaagggaaaattctctcaaaactaggggaaaccccagcattaaaattttaattaaggggaggggggccaaagtccaacccaccatatcgctagctaggggacaaaggggccccttttccggatcccccccggggccccggggagcacccccaccctgcccatggggagcaaggaccccccaaaacccgaaaggaaccccccctcggacggggcgtccctaaaggggaagacaagccccctggtctccccgttcctgagcagggccttgagggaggggaaaagccccccccgttccggaaccaggccgaattaggccgggccaaacccgggg

SEQ ID NO: 35191 - DNA, 313 bp, Zea mays
  unsure (1)..(313): unsure at all n locations
  Clone ID: MRT4577_132095C.1
ggcggacgcgagggcggacgcgagggcggacgcgagggcgccgcaggcggcccaggcccaaccgcagccacgggcgcagcagccgccgccgacnacaccnccagcggggcagagcctgtgtgattcgcagaggggccgcgaccggaacacgncccggcagttttttttttaccacaagccgacactgacgctggcccgatagaccggggcgcacgcaacgagagcctccgctacccggaccagttaggcaagaccaaggtgcacaccgagggctgcgcccacttcggccagcccaacccgcggagccctgcgc

SEQ ID NO: 35192 - DNA, 1661 bp, Zea mays
  Clone ID: MRT4577_132096C.1
cttggctcctcgaggttccggtgatatacaagtcctggctctgttcctggggaaaaagctcctctggattttaccttaaagactagtttgcagtttgtttcatcgtcatctgtgaagtggtgtcacaagctcaatacaagttttggcagaagtagcatcactggagccattggtcagagctgtcctcgtgggtgtcaaaatttagagtgctcaaagcttgagagcaaaaaggaatttctattctcaaaggctttacagtcatgggtatatccacaatcgctgttgccttcctctatcatatctgctatgctctcatcaactgcaggagaaagtgattttcttctcaaaagacatcaggactgggaagattcatttcagaatctttactacatgctccggaagaacatgttgaatatattctatgtttatacaacacaatttgttgctctcttcattagtggaagctgtttggagaaaaagcagtctagtaatgcctacttatcacaatctacacgtggcctacgctcattactacggaaacatggcgtttgcttttctatgcctctttgcagcactgaagtggagcaggctactgaggacgaccttattgaactttcagaaatcgaaaggcgcaatgtcggacaggcactccatttggatgctttatctgacgtggataacaccacgcagtcgctgctttcgtttactggcaacgagaacgttcatggcctatacgacgttctattgaattacaagtccttgctgaattcattatctgctgtggatgtcccagtcttgtattcaccccagccatttcaaaatggctgtctacacatcccagaggtgaagtgtagggagatgaggagagcagacatgtcatccggcgggttcgacacagaacagggatccgcatttgcgtcgacggcaggcaacgtatgctacagcatggaagtaaaggacgcggttctgccgccatgggtggtctctgggcccctccagctgctctgcgcccacctgtgcgccgccatgagcttggacgcgaccagctttgatctgacgatcgccacggagccgtcgtcgatgggcttgaacgtggctctcgactccatgggcaccaccaccacggatgtccagcctgaaggatccaccccctccagctgctctgcgcccacgacgcccttggtgggtgccgttcctgacgcggccctcgtccctgccctgcactccgcctcgctgcgccgcctcacctacacggacggcggcgggtacgttgcgcacacaaccgtgtgagcgcctctgagcttgagagcccggccctcctcggtatgcgcagcgcagcgcaggcttgttcttttgagaatttggagcctgccctggcctttgtcgtacaaggacgacgtgtcgttacacgcttggttgggttggatggtaactaaactatgaggccagacttcttctggtggtctggaaaaggaacacttatgcttgaactcggtgtgtgctttttgcctggtcgtactgtcgttcaaagttgggaccgttcttaccttgccgtgacaccgcctgttggtgtgagcccctgctgtttgaattctgaagacaaccatcatcgttttgcggttgacaacggacggtttcttgattattttcgttcccaaccc

SEQ ID NO: 35193 - DNA, 624 bp, Zea mays
  Clone ID: MRT4577_132097C.1
ccaacgaaaacagccataattattcccaaaaactcggaagcaaggggggggaattaacaactcttacaacatcgggggttgaaaaccccacaatacttcaaaacagacccccataacacgatagcgggagcaactctcggaaaatcccgggaaaagggcagcacactggcctgatgttgcgtcatcaaaaaacttctctagaactcgtcaccctcgtcgccatcctcgccctcatcaaattcagaaccgacctcctcgaagtccttctcgagggccgccaggtcctcacgggcctcaaaaaactcaccttcctccataccctcaccgacgtaccagggcacaaaggcacccttggggaacatgaggccaaactcggggccgatgcggaaaaacccccccacaacactgggggagttggaaatcatgcacacggaacgctgcaccttggccaggtccccaccaggcacaacgctaggaggctggtatttgatgccccacttgaagccagtcgggcaccaatccacaaactggagggggcgtttggtcttgatgggggccacagaagcattcacatccttggggaccacatcaccacggtacatgaggcagcaggccatgtacttg

SEQ ID NO: 35194 - DNA, 267 bp, Zea mays
  Clone ID: MRT4577_132098C.1
ggcatggtgaaagaaccagtcccgatgggactagggccatggggtgcggagggaggccgggcatgggacgacggggtctacactggcgtgaagcagatctacgtcatgagaggagcgtgcatcgggtcgatacagatcgagtatgacaggagcggccactccatctggtcttcaaggcacgggaacagcggccacatcacccacagggtgaagctggacttcccgcacgaggtgctgacgtgcgtgtacggctactacgacacgagc

SEQ ID NO: 35195 - DNA, 381 bp, Zea mays
  Clone ID: MRT4577_132099C.1
gtccttttttttttttttttttttttttttttttttttttttttttttttttttttttttaactaggaagggttatatcaggttagcccattttccaaaacatttagatttttgttttacaaaatttaacaaattttccacagaaaccaaaggaaaacacagggctagaaatggaaaacctaatacccggccgggtctgatagtttttgcttttcctatcatttttaggccaaaactgggagagcttaaaagatgatgatcctttttttatcccctttcttgacctgtttggcattcaaacattgttcaccatgaacatttttttctggtccatcacttgcatgcttgaaaaatccctgtaacaaaacattccttttccct

SEQ ID NO: 35196 - DNA, 1312 bp, Zea mays
  Clone ID: MRT4577_13209C.1
ccggccgggaagcctcacccggcggaaacctcttccgagttccaactcccaaccgcagcctcagccagcctcagcctcacacggtcgaagcagaacccgtgaacacctcaaacctcacggctcacgccaccgtcctccagccccgttctccggcgatcctgtcattccagacgcgtctccgcccctctcggtccaccaccccgacgccgccacatgtcgacgcagtccatttcgccggcctctgcgtccgcgcagttcacctacccggcggcagcggccccgtcttacttccccgtgcccttccacctccagaacgcgcaatacaccgcatggaccgcagccgcgccggcggtgcctgtgtacaacgccatctatcccatgccccaagtccagcaggcccaacagttgttccaaaaggactcgaagataattactcctgaagctctagctactgttaaggctgctattgcaaatagtgagaaagacaagaaggttgatgcaacaaaaaaggcagtgcctcgaaaggcagctgggcaaagttgggaggaccctaccttggctgattggcctgaaagtgctcaaggatgtgatgagcccaacagattgccacacgtgatttagatgatttccgtttgttctgcggtgatcttggaaatgaagtgaatgatgatgttcttgcaaaggcattctcaaaatatccatccttcaatatggccagggttatacgggacaagtggactggtaaaactaaaggatatggttttgttagttttgctgatgcgtctgatcttacttctgccttgaaagatatgaatggtaaatatgtaggaaatcggccaatcaaattacggaagagcacatggaagaacaggatagacttagaagctttggagaagggaaagacccaaccacagaagaaaatcaaactgcagaaaagaagtgttcttcacaaatgaaactgaaaaattctgctcgttcatcgtctgtcagtatcgtttgggaaagctgtctgaagcattaacagttttacttaacgtcagatgtgtaggactgatggtcaccaagttcccggtgacactgtatacaatcgcagacgcgatgctatgttggtgattgaacaggtgtagccgaatagttggatccaataacttcacctgtagtgtaatggtccaattttatcatgggaactgtagttctaaatactccagtgaccagtgctattgtggtgaattattctgtgatctttattcataaatattcgtgggtgttggcctgtttgaatcattccgcccatggtagctagctaagtgcc

SEQ ID NO: 35197 - DNA, 448 bp, Zea mays
  unsure (1)..(448): unsure at all n locations
  Clone ID: MRT4577_1320C.1
agaaccaagagtgcttaaagggacggacttcaattacaaatgcaaatactagagcagttcagcaagtgatgatggaaggaaacacccaaacattacccaggggggccaggacacaaacaaaggtttttcanccctacntctctgactcgacagccaaacagattcatgcaagcagatcagtattccttcgcctcgtgacctgcatcactgccgccctctgcggcgacctcctcgtagtccttctccagggcggccaggtcctcgcgtgcctaggagaactccccctcctccatgccctcgccgacgtaccagtgcacgaacgcgctgcaccttggcgaggtcggctacccggcaccactgtcngcgcctggtanttgatgccgcacttgaaccccgtcgggcaccaattcacgaactggatggtgcgcttcgtcttgatggtggccac

SEQ ID NO: 35198 - DNA, 191 bp, Zea mays
  Clone ID: MRT4577_132100C.1
ccgctaaaacaaaggggctttggaaattcagaggggccagcatcatacccaacccctgtccaagggctttttggggggccccaatcaaccaaaggggcggggatccatttatcaggctgggtcgacgttcattagcagtccaccaacttcggccccccccttttggcgcaaaactggaaggctcgcttctg

SEQ ID NO: 35199 - DNA, 613 bp, Zea mays
  Clone ID: MRT4577_132101C.1
ggggatgggcctcacttgggctataaaagggaagacacataatattacaaggcagactcaattcacagacccaacttggactctcagactctcagacatattcaatacaacatacaatgggggtagggttttacgccccggcggcctgaaccactctaaaccttcgtgtgctctcgtgttttcatccaccatctagcagacaagcaaaccgctaaggcccctcctcatcttaggatttaggacgggtgcattccgccacccggccggagaatttcctctccgacatatagatatagttcattaatcattagtttaactcataggccaagcaccccacatacatatagttcatcaattattccgtaaataatatgcatatagtttcgttttgctgaaatgtggtagctcgtttagcttgcgagctaactcgttaatgaatcgagctagctcgttaacgaatcgagctaggatgttacctcaactcgtgaaaaaaattaaacgagctaatctgagccaaaccgaactgaccataaatcaagtgagtcaacaagtcacttgcatttcgtccagccctacacccgaccggtttacagtgtgcccaaaccaggctgcc

SEQ ID NO: 35200 - DNA, 439 bp, Zea mays
  Clone ID: MRT4577_132102C.1
gaaagaactagaacaacacgtgtttctttcttaaaactgaaaccaataacccgcaaaagtacaaactgtctataagggctagtctagaaccacatttttccaaatgattttcattttctcaagaaaaaatgaattaattttccttgagaaaatgaaaaatccttttaaaaaatgagcttcctaaactagccctaagattttttccaatgtcttctaattggctcaaaagtacaaactttctataagattttttcccactgtctgctactaattggcaaccgcatgggaattaaatatgccatcatagattcaccatcgaaggattaattaacttgcaaccttttgcatctggaaaaaaggaaaattggtgaaaccgtaatcatgcggctatgatgcatcaagttggtagtagtagcttgttaagaacctaataataatt

SEQ ID NO: 35201 - DNA, 483 bp, Zea mays
  Clone ID: MRT4577_132103C.1
tacgctctgataccagctgtgacggaacctcccaagtaattaggcccacctacagttgtccttgtctaacagacctcagaccccctgtagatgttcctaagtcacttgacaggttcggtatctttccttaccttaccaggaacgtttcacccgtcttgtagacattacagaacatcggagataaagacatgcggaagcaattacataaacttacatttatttcaaaagtaagcttgagttatgttattacagaccagaactaaaagtgagtgcagagtagtaatattatacaaaccaaggaaggcacaaacacctcccgataagtttaataagcaaaagatcctaagtggaggaccgagtcctcccgcacttcaatcttgtttttcctcgtttggtaccaccttggagcaaaagcaacaaaagtttgtcgcttcctcacctaaaaacaacaaagggataaaccctgagtatggaatactcaac

SEQ ID NO: 35202 - DNA, 1995 bp, Zea mays
  Clone ID: MRT4577_132104C.1
atgggcaaggacaggaaaggtcggggttcgccgcgtcgcaccggcgacaagcaaaagcgtgagccaagtcctccctcggaggacttcgatgattccgagtactcagaggaggagttttcctccgagtccgagggatcgccgttcgtctttgcgcctaatgctgccggcatttttagaaataaccgccgagcgataactgatgacaccggcgttttagagcattttagaggtaaccgccgagtgacagatgatgacaccggtgtttcagagcaccacctcgttggtggcgcaagtctagagctgcgtcgcaggaggaaaatagagtaccttgacattcccctcaaggatagcatcaaggggtggcgcctcgagtggttcattgtagagaaccactgcaagtcccttccccctcggtcggggaggcagccagatgtccgtactccaaactgggtagaatctctgaccccttcagagataatggaggcaaaagtactgcttgccgaggtctgcttgttgaaagacagaggcctgactgctgaagctatggtcgctgattttgtcttcaagaatatccagcctttgaagaaaagggcgtacccggcttatctatacagtggcatcaatgattctacccgggccgcaaacaagagaatccccactgaagatctgcctcctgctagtgatggtagcctgggtcttagagtgcgaccctgtcctgaggacattgaggctctgattgcccctcttcggagtcttccaaatgatgagaggcagactcattttgagatgctagctagcacaaacgatgcagagatagatgatgtacttagtatgttggctggggaatcatctgactcgacccacaccgagccgatggctattatggctggacaagagcttggcaaagcggtggagattcggaagcctgaagttcgtgatgaagtatcagcagaggtccttcctgaggttgatgccaagggctgtgatcatgcacaagctgctatctatatatttgatgaagatgaagaagaagaagaggaagaagtcccgctgatccgtaagaacagccgacattacagaagtagtgagggggcccttgaggaagtcatccatgaggatatgctgtcagagccgactgccgatgacttgatggctgtttgttcagatgttccagacgctggactggaggtatcccgagcagtgtctcgttcgtcgtcgactttggagggcagtcttcaatgccaagacgctggtctgagtcgcccgactcccatggaggtgacagaggagccctcagccttagaggtggctgctgcagaagacccagccccgagggtggtgctgaaagttacccagccccgagggtgttgccgggctgagatcacccctgacaacgcccttcaaattgttcctgttgatcttccctcgtcaagccatgacatagctccccctgccttgggtctaccatcgttcctctccaatcttcagcttgactccgaaaggatggcacatgaggaggagaaacgagcacttgtagcctctcgtgataatctggacaggttatatcatgacgctagcaactccttgactattttggaaaggagccaccgcttcagtatgttggacctggaccatcatcgtcacgagctgcatgtatctcaggatgaagttcagcggcttggacaactgttatcagtcaaggatttgaccattaaagatcttcgtgcttcaaagaaactcgtcgcacaggggctagaaactgctcgactggctgtcaaagcctcagaggacaattgcgccgttctgaaggctcagcacgacaaggctatggacaaagccgttcatgcgaggtggatcttgatgaggaggcccggcatagtggttcctgacgacattgtcatcgacgtcaatgttgcgcctgatgctttgagtcgtccttcttcctcgattgctcctacaaaaaacattgccgacaaagatgtttcgatgcagtga

SEQ ID NO: 35203 - DNA, 325 bp, Zea mays
  Clone ID: MRT4577_132105C.1
cggacgcgtgggctagcaacatagaatgcacaatagtgtaccaacaatggcagccagaatattttgcctccttatgctccttggtatttctgcaagtgctgctacggcgaccagtactagctaccagggttaaaaaaaaagagtgagtcggcgcgacgtgcaaggcgcagcatgtgtactgtgcgcgtgcaaatccagaatgacgtagctctgacgtgggctcgcaatattctcgcgtgttcgttacaataatgataataactatgaggaataaatatgggaatgttgccagtgccagatagtacctgcccgggcggccgctcga

SEQ ID NO: 35204 - DNA, 1707 bp, Zea mays
  Clone ID: MRT4577_132106C.1
atggcgaacatgaccgtgggcacaacgccggcgcgggggcaccagagggcgcagaacgtgatggggtggcccaatggcagcggatctactcccgcgagcaatcgcgcgaagaccagggcaataagcaaagaaatagggggcgcggggagaggagttggggcaaaccaaggggtgtccagggctgctgacgatgaggcggaactcaccgaggcagcggacacggtgggggctcaacgacgatcgcagaacgggcgagaaaccacggcgagtggcggtggaacttcctggacaaccattggcgctgtagccgttactccgcatggcacaccggacagtccggtgaattatagcggagtggctccccaaatttccgaagttgagcagttcagagtggatctctctggtgcaccagacactgtccggtgcgccagaccagggcagccttcgcccaaggtcgggcgaggcgatgactcttccgaggtcgaggctgagtccgagccctggggtcgggcgaggcagagaccgtcttccgaggtcgaggttgagtccgagccctggggtcgggcgaggcggagaccgtcttccgaggtcgagattgagtctgagccctggggtcgggcgaggcggatagtatctttcgaggccgtggtgggggccgagccctggggtcgggcgaggcggagaccgtcttccgaggtcgaggttgagttcgagccctggggtcgggcgaggcggagcttcctatggcgcctgatgctagacttggctgttgtcagcctcaccctggcgggtggcacagcagtcggagcagggcaggtggcactgttttcctgtcaggttccgagttctcgggctggtatgttgacgctgtcaacggtttggccagagtcgggtttgcgagagcagcccccgagcctctgcacagagcgcgaggacggtcaaggactgactcggcttttatcatacgccccttcatcgcctttccgcaaggaggaggggggaaagcgccatgttgccctcggagggcgccgaacatggtgtctccaggtacctcaggagcgtagcccgtgtgacggaacctctcaagtaattaggcccacctacagttgtccttgtccaacagacatcagacaccctgtagatgttcctaagtcacttgacaagttcggtatctttccttaccttaccaggaacgtctcacccgtcttgcagacattacagaacatcggagataaagaaatgtggaagcgattacataaattacatttattttaaaagcaagcttaagttattttattacagaccagaactaaaagcgagtgcagagtagtaatattatacaaaccaagggaggcacaaactcctcccgataagtttaagcaaaagatcctatgtggaggaccaagtcctcccgctctccagtcttgtttttcttcatttgataccaccttggagcaaaagcaacaaaaatttgtcgcttcctcacctgagatgattacggaacaagcttcatacgggccagcaactccctagaatgttctagctatggtgtggtgaatttggtggctgtggtcatcacaaacacaggaagacagcgtacacagctcttgacagtgccaacttagtggcagcgggagaggagctttggcttgcaatacacatgaatccctcacaacactgcaagctttggctagaacaccattgaat

SEQ ID NO: 35205 - DNA, 332 bp, Zea mays
  Clone ID: MRT4577_132107C.1
tggctcactcgtacctagctgcccttgcagaatgcgcatgcccgtggctctgtacaccgcaagcctccgccgccacgcgcctacactggtgggcggcgcctgcgcagcaggtggggaagccagggcagatgatctcgcagctggcgcagaccgcggggttctggcgaggcccgggccgtgtacgcgcgtgcacacgaagagggaggggaagcgcacaaggggctatgggaccgtgacgtggaccccagcacggcggacaggatattacagggacggaaggactggctggtccgcaaggcgcacgctgaagatgcttatcgtatcacgtgaac

SEQ ID NO: 35206 - DNA, 531 bp, Zea mays
  Clone ID: MRT4577_132108C.1
tgccttcagtaagggaaagattgctggttacaaactactggaggtcattcaccagaaaccctccatagtcaatgatcataaggatggaaaatggttggcagaggtccatggaaacatagaattcaaggaagttactttcagttatccatcaagccctgatgttataatctttcgggagttctctattttcttccctgctggtaaaacagttgcagttgttggagggagtgggtctggaaagagcactgttgtggctttgataaaaaggttctatgatcctaatgaaggccaggttttgctagacaatgttgacataaagacactccagctgaggtggcttagagaacagattggtctggtaaaccaagaacctgctctttttgcaacaacaatcctcgagaatatactgtatggaaagccagatgcaactattgcagaagttgaggctgcagcgactgcatccaatgcacatagtttcatatctcttcttccgaatggttacaacacaatggcaggtgagagaggaatcca

SEQ ID NO: 35207 - DNA, 367 bp, Zea mays
  unsure (1)..(367): unsure at all n locations
  Clone ID: MRT4577_132109C.1
attcggctcgagctgcgatccattttcgtttttgcttcgagctccgctccggtgaggggcgctccattatggcgattgcgcaagctgtgcctcgttctgccatgtgcttgtcttgcctgcaccaacggcatgtaaccagtcattagttggtgaaatcctacactcccctgcagaccacgttagcctttaccttgccgtcttcgatacgcgccgagagcccgcgagcgtttggggagttttggagcggaggaggcaagggaggacagacagggaagatcggttgtggaaatggatgngggtggaatactagacgtacaaaatgctgatattgtgtccacacgggtattcgcagtccataaacctgaac

SEQ ID NO: 35208 - DNA, 261 bp, Zea mays
  Clone ID: MRT4577_13210C.1
atactcgcaataagtgcgggtgtcctgattgaatttagcgagcgatttttctgatcagcctttttttttggtgggaaatcgaccgttttggaggtagtacgaatgctagctgccgccgatcgaactctgctggaaaatcgtgtggaatctagtaactgaatctggtggggagaatctcccggtcgttcatgtgaaactccggccggcgtcggccgtatgcccgtatatacacttgcaaaagcaggggaaaaaaatgtttgt

SEQ ID NO: 35209 - DNA, 196 bp, Zea mays
  Clone ID: MRT4577_132110C.1
cccacgcgtccgcaacttgctttgacaaaccctgcagcgttctaccaacaacccatcattgggggggccctctcttagacgtcttatgagttatacctcaataataacctttttcggctgacgtttgtggcttaccaaacataatatactccctttctgaacctgtatgatgaggatggagatgctgcttcataca

SEQ ID NO: 35210 - DNA, 866 bp, Zea mays
  Clone ID: MRT4577_132111C.1
cctcgaggccggccgggccggccaagccgcgggtcgtcacgctgcaggtgatcgagaaggtgtccaccgtcgtggaggtgctgaggtccacgccgcacaacgggttccccgtgctggactggccgcggccaggcgtatcggagctccacgggctggtgctccggtcccacctgatggccgtgctcaagaagcggtggttcctgacggagaaaaggaggacggaggaatgggaggcccgtgagaggttctcgtcgacggagctcgcggagaagtccgggagtatcgacgaggtggcggtgcagctgacgccggaggagctggacatgtacattgacctccacccgttcaccaacaccacgccgtacaccgtcgtggagaccatgtcggtggccaaggccgtggtgctcttccgcacctgcgcgctccggcacatgcttatcatcccaaagttccaagggcctgagatagctccaatcgtggggatcctaacgaggcaggacctgagggcacacaacatccttggtgcattccctcatttggcaaacaaaaggaaagtacactaagctctgtcgcgccatttttggtaaatttaatgttctctgcatccaaagaaaaaggtccagctgttttgtttccccatgttctatttttctctgtaagtagattgaggatttaatttcttgtctcatgagattgtgtgaataatagcttcccatgtaaaatcacatcttcaccttcacttttctgctcgcacttcgatccttgtaatcaaaaggggcaaacaaaacaactacgaaatatacattttttgggagatgtttcgaattgctattacttgattaaaaaaaaaaaaaaaaaagtatgag

SEQ ID NO: 35211 - DNA, 242 bp, Zea mays
  Clone ID: MRT4577_132112C.1
agggggttgggtttttctttagtgggggtaggcttttcttctttttctttttttttttttatatcaggctaaaactcaacccttttttttaaaaaaacctttaatctttcacaactaaaacttcctttattaagacctccttcgttttttatactcaaaccaaacttttcacactccaaccttttaaaaaccttttttagaataaaaagggtttcttcattggcccaccttttctggaaaaa

SEQ ID NO: 35212 - DNA, 283 bp, Zea mays
  unsure (1)..(283): unsure at all n locations
  Clone ID: MRT4577_132113C.1
gcnatacactacgcgtctgataccataanancattctcancagtcacccacatctgccgagacgtnnactacggctgactaatccgatacctacacgccagcgggnntcgntatttttcatctgacctattcctcnatgtgggacgaggactatagtatggatcctntcactttcctagaaacctgaaacattgggancatccnactanttgcagtcatagcaactgcntncatgggctatgtactcccatgaggacaatatcattctgaggagctacagtaa

SEQ ID NO: 35213 - DNA, 344 bp, Zea mays
  Clone ID: MRT4577_132114C.1
agcgaggacatgttcattcaattttattgcagcggcactaaaaaattcactggacaagggggggggaccgggggacactttggaattccacaaatgtttttttttattaccacaacggttgtcgggggttagcggccggccgggaggaaaaaacaccgatcgaagtcgaacacagacgagcatgggaacccattttactttattgcttggccggggccggcgacgtcccaccccaccgatgatcctatacagggcactcactggtgggctccggggggggggggtgcctgccccaccctcggggacccctggcgcttgacgagcttggtgaaagaggggccccc

SEQ ID NO: 35214 - DNA, 383 bp, Zea mays
  Clone ID: MRT4577_132115C.1
taattatcgcctcgggaaggcagagcacttttgttgcctagagactagactcgccgctgatccatcagctctgacaatgagagcctgagtaagctgatgcattgcagtgcaaccccgcgagcctagagctgatagctgggcctttaccacagttcccagacatggagtacgaagaccgctgccacaaggaccaggagcccaagtacgactgcctgatcttcgacctcgacgacaccctgtatacgctgagcgccgggaacgcaggccatgccaagaagaacattgaagataacaaggaagagaagctgggtattgacgagaccaagatcgagaacctgggcaaactgctgcacaagaacaacggcaccacaatggctggactc

SEQ ID NO: 35215 - DNA, 642 bp, Zea mays
  unsure (1)..(642): unsure at all n locations
  Clone ID: MRT4577_132116C.1
ggccgggctccctatcgtgtgtctcctctcgccggctttaaaaacgcacacaaggcgctaaaacgcctctgccaccgggtccacctcaggctccccatatncgcgggttccccttaccctttttcccgggcattccttncccgcgggggtgnnnnnnnnnnnnnnnnnnnnnncnnncnnnnccgcggggggggggggggggcgggggcgcggggggggggggggggngggggggngcgctttttgggggggggtggggttttcgggggggttcgccctttggggcgacccctttttggggggccccgggggggggcgcccccggggggggggggggggccgacggggggggggtgatgcccccgggggggggggaggtagggggggggggggggggtttttgtgcgggagagaggggggggggggggggtgggttttttttgcgggggcttgggcgggggggaggggggatttggtttccgggggggggggggggggggggggggcctccctctccctctntggnggnccgggggcccccccccggggggggggggggggtggtttnttccccccctcctctggtggggtgtgggntgnngttagtagaggcccgccggggggggggggggggggtttttt

SEQ ID NO: 35216 - DNA, 643 bp, Zea mays
  Clone ID: MRT4577_132117C.1
atacggccccggaaaaaccccaaaaaaggcggcggaaaggggagaagggaagaacatggacgggcacgtcggccagttcttccagtcggtcagctcgatcttccgcgggagcgacaccctccccgtctgcgaccgcgacatcatcgccggttgtgagacagaggttgctgaggctgcaaatgaagaacagaagaacgacagcctcatgaggctgtcatgggcgcttgttcactctaggcagcccgaggatgtcaaccgtggcattggaatgctcgaagcttctttcggcaagtctaacagtccgctacaaacaagggagaagctctatttgttggccgttggacactacagaaatggggattacacaagaagccgtgagcttctggaaagatgcttagaggttcaacctgactggaggcaagctcttactttggaaaggctccttgaagagaaaaccaaaagagatggtatgattggcatggccattgtgaccggcgcctttggacttgtggggcttgttgctggtggaatcatagctgctgcttcatcgtccaggaagaaatgaggctccggtatgcggtgaataagatgattagatgagcaagaacttgatgtgaagttgcgtaatcttaccttggcactc

SEQ ID NO: 35217 - DNA, 402 bp, Zea mays
  Clone ID: MRT4577_132118C.1
aattcggcacgagggcccagcagcctgcatccacccctcttaccgaccagtccgctccactcctgtcctagaactgcaggcggcacatactggccccgcttgtcagatccaatgctatcaccgctggatcacctcacagaacgctcccttctattcgtagtaacctggcgtgcagcatggtgctcctgagcaccgccgcccactaccatagacagggcgccctgacaccagatcacggcgttgaggtggtacggagctgtggatgcggtgccctgccggatccagctgatcgcagaggcttccttctctaagctcttcacagacttcgccagaccagtcgacacgtgtgctcatgagcagcagaagtagcctcccatcttgtccacgtcgcccgaactcgga

SEQ ID NO: 35218 - DNA, 485 bp, Zea mays
  Clone ID: MRT4577_132119C.1
cattgggacctcgaggcggcgggatagcatccttcggtttggagataaaagaggcatacgagcaggcaacggcatgcacagcagccctcagtcatgctgcgacatggttcgtcgcttctcttgcttgacagtgtctgctgcggcgggacacgccgacaggcctagctattgccgctacaacgacgacgaccacgatattcaactgcacagcagtttcgtcgctatcgtctgagcgcgcaattgctagaaactacgactatcgaggatgtcttcctgcgggggtgggggtgctaccacgagcaggacaagtgctccgacgattggcaagattgacaggcggccgctggcgagaacctcttggtatgcatcgacctgatacgaaggatgactcaggcctcggttggcagaccgagggcgggcgagtgctgcgacagcgtgccctgcgaaagggactacatcccctagtgcatgtgaatgaacaaggt

SEQ ID NO: 35219 - DNA, 2132 bp, Zea mays
  Clone ID: MRT4577_13211C.1
cttccgagttccaactcccaaccgcagcctccagcctcagcctcacacggccgaagcagaacccgtgaacacctcaaacctcacggctcacgccaccgtcctccagccccgttctccggcgatcctgtcattccagacgcgtctccgcccctctcggtccaccaccccgacgccgccacatgtcgacgcagtccatttcgccggcctctgcgtccgcgcagttcacctacccggcggcagcggccccgtcttacttccccgtgcccttccacctccagaacgcgcaatacaccgcatggaccgcagccgcgccggcggtgcctgtgtacaacgccatctatcccatgccccaagtccagcaggcccaacagttgttccaaaaggactcgaagataattactcctgaagctctagctactgttaaggctgctattgcaaatagtgagaaagacaagaaggttgatgcaacaaaaaaggcagtgcctcgaaaggcagctgggcaaagttgggaggaccctaccttggctgattggcctgaaagtaagatatctaattctctattatcttttttcacaatgttttgcaaatgctccaattctgtgggtatggagtccttaacatggcaacgttgtggtattttagctcttattgctcgttgccttgcagacaacaaccatgagaaaatgtcagtcttacaggcaaggtctaatgctctatctattatgctttgatctgaaacaaattgctcttttttccctttctctaaaggtgctcaaggatgtgatgagcccaacagattgccacacgtgatttaggtgggcttgcagatgattactgaacgttttcaaagtacctaattcctgtttacctgatttgtcacatgtagttgaatattgtttcatgtacctttattaatcttgggcatgcttatgctgttgtatgaaatgctatattcttcttgtgatgtttgatgcaaacgtatgtgtagggtttgaatttctttgtgcattacaggcacacaccccaactgctatgttccctccattacttagttcgccataagaatggcggcatacttgttctgtcaattgttggtttgttggctgtaggaacgttgtcttggctgctttcttcattgctcctcccctcttcaatggttgatttaagtttgaatgatgtccatccacctaccaatatttatgtaatgtccacaatttctaagatgtgccatatatgtctttttcataaaaaatcactattgttaaatttgcaccgttttggtcaatgaatctctttaagtatttaatagttattctataattgttttgctagcacttacctgcttggtggccacaacttcaagttttgagttgcactactaattcatttgtgcattgataatgtgattctaccttgtagtcttcctgatgacaattcagttagtttctttaaggatacttcaagtaccctcattcacaattgcttgatctctcgcctacagatgatttccgtttgttctgcggtgatcttggaaatgaagtgaatgatgatgttcttgcaaaggcattctcaaaatatccatccttcaatatggccagggttatacgggacaagtggactggtaaaactaaaggatatggttttgttagttttgctgatgcgtctgatcttacttctgccttgaaagatatgaatggtaaatatgtaggaaatcggccaatcaaattacggaagagcacatggaagaacaggatagacttagaagctttggagaagggaaagacccaaccacagaagaaaatcaaactgcagaaaagaagtgttcttcacaaatgaatctgaaaaattctgctcgttcatcgtctgtcagtatcgtttgggaaagctgtctgaagcattaacagttttacttaacgtcagatgtgtaggactgatggtcaccaagttcccggtgacactgtatacaatcgcagacgcgatgctatgttggtgattgaacaggtgtagccgaatagttggatccaataacttcacctgtagtgtaatggtccaattttatcatgggaactgtagttctaaatactccagtgaccagtgctattgtggtgaattattctgtgatctttattcat

SEQ ID NO: 35220 - DNA, 2499 bp, Zea mays
  Clone ID: MRT4577_132120C.1
atggacttctctctcctggactttcggccgagcctggccttcgaggactccctcagggatgccctggcatcctcagtttgccctgcccgcccaagtcttcggtcgtccttctggttggtggtctcctttggcagatacatcttcaagttgaattcggtctcggttggtcatcttcttcaggttgcccttggtgggttcgccgcgggctttgaggtgcttcagctggctgaccgggtttttcggttttcggtctcttcgatggccatgggttttcatatttacaactcaggttgcattgagcgtaaggaattcatggctttcttcaacctttggaatcgtggtggacccaattggaagcatgaattcaagcttttttcggatgaggaagcggcttcctggttgaaggtccggggcaggaagaatccttcctatgcggatattgttaagctccctctcaccggtgccaatgttgttccgattcgcaacattatcaagtcccctagtggtgatcagcattcgactcgggctggatcttcggtgttcaatcgtttgaaccctcctttccataatcatgctcagtccctgacgctttctttgggcgtcacctcaccaaaaccccaacctgctccgtcttcgtccgctggttggcgatcctcagttcctgctctgatggcgtataggcgcgttgatcctgaaccctttctcccaccaggcttcagcgcctcgatggtccttcaccgggaaattatggccaggtcagttactaggcgcctcccgccattgcatgaggactgggctattatcagcattcaacctttacctgaccatgagattactttcccggtggtgagggatgtggttagagaataccttgtggagcacagacgacttggggtgcgtgatatccagcggtcgcacctgggtcaggttctggttcagtttagcagcgtgcttgaaagagacaatcttgtcctgctcggtccgcaacaataccttgatgcttccttcactactcagtggaataacgatgcttggaatcatagagcccttttctttaatcgggaatgttggcttatgttgttgggattccccctggattaccgttcatcagaatacttgcaggcggctattggctcttttggcagattgatcttgtgggaagaggacagacgcaatgtctacaggactctgctcagggttcgggtcacgtctctagaggaggtccctcagttcattgttttctcagaagctgatggctttattggtgactcgtggacagtgcagtgtgagataatccaacaaactttgctggggggtcagcctcaagatgaggatccggtgccagtggtccctgaggatggtcagcagctccctcttgagttttttggtttgggtcaacctgtgccggctgtgggctgggatcttaatttcccgccagaagacaatgtccaagcccagccagcagacaacattcaaggagattgggaccaatggattgttaatgatccgcctgtgcagcagcctcatctggacctgccacctgacgagcaacagatagttcttctggtcacattcatggtgctccgctgcagaatgggcagattcagaatgggcagattcctgatgatctggtggctgtggggccggtgcccaactttaatgcccccgccccctgccttgggcgacatccctatgattggaccccaggaggttgatggcccaccaattcagggtgttctgcatgtgcctggggatattgctatccctgttgctcagtcggtggaacctaacgttaatggccacaacaatgtgatgttgaactttatgttttcgcaagattggcagccggaccctgttttgctgagtcacttggaaaggaaaaggaatgcccagttctataggatctgggctaactattttgccccagctggtaattcggtgacctcggtgcaggttcccaagaaatgggcaccctttttcctatccaacttgctgcatgaagattcttttagttggtcaaaatctttcttgtcttcagatattccttctgctctgatggagccagagactgagacacattcctttgtcatccccaggaagtgccatgatggcaagttccttgattcggtcctttctggggaatctgctgacgacgcttctgttccctcagacccggcctcctccccaccaaaacatgatgttgtggaatctgacctgaggagaagcaagaggctccgtgacgcccgggctgggttcagacagggttcatgccagaagaagaactgtttgatgtgtcaacacaagtttgagggtcccccctccctatctgctaaaactatcagacgcttaggagagagcttttgcaatctgtcagaagaggagttggctgacaaagctctgaagaaaaagaagaacccacctggctgtgttggctctaataagtcagggaaaaaagataagggggataagaaacaagactcttcagatgatgacaactga

SEQ ID NO: 35221 - DNA, 299 bp, Zea mays
  Clone ID: MRT4577_132121C.1
tcgtccactctgagggtgccgcctgggcggaaggatgattaatgtaagcgcccaagtggcgttgacggaaattcacgaatgatataaggaggtatccttatgaaaatggtcatggaacaggcaaaggatctattttgcaaggaatgtctgctatgagtggtcagtgttgctcttctatgactacaagaaggaaggatcatcatggcgcagtatgaggatagaactatgtacgaaccagccatactggttacaaataacgctgactcggagtgatacattgtaaaagaagcataggcatc

SEQ ID NO: 35222 - DNA, 385 bp, Zea mays
  Clone ID: MRT4577_132122C.1
agcagtgctaacaacgcagagtactttttttttttttttttttttttttttctttttttttttttttttttttttttttttttttttttttttttttttttttttttttttggccacaaaggaagacgttccacaacaaaaaaaaaccctttgggccaaaaccctaaataacgggggcacgatcccttaaagcaggcaggggcccaaagggatgggtaatttggccggccttatcccacagggcaatgccaaaaacccccaaacccctggaattaagccaggcagaggggggcccacaacaagggccccccggaaaaacgcccccccccctcggccccgccccccaggggacaatccccgggaaccctggggggttcccacgggt

SEQ ID NO: 35223 - DNA, 1211 bp, Zea mays
  Clone ID: MRT4577_132123C.1
cttcctctggtctttgggtacctcgaggccggccgggcacttcctcttctgcccctccaacctctcctcttcctctggtctctggacaaccaagccagagaggagcagccagcgacaacctcctctcctctcctcccctcttattccgcgcccagcagcgaggcatggtggagaaggcgaggaccatggcgcgcaggctggagatcccccagtggaaggccgacggcctgccgtcgccgacgagcccgctggaccgcgcgtcggcgtcgccccgtgggtggcgccaccgcgacgccgtaggaggaggcgtggggctcgggatcctggcggcgctcgaggccgagggcccgccgcagcccgcgccgagggtgtccatcccgcggcgcgcggcgcggctggaggtgtcggagctcgggtgcagcgggcgctgcgccaccagcctgtgcggcggcgtcggcccggcccccgcccggcccggcggcggcgcggcgttccgcgtcgcggagttcctgtcgtgctgcgacatgtgccggcgggcgctggacgggagggacatcttcatgtaccgcggggagaaagccttctgcagcatggagtgccggtaccacgccatggtgagcgacgagttccagcaggagaaggagcgcaagcgccgcgccgccgtgtcccggacttcggccgcggagatggccgggtcgccgtgcagcggcggcggcggcggcgggcagatcttcttcaccaccggcatcgtcgccgcctgatgggcgggcgggcgggcggatacggatccgtcttctctggtctagtgatacaaaacaaaagaaaaaatatccagctagaggaaccggcggccgctgtaacataaacctgccaagaaaaaaagaaccaagaggagaaataagaacggatgggtgcgtgtagagcagagaaatgggcgggggagaattttgctcgtcctctcctcttcggtagaggaggaaccgaggcagggagggtttatttcatctgtggatttttttttgtattattgttagtaaattatagtagtacccctattatgacgatgatgatgggcgggatgagatgttctgtagcagcagcagggaagggggatgatgtgacaagttttccaaggattgttgcttcccttttgtttctcctctagtcctctgctctgccaagggaataaaactcctcgcttgttcaactcc

SEQ ID NO: 35224 - DNA, 289 bp, Zea mays
  unsure (1)..(289): unsure at all n locations
  Clone ID: MRT4577_132124C.1
ttcataatcaacgaccacgccnccaccaagagcgggtttttaacaacttagggggccttacaaaccgcgatcctcaacactttgaaccaccacaactcggtgatgccaaacaaccacctcatcaacaagctcctttcgagcaatgacaagatcaacttcttcaccattacccggtactctctcagaacgatcctgaacctaaacggctatgacttaatcatgctcataccgctgtccatcgaactcagcatatccgaccccaaactaacacagctctgcttctacaaca

SEQ ID NO: 35225 - DNA, 166 bp, Zea mays
  Clone ID: MRT4577_132125C.1
agctcgtaagcaatcaccactggcgatccatgaacgtctaaccatggctccactgatccatactgattgcacgcaggctaatccacaaaaaccacgccctccttctaatatcagaacgcaaactttaccaactaatgcccctgaccaaactaatccccaccagatt

SEQ ID NO: 35226 - DNA, 352 bp, Zea mays
  Clone ID: MRT4577_132126C.1
tcccacgcgtccgcttaccttatcctccctctacgtttctcattcagcttcttgaaattctgcggggttcttattaacaagttatcggatctacatatcctcatcacatgtttattaccgctgcttcatcaactgcctcacctctaccacttactaccactctcttcacaacaccttcagcacctacttctagatcctctaatccaatatcatcctctattcttatacccatatctccctcaacttcagcttcatcaccttctccactgaggatgcaatacttaacgccatctaatgcattaactgcaaataactttacttcctcaacatcaccatcaactatgcccaatcc

SEQ ID NO: 35227 - DNA, 305 bp, Zea mays
  Clone ID: MRT4577_132127C.1
ctaaaacccaagcgaacagacttgcgagagggtaaggaaaggaatgtgtagcggtaaaattgaatgcctcacattccataaatttcgatattacaatacacatatttggtgatagcatccactctgaggttaaaaggcagttgcttcttccgactcaacatatgtccactgactgcacaggagctgtatcctctgctctgatgatacagaccggaaattctcacgaacgcctacttattacatgcacatgcttagagccttgttggctggtaggtgaactctcagacatagcggccacaggaacc

SEQ ID NO: 35228 - DNA, 1264 bp, Zea mays
  unsure (1)..(1264): unsure at all n locations
  Clone ID: MRT4577_132128C.1
ggtgggttctttgcgccgctgccggcctcgggcttcaacgacgccgggatgagctgggacgacgaggacgagatcgaccaaagcgtcgacgcctcctcgatggccatctcggcctccatggagaatgctgcgggcgcggtggcgggggcaagtggcgccggcggtggcagcgggagaggcaagaagaaagggatgccggccaagaacctcatggcggagcgccggcgtcgcaagaagctcaatgaccgcctctacatgctgcgctcggtggtgccgaagatcagcaagatggatagggcttctatccttggcgacgcaattgagtatctgaaggagctcctgcagaggatcagcgatcttcacaatgaacttgagtcagctccgagctcttcgcttgttggaccaacatcagctagcttcaacccatcaacaccgacattgcagacatttcctggccaggtcaaggaagaactttgcccgggctcattcccaagccctactggacaacaagccacagtcgaagtcaggatgagggaagggcatgcagtcaatatccacatgttctgtgcgcgtaggccaggcatcctgctgtcgacaatgacggccctcgacagcctaggcctcgacatcgagcaggcggtcatcagctgcttcaatggctttgcgatggacgtgttccgagctgagtgcgcggatggtcctggaatggtgcctgaagaaattaaggccgtgctgatgcacaccgccggcctccacaacgcaatgtagccggtccgaaaacgggccaccgccaggatgacgacgatcctcctcctttctactaagggcttcggttcggaagcggcataagattaagctgtggtggccattggttttctggggcaagtgatgaattttaagatgatgaggctcgccatctcgggcatgaggcatgagtgatgatgtaactatgggattcttttttttcttctcattagcctaatgtcggattttctcctctctgatacacttgtggtgtaatagaatctatgctgcgtgttgaacaatatatggtggtgaatggtgatgcggtagctagcatcaaactcagtgcctgttggtcagagatcgatggtgcaaagagagacgagttcattcatcagcgtccagcaatgattttgactggctatgggtccgtccgtccttgattcgaatcaaatgaattgaatcctctggcttcttgttatttaaaagttgtgggntgttgggggtattaatattnggg

SEQ ID NO: 35229 - DNA, 357 bp, Zea mays
  Clone ID: MRT4577_132129C.1
cttgcaaaaccgtatttgcgatccacacctagcaggcgaggttagcactcttcctggggacatggatgactaggagcacgatgtgttcagacataagatttaagttgacggcgaggacgtattcatggatgccgacgactatgctacctaactgcacgaacttgtctatatgaaacacctgctcaaggatatggatgaggaggtcgacagactacgtgagatgcacgccaagggtgcctaggagataccaggtgtacattagtatgcaagcacatgtgtgtacagtgtagagatggaatctgggccagcatcattggaaatgttgtctatgcgtgcactttagaagatatgcagaag

SEQ ID NO: 35230 - DNA, 621 bp, Zea mays
  unsure (1)..(621): unsure at all n locations
  Clone ID: MRT4577_13212C.1
aacaaagctgtggtttttttcccaaacgtttttgggtgggggagaggggaaatacagagtcacgttacggttccaaatcaaccgggaataaaaaggggaaaaaacaatgcacgcctgatgacacctgcccaccgattgttggcaccatgccgtccggtaaacgacaggagatgagccgacacatacgctttgttgaaagaacgactacttttttagacgangcatgcgaangnacatacaggaacagacaggctatgaccacccccccatgcgggaacaacggcaaaaagcnagcgaggggagcgaaannccaaaccgacgaccaaagactgggcaagcaccaggaacaacgagcaggcacggggcggctgcacgaagggctgcgccacgaagcggcgcnggaacggcccggcggccgncgggggcaggncgnccgggaagaacacccccnggggcaccncgaaggacgccaggcnccgccggcagggcgccagcacccccnccgcccgcagcgccgacccgncccgcgggaccaccgcacagacgaacnccnccccgnacggggggncaggcaccccgaacgacaccgccggcgccacaccgggcaggccnagcagcacg

SEQ ID NO: 35231 - DNA, 337 bp, Zea mays
  Clone ID: MRT4577_132130C.1
tctagcagcttctgcttgctttgtgggggaaggagagagagtgagagagagatctagtcgagaggctagtaggtggtcctcgaacgaagatgttggcggtgctcaccggtcaggtggtggaggtgccggcggtgctggtggcggcgggcagccggacgccgtcgcccaagacgaaggcgtcgcagctcgtggggcgcttcctggtcgactccgagccggtcgtgttcgtgcatctggttgaccacggtcaccttgtctacttccacacctaccaggcgcttttccgtcccaggtcgttcgtggccaaggccttggttgtttctgcctgttcgacggg

SEQ ID NO: 35232 - DNA, 138 bp, Zea mays
  Clone ID: MRT4577_132131C.1
cattgtcgttttgctatggaggaggagtacgcggccgtgttgtccaaccacacctgggacctggtgccgttttcatcaggcaccaacgtggttaccgtcaagtgtctatttattcacatgcttacctttgatgattca

SEQ ID NO: 35233 - DNA, 1463 bp, Zea mays
  Clone ID: MRT4577_132132C.1
acagctccctcgagcaaccgggcgtgtgccgcgagcagactactggagggctttcaccatttcgtttttcgttcagtctgcctgaaagctctgcccccttcgttgccgcttgcccgcttgtctatataaagctggaagctctgctcctcccgccatcccacatccatctccacctccctcatacaacgccgcgcgtgccctagtggtagcaccagctgcgggcctgtggcaacagtgatggccaatgccactgtccccgagttgcagccgcaggtgcaagcggcgggtggccgcaaggtggtggacgaggtgtccggctggctgcgcgttctggacgacggcagcgtcgaccgcacgtggaccggcccacccgaggtcctcccgatgatgcagcccgtggcgccgtacgacgtgccccgcgacgggcacacgctgcacgacctcccaggggagcccaatttccggatctacctccccgaggtcgacgacgaccgcaagggcgggcgcctgcccgtcatcgtgcacttccacggcggcggcttctgcttctcccacccgtcctggctcatgtaccaccagttctactcgcgtctcgcgtgcgccgtccctgccgtggtcgtctctgtcgagctcccgctcgcgcccgagcgacgcctgccagcgcacatcgacacggccgtcgccgcggtccgccggctccgctgcatcgcgctgtcggaggacggagctcttggtgacaaggcagctaagctcctccgtgaggccgccgacgtctcccgggtgttcctcgtcggcgacagctctggcgcgaacgtcagccacttcaccgccgcgcgtgtgggccaggacggcgctggcgtctgggcgcccctgcgcgtcgccgggtgcgttctgatccaaccgggattcgtgcgcgcaacaaggagccggtcggagctggaggtgggagagtcggtgttcttcacgctggacatgctggacaagtgccaggccatggcgctgcctgttggcgccaccaaggagcacccgttctcgtgccccatgggtccgcaggcgccgcccctggagtccgtgccgctcccgccgatgctggtggccgtcggcgagaaggacctcgtccgcgacacaaacctcgagtactgtgacgccctgcgcgccgccggtaaggaggtggaggtgttggtcagccgcggcatgagccatgcgttctacctcaacaagttcgccgttgacatggaccccagcacaggagagcgggcgcaggagctgattgacgccatcgtgagcttcatcgcttcccactgaaggctgaagtgctagaatgtaatttgcctgtgatatgcctgtgatgcgtgtctgtccaccaaggaggttaggaggagcacccgttcacgtctcgcctgcacatgtaacttgcgtttgcccctagtacccatataaatataacttcctccgttcacctc

SEQ ID NO: 35234 - DNA, 310 bp, Zea mays
  Clone ID: MRT4577_132133C.1
aaattaataaacctctttttattattttatttttatgaaaaaaacattcacggatctttcgaattggtagaggaggagaaaatatctacagcgggtgtttgaatgcactagtgcttaaaaacattgttccaagggctccatagcccttaaaagagcctataaaacacctgctcatgaagtaagccctagttagtaagagtggtatccttacaattacaggtgagcgaactttagttgctgcaaagatgatgggaagatatactctatttctgaggggcgattccaagatcactggatttatggacataaa

SEQ ID NO: 35235 - DNA, 1957 bp, Zea mays
  Clone ID: MRT4577_132134C.1
gggtacctcgaggccggccgggaaacgccgggagccaccgcgatgtcgcccaagccggcgaagccgacacccgccaccgagttcgagtactgcgagctgtgccgccatcaccacgaccatggccggcgccatcgctacatcgtcaagcacaggagaaatctcgacgccgcgctcacctgcttccgctccaagctctccgacctccgccgcgccttcctccccggctccccctcttcccagccgccgcggacccgtctctggtgccccttctgctccattgacctcgtcgacctcgacagccgctccgctggtaacaatgccatttaccatatggcaagcagtgagcacctgaagggtgtgaaggatttcctgtggaagcacgggggacggatggatcaggtggtctcgcttaggatttcagaggatgtgcttgccaagtgggagaaaggccctgaatgcttgagcacaggaacgaagaaggggactgaagagctgattggaccatctctgaagcagataaaagcaatggggcatatggctctattagtacagcgtgtcatggagcttccagttctggaagtgcttcacattctgctccatatggaactgtcggcctgcccatcacaccttggggatcggccgaaacacataagctgcagggtgcactgtctacaaactggtttcacagcagtggtactgaaacaaaaggccatcagtctactgtctttgtgaatggcgcaagccaatcactttcttgttctgatcatatgttacctttgcgggttcaacaaagtcacactggaggaaatttgagcaatggctcaaaagcaaatgtgcatacgggtgctcctcctccctggttaaaagctaacgaacacgatccaaagaatttgtcactcaaaagctgtggtctttcttcccggaaagggaaattgaggaaactcaatccaaacagggttggtgctgcatgggcagaaagaagaagagctgagatggaaatggagaagcaaggtgaaattgttccagcaacatctgattctagttggctgcctaattttggtagtgtctggcaatctggcacaaggaaggaatcaaggaaagaatttgagaaaagccacaagattcatgacacgaagagcgaccatgacttatccttggagataaaaccatatatcagcaaacggatgcgtgtaggtgctgagaaagcttctgacaaagctgaagagcttggcagccacctaccgcagtaaacagatgtacaacccggtggatgtcgtcgcgtgggcgtctctgcggaaaaagccgccagggcgcgcggcttgattagcgattggtttggtttccatgtcaggtcgcgcctgggaagcccgccgcgagtacggaatgccaagccagtagtagtttttgttctcggcacgaagccatttgatgttcgttttgtgcgacggtttgcggcttgatcgcgattggcctcgtagcctttttgaccgaacgagagaagcagcagctctgcaaagctacctccaggttcattcgagacggtaggctgggagggatagcgtcattgcggccaatggttttcggttcttttccacttgtgcacgacgtcataaacccgagaaaatgtttacagcctcacagggcaccacctctcatagaaccagagactccggttccgttggggtaaaaccgtaaaatggccgccgcttgtcttgttaaatgttggtatggatcttattacactcgccactcggtaaaagaaaggttcaggtttaacaattaccagccacttttaaggcttgcatttaattaatcgcaagatagagatctatatatgcgaacgtttgtcataataggcgaaccacagctacagcaatttttgattacacacttcaatgtccccagcaatgaatatgatacgggtgacgggggttggggcaatagtagtagtactacc

SEQ ID NO: 35236 - DNA, 467 bp, Zea mays
  Clone ID: MRT4577_132135C.1
tggagctggtcgagaagttttccagaacggggtgaaggtggccaagctccgcgcgaacggcgagtaggaggcgctcccgcatgccgagctgcagctgcagagatttcccaccgtgctcctgttcccgggccgcaccgccaggcccatcaagaacccgtccgacaagagggacgacgactcgctcctcacctgcgtcaacagactccggtgataaacgacctccactgggcgagaaccattgctctctgtaagcctgtatgatcttatgtctgatctttatgagtttatcaaaagcttgatagaagggacgtggatgtttttgtttttccccccgcccccgaaggaatgatggctctggggaaaccatcaggtgtagatgtaaataactgaaaaatgattgcaggatgtgtacctgaagtctgagcttctgaggacctgtgcttggtcgctgaaggagagaataattg

SEQ ID NO: 35237 - DNA, 1231 bp, Zea mays
  Clone ID: MRT4577_132136C.1
ccgggatataatgttcaaagtcaacaaccccattctattgcagaccacccaggtaacatgaattcttccgttgcaccattgccacccccaccttttaataactcaggatatggagggcaaccaaatcagataccgcctcccccaccatcggcaccactcaatcctcctggtccccaaggcagtttccctgctctcccagcaccatatcatgggaataactatcatcggcctccaaccacatcaatgcctaatgagggatataatctgcaaccagcgccccctccaccgcctccaaatcaattcccttctgtgccaccagaacaccaacataggccgcatcactggggtaataactgtccaccgtgtcctgagagatatcggtacaatggacatgatcgaggtcatcacagacatgatcgaaggcatcatgcgcacgacagacaacaccattatgatgatagaggataccgctatgatgatagaggatatcactatgatgatagaggccattactttgatgatagaagacatcagtttgatgacagagggcatcacttcgatgagagagctattagggggtcaatgcacaatgaggctgctgacaggtcaagatatccttttccaccaggaccttcttcgattcctgaccattttgaagcttcaccaggcccaatgcactaatggcgaccattcgatccttcaccaaggcattgggcaggctggtctaaggcggcttagataacctaataacattctcccctcaagacattctgtggagcctccagtttcccatgcagctggagctggaggacatggtggatggagacctagataaccttttggaatattgaagtggccctgacgcttttcttaagtctgtgggggatttaacctgggagagtccggtggtctctgcttcggattgaaggcactcacggaccactccaggaaagcgggagctgctggtacctgcctccttgtacatatgtatctcaatgattctatggcggtcgcgctgcctgatttgcccttgtatccatcctaccacacggggagctgaattgtagggataggggtgtcttagattgtacttactatttgttggtgccagtctccgattccattgctgatgtccgttcctgaattcctcctggcctcagccgaaactgttgagagtaccccgtacatatatgccaaaaaagagtgaaatacaagtcattttgccctttgc

SEQ ID NO: 35238 - DNA, 1038 bp, Zea mays
  Clone ID: MRT4577_132137C.1
acacctgtgtatcacacttcaaatagagcagtgtgtgaacgaaaatgacaataaacctgtgatatggtatttcagctcattgttcatgtgactacaagctaaataaagtacaacaaagaaagaaaattttgacacacctaatcgagacactatgaaaattaaaattatgacgccaactattcactatccatcatatgatgattgcatctgctgcaaggaccctgctcatcttcttatttgtcactaggctttggatgtgccttcggaataatcacaagatgctgttctcttgttgctgccatgaatcaatctgttgtagtttagcagcaaaactggatcatatcatggatcaagtggcaaaacttctcactgtcaccaagaacaaaatggactccatagcaaactaggtgggattatctgtctttgcttccggtcaaaatttggatggtgccagcaagcatgcagctgcctcaactatagtttctgtaaagataatatatcaaataactgttcatgactttgacttgattattagggctgcatgtgaatatctggtatgtcttcccagtgtatttttcaatctagaaaggagattcaagtgactcatcccaaacatctccactagcattggaagcatcttcaccatcttcttccatcgccaatcttacatactctcttcgtgcaaaacgatcccagtctgttaatgatggctcttcacgcatttgacggatgagaaatggatccctagcttcaaatgccataaatttgttcagattaaaaagaatgttaaagaaatgtccagacagtttgcaccttcggaagtctttcaatgtcaaatagctatcattctcaggtccaatcatatcaatgagctgacacaagatgtcctcaaatagaacaggttcctgggccatgcactccatgcgatgaagttgctcctcaaagaagaactgtagttcaatatgtgtaagtatgccattgccgtccaaatctatacatttgaaccaatattcttggcttggcctggtgccgaattca

SEQ ID NO: 35239 - DNA, 429 bp, Zea mays
  Clone ID: MRT4577_132138C.1
cagggcaacataacatattgtattaaaataaaaacatttacctgaacccaagttgacgtggagaaattgacctccaataccggacgatatcgattgagatcttggtatctactaaatacgtttgtacacacaatatgctgaacggaatgctagggtcttaacagattacataacagaaggcgagagtaagacaaacgccctaagtattcacccactaggccagtaccttaaaaaaaacaacatccaactaccatgctgcggaatcacagaaataccaaccacgtggtaggaaatgccgaccgacttgcatgacacatgatcctagaccatgctttgtcatcaacaccctgaacagtatgacacagaacgaggacacatgcaaccacaccgggctactggatgacctggacactgtccttgactattacc

SEQ ID NO: 35240 - DNA, 182 bp, Zea mays
  Clone ID: MRT4577_132139C.1
cggctcgagcgccctttttttttttgttgtaagggatcaaggaggctcaacacaaaaatacagcacatatttggcgagtatttaagttcacacaacagaggattaactgattaaaccatgtataagagcgttagaaggcatcacatgcgaaagcaaacaagtgctttatgcctcgggcgttg

SEQ ID NO: 35241 - DNA, 780 bp, Zea mays
  unsure (1)..(780): unsure at all n locations
  Clone ID: MRT4577_13213C.1
gaggctcggcccgggaaaaaaaaaaaaaaatatgtgttcattatttttattatagatgtcagttttttcccctcaagcctggtttgaatttggatacgaaaaggttttgggaacaccagcctcctcctttcattttgttcctggagaaacacccatttctacttttcgtgaagtatttgcatttgtagtaacgtatctggttatcatctttggtggtcaaaagttaatgaagaatcaaaaacctatcaaactctctttcctctttcaaattcacaatttctttttgactgttttaagtttaggattgtttgtgttgtttgttgaaaatgtcatcccgatagtatatcgcgatggattctttagcgcttattgttctcctaagaattttacccagcctctggaacttctctattatattaattacttgaccaaatattatgagttattggatactgtcttcttggttttgagaaaaaaaaatcttcagtttttacattggtatcatcactcaatgactgctctattatgtttcactcaaattaatggccgtactactgtatcctgngttcctgtaactctcaatcttgctgttcatgttntaatgtattattattatttcttggctactttcgatatcaaagtgtggtggaaaaaatatatcacagttacccaaatcgttcaattgtcattgatattgccgntattcttttctgtatctttaactgggttgctttcaaatacagggccttctcttcctcatttcggnaactgctctgctga

SEQ ID NO: 35242 - DNA, 166 bp, Zea mays
  Clone ID: MRT4577_132140C.1
gcagggggactggattatatggacctagatcgatgcaccattgaatcggtccggtgcccctacaccagcgtaagttgggatctttcgagccaaactaccaatttttttggccctcttgggtagttttcctactacttatgtcagccctatctctactcaacgtaat

SEQ ID NO: 35243 - DNA, 253 bp, Zea mays
  unsure (1)..(253): unsure at all n locations
  Clone ID: MRT4577_132141C.1
ntatattacaacagaatgacgaccggcccgtgctcagagtaatactccaacaggagaaacacatccaacgatggatcatggccgatcacaattcaatatggccagggaaaatctgaccaccggggcaagctataaaacacatcacattaaactgcccagcatgatacacgagatcaccaatcggactatgaagcacctaactttcagacctgtgtcccacgggtgatcaggtagacgccctcgatgggtccaa

SEQ ID NO: 35244 - DNA, 382 bp, Zea mays
  Clone ID: MRT4577_132142C.1
gcctgcaggtgccgggccggaagttatcgtggggggacgaccatgttctctaggcggggggcgcactttcactgggacactcgctacaagatcgttcgtcgtggccaccaaggcgctcacctacctgcaccgacgaatgctcgccggcgatcctgaacccgcactgaaaggcccacaacatcctgcttgataacgatgacgaagcgcacgttgctgattccgctctccccaagtgcttgcaagactatggcgcatcacagtgacacactgccattgcacgctcctatggttatatcgccccacagcacgcatacacactggaggtacacaagaagagcgaccttacagccaccgtgaggggctgctggagctggaaacgcga

SEQ ID NO: 35245 - DNA, 193 bp, Zea mays
  unsure (1)..(193): unsure at all n locations
  Clone ID: MRT4577_132143C.1
ggccccaaacaaacaaataggagtccacgaaattggtcaaggccattggcgtaaccctacagatcatcaaatcacaactcgacaggggggggggggtanagttcttcagcagagaaaaatttaaaaaactgttttgggcgccacactaggggggacgggggcctaaaatcacccaacaccgagggctcttttt

SEQ ID NO: 35246 - DNA, 532 bp, Zea mays
  Clone ID: MRT4577_132144C.1
gaaacaagccgacgcacgacacaggcataatctgattacatgatccaacacccacatgccaatgccagcctaatagtaagcatcaggcgagatgcaccagaagctgaactatcgaactgaaatagtgtaaatgttaataaagacatcaatgcgcataagcacgtcttgcggagaatgtgcaaagatggtgctatgaggctgtatggtttcgacgccatcacatgagcacatgctgattggtaatgccgaaacatgacttccagtgctccatctggcttgcggcaaaagcggggactgggcaagggatatcctgagtcgcaagatcacaggtatggcctggatctggcatctatggcgcaaactcaatgagtgggcagtgatcctaagatggcatggggtggtcgagcacgatcgagggaggctttttggctgacaaactcactacggacatggagctgcctctgtgcaggggccataggggtaaagccaattgctggttaagccgattttacggaagtagccagctggatga

SEQ ID NO: 35247 - DNA, 252 bp, Zea mays
  unsure (1)..(252): unsure at all n locations
  Clone ID: MRT4577_132145C.1
gaccgggccggacagcccggaccgacccaattatatnaccacgacggcaagagcgccnacagggggggcgcacagagcggaagcgcggcacaccaaagagcgagaagcaccacacaacaagcaacagggaacaccgcccacgccgccgcgcggcaccgacagggggacaacaccaccgcaaaggcggagcaccaagcgccgccacagggagaacagggacgagggcaccaaacccaacgagaccgaccgacc

SEQ ID NO: 35248 - DNA, 354 bp, Zea mays
  Clone ID: MRT4577_132146C.1
ccacgcgtggcggagacagagacccgatctacaccatcgatttttttttctcacttgccctcacttctcctcgctatcgtatgttatcaccacctccacccatacaaccttcggctgctgctaccacccaccaccgccgattcatctaccgactccgtttcatctgccacctcctgttcacctgccacctccagtgcatctcccaccgtctgtccaccttacgacgcctttccacctgccacctccgttccatgttccgccaccggttaatatgaccccgtcaccattccactaccctactcaacctacccaacctcagtctcatccccagccacacccatgcccataccaaca

SEQ ID NO: 35249 - DNA, 660 bp, Zea mays
  Clone ID: MRT4577_132147C.1
ccggccgggaagagaagctatcggtatcgcgttcgagtgcgtgtgttcgtgcagccagagacaggggttcgtcaacgatgtgtttcactgcttcttcgacaagtgcacggcctgcgacgagatagccaacttcatcaacctcctcacaaccgatctccgcatctagcataatatatgcttcgagtgctcacacgggtggtaggatatctgacctcgctccgtctgtatggcgagatccacggcgtcttgtactgctacattcacttcgcccagctgctgattgctacaaagggagctacaaccgcatgcatcgacaagagcgccgctcgccaggaggtgtctcggcggaacgtagactgcacgaggactacaccgcctgtcaaccagcgccagcgatctgatgagaatacatacaagataaataagatcggagcgaccaacatccacacatgcatatatattacgcagactgaagtccaaccggttgccatatttctttaccacatactacggctgctttattccctccgtcgcttcgttgttctcttaatctctcgtgagagatcggcgttatcatcgactctgcaagcctctgctgctccatgcttacagtacgatctcgagctcacgatgatcggaatatctgagcatggacctgtc

SEQ ID NO: 35250 - DNA, 375 bp, Zea mays
  Clone ID: MRT4577_132148C.1
gggccccaaaaaacggggcctttttggggggaccatttgcccttgcccaaacagggttccaatccctcaaaattccttccgaaaaaaccccgcacccttggtaaaattaaacctcctcccggttacatgagccttaaggtccctggggggtattaaaaccccgggggttttaaaaattaaccccagggggggagccttttggtgccctgcccccaaggggtggaatcctttcaggcggcccacccttttggtttttcccccccgggggtctcaacctcttgggcccaacttgtgccatccttgtgcccccccgggggggaacttttaataaacttaaggggccttttttggcatttttccaaaatttctattttg

SEQ ID NO: 35251 - DNA, 223 bp, Zea mays
  Clone ID: MRT4577_132149C.1
ttaaggccatcttcacgataatgctcgtgcttcaagctcgaatacatgcaactaatgggaaaagtgacatcttacattgatagaatgtgaaactttaaacaataatcccacatcatatccagttaatactgtaataacaacattctagcattatgtattcaaactgcctactgatcatatgatcttaccatatgctcacccctttataaactctccaagatca

SEQ ID NO: 35252 - DNA, 279 bp, Zea mays
  Clone ID: MRT4577_13214C.1
gtgcattcgttatgcgggggggagggggaattgggcgaaaagcgacgagctttactcgttaatgttagtgtagaaggtggactgcaagaactaaagtgacaagttacttaaaaaagtaaagcgtggcttaaaattgcttttactgtcatacagctggcgatgaggaggtacctattgtgttgagtaacggtgataattttatacgctattctgagccagcagaagtgaaggccttaagccgattttaattgtttcgattatactgagaggtcttttatt

SEQ ID NO: 35253 - DNA, 699 bp, Zea mays
  Clone ID: MRT4577_132150C.1
gccggccgggtcgggatctcagccaacatctaccttcaattctcgttactcaacataggaataaaatagatggagacagacaatagagagagcagacacttgagcctacatcgctcgcacgaccttcgcctggaaggccgagaacgtgccgacgtcatccgacttcgacgagggccgagtgaccatgcgaaagagagtacaaaaagccaacgcagcggcggctcttggaagcccgtgagatcgacccgagcgcctgctgtacctgcggcctctgtcaggtgagccaccgatttatctgactgtagagttccctgtcgactacatgtgggacaccgaggggatgtccgagtacccgaacacgttcatcaagaacctggagttggacgtgatccacttcatctgggccatgctgtactggatcggctgcatcttccccgagctgatcgaccgcaacggcgatctagttcggtgatgccgtgtgggaaaatgtcgcttcccagatcttcagtgaagatgatcatggactagctcgggaaccctatgctcatccacggtcagagcatccttgctatatgggcctgacatgtcgagctcatgggcgccgacgagggctaccgcatcgtacaccaacgcgctcggcgatgtcgtcgaccagctctaccccgtcgtcagcttctacacggtcggtctcgccgacga

SEQ ID NO: 35254 - DNA, 663 bp, Zea mays
  Clone ID: MRT4577_132151C.1
ctcctatgggcgattgggtccctcgaggccggccgggaaaacaaatccattctcccgcccacgaacgacacgagactatcgcccgtccagcacgagggacacgagaccactggacggattgacttgtacacaataaatcccacgaccgaactcagcgagattagcccaccatggctcaagatatgccccccaagggcgggtacgagcccgtccagtacaagcgaaacctccccgccaggggtctccgtcccggtatcctcctccttggcatgggcgccgttatgggctatggctggtacaagctgatcggtggcatgcgcgaaatgaacgaactcggtcgtgaaaagatgtgggctcgcatcaacctcatccccgtcctccaggccgaagaggaccgtgatcaggtccgacgatacctagccgaccagaagcgcgagaaggagcttttgggcgacaacgccaaggtttacaacagcaaccgattcgtgaggccgacttttgccgtcacccctcctcctaccacaaactaagaatacaacaataagaaaggaaatcgggtgccatgtgctgtgtatatatgtttttgacaaagtggttctatacaacccacgtctagaattgaaagggttatgcataaaaaaaaaaaaaaaaaaacccgcggcc

SEQ ID NO: 35255 - DNA, 745 bp, Zea mays
  unsure (1)..(745): unsure at all n locations
  Clone ID: MRT4577_132152C.1
cctcgaggccggccgggacgagcaattcgatcggtcgagcagtgtggccagcccatcacatcatcaagtcgattgcaattgcaataatactactagcttgacgccggcgttgggggtgcgggcgacgtgatgtccaagcaaaagatcgtgatcaagctgggcgtacccaacgccaagaaccggtctaaggccatgcagctggcatccaaatttgtcggggtgagcaaggtggggatcaccggcgacggcaaggaccggctggaggtggaaggagaaggcgtggacaccgtcctcctggtcaactacctgcgcaagaaggtctgccgcagcgctgacatcgttaaggtggaagtgaaggacaagaaggacgagaagaaaccggaagagccgccgtattattgctggcccaattactactactgtccgccgccgccgccgccgctgcccatggtcgagcgagccgacgacagttgccacgtcatgtgataaagctacttactattcgagatatatgtttcggtagacgtattacgtatactatatcatatgagcataataatgaagtactcatatcatcacttagcttgctatatatatatgcatgcatgtatcgtctacgcacgtaaagccatcggtgcatgacatatatatcatgcggntcatatttgccnatgtaatcacacacgtatatatatactccccactggttaggagtaaaattttcattttttttatcctggtcaac

SEQ ID NO: 35256 - DNA, 648 bp, Zea mays
  unsure (1)..(648): unsure at all n locations
  Clone ID: MRT4577_132153C.1
gtggacgcctgcggttccggtccggaattcccgggtcgacccacgcgtccgctagatcccagagtttgagccgagtgagcaggaagacgctagtgctacagataggggcctgggccctagcctcactgaggaccagccaggtccctacctggccccaggtctcctggggagcaacattcatcagcagggacgggcagccaccaacagtcatcatggaggcgcaggggctatggagactcggagtcgccacagttcgtacccagcggggaccgaggaggatgaagggatggaggaggagcttagcccttttcgaggacgctcgcgttcggctccccccaatctctgggcagcgcagcgctacggccgtgagctccgaaggatgagcgatgagtttgagggttccttcaagggacttcctcgcccaaagagcgcaggcactgcaacacagatgcgacaaagcgccggctggacgcgcattatccagtcctggtgggatcgaaacttgggcaaaggaggctccaccccctcccagtgatcttctgctccacatcccggaactctacccgctcccgtcgcccgccatattggngtgtgnggcggaagnctttcgaggccttangaaaaaaaaagaggatcgctgtgtccctt

SEQ ID NO: 35257 - DNA, 1708 bp, Zea mays
  Clone ID: MRT4577_132154C.1
tgcgcccacttcgcactcggacactcctcggccggtcggcccggatcggtcgcacggacacgccccgcgcgtcgcgggctctcacctctctcctcctcctctgcctgattggcgtgcccccatgcggatgcggtggctccgacccagctagcccccaggctggggctgcgcccgcggcggcgatgaagcggccgctgcggcgctccttcgcggtgctcatcttcgtcgggctcgtcggcgcggcctccttctccaccgcgctccgtcgcgccgtggcgcccgcgcccgcgcaggagcccccgccgctcgacccggcgcgcctcaacgccacgctgctccgcctggccgcagccgatccgtcggaggcgtcgctgcgccgggacgtggacggactcctcgagggccgcctcccggcctccgcggcgcgggcccgcgcgtggcgccgcgaccgcctcctccacccgctccacctccaccgccaccgcagcttcccgctcccgcgccgcggccgctacccggacgacgaccacgacatcctgctccacccgctcccgcgccacgagcagctccacatcgacccggccctgcgccgcgacctccgctcctggcaccgcctccgccgctacgaccccgccgtcctcgccagcctcccctccctgctctccatccccgggcgcatcccctcctgcgccgtcgtcggcaacagcggcatcctcctgcgcgcgagccatggagccctcatcgattcccacgcagccgtgttccgcctcaacaacgcccgcgtctcaggctacgccgcgcacgtcggcagcaagaccaacttctccttcatcaacagcaacgttcttcacctctgcgcgcgccggcccggctgcttctgccacccttacggccacggcgtccccatcctgctctacatctgccaggccgcccatttcgtcgacgtcgccgcctgcaacgccacctcgtcctcccgccacggctcccccatctccgtcaccgacgcccgcctcgacgtcctctgcgcgcgcatcgtcaagtactactccctccgccgattcgtcgccgagaccggccgcgcgcccgaggagtgggaccgcgcgcacgacgccgccatgttccattactcgtccgggatgcaagccatcatggtcgccgtgggagtgtgcgacagagtcagcgtgttcggcttcggcaagtcttccgacgccaagcaccattaccacagcaaccaaaaggcggagctagacctccacgactacgatgcggagtacgccttctaccacgacctctccgagcaaccgcaggtagtcccgttcctcaaggattccgggttcgccgtcccgcccgtcgtcttctaccattaggccagcttcgagagcgcgcgccatgtgctcgacgttatgtggaacggctgttttcctcgcttatttttccggttttgattagtgggtacgacatagtaaaatggggatatcgagatagtaaaattttcgtgctgttggagttggaaggtgtatattggggtttaggctactccactggtatagaagaagggattgtttgcccttttgatttcagcacgacagtaggcagtgcctggaattgtaacttcagactgatattttaatttattaagaaacagaatgtatatcttaccatcactttggaactgcgttcaggaatacgtggcattttattttcatac

SEQ ID NO: 35258 - DNA, 441 bp, Zea mays
  unsure (1)..(441): unsure at all n locations
  Clone ID: MRT4577_132155C.1
tatctaaaaagggtaattttgtaaattttgatcggtctttgtgggtctccacccggtctctccatacccttttctgactccccctcccccttggtcgtcgagaacgagacgctgggccggaaaatggacggtgaacggacattaggataccggcctcttcttcgttccatatagcagctagctccggcagaagccttcgctccacgcaaaaggatcaaaacaagagcagaacttttagacatcacatggttcacatcagcggtgtttctttctcctccaccagagtccagagaacgcttgagaatccttccgcagtaggcacagaaacccgagttccaccgcttctagactctaaaaagcacctagaagcccggtcaccggagaaactcggcgcgggacgccgtcgacagctccctgcgcagccggacgcgtgggnccggt

SEQ ID NO: 35259 - DNA, 386 bp, Zea mays
  Clone ID: MRT4577_132156C.1
gagacccatgctggcgtgaaggaggggggtttgggagcggacaggggagacgattcttgaagaagatcgcgcgctgatcttggcccgtgcccgtccgtgcgcgacctcggcgtatggttggtggcgattggcagtgctggtagtgcgccgccgccatgggctgcgtcgcgtccaagaacaccgtctcggtgacgccggcggccgactcgtccggcgggctcagggaccggagccatccgcgcgcccaggagtctgctgctcctgtgccgttgccggtgcccgtgccttccctgcgtagctcgtcgtccgcggcgaggaggtcggagaaggtcaaggacgacgcggcggacccagggcaaggccgtcctagccggggtggggacgtc

SEQ ID NO: 35260 - DNA, 749 bp, Zea mays
  unsure (1)..(749): unsure at all n locations
  Clone ID: MRT4577_132157C.1
ctgcttttctctctgctctgctagctagctcttgtcttgtcactgagtgagcagcagggagctgtctagctagcctagtacaggtggagtggagtgtgtggtggagtgcaaaccaaatcaaacgaagaaaagtgggagcgaggaggaagaaaagaagaagaagacgacgacgacacccaccaccagcagcaagcagcataacgaaatgtcgatcaagtactgcgaccagcacaaggactgcgagcggcagcgtctgtaccgtcgcttctgcgccgccctggtgggcgtcatcgtgctcgtcctcctcatcgtgctcatcgcatcttcctcaacgacgtgagcatcgtgtgcatcaacgtcagctccgcctcctacctcaccgtcaccatgcaggccacgctggcgtcgcgcaacaccaacgaccgcgtcggcatctactacgaccgcgccgacgtgtacgccgagtaccgggcgatgcagatcacggtgcccaccgcgctgccgcccttcttccagccgcccaacgacgccgccgtctgggcgcccttcctctccgcctccaacgtcccgctgccgccctacctcgccaccgcactcacacaggacgaagacggcggngtacctgctcgtcaccatccgcgtcgacggctggatccgctggaaggcaggngccttcatcaccagccactaccacctcagggtgcgctgccccgcgctgctcaccgtncacgacggacaagggagctacg

SEQ ID NO: 35261 - DNA, 725 bp, Zea mays
  Clone ID: MRT4577_132158C.1
atgatagatggatggagcttgatcaatcatgaaggaagcaaagaatgaacagcgccgtgatgtggcgttgatactgtggatactgcaaataatgtaacgttcacccactccaatgggagcacgattcgccaccaagacatacgtggcaggatggaccacctcggcactacaccaaaggagaccatgctggctgctatgctgggctacactagggatactgaaatatctccctgcttactcctgacttgctcctgtacgatcacggatcggctactgctagcgccatacttactcctgcgggtatgatccgagggctttcgcgcaagcttgaatgcttacatgtatgtggcgcacgcaggacgacaacgctgccatcgcgagagctacagcgccatagacgcttgcccccgatgtactacgcagtgccatcgctttacgacatatggacaaatgtaagtatcacgagcaacataaccggactcaacctcgcgtgacatgtatttaactgctccggctactgaagagaccgaaaacatatcgtggccagcgtgcttaacatggaggagtggttcggacacaggggcatcaagatgctcttctagatggcactagggatggccacatgcagcttgaccaaaagcgacgccgtatacgacagatgcatgaacgaagtctgcgtctcggacaccagactgttcatggacatgatgctgaaagacaccagc

SEQ ID NO: 35262 - DNA, 1446 bp, Zea mays
  Clone ID: MRT4577_132159C.1
tagctagctcttgtcttgtcactgagtgagcagcggggagctgtctagctagcctagaacaggtggagtggagtgtgtggtggagcccacgacggctctgcgggctttcctctctgctagctagctcttgtcttgtcactgagtgagcagaaggagtgtgtggtggagtgcaaaccaaatcaaacgaagaaaagtgggagcgaggaggaagaaaagaagaagaagaagacgacgacgacacccaccaccagcagcaagcagcaatcagcaaccagcataacgaaatgtcgatcaagtactgcgaccagcacaaggactgcgagcggcagcgtctgtaccgtcgcttctgcgccgccctggtgggcgtcatcgtgctcgtcctcctcatcgtgctcatcgtctggctcgtcctccgccccaccaagcctcgcttcttcctcaacgacgtgagcatcgtgtgcatcaacgtcagctccgcctcctacctcaccgtcaccatgcaggccacgctggcgtcgcgcaacaccaacgaccgcgtcggcatctactacgaccgcgccgacgtgtacgccgagtaccgggcgatgcagatcacggtgcccaccgcgctgccgcccttcttccagccgcccaacgacgccgccgtctgggcgcccttcctctccgcctccaacgtcccgctgccgccctacctcgccaccgcgctcacacaggacgagacggcggggtacctgctcgtcaccatccgcgtcgacggctggatccgctggaaggccggggccttcatcaccagccactaccacctcagggtgcgctgccccgcgctgctcaccgtcaacgacggacaaggaagctacggctccaacgccggtggggggctcggctacttcaagttccagcgcgcagcaccctgcatcgtagacgtctgagatcgatctcgattcaaaaatcacattaaagaagctcggccgggatgaattgaacaagaagcccttttctttttcgtaataagatatatacatatgaatcaaataatagcttcaactctttggtttatttttgttgcttttttttcttttttttgtttggatgggaaaaaacgtagactatattgtagcaattaatatctggaggatatgcttctagatggatggatatatgaacgaaagggccggccgccgggaaagctcagctaactttgagttacctctacttttccctatctctgtactgtagagtgtattttggatttcctcgaggtatggtgggacaaaaaaaaggactattgctttgaatctacggaattcatgagagggacaaacccacacacacacaaaatgtaagtgtacgtgttactattaagttgttgatgtaagtagacttttcactcgaaaaaaaaaaaaaaaaatttgatgaatagctattaattatccaccatatatgatt

SEQ ID NO: 35263 - DNA, 329 bp, Zea mays
  Clone ID: MRT4577_13215C.1
gctgaggctctgttggcatcaagagctctcaggggaacgatctttaatatttgtggggaccatatggggaagatcttatgtggggacccactgactgggacactgctataacctgatgttacatgccgagcatgtctaaccccaatggtacagataaaactgctccaggggctgtgtgcatacataatacggcctatcaggggatatcagccccatcagactcataacttcttaaattacgcttcagaactctagccatcatgagatcataacggtcgacatggtaagcctatgctacggagaaagcctagctgtgtgaagggatgtat

SEQ ID NO: 35264 - DNA, 1247 bp, Zea mays
  Clone ID: MRT4577_132160C.1
ccgggaaaaaaaaaaaaaaaaaaaaaaaaaaaaaaagcttgccggctcctcgaggccggccgggccggggctttcctctctgctagctagctcttgtcttgtcactgagtgagcagcggggagctgtctagctagcctagtacaggtggagtggagtgtgtggtggagtgcaaaccaaatcaaacgaagaaaagtgggagcgaggaggaagaaaagaagaagaagaagacgacgacgacacccaccaccagcagcaagcagcaatcagcagaacgaaatgtcgatcaagtactgcgaccagcacaaggactgcgagcggcagcgtctgtaccgtcgcttctgcgccgccctggtgggcgtcatcgtgctcgtcctcctcatcgtgctcatcgtctggctcgtcctccgccccaccaagcctcgcttcttcctcaacgacgtgagcatcgtgtgcatcaacgtcagctccgcctcctacctcaccgtcaccatgcaggccacgctggcgtcgcgcaacaccaacgaccgcgtcggcatctactacgaccgcgccgacgtgtacgccgagtaccgggcgatgcagatcacggtgcccaccgcgctgccacccttcttccagccgcccaacgacgccgccgtctgggcgcccttcctctccgcctccaacgtcccgctgccgccctacctcgccaccgcactcacacaggacgagacggcggggtacctgctcgtcaccatccgcgtcgacggctggatccgctggaaggccggggccttcatcaccagccactaccacctcagggtgcgctgccccgcgctgctcaccgtcaacgacggacaaggaagctacggctccaacgccggtggggggctcggctacttcaagttccagcgggcagcaccctgcatcgtaaacgtctgagatcgatctcgattcaaaaatacattaaagaagctcggccgggatgaattgaacaagaagcccttttctttttcgtaataagatatatacatatgaatacaaataatagcactctttggtttaaaaaaagaaaaaaaaaaaaaaatcaccttgaagaagctcggccgggatgaattgaccaacaagccccttcctttttcgtaccactgatatagacgtatgaatgcacgctagagcactctttggtttaaaaagaaaacagagagaaaaatgtcaccttataacagctcccccggcatacatgccgcaagaatccctttttttt

SEQ ID NO: 35265 - DNA, 494 bp, Zea mays
  Clone ID: MRT4577_132161C.1
gggaacaggggacgtattatgctaaccagtgatacgaatttcggcgaatttcgcctattttttatcgctttcggtgctagaggaaattggaatttcggtccgaacatttatatattgtcagttctaaattaaaaaaaatacaaaagtcaaactttagtaaaaaaacgaaattttgatcaataaaaacgaaattggtaaaccctcatgctaacatatgtgatatgtgatcccccttctcttccatctctttcttgtcgtggaagaggtcgatcgacacgctgggacacgtcgtgtgtacgttagaaccaatgacagaattagtgcctgtttggatctggctaactggtattcttaactcaaaggtaagtgcagaaggagtactaattaatggaaattacattcattttctttccttcttaagacaagagacagagaaacagaaagctagtactttcctcattgaagcttccaactaccccccaccccagcgctac

SEQ ID NO: 35266 - DNA, 872 bp, Zea mays
  unsure (1)..(872): unsure at all n locations
  Clone ID: MRT4577_132162C.1
acactcctaagggcgattgggtccctacgaggccggccgggaaggcacaaaagcaaccttattctcacacaatagaaaagcactacttaacagcccacttcttcttcttctagcacaacataggaaatagccaaatccgactctccatccaaatcgcgtacaatcaccacttccaaaacctctctacgcgtctccctctcccctccaaaccaaaccaccaaaaaaaggacagatagttcaacacaaaaaatgtcgtactacgacattgacgccatcctcacggatgcagagaaagtcccatgccaattcgaaatcgacgttccctacctcggccatctcgacaactcccccaacggcctcaaagcaaacacccccctaactctccccctctggctcgccgaaatgctagcactagcatcaacacccacgtcaaactcaccactgacgctgaatctcccaccgtgtctatccaccgctgttttatccgcgctaaaagccgatccgcgcgccgtaccgcttcgagatcatagtttgcatttctacggcgtgggggtgcgcatgctggatttgttcgatgagaaggatgtggcagaggtgttgaggaagacgtttgttgtgagggcgggggatgtaggactgcatgcgagaaaggcggatgagggcatggtgggagggaatggggaggagtttttgagggggcttgaggatggaannaaaaaggnttgtttaaaagaaggcatgagggtgtaaaggnagcgaaggagtggacagataaagtgaagaagacttgatatgatgatgcaacatattggtcaggatagagatacccatgaggtgccagacaaaggcactacgcgatctacgacatggat

SEQ ID NO: 35267 - DNA, 290 bp, Zea mays
  Clone ID: MRT4577_132163C.1
cccttacatgcgtccgtctccaaggttctcctctcaaaggagactgggaagggagagcactcaaggcagcgggatcagatctactactggaggcggtgtgggtctacgccaagtaacaggaatatatgtgggcgatgattaggtgatccatttcacaagaggaagaggacaggaggtcaaaacaggaacctgtacaccatattattcttcgcagagccacccctaaaataaacaacacgccttgcccggggagcaccaacaaaaccagagacagcagtacagagacaaac

SEQ ID NO: 35268 - DNA, 1437 bp, Zea mays
  unsure (1)..(1437): unsure at all n locations
  Clone ID: MRT4577_132164C.1
cattgggtacctcgggccggccgggagcccatccctccaagggggctcaggaacccatggcttcactgcctctatgccgctcgccgtcgtccctactaccctcatggcctcaccggccaatctccgcctccttcaacccaaagaatccctcctcccctgtcgctgctcacgtctccgtccaggagacgcctccccaacctcaagacccgtcgcctccctctgattccaacccaaatggcacaaggcccagcagcagcagcaacacgaggttcctgtgggtcaaccccaacagcccgcgcgccgccgacgtcgcacgcgcgcgtgccgggtctggccgccgcgcacgtctcgcttctgctgccgcggcgctcggcgcgtgcgagaccaccgagtccgctgtagaggccgcgcttcaggcggccttccccgagcctccttccgagcaggacgccgtcatcgtgctcaacacggctgccgccaccagggcggagaccgccgtgctcgctctccgctggttcctggggaacgccaaggtccggaagaaggtcatcctctacaacgtcgtgctcaagttgctgcgcaagaagcggctctggagtgagaccgaggcgctatgggccgagatgctgcgggacggcgtgcagcccgacaacgccaccttctcgaccgtcatcagctgcgcgcgcgcctgcggcctacacagcaaggccgtcgagtggttcgacaagatgccggagttcggctgctcgccggacatgctcacatactctgcggtgatcgacgcgtacggccacgctgggaactccgaggcggccctccgcttgtacgatcgcgctcgcgcggagaaatggcagctggaccctgtgatctgctctacagtgatcaaggtacactcgaccagtggcaacttcgacggtgcactcaacgtgttcgaggaaatgaaggcaatcggtgtgaggccaaacctggtcgtgtacaataccatgttggatgccatgggccgcgcattgcgaccttgggtggtgaagaccatccacagagagatggttgaccagcaggtgcagcccagcagggcgacctattgttgtctcctgcacgcatacaccagggcacgctatggcgaggatgccatggccgtgtaccgactgatgaaggatgaggcaatgggcatcgatgtgatgctgtacaacatgcttctgtccatgtgtgcagacattggctatgttgacgaggctgaggagatcttcagagacatgaaggcgtccatgggtgcccattccaagcctgatagctggagctactcatcaatggtgacgctgtactcatccactgccaacgtactgagtgcagagggcatactgaatgaaatggtggaggcccgctttaagccaaacatctttggcctgacctnactcatccgatgctatggcaaggtgg

SEQ ID NO: 35269 - DNA, 312 bp, Zea mays
  Clone ID: MRT4577_132165C.1
gagctactagtcggcggccgccctgggctttgtggcgggcttgggctaaaaagggggacattggccttcggaaagacagcggtcttggagctgttcacgccggtctcggtcattcttcgaggcgcacttgggcttgccaagcgacaacagatagtacaagtgtttcaccttggtgcaggatgcctgcggagaccagcttgttgagctgaacgttcagaagctggaagaagtagggcgggagcttgcccgtgtgcttgtgccccaagaacctggcaataacaaagctgatggaccccgtactttacttgagcg

SEQ ID NO: 35270 - DNA, 409 bp, Zea mays
  Clone ID: MRT4577_132166C.1
agggtcttcctcccggtcatcgctggcctttccgcgcgatctacgatgtcgtcgccacgatatgccgcacggcagcgtggcagcagagtggggtccagaggcgtgggtgcggccgacttctgctgacgcccgcgcggagtggtcggtgctgtcagccgccgtagatccggccgaggaggccccgctgggcgcgggcgacgggacggccccaccagcggtggtcgcgcagcgccgcgttcgccgcgagccagccgcacccgccgtgcaccccgccaccgggatggatcgccgcgctgccgaagtacagccccgccaggtgcgtccgcggcccgccgagccccgtcaccggacggaagatcgcctgctggaacagctgctgcgtcccgccgccgacaccggcctgccccag

SEQ ID NO: 35271 - DNA, 1055 bp, Zea mays
  Clone ID: MRT4577_132167C.1
ccgcggctccgcctccccctcccccaaatttgaaacctccgaggcggacgcgaggcgaagacgtgcgtcggtcatcgagacggccggctgggcgaccgcgccgccgcctctctcctctcgttgcgcgccgcgggggttgcccgcacttgggggcgcgcttgggcgcggggttggatgcagctccgccgacggaggtgctcgtcgatcgcgtcggccacaccgggacggtggtaatcatgccgagtgataaagcaaaagctccaaagaagaagggcgaagaggatcctggaatcccgccagctccctgtgaaggagaaattagccatgagccacatagacaacggtcactcaatgggaggaccactggtccgacccggcgttcaaccaaaggaaattggacacccgaagaggatgctatattgtcccgtgcggttcagacataccaagggaaaaactggaaaaagatagcggaaagttttccagacagaaccgatgtacaatggttgcacaggtggcaaaaggttctaaaccctgaattggtcaaagggccatggtccaaagaagaagacgaaatcatagttcagatggtaaacaaatatgggccaaagaaatggtcggccatcgctcaagctttgcctggacgcataggaaagcaatgccgggagcggtggcacaatcatcttaacccagccataaacaaggaggcatggacgcaagaagaggagattactcttattcatgctcataggatgtatggaaataaatgggccgaacttacgaaatttttacctggaaggacggataatgcaattaaaaatcactggaacagttcagtgaagaaaaaggtcgattcgtacatatcttctggtttactttcacaagtcccatgcctctctctgattgaatgtcctgcacaatgtgactctttatcggctatggaccaacaaaacaacggaggtactgattgcaatgaccagaacactagtgtgggcttaagctctgatttacaagtaaatgtggatgccaacaagaaagagcacatgactctcactcgt

SEQ ID NO: 35272 - DNA, 1023 bp, Zea mays
  Clone ID: MRT4577_132168C.1
tcacagtggcggtggttttattttttctgttagttattccccctttttgggaacaactgcaaattctcatcggttccctgcctaaagttggcgatcgcctggagaatttttttgaagactggcacgaccggatggaggtgaaattttttagccaagctttttccgtcgatgatctgccggactccatttccgccctgggggccaatgcccttagttccctgattaacctattttccaattccgtcaccgctgtcctgcaaataatcttcatcctggcgatcgccgtgatgatgttgctttctccccaagcctatcgacagggcaccctaaaattatttccctccttttaccgccgccgggccgacgaaatcctgacccaatcagaatcttccctgggcaattggctcacgggcattgtcattaactctttttttatcgccagtctcagcggcattgggttatggatattgcaaattaaattagtcctagtccatgctttgatggcgggaattttaaatttcattcctaacattggccccgccgccagtgtggtatttcccctgatgattgctgtgctggacgccccctggaaaatcattgccgtactaattctctatttcctcattcaaaatgtggaaagctattggctgacccccattgttatggccaagcaagtttccctgctgcccgcggtcaccctcatcgcccaactattttttgccagcatattcggacttttaggtttgatcatgaccaataatgaggaattaggcaaaaaattcgacaaatccgtctttcctggcacccagggcggccctttggagcacgtcattaccgctaaagcagtggcctttggggaagcgctgaaaccagaatttaaggtttattctggccaggtaatcgccaacgcccaagccatggccgaccagttacaaaaacggggctttgacctggtatccggcggcaccgataaccatttaatgttggtagacctgcgctcaatcgccatgaccggcaaagggg

SEQ ID NO: 35273 - DNA, 406 bp, Zea mays
  Clone ID: MRT4577_132169C.1
gcagagccaccagtaaggtctccgcgcgatttcctgcgcttttcctaagctcccgcgcagcacggtggtgggcgggcgtgatcatccatccctgatccgccgggtgcctggcatcgtgtggccggttgccgtgggggcatgggcggccagattcgccgcctcgcgcacccgtgctgcccgagaggggtcgaagaccggttcaagcgtgtacagtgccgtcctgcggttcacgatcgggcgaagactagtttcgtctagggcgtgccacggattttctcgtcgagaggtcacatccgagcgcgagtgctagaaggcttgtacgctcgtcacgtcttctgcagttctacgtactccgtatatatatactgcgcgtctgtcttgtgatactactaaccaagttactgaa

SEQ ID NO: 35274 - DNA, 819 bp, Zea mays
  Clone ID: MRT4577_13216C.1
aatctcggccagccagccagatacaacatacagtaccgagaaagattctttccccctcctcctcctcctcctcctcctgccatccgccgccggccacccagcaatggcggccacgcccctcgactccgcctgggagtggctgatcaccaacttcagcgagttccagctggccaccgtcgtcaccttcgtcctccacgagagcgtcttcttcctctccggcttcccctccctcctcttcgagcgcctcggactcttcgccaagtacaagatccagaagaagagcaacacttctgcttaccagaacagatgcgtcatgcgtctcattctctaccatgtctgtgtgaatttgccagtcatgattttctcctatcctgcctttaagttcatggggctgaggagctctcttcctctgccacactggacggtcattgtatctcaagttcttttttattttatactcgaagatttcatattctattgggggcacagggctctgcataccaaatggctatacaagcatgtccacagtgtgcaccatgaatatgctacaccattcggcttaacttcggaatatgcacaccctgctgaaattttgttcctgggatttgccacggttgttggtcctgccctcactggccctcacttgtttaccctttggctgtggatggttttgagggtgttagagacggttgaagctcacagtggatatcacttcccttggagcccatcaaacttcctgccactgtatggaggctctgacttccatgactatcatcatcgtgtgctctacaccaagtcagggaactacgcctctacttt

SEQ ID NO: 35275 - DNA, 271 bp, Zea mays
  Clone ID: MRT4577_132170C.1
ggacgagtactactagcggcggggcggtccagcgctgctctccctacggcctgctgctggcggtcttggcggatcacgtgcttgaggctcacaataggctcgggctgcgtcgtgaggactcttacggacgccgcggcagagctggtgagcccggtggcgctgctcctactccccgtgtgcctgctgttcctcatccgcctcctctcgtccgaccgcggcgccgcggcgctcgccgacgccttcgccttcggcgggtgccccgacgccggcc

SEQ ID NO: 35276 - DNA, 323 bp, Zea mays
  Clone ID: MRT4577_132171C.1
cttaggattaacttataacaaatcctgacaggaggaacagcacgcagcgaaccaaagcccaagccggtggagccaggggcccgctgtcgcgggggggggggggggcactaacaacggccccaggagcgacctagacagcaaaaacacacgggggccgcgccggcagggggcgaacgaagaaaaccctgcgggacacggggcagcagcacggggccaagccgcggaaagagggggggcggccgcccccagcccggcccccccgggcgggggcgggcgcgtcgggcccccgggccctcacggaacccgtcgggcccggggagcga

SEQ ID NO: 35277 - DNA, 259 bp, Zea mays
  Clone ID: MRT4577_132173C.1
gcaacctcataagcgcccacagcaacgacgcctacaggcacgccgactgaaacttcctcgggaacacagccatactcatcagctacctcaaccccgactacaacacaagcatactctacaagagtgcctgagtatacattacacaataattagctgcaccgactgatcaagggtgaactaataccaagaccacgcgcgacaacagccgtctgagctatagactaaccattcaaacgacgaggtctgcctgatgatacat

SEQ ID NO: 35278 - DNA, 304 bp, Zea mays
  Clone ID: MRT4577_132174C.1
ggcaacaaacttgcaggtaaacttattccaatccatgctcatatccctcaatttttaatttgactcccaaacacaacaccgggaaaaaaatttttacccgacaacatggacattttctttactcccttccaagatattaaaccctacaaacttcccaacacaaattaaagttttatacagcaagcagtaccctttttttcccaaacaaaaaaccacaacacctgaccaccaacttttgggcaaaatgggcttcccaaacaacatgacccatatcccacttcacaatttaaaaaaggccttacca

SEQ ID NO: 35279 - DNA, 387 bp, Zea mays
  Clone ID: MRT4577_132175C.1
tgggtcttcagaccattagctttatcttttccatatcgcacaacaacccgatccacacgatggggctgctgatcgttgctgttgctcatctgtctctcgctgacagcgccaccttcactcatacattccgcgcttgtatctgtcagcctacttccccatctctatcaccgtcatcgcttcatctatccacaaaacccacatcttccaccctataggcttcaacaagcactcgcacctcgcaacatacctttatcaactttgattcaacaatcaccagccctatcttttgagcagtcattggtacacatccctctatgcacatcatctgcaacaacttgtgctacctgtgatcaaccacatatctctggctaaactttcttactacta

SEQ ID NO: 35280 - DNA, 284 bp, Zea mays
  Clone ID: MRT4577_132176C.1
gagctatgtcggaccatgcacgcgcgcgtacgctagcatgcattctagagagtcgacgcatgcgttcgcattcaatctcactaccatacatcatgtgggacgtcgaatccatgcggtttttctaaactacgggcatggatgtcgacgaagagaagatctagcacggaacgcaaggcaagatctaagatcactaaagtgtttactctcgcccacttcatattgatctttcacaatgcgcaaaggatcgcctgatgcactggcgtgcgcacatccgaccggaccat

SEQ ID NO: 35281 - DNA, 305 bp, Zea mays
  Clone ID: MRT4577_132177C.1
acgtccactcgtccgatttattatatcacaaacattgatgctatcataatgatttaggttactgtgactcttgacgtatttgttgttacttttatggcaaccaatgaggcatctacttatgacagactggagtatttttgttagctcaaaaagactggtttctggtgacacatttattttcttgagtgtgacatcattacatgttaaagttgtcttgtacgttacatttatttcctggctttactaaatttttggatcaaccttctaactgttcttcatctaattgatgtgagaacaaatagctg

SEQ ID NO: 35282 - DNA, 628 bp, Zea mays
  Clone ID: MRT4577_132178C.1
ccggccggggatcagtacaccttcttctatctctcgtgggaaaactgggcagcggcgcccggtacctgcgctgaccacggcggcgccattgccgcagcgcccagcacccgacctgagctacgattccttgatcctatcggtgctacgcctagcgaaggttgaagcgagtttgtagaagaggatttagcggagggtttctcaccgtgagtcgtgcgcaccgaggctcggtccccatcagagttgcggcatcgcggcaagagattccccatggtccgaggctgacctcgtcgaattggggtctcgcaaagcctgcccacaatcccaccaactggtccatgaacactgagcaccgatgaaggttcgtgcccatggcggcggcatccattccgtccaaccatacgacgcgtcaggaagaggctagtctggccatgcagcacggcgagtctgcggtggcgatctgtctgtttctctctcgttgtttccctcctctctttgtttactatggctcttggatcggctccaaatccagcgtcaattgatggcgtatttacggaaggtgtacagggtgcccatattatatgcacgttaattttgccagcaaaaaaaaaaaaaaaaaattttgcggccc

SEQ ID NO: 35283 - DNA, 498 bp, Zea mays
  Clone ID: MRT4577_132179C.1
gcatcctcttcctcggagcctcgcgctccggggctggtgggatgacgtaacgagtcgccccagtgccggacgcggtcttccactaactagacgactctacgacacttgcaacctctgggaggaacacaagctgctcaagccaaaaagcgcgaagccgaggacagttttttttaaataggggcattgttttctgaggggagaggagtgatgacatatgtccaaacgttgcatctaaactcaggcagtccgtgcagtgcatttgatgctagcgatcctcgccctgctgtgcaccgccaggtactcttggcagcaggtgactggcacgagtgcaacttctcgctcgcggccttgaagcggctgatcaagacgaggccgcctttcagacatgtaaccgtgtggcctctttgtgcatttttttgtgttctcaccttctcctgctgcttgccggaatgatggctgtggcagttccgcgcgctcgccctggcagggggcgttatc

SEQ ID NO: 35284 - DNA, 1248 bp, Zea mays
  Clone ID: MRT4577_13217C.1
gtctcactcgagcacccgcgcggcgccctacccaacccacgctattctcggcccgctcgccaccgctgcacgcgccgccgccgcatctccagcccccgcgccgctcctcatcttacctgggctagctacagcgacacctgcgtgggtggtggtgtccgactacttcattactcactggccgtccattgcagccctaagcgcggttcccttccagctccgctgcggggagcctggtttcgctcgtgatgtcgccggccgccggagagcagctctctggagcccaccgagagggcagggccgtggaggcgcggagggtcttcataggcgccggctgcaaccgcgtggtgaacaacgtctcgtggggagcctgcggtctcgtcgccttcagcacccagaatgccgtcgccctcttctcccccctgagaggtgagatcgtgacaactctcccggggcacaaagcgccggttaactgcacgctatggcttcccacgaagaaggatgtgctccatgttcgaggtagggagacacactatctactctcaggaagtgctgacggtactatcatggcttggaagattggttctggcaaaggagagtggtttcatgcgttgcagctcccaggaatgcataagaaagggatcacctgtcttgctggaaggatggtgtctgatactattgcaatttttgcttctacttcttcggatggtattgttgttatttgggagatggcaattgagcccaccactggtggcgattgcaaagtgacttgcttgcattctctgtccgttggtttgaaaccaatggtttcactttcattagctgtattgccaggacaaggaggctatctcattttggcgatgggcggtagatcacaagatcacatctattataaggcaggcttaaggcctaatcattctgatttttttttctttacttctttaatatgatggaatttcactcccattcaggctcaatcaggagcaggtgcagagatctggctctgggaggttggaacatggaaagctgttgcccgcttgcaatctcacagtctaacattgacacaaatggagttctctaagtataatgcgtgtcttttaagtgttttgcgggatcgccatttgtctatcttttcactcaggaaaactgaaggaggagttatactttgattgtcttcaagcttggagccacaaaagaattatatgttcatgcttatggaaccccttctgcttttaataccttccttgattc

SEQ ID NO: 35285 - DNA, 200 bp, Zea mays
  Clone ID: MRT4577_132180C.1
gtcgctaagtcaccccttttctagacaggaatccagcagtaccttctcttatgagatacttaggagaggggtactgactcaagaggatgatcaacatgtgcggagccctgaggcattggtcgcttttcttctaggtcctgctacaaggccttattcacaggttccattacttttgagtcgtggaaaagattgtagaaaac

SEQ ID NO: 35286 - DNA, 563 bp, Zea mays
  Clone ID: MRT4577_132181C.1
aaaaaaaaaaaaaaaaaaaaaaaaaaaaaaaaaaaaaaaaaaaaaaaaaaaaaaaaaaaaaaaaaaaaaaacaaaaaaaaaaaaaaaaaaaaaaaaaaggtttgtcccttgggccgggacccccctaggggcaatttttggaaatttccttccccttgggggccgttcggccttgcttttagggggcccatttcgccttttgggggggggttttacaattccttggccggggttttccaacgccgtgatggggaaaaccttggggttccccactttattcgctttgcagcacttccccttttagccggttggggtaatcccaaaagggcccgccccgatcgcctttcctaacagttgcccaccttgatgggggaggggcccccccctgttggggccctttaagcgcggggggggggggggttacccccagcgtgcccgttccctttgccagggccttagggccggttcttttcgtttttttcctttcttttttggccacgttcgcgggttttccccttaaggttttaattggggggttcccttaggggtcccgatttagggct

SEQ ID NO: 35287 - DNA, 627 bp, Zea mays
  Clone ID: MRT4577_132182C.1
aattgaatctattagactgcaggtagcatagcaaccaacaaaccagtcactgatacatatatggtgaccgcagctctgttcttatagatcatacagcacacctgcactacctgcatgactgcatgatgtgaagtaggcagccttctgctagccctcgactaatcagactacattctcctctccccggttcacaaaccttgcccgatggttgtgacctgtggctgacgaaccaccacgaaagcagccaaatagaacagtatctttgcaccgacggagacatcagtaaacttcaggtgcctccctcaggggtacgttcatgctgctttccattgtttgccacccaagcccagagctgtcgctctgcatcattgtgacgaactcgccatagttggtctggccgtcattgttctgatcgacctcataaatggtgtcctcaaggaaagcatttttcatctcgtgttccactgaagccttttgaagctcgtcgacagtgatgtaatcacctccatctttgtcgaaatatgttaaggccgccatcaagtgttctttgtgttctgttttatttaggggcactgttacagcaataaactcttcccagttgatattggtgttgccgtcataatcatc

SEQ ID NO: 35288 - DNA, 133 bp, Zea mays
  Clone ID: MRT4577_132183C.1
tggatcgagtaattcatcaacacgcagaacacatgcagcagagaaatacattgaggtggtttctggtgataaccatgagatttggattacgggcttggtttactatgacagcggggcgaagaatctgggggaa

SEQ ID NO: 35289 - DNA, 442 bp, Zea mays
  Clone ID: MRT4577_132184C.1
ccttttgttatttttgggtgttttttgttttttgtttttttggaacaaacagaaataccacctacaaatagtctaatagcattagctgggaggtacagccttacaggaccactaggaaacctgatgggagcacgcggtgaaaaactatagctgcacttacggaacaggaccgctgttgggcacactctacagacgaaacgcgagggcattactaaaatactggtgcatcctgaatatgccatccatgtgaactgaacgggtggtaaccaagctttttctattacagttacagagcgtgcattaccattaggcacgccaagcaaaaaaactgcaatgagactagtacacgcatcgatccaggccagaaaataggaggagccctctaggagaacgactgtcccacggaggaagtggcgactaggcctgagaggagacccacagg

SEQ ID NO: 35290 - DNA, 326 bp, Zea mays
  Clone ID: MRT4577_132185C.1
agaacagcgacgacgcgtgcgcccctacttcatctcctaattcttctcctcaggtaaccgtcttgaacactaaacctcacaaattgggtggctctttatactgtacgggtcgtttacaaactcgcagtccatcttttctacccctgctataaactacactaacaattcgtatctactgcatctacaaaaccacattccactcagctcaatgacattttgattccagacaatcttttcgaccttcctgatgaccataaccgaaacactcacattcccaactcttcttatattgttacatatcacctccaaattatatatacaaacat

SEQ ID NO: 35291 - DNA, 469 bp, Zea mays
  Clone ID: MRT4577_132186C.1
tttttttttttttttttttcgccctcgcaacacgctaacacttagcactgatcgattgaacagtttgacatcagcattttcagaggaacaaattaaatccacatgccatcagtcgaagtcacatccacagcagagtcggtcagttagaaaaggaaaccaatcgattaatcgagcagagcaggccggatcacgagagggacttggcgacgggggcagttgagaggaggccggagagcaagccgacgacgagcgcgctgttgtacgtggtcggctcgttctgctgcacgttctccctgtcgtcgacgaacgagtcgttcttgaacggcccgccgaccagcgcgcccgtggcgacattcgggttgggctcgggcgacttgagccactcctggccgtcgcagccggtgtcgacgccggcggggatggaccccccccggtggtgcacccgctgcgggtagctgtcccctcgtgc

SEQ ID NO: 35292 - DNA, 289 bp, Zea mays
  Clone ID: MRT4577_132187C.1
gtggtgtgaataatatttttggtggcgatttataatggtggtttgttcatcctaaagaaacaattggtgccatataatattgaagaaggtcagatggaaaagaaaaaaaaaaaatttgatccttcggctaaatccttgttggggggggggggttgacacctgggctcattgttctaagtctcctggctcctacgcatgtggggcgtctgcatggcaatgatgggtggtgctggggaaaattgtactccttgcctgttcccgacttatacctgcccgtgtccttgaaggg

SEQ ID NO: 35293 - DNA, 377 bp, Zea mays
  Clone ID: MRT4577_132188C.1
cggcgaaaacagactgagtggcggcatcaaggacttattgtctttacccaacttactcatctttaaaacagcgcgttgggtaaaaattgtgaatcgtattctacactcttacttactaaataaatcgttttaatttttaaaaaaaccataacaacccatatcacaatattgaggacaacaacaaaaatacaacaaaaaaaaccatataaacatcaaaaaacaaaaaaattcaacaaacaaaacaaaaaaaaaaatggtctgccctttaaaagaacccatttacactccccctcctattacaaaaaaaacctttttttaccctccccaaattaaaaccattcgcccccttttataaaacctctctacttgaaaaaccc

SEQ ID NO: 35294 - DNA, 151 bp, Zea mays
  Clone ID: MRT4577_132189C.1
gaagacgtcgtcggaagtccatcatcactactaccctaaagtgccttgtaaagcacaggctgttgcttgaaggcattgaagttttctgggggggcacgctttgggcctactaatcagacactttggccatagaaaggggtgggtcccaagc

SEQ ID NO: 35295 - DNA, 258 bp, Zea mays
  Clone ID: MRT4577_13218C.1
agctattcgactgctcagctcttatctcctcagtgcctgtacctgacatatgctactctatgggcctcgcactcgcaaccgcacatagaaagcctaggagtctctctacctagcgtagcttgagtactctctcagccccgtatcgggacccctgctctgcgcaatccatccatggcgtaggaatcaggctgccccttgccaaagtatgtcgattggtatgttaatgatccagctttgcagacggattcactgtcatat

SEQ ID NO: 35296 - DNA, 242 bp, Zea mays
  Clone ID: MRT4577_132190C.1
aaaaaaaaaaacacaataaaaaaaataaattataacatacaaaataatataaaaaaaaaaagggaaataaaaaaaaaagaaattagataataaaaaatggcggatgctttggaggctcaggtcttgctttcacgagcgtccaatgtcttactttttgtttcgggccctttaaatatattttagtggccggtgttttaaactgctgggcctgggtaaacccgggctttacccagcttaaccgt

SEQ ID NO: 35297 - DNA, 318 bp, Zea mays
  Clone ID: MRT4577_132191C.1
tctgttattcctattacacacacacatacctaataaagctctttgttctggagctttatcgttagtgccaagaatgtgaaacgagggcaccacccatgtacggaagctggattaacatctgatgatatagcgcatgctgggtgtttgtatggccatcgacgtcgctgtggcattaggaagcgagatattggtgcatcgggctggtcaaacgggttcatcatgtgtgtggcacgcatacggatctcagctctaccttcttatttgtttgtttggtctagcgtgtatgagatgctattgaacttgacatgccctgctggt

SEQ ID NO: 35298 - DNA, 405 bp, Zea mays
  unsure (1)..(405): unsure at all n locations
  Clone ID: MRT4577_132192C.1
tccgtccgctggtgtacccgtgctcctatcgatccttgtccggcataccatatttccaggttcaagcctcgacnncggcgtagtatgattctgtcatgtcatgctgtctttccctgaaccctgatgccacataccgtgatctatcggcgtgcgttgcccgttgtcgcttccgggacatccagggtgtgcggtgcctggatcctcatgctacaatcgatnnctctgcgggaaagattatcctaccggcgtggcattatgtgtgcatgtttaagtgcgtgcggcgtaccgagcacatacaaagttgcctctgttgggacatccgcttgccatcccttgcgcgaaccggccgcttgagatgaaagatgtccccttagatccctctggggctgtggggattaaacatgc

SEQ ID NO: 35299 - DNA, 390 bp, Zea mays
  Clone ID: MRT4577_132193C.1
gttgggggggggggaaaacaaaatattggggtaaaaagaaagggggggggttgaaaagggggggtacaaaaaccttgggggggaagtaaacggggggtccaaaggaaatcccgggacccagaataggcaaaagtattcttcgggcccgaattaactttgccactaagggagttaactaccacgtttttttaaaataaaacaattggttttgttttccgaaaagggggggttccctttaagttaaagcaactgggaggccggggctgggaataaacaccttacaaaaaagaatattaaaagattgtttttgttaacaaaaaattaataaggttgggaaggactgattaacttttcaagaatggggggaagcctttaagtcccctttttagg

SEQ ID NO: 35300 - DNA, 635 bp, Zea mays
  Clone ID: MRT4577_132194C.1
ccgccatcgagtacgccgtgtgcgccctcaaggtggaggtcatcgtcgtcatcggccacagccgctgcggcgggatcaaggcgctcctctccctcgaggacggcgcgcccgacaagttccacttcgtggaggaatgggtcaggatcggcggtccggccaagactaaggtgaagaccgaccacgcctcggtgccgttcgaagaccaatgctccatcctcgagaaggaggccgtgaacgtgtcccttgagaacctcaagacgtacccgttcgtcaaggaaggggtggagaaagggaccctcaagctggtcggcggccactacgacttcgtcaatggaaagttcgagacatgggagccctaagccgcgcgcggccggccaaattaacagccgcagcaaggcttcatcatataactccaacaaggctacaccatatatacatgcatattatatacaaacgctcccgaacctatttgccgcgtggagtacttatttgccgctatatactagctatacacataccggaattgacgtaccggtgagaacaactatactgtaataagcaatacctgcgtgctttgacttctaacgcggagttgttttttttttatgataatatgatgcatatataatttgatt

SEQ ID NO: 35301 - DNA, 1320 bp, Zea mays
  Clone ID: MRT4577_132195C.1
gactccttagggcgattgggatcctcgaggccggccgggacagagcgaaacaatccgcagagactcggaagtcggaaagaatccctcctgttcttcgtcaaccctccagaacctgctctctcttcctctacgagactacgaccgtgtaaggacatggccgtcgagcgcttgaagaccgggttcgagcagttcaaggccgacgtctacgacaagaagccggagctgttcgagccactcaaggcgcaccagtcgcccaagtacatggtgttcgcctgctccgactcccgcgtgtgcccgtcggtgaccctgggcctgcaccccggcgaggcctttgccgtccgcaacatcgccagcatggtgccgccctacgacaagaccaagtacgccggcgtcggctccgccatcgagtacgccgtctgcgccctcaaggtggaggtcatcgtggtcataggccacagccgctgcggcgggatcaaggcgctcctctccctcgaggacggcgcgcccgacaagttccacttcgtggaggaatgggtcagggtcggcgccccggcgaagtccaaggtgctggccgaccacgcctcggcgcctttcgaagaccaatgctccatcctggagaaggaggccgtcaacgtgtcccttgagaacctcaagtcctacccgttcgtcaaggaagggctggagaaagggaccctcaagctggtcggcggccattacgacttcgtcaatggaaagttcgagacatgggaaccctaagtggccatatacgtacaaatacgccccaccggacttattagctgcgtggagtgcttaattatttgccgctatatatacacatataccggaatttaccggtgagaactatactgttgtaataataatagcgggaaaaaatattctttgcaaaaaaaaaaaaaaaaaaaaaaaaaaaaaaaaaaaaaaaaaaaaaaaaaaaaaaaaaaaaaaaaaaaaaaaaaaaaaaaaaaaaaaaaaaaaaaaaaaaaaaaaaaaaaaaaaaaacccaaaaaaaaaaaagagggggggcccctttaagggaaccaatttttaaacccgggggggggggggttaaattttttttttgggggccccaaaaaaaaaatccgggggcggggttttaaaaggggggggggggaaaaacccggggggcccccaaattaaagggcttgggaaaaaacccctttttcccggggggggaaaaaaaaaaaaggcccccccagatccccttttccaaaattgtccccccctgaggggaaaaggggccccccccctgggggggccttataaccgcggggggggggg

SEQ ID NO: 35302 - DNA, 156 bp, Zea mays
  Clone ID: MRT4577_132196C.1
ccagtgagcggcaagccaccgagcgtcctgacggcctagtttccggtcaactacagctgtgacatcgccgggctggcggcggacccggagacgatcgccaagatctgttaggtgataagagatccactcccgatgggccatgctggagcgcgctcg

SEQ ID NO: 35303 - DNA, 482 bp, Zea mays
  unsure (1)..(482): unsure at all n locations
  Clone ID: MRT4577_132197C.1
ccggggnncgagccccgnaccaataggnaagccgaggtccagccgtagtgacgtcgatttcgattaacccgagcggcgcaaatccggtgtcaccgaagcacatcttccatctccagcaattcttccttcctcctcgtcgcattccacgtccggatctcaaattgtcccatcccgtgctcctcctccccgatcccatccctccgctccagatccgcacgccgccaccggatccgcagccagcgcggccggcatggaggagacgccgccggggcagcgcccgcagccgccgccggcgcacgcgtctcctccgttcgcctcggcgcccttcacaccgctgccgcgcgtcttctctccaggcctcgccgccgcgcggggcacgcccagcccccccggctcggggcccggccacgcgctgccgcacctcagcacgccacccggcccggccgtcttctcctcgccgctgcgccctgcggccgtgccct

SEQ ID NO: 35304 - DNA, 140 bp, Zea mays
  Clone ID: MRT4577_132198C.1
aattaggcgcgtaatcaattaatactgcgtatgccaagcgatactcaaaagatagatatgtgtggggcattaattagcccctcgatcatcacaagggagccaaatacacttgatatatagcggctattacatgaaacgtt

SEQ ID NO: 35305 - DNA, 195 bp, Zea mays
  unsure (1)..(195): unsure at all n locations
  Clone ID: MRT4577_132199C.1
atcgangctganncatngatgaggctcgcgtacggcagctaagagttcgcctcgaggctcctcgttcgcctcctactccaagttctcgcagcttcacgatctctactgtaacggctgttccatcagcgcgccgcggacgcctacatgcagctcttcaacccgcacgcctggcatcatgactgactgggagaaccc

SEQ ID NO: 35306 - DNA, 327 bp, Zea mays
  Clone ID: MRT4577_13219C.1
acgcccacgcgtacgctcacgcttccgctaattcgtctacgacgcatgctagatccggggggaactcgtcgatgccgggttgttttcactggatgaaaaaggctcgccatttgttatctacgcgagtcacgggcaagcatccatgaaccaggtgttagagggctacccgcggcagtactgggaggacttcaacgttctctgctgcatgtgcacggctgtatactcacattttggtggagaagaaaaatcaaaatctatttctacatcacaccatgtcgtccaacaacttgtagcgatcattctgaagagggatcttgaggcaccgtg

SEQ ID NO: 35307 - DNA, 412 bp, Zea mays
  Clone ID: MRT4577_1321C.1
gggaatctggggcaatgcaaaaacaccccccaaaagcacagagatctttaaaaccaagagtgcttaaagcgacagacttcaattacaaatgcaaatactattttttttcagcaagtgatgatggaaggaaacacccaaacattacccaggggggccaggacacaaacaaaggttttttaacaccacaacctggcttgacagccaaacagatttatgcaagcagatcagtattcctccttcttgtcaccgtgatcactgccgccctttggggggaccttcttgtagtccttctccagggggggcaggtccttgcgtgccttggaaaactcccccttcttcatgcccttgccgacgtaccaatgcacgaacgcgcgcttggcgtacatgaggtcgaacttgctgttgatgcggg

SEQ ID NO: 35308 - DNA, 2177 bp, Zea mays
  Clone ID: MRT4577_132200C.1
agccctcccccctctctctctcctaactctcacctcccaaaatttactccagtttctctttcttcttatctctcccccaagcctgtctctctgacgcaatgccgtttcccaccgcgcggtggcggcggcggcgcgagggcaccgcctctcggtggtgcgggatcttggtcctggctctggtggcgctggcggccggtgcgacggcggagacgtcgccgttggacgtggcggcgatgcgggctgtggcgaaggcgcttggcgcggacaagacgctgggatgggacgtcgcgggcgacccctgctcgcgcgaagcggtgggacggggtgtcctgcgactcgtcgggtcgcgtcacggcgatccaggtcggggcgcgaggcctgacggggaccctgcccccggaggtgggcgacctcaccgagctcacccgcctcgaggttttcgacaacaagctctccggcccgctgccctcgctcccgggtctctcctcgcttcaggttttactagcccacaacagcagtttcgcctccatcccctccgacttcttcaaaggcctcaccgggctcaccgccgtcgctatcgactacaacccgttcgcgtcgtggtcgctccccgcctcccgcgcaagcgagacatatagccaagcgagcaatggtccacgggacatccatgttgttgaaagtggaaatatggtcatttcaatccaagttctccgcaatgtgaccaacaacttcagtgaggagaacatccttggtcgaggagggtttggcactgtttacaagggcgagcttcatgacggcacgaaaattgctgtaaagcggatggaggctggtgttatgggtaacaaggggctaaatgagtttaaatcagagattgctgttttgaccaaggtccgacaccgcaatcttgtttcactgctgggctactgccttgatggcaatgagaggattctagtgtatgagtacatgccacagggggcactgagccaacacctgtttgagtggtctgagaaaaatttgcgaccattggaatggaaaaaacgacttagcattgcacttgatgttgcaagaggcgtcgagtaccttcacagccttgcccagcagacctttatccacagagacttgaagccatcaaacatacttcttggtgatgacatgaaggccaaggtggcggactttggattggtccggcttgcaccagctgatgggaagtgtgtctccgtagagacaagacttgctggcacttttgggtaccttgcaccagagtatgcagtcactggacgagtgaccacaaaagctgatgtcttcagctttggtgtcatcttgatggaactgattacaggacgcaaggcacttgatgagactcagcccgaggatagcatgcatttagttacatggttccggaggatgcagctcaacaaggaaacattccgcaaagcaatcgaccctgtcattgacctcgacgaggaaacctacgctagtgttagtaccgtctcagagcttgctggccactgctgcgctagggaagcacaccagaggcctgacatgggccatgctgtcaatgtgctctctaccctttcggaagtttggaaaccagccgatccggactcggatgacagctacggtatcgaccttaacatgtccctgcctcaggctctgaagagatggcaggcgttcgaggacagcagccactttgacggtgcgacctcgtcgtttgttgcgagcctggataacacgcagaccagcatccctacgaggcctcctgggttcgcggactccttcacctctgccgatggaagataaagacatttacgctgctagtaagggtgtgcaaaaaccttatgcttccgttgaaatagaagctcgggcgatccttgttcattcttttagtctcttcaccccacaccaatctttccatgtctctttattcgtctctgtactgccgtgtagctgctctttggtcgtgtatgctgtgatcttgtcccgaaaattgcctggaagttcgaagactttgctaactggtttatgtcatttgctaagattaaagtagaaggatgctagagctgtatggttgtatcgggtactgacaatttgcaaaggaaggtgattctgtgttcgtccactttgatcctgtcccaaaaattacaggaagtggaaaaaaaaaaaaaaaacaacccccc

SEQ ID NO: 35309 - DNA, 1659 bp, Zea mays
  Clone ID: MRT4577_132201C.1
gggttaccagcagtattaaccgccacattcttggaagcaaaggtaggaagtttcccatagagattgttaaaatcacagttgcagggggaaatgctaatggtggtgctcgcgcaagtgagacatatagccaagcgagcagtggtccacgggacatccatgttgttgaaagtggaaatatggtcatttcaatccaagttctccgcaatgtgaccaacaacttcagcgaggacaacatccttggtcgaggagggtttggcactgtttacaagggtgaacttcatgatggcacgaaaattgctgtaaagcggatggaggctggtgtgatgggtaacaaggggctaaatgagtttaaatcagagattgctgttttgaccaaggttcgtcaccggaaccttgtttcgctgctgggctactgccttgatggcaatgagaggattcttgtgtatgagtacatgccacaggggacactgagccaacacctgtttgagtggtcagagaacaatttgcgaccattggaatggaaaaagcggcttagtattgcacttgatgttgcaaggggcgttgagtaccttcacagccttgcccagcagacctttatccacagagacttgaagccatcaaacatacttcttggtgatgacatgaaggccaaggtggcagactttggattggtcaggcttgcaccagatgatgggaagtgcgtctccatagagacaagacttgctggcacttttgggtaccttgcaccagagtatgcagttactggacgagtgaccacaaaagctgatgtcttcagctttggtgtcatcttgatggaactgattacagggcgcaaggcacttgatgagactcggccagaggatagcatgcatctagttacatggttccggagaatgcagctgaacaaggaaacattccgcaaagcaatcgaccctgttattgaccttgatgaggagacatatgctagcgttagtactgtctcagagcttgctggtcactgctgcgctagggaagcacaccagaggcctgacatgggccatgctgttaatgtgctctctaccctttcagaagtttggaaaccaactgatccagactcggacgacagctacggtattgacctgaacatgaccctccctcaggctctgaagagatggcaggcttttgaagatagcagccactttgacggcgcaacctcctcatttgttgcaagtttggataacactcagacgagcatccctacaaggcctcctggattcgcggagtcgttcacctctgctgacggaagatagacggttagctgctagggcgtgccaaaccttgtgtgcttccgttgaaatagaaggctcacgcgatccttgtgttcattcttttagtctcttcgctcctaatctttcatgtctccttattcggctctgtactgccgtgtagctgctctttgatcctgtcccaaaaattgcctggaagttggaaaaaatttgctaaccggttatgtcatttgctaagattaaagtagaagtatgctagggttgttgggttgtatcggatgctgacaatttccaaatgaaggtgatcctgtattcgtcgaaaagtatggccctggcctgaagtttttccatgctcttctgaagcaacgcctcagccatgacatcatttcgcagg

SEQ ID NO: 35310 - DNA, 387 bp, Zea mays
  unsure (1)..(387): unsure at all n locations
  Clone ID: MRT4577_132202C.1
acccctccaaaaccccaacgtgnctgttaaaatttaataaacacactccacccaaccacaacataactgacaacctcacacctacttacccanaaacaacttattcttcaaatccctccctttaccncaattactccattctcctttatactcaaactctccntccattatatccagtgtacactatttcaacattacgcataaattctacttaatcttaaaacttatccaaccaatacttatactacaatctgacttttaaataattcctataacctatgacccacttggaatctatttcttcttcaacatttctagcttcactcaaaattaacgcatcagacatcattttctttacctttttttaccaacttcaattctcattac

SEQ ID NO: 35311 - DNA, 873 bp, Zea mays
  Clone ID: MRT4577_132203C.1
actctccctcactccacgggagacgacagagcacggagaaagcgaacgaccgcggcgatgctctacatagtcggcctaggcctcggcgacgagcgcgacatcacggtgcgggggctcgacgccgtccgccgctgcgccaaggtctacatggaggcctacacctccctcctctctctcggcctcgacccagcctcgctcgctaacctcgagaagatgtacgacaaggagatcacggtcgccgaccgcgagatggtagaggagcgcgcggaccagatgctgagcgaggccgcggaagccgacgtcgccttcctcgtcgtcggcgacccgtttggggcgaccacacacactgatttggttgttcgtgccaagaacatgggggtagaggttaaggttatccacaatgcatctgtcatgaatgctattggcgtttgtgggttgcaactttaccgctatggagagaccatctctatacctttcttcacagagacatggagaccggatagtttctatgagaaaattcagaacagtcgtcgacttggcttgcatactctttgcctactagacatccgtgttaaggagccaacacttgagtccttatgcagaggaaagaaagtgtacgaaccagcaagattcatgaccgtgaacactgcaataagtcagcttttggaggtggaggaactgcatgggggatctgcatatggtccagattcgctatgtatgggtgtagctcgccttggaagcgatgatcagaagattgtggctggccccatgaagaaactactagatgttgattttggaccaccccttcactgtctcattatagggggagagactcactctgtggaacaagagatgctagaattctacctgatc

SEQ ID NO: 35312 - DNA, 1080 bp, Zea mays
  Clone ID: MRT4577_132204C.1
cctccatagtataaaatgctcagatttttgaagtacttttcgaaagagtgtttttaaaaaccgctgtttggcaggctctggttttttttccggtgccaaagccctgaccctaatgcgactcaagaatcatctgccgcttgctctgaaagggactactcccgtatgccgtttctggggaagcaacccttgctaacgcctgcctgacagcctccttcagagacctgaggcttgcacctgcacttccccagccgtcctccatgcacagcacgaacacatgccgcgcccttcctcctaacgaggtcatgttggccctcaccgtcttcagcctcaggccatggaacgcctgggcgagcccggcgacgaggtccggccggtcggcgcagcttatcgaggcccttatgtagacggacctgtcggcgccggcgtcgccggtgtggagctcgatggagacctcgtcggtctccgggggcaggggcgtgctctgggtggtggtggtggcggcctcgcttgctttcctcttcaggagcttcacttgctccaccactctggcaagcaaggtggccttgtccatctgcctggtatcaggaaccatcctcctgagcgtagccagatgagcgttgatcctctcccggcgccgccgctcggcctcgctgtggactttcagggccctcgcctccgtcgcactcctccccgaccccgacgacgacgacatgtccggcggcggcgctacccgcacggccggtggagcggcgctttcctgctgccggggcagaagaactggactacccccggccccgagcgctgaagggtcacggccatcgtatggctgcagctcctgcttcccttgcagaggttggcgcgcagccattgaaccaggcatcatcctcacctgcagtgcaggttcgtttcaaataaaagtggtgcaacaacgtcttgtcatctcattctctggaatgagtgatatgcatatgcttgtgtgcgagatgtgatcatcttcttatgatatgagtgatgacagacaggcgtactgcggtgtatagtgtgctcgttgatttttcccggccggctcgaggtaccaat

SEQ ID NO: 35313 - DNA, 772 bp, Zea mays
  unsure (1)..(772): unsure at all n locations
  Clone ID: MRT4577_132205C.1
ggtcttgtattcacctataataagagagtattggcttactggaggagaatatacagaacatgagtctgttttggccccgagatccgtggtgatcgttccagagtaaaattgagtcgagagtgccgggatcctagtcgagagtgccgggatcctgacacccatgatcgccgtggccgcgtccctcagggcctcggcctccgcggtggccgaagctggcggcgacccggccgttcttcacgcggtcctcatcaagaccgcctcgtcctctcgcgccgcctacaacctcctcttctcccgctaccatccgtcgctctcgttgcacctcctctcccacctcccgttctgcttccgtcccaccgccagctcgctcacttcctcgctctcctccctctccgcttcctccccggcctccgcgctcccgctcctccgccgcgtcctcggcatgtcccctgctctcctctgcgacggcccgctatcctcactcctccgctccatgccgccgtccatcgcaccgcacgtgcacgccctcgccttcaagctcgccctctcgtcgtccccctactccgcctcttgccttattactctctactccagagcccgctccccggcatgcgcccgccacctgttcgatgaaatccccgttgcaaatcgggaccccgtttgctactcctccacgattgttgggctcgcacagaatgggtggtacgaagaatccctctctgtgttcgctggcatgcgcgcaaatggtgttgnattctacatgcatgcgctc

SEQ ID NO: 35314 - DNA, 376 bp, Zea mays
  unsure (1)..(376): unsure at all n locations
  Clone ID: MRT4577_132206C.1
cggctcatattntgctgtagcgccttcgacgtcgccgacgcatctaacgcagttccctccgccgcagcccgaggcaagatggttgtttagaacgacattgatctgttcaacccgacggcagaactcgagaagcttaagcacaagaaaaagagactcgtgcagtcgcccaactccttctttatggatgttaagtgccagcggtgcggggggataaccactgttttaagccactcccagactgttgttgtgtgcactggctgtcaaactgtcctctgccaacctacaggatgaaaggcaaggtttactgagggctgctctttctgtatgaagggagactatatccgcccgccgccttcaagccttttgatttatgccc

SEQ ID NO: 35315 - DNA, 372 bp, Zea mays
  Clone ID: MRT4577_132207C.1
acaaacataatatacacagctgatcgatcgagctgcataaacctgcacgttctacctagcagggcccaagatgtcaggcttacttcccaattccgtgcgcccctatcgccgatcttctgatcttcactctccacgcctccgccatacatgcgcagatacctgcctcggcaactaccgacgccgccgtggccgtcacaaacccgcatccaggaagcactggcactgtctgctgtatattgggcgccagcggtccggactctcgtctggaactctacatgcacgacatcctgtgccggtcgagcctgacagctcatcccatcaccggtttgctgggcatcatctaccacgggcatgtccatttcgcgcggccca

SEQ ID NO: 35316 - DNA, 407 bp, Zea mays
  Clone ID: MRT4577_132208C.1
tctctgacacgtgggcagacccgtcagcgcacgcatggacatagccatgggctgacgcatggcgcaatagcagaacacgcattcaacgtttgctctacgcactgtgcgcaggtttcgacagcgtgacatgcaaaaacttgaatcgatgggctacttcgcaacctaacgacattgtacgcgctagatcagatcgccagaccccacgctgcgagggctgtaccagagcagatcgctcttcgggcaacatcgctatgacggtgccatcacactatgcattcaggggaataagtatctacagtccatccagatcgatcttattgacgatatcctatacggtaatggcattgatggcgctgcggatgaattgctggaaccagctgattcctgcgaactgcactctcaacccg

SEQ ID NO: 35317 - DNA, 379 bp, Zea mays
  Clone ID: MRT4577_132209C.1
ggtccagaattacccgggccgacccacgcgtcagcccacgcgtccgccgacatggcaagtggtctcatgccaaatgcaccgtgacatgagccaaacaacccatgaacgtcgctccgtaggggacggggaaagcaattccagcagacccacacacgtcgcgtcttccatgcatagaaacgagggaaagcggtttcagcagcagtggggtggagccattttactcatcctaatccgtccaccaacttggctacaaaaagtcgtaccgaggcccctcaagcgatagcggtggtggatctgctcggcgccggtggcccgacgctctccagctactccgacttacctacgtcctccaaggtacgcacgtacgtacatctgattt

SEQ ID NO: 35318 - DNA, 3196 bp, Zea mays
  unsure (1)..(3196): unsure at all n locations
  Clone ID: MRT4577_13220C.1
ccattgcagccctaagcgcggttcccttccagctccgctgcggggagcctggtttcgctcgtgatgtcgccggccgccggagagcagctctctggagcccaccgagagggcagggccgtggaggcgcggagggtcttcataggcgccggctgcaaccgcgtggtgaacaacgtctcgtggggagcctgcggtctcgtcgccttcagcacccagaatgccgtcgccctcttctcccccctggtatgccggccttttcctgcagttttgattaccagatgagtatatctcacttgttcgtgtcacccaaatcgtccaaacacgtgttcgtgcgagcagagaggtgagatcgtgacaactctcccggggcacaaagcgccggttaactgcacgctatggcttcccacgaagaaggatgtgctccatgttcgaggtagggagacacactatctactctcaggaagtgctgacggtactatcatggcttggaagattggttctggcaaaggagagtggtttcatgcgttgcagctcccaggaatgcataagaaagggatcacctgtcttgctggaaggatggtgtctgatactattgcaatttttgcttctacttcttcggatggtattgttgttatttgggagatggcaattgagcccaccactggtggtaagattgcttccttgtggattgccaatattactgctaggagcctaatattttgtcatgatggtttaaactattcaaactctaattcttttttattatatgattttgacggttctgggtaatgtgcactacacttctacttaagttatttgctttctcttcgcaggcgattgcaaagtgacttgcttgcattctctgtccgttggtttgaaaccaatggtttcactttcattagctgtattgccaggacaaggaggctatctcattttggcgatgggcggtttagatcacaagatccacatctattgtggggataaggcaggcaagttcattaaggcctgtgaacttaaaggtcattctgattggatcagaagtttagatttttctttacccgtgatgatggacggtgaaaggcacaaccttttccttgttagctcatctcaggacagaaccattcggatatggaaaatgacttcagaagctgctgcttctggctcctccttacaattgaggaaagaaactattgagatgacctcctatattgaaggacctctatttgtggccggcagtacaagctatcaagtatcactggagtctcttcttgttgggcatgaggattgggtatattctgtagagtggcagccacctacattgttaactggggatgaagctcatcagccaatgagcatattatctgcatccatggacaagatgatgatgatatggaggccagagaaaactactggcctttggattgattcagtgactgttggtgaattaagtcactccgcacttggattttatggtggactttggcagcctgatggcagatccattctcgcacatggttacggtggatcctttcatatgtggcgagatgttggactggattctgaaaattggcagcctcagatagtcccgtccggtcatttcgcacctgtgtctgatttgacatgggcaagatctggccaatatttgctatcagttagccatgaccagacaacacgcatatttgctccttggagaaatcaagttaaccctggagacatgatctgttggcgtgaaattgcccgtccgcaaattcatggtcatgatctcaactgtgtgacattcattcagggtagtgggaaccatcgttttgttagtggtgctgatgaaaaggtctctagagtctttgaagctcccttatcatttttgaagaccctacaacaagcaactctgttgaaacctgacatctccgaggattttgacaatgttcaagtccttggagcaaatatgtctgctcttgggctttcacagaaacccatatatacacatggagtcaaggaatcctcaatcagtaattctaacgatggtccagattctatggagacaattcctgatgcagtgcctactgtattcactgagcctcctgtggaggaccaacttgcatggaatactctatggcctgaatcgcacaaactatatggtcatggaaacgagctcttctctatatgctgtgattatgaagggaagcttgttgcttcatcttgcaaggctcaatcagcagcagttgcagagatctggctctgggaggttggaacatggaaagctgttgcccgcttgcaatctcacagtctaacagtgacacaaatggagttctctcgtaataatgcgtttcttttaagtgtttcgcgggatcgccatttgtctatcttttcaatcaggaaaactgaaggaggagcagagcatcgtctggttgcgaagctcgaagcacacaaaagaattatatgggcatgctcatggaaccccttcggctatgaatttgcaactggatcaagggacaagagtgtcaagatatggtgtgttgaagatgcatcttctgtcaagctacttgcaacattgcctcagttccgtgacagcgtaactgcattagcatggatgggccgtgaccgtgcttctaatgctggtatcgtcgctgctggcatggacaacggattgatcgagctctggagcgtttcaggtggaagagcttcttcaggaacccagctcagcgtggcatgcgtgcttcgatttgaccctctcttgtgtcacgtgtcaactgttcaccgattacggtggcggtgctcaaccgatgagaaatcgacacttgagctcgcgtcttgtggagctgatcacactgtaagggtgtttgaggtctgcggcagcatataggtttatgtccaacctagtaaatcaaaactgttatgtgcgtggcaggtttttattgatatcggacaccgttgggttgtaaaactagtcctggtatgagaatcgagaaaagagtgttttcatgaagcatgtgctgtccatatgtaaccccagtttagtggtaatagattcagtgttgccctcatttgagaagctatgaaattatggttatagatggtgatgtatttgctaaatcccctatatccgaaacagggggtatcctctcaaaatgnacaaaatacaaattcgatnaaaaaaaattaaaannagggcggcagatataaaagctccgagcttaagtcg

SEQ ID NO: 35319 - DNA, 354 bp, Zea mays
  Clone ID: MRT4577_132210C.1
aggcccaattcccgagcaaggaggtggaaccggataaagagctggccataataaccacgggagataaggcataaacaggagagcacggcaaactggcaggaaacggaaaactggaaagaaaaaaaaaacattgccaaacagatacacactacccaaggggaaagccaaacaggaaaggcgacccacccatgaagggggggccggacctgtacgtccaacacctccaatactgcgacggacttggtgactggaacgaagccggtgacccccgggggcccggggcccggaggggccatggactcgggcaggggggtgctgttgtaccggggcaagatggcgaaaacgacgaaaacg

SEQ ID NO: 35320 - DNA, 307 bp, Zea mays
  Clone ID: MRT4577_132211C.1
cgtgtgtgttgtttcgatttaggccagatggggaaaaaaggagggagataaagccactccgacaggtctatcactcgatcgatcagcgctcccctgcacaagaaaaccagttttccgaagcttcgagacagggcggttggcggcagccgcggggacgatggtcggaatcttctccaggttctcttccggcgccggccaccgccgcgccaagagtgccgtcgaggttgcggagacattggcgcccaacatggagactggggagtctgacccggtagccgatcctggagatagccctcacggcattgag

SEQ ID NO: 35321 - DNA, 557 bp, Zea mays
  Clone ID: MRT4577_132212C.1
cattgggtacctcgaggccggccgggctacacagtcaaccacagagacaggcgtcttcctactcgcctatctccgcgactctcagctttccccaattcccccccttctcccttttctcaccaccgccgccgctccccccgatcaacaacaccatggagggagtgcatcctcgatccacactcggtcaggctggtcatccaacacggaaacgcgtgttgggagctgaactgcctccagcatggtattcgggctgatggacagatgcccggggacaagaccattggcggaagagatgatgttttcaacaccttcttccgtgagactggagctggacaagcgcgttccccgagctgcttttgatgagcttgagaccactgtcatcacatgaggtgaggactggcacctacgcgcagatcttccatcctgggcatctcatgatggtaaaggaggatgcagcccacaagttcactcgtgatcactacagcattgctttcgagattgatgacctgtgactggaacgtatcatgaagcttgcctataaatgcactggcctccat

SEQ ID NO: 35322 - DNA, 469 bp, Zea mays
  Clone ID: MRT4577_132213C.1
ggggggggggaaaaaaccaacccttggcagcagatattatacccacacaaggggaatgatgaatacaagggcccgggaaaataaagagacccccacccacccacacaaaccccaagcaacttcatgctggaacaaaaacgacccaagaaacccggccacccgcacaaaattatttttctcccttgcgcccccccctattccccttttcccaacctaaaacaaacgaacccccttgctccaacacccaatccaacgaaagcctttttttaactttggtcaaaaacccttgctcctgaaagaacccaaaacccttatggccccccccccgaagaattacttgtggtaaaaagcccccaaggcaacccccaaaaacgggcccacccaaaaaaaccaaggggcaacccaagggttgtcctttttgtaaaacaaaggggggcccaagcttcttgcccggtttatgcccgtgccc

SEQ ID NO: 35323 - DNA, 286 bp, Zea mays
  Clone ID: MRT4577_132214C.1
gtcgcggcgggcagtggcggcagtatgttggctaccagggtatttagcctagttggcaagcgagcaatgtccacctctgtgtgtgtcacgagctcatgaaagtgttgtgaagagcgaagacttttcgctcccagcttatatggatcggcgtgaccaccccttgccggaggtggcccatgtcaagcacctgtctgccagccagaaggcactgaaggcgaaggagaaggcctcctggagcagcctctccatggatgagaaagtcgagttgtatcgcattaagttcaag

SEQ ID NO: 35324 - DNA, 291 bp, Zea mays
  Clone ID: MRT4577_132215C.1
cttttcaaaagaggccgggcggggaacttattttcccgtactcgtcgacagcaaggaagcgctccccgcgtgtgcacacctgcaacctgcgacgcaaagtaggagaggacgagccgccgaccacacgccttggagtctgccagccgccgaccacaagcgccgccggcgaccgccgcaaggacggagcacagaggaagcgaaggctgcaagccgcccagacttcacgcggtgaacgtggaggggccttcggccgacgagctgctcgcctgcgactgccacccctccgctccg

SEQ ID NO: 35325 - DNA, 269 bp, Zea mays
  Clone ID: MRT4577_132216C.1
ctcagcggactggtccacccggagttgagtcggagtggcgagctggcagtacgggctctggagcagttcgacactgtggcggaggccatgctgataatacacaagaaggggattgtcaatgaacagtttctgctgcagcggctggcagacggggccatcgacctctatgccatggtggtggttctctcgagggcctcaagatccctgagtgagggccaccccacggcccagcatgagaaaatgctctgtgacacctggtgtatcgaggc

SEQ ID NO: 35326 - DNA, 332 bp, Zea mays
  Clone ID: MRT4577_132217C.1
agaaaaaaaatagctgaaaaaatctgggcgcccaggtgcaaaagtttaacagcggggccgttctttgtaaacaaaaaggggccctgggatcctccagaggggggaccttcaccattttttggtcactccaaactcttaaaacgggccctaaaaatgatttccaacaatgccctcggttttaagcgcccgacgcttagctccttggtttggccaccaaagggcttgcggggggtgactcgtacctcccccggggggggagccttttttggccgcctgagttacgggccaggggggggatccctcttttgaccagaatgggcccggatttaaag

SEQ ID NO: 35327 - DNA, 123 bp, Zea mays
  Clone ID: MRT4577_132218C.1
gtcaagctggtgacgagattgttgcgatggatcctatacagaagctgtgaagaataatcggcgagtcaagtgtcactgattctcgccgacacgatggtgatgctattacgattccctctgaga

SEQ ID NO: 35328 - DNA, 201 bp, Zea mays
  Clone ID: MRT4577_132219C.1
gaaatagtactaatatttgtttgtgtcatgcaagctacgtagaaactaggggtgcatgcacatggacccacgaaaatttagaaatctagtagtttggataaattttcaccatatatacactacctataaattattattatacaccctcaagatatatgcacagtagtggtggacctagctgttacgcttagagaggtatgc

SEQ ID NO: 35329 - DNA, 340 bp, Zea mays
  Clone ID: MRT4577_13221C.1
gccaggttcacttagtcgggggccgccctttttttttttttttaatgatctcaaaagacatgacacctgatggccaaagaaaacatgtgtttctcgcttacataaagctagcttacttaatacgttacacccgaatctggacgagggcccgaaagaaatttccaaagatccaagctttttgaaaagagtccaccaccaacgaagattatggggttgcagggatcaccagcgagcacggacttctgggtgtttcagtgttaccccctacggacatattcgggtacaccaatccataaggggattggcgaggtttaaaggcttttctagtcatttttaacta

SEQ ID NO: 35330 - DNA, 594 bp, Zea mays
  Clone ID: MRT4577_132220C.1
attgggaccctcgaggccggccgggatagtcttcccctcccgcggcaagtctctctgaattgcgggtctccggtgatggcggctctagctccatcaagattctgggcaccaagctcaacttcgcgcggctcctcccgctacggcaccgcagaggccaccgcgtggggtgagaagatcgactccctcttcagcaagaagcctgcccataaggccacagccctctgcgcggcctcccgcttctccacacatcatcgacgaggtcggcaagatgatacggccctgacaggaggatctacctgccggatgggctcttggaccgcctcggaggtaccgagagtactctcaccggagaggtactctgcagatctacgctacgacccttttggactgagctataagacggaggacttcgccaaggaccaagactacgagctgatccatgtcacatgggacatgctcggagacgctggcgctgtcatgccaaaggcgagcaacaagatacggcgctaactgcggccccgatgtcgtctggttcaagaccggcgacctgctcctggacggcaacaccctcagatatgtcggcagcaggatccc

SEQ ID NO: 35331 - DNA, 301 bp, Zea mays
  Clone ID: MRT4577_132221C.1
caaaaaggtcaaggctaagtcattccagctaggagacctgatatggaagaccatcttgccagttgccactgaggagcagagaccgaaaaatttaggaaatggccaccaaactggaaaggtccttacaagatcacgcagatacatgttgcaaacattacaaggtgatgacttgcccaaggcactgaacatgtgtttcctgaagcaatatcatcctagtatgtggtaagatgctaaaaactgatatggtcacactaagttgattctagcctacgccaatttgtcgtctctgtgcacgcacgga

SEQ ID NO: 35332 - DNA, 416 bp, Zea mays
  Clone ID: MRT4577_132222C.1
gacccccggcctttacttctagccgtttacccgaaggcgccgggggggctttatttaccatgatcatgtgcaagaaaaaccggcgcgaggactggaagtacatttttcatgagggggttgtatatgccaagaaggactacaacctggccaagcaccccaaacttgacctggccaacctggaggggattaaacttattccaaggtttaaattcaaagaggattttaaggagacccttttcttgcaggactatacttgtaacttaacaaccattggatttagcaccttcggaactttcttaaacttgcgttagaaggtgggcccaacaaccttaaaaaattcttcaaagccccgttccgttccttttgcttttggccaaccggtggaccgcccaagggttcccctttcttttggggaa

SEQ ID NO: 35333 - DNA, 298 bp, Zea mays
  Clone ID: MRT4577_132223C.1
ttttttttttttttttttttttttcttttatgtatttatttttttttttttttggttgggccgcaacatcccttgtatttcacataaagaaaacaagcggggcaaagtccatgccattgctagttcactattacataaagcactacattttttagttggcgcgggggttttaacaatctgcccacattctttaagaaataattttttttctctatcattagcgtatgggttttcgcttgttatcgagcttgcctccggggctttggcccttggtgcccaaatggcccctggtagaatg

SEQ ID NO: 35334 - DNA, 968 bp, Zea mays
  unsure (1)..(968): unsure at all n locations
  Clone ID: MRT4577_132224C.1
ggaaaaaaaaccaggccccgacacgaccctctctcgcgatcccggcgcaacggcccggaggatacggcggcggcgtgctccccctctctccctccttgtcggcgcgagctcggatacgacccagaggtggactgggaagccgccggagagacgaactcaatcctccattgaagaccggctggctgctgccttctacctacccccctccccagcagcagatcctcggcgcgaccctcttattccatcccggcgcgagctcgaaggggatctcgaggtgcagcggtgcgagcacggcggcgcccgcagcgacccccatcaccggcgtccgctcctcccaaaaattatcttgccacgaaggaagaaacctgctcctctgctcgaactcccaactcggagatctcgggcggcgccggagagatgggggcggaagtcgacgcactgtacgagatcggccgccacgcgactggatcccacgaaatcccttgtgaaagagacgaaaccgctcgagcgagcggcggcagttcaggtgaaggaggaggcgtcctctcgtatctctccttccaaggcgtaagtaagctcagggagaggtggagcaggtacaacactcttggggggagtaagcggaggaagagggaaaatgcagcatccttgttcgtctcgcggaatgcggagtatgttgctgtagctgttgggaaccgcatttatatcttgagaaagagcgatggctatgaatcaccctgcggcatatatacaaactgttacaagttttcggagccggataatagcggtgatggctcagcatgggacagtcgtatcatcaggcttcgtttattgtggtacaacgacttgctggagacattcttgggaattattatgngaaggtacaatgcaaactgaatgtcagcaaagttgattggcttcctttcaaaggaacattgacaccataccatctcaggccatcaccgcta

SEQ ID NO: 35335 - DNA, 390 bp, Zea mays
  Clone ID: MRT4577_132225C.1
tcgagcgacgcgtacgcacccagtaactagatccatcatctagagcgctaccgttcatggaccactatattccggagcgacgaagtgagacaaacagtagtacatggcatgaagaacgtccattgcgccgccctcgtcgccgacgtctgggccatcggctcactggactcagtggcttctgatgagccctgcaacgcactcgccggaccggccggcattcttcttggtcctagcgtaagcggctacaccgtaacgctgccgcccaatgacgactcgctctggcgctgttgttagagtacggacctcaatgatctatcaagctctcagctgtaatctattgaagtctctgatgtagctgaacctactaatgaatcctgacatcatgctaca

SEQ ID NO: 35336 - DNA, 323 bp, Zea mays
  Clone ID: MRT4577_132226C.1
cccatcccccttccctttcataataacgctgcttaggcccagtcatgatttaattagaaacttcttgtcaaaggatgttgtttgtacctagttgtgcgcactggataatttagctcaggtcgttagggttgtcttcccaaaaaaaaaaaaaaaaaaaaaaaaaaaaagcttgtacacctgcccgggcggccgcccgggcaggtacaagccaaagtttgatgctgtgattgctgaattaaaggaggctgagaaagagcatcagaaggagtcagaaaggatagagaaggaacttgctgaaatggaggaaatgaggaaaaagatca

SEQ ID NO: 35337 - DNA, 279 bp, Zea mays
  Clone ID: MRT4577_132227C.1
cccactcgtccgacgacccgtcaggatggctgccaggggggctactaccagcgtagggggccagctctacccaatgaccttcccacataaacccctacgtactacgggctccaaaccacggcctccagctgagacagtgcagatatctcgacataagagtaagcactaattgacagactaccgcatgacaaaccgagaccttgggctccaagccagaaaacgaaccacagcctaggaggccattatcccgatctgtacccgcgaggccaatacaggaac

SEQ ID NO: 35338 - DNA, 762 bp, Zea mays
  Clone ID: MRT4577_132228C.1
ttgggtacctcgaggccggccgggatttctaaccagggttcctccagcccagccgccgccactgttgaggagctcacatcgcctcgacacaacacggtctctggtttcaacgtaagctctaactattccctctttgatccgttctgttccaccctgacccaatcttacaatattatggatacatatgatcttttcttcattaacaaggatgatgaagaggaagaattaggaatttttttttgtcacagcagtgttccgttcgttttattttgcaagtgagggttttaatttagctgctaggccgataaaaggccgtccgatttgaaatactagaaccgaattgaatcttccagtactgaggtacaagatttcaggagcgaactcaggctgttcacagatctgtactggaatatgggtgggtactgtgtaggccataagaagatgcagtgtttgttttcttttaatttaaactcatcaatgaatccatcgttgttgcttggggatcatagggccatgcacaattgaatttaattttaaatgatcaatgaatctatagttgttgtttggggattataaggccatgtacaatgaaaacgcttagaggcagtttccatgttcctattaccctggacatgagcacaaactcctgtgtgtttggcggtgggcgccgcatgaaaaaacattcagaacctgcttgcaacattttcctttcttgacacgcaggagctactgcctatcatgttactaaaaattactttgctg

SEQ ID NO: 35339 - DNA, 122 bp, Zea mays
  Clone ID: MRT4577_132229C.1
tcaccactgacctgcttgctcgtaggattgatgttcagcaggtgtccctggtcatcaactatgatcggcgcacgcagccaggggagtacgtgcatcgtattggtcgtaggggacgttttggt

SEQ ID NO: 35340 - DNA, 375 bp, Zea mays
  Clone ID: MRT4577_13222C.1
aaaaaaagaacaaaacttaaaagagaaaaaagatatatatataaaaaaaaaatactaggggggggccaaaggatgggcggcaaaagtttgcgcctactgacttcgagtcatatttattgagatcatgatgattgattggaggacacagaggccagcggtgcctgtttaggatttgccatgccatgaccaaacaggcatatgccaggttcaaccaacgtgagccctctttgttttggacttttgggggtggtgcggaccagaccattgttgtggaagtttccataatgtgagtggcaacaggaatcggctatatagctggcctttacctgaccctgtggtggtggaacctgaatgaacctccgtacaaatacacat

SEQ ID NO: 35341 - DNA, 209 bp, Zea mays
  Clone ID: MRT4577_132230C.1
tttttattttttttttcttttttttttgtttggttttttttcttgtttttttttttaaaaaaggcctgggaagctgggtttattgggattcacgggctttctacaaggacgaacagggccagaattggaacccggaggcccatttacataacaaatcccaaacttcgtcggggaaagcaaaaccttcgtggagaaacatttacttttat

SEQ ID NO: 35342 - DNA, 206 bp, Zea mays
  Clone ID: MRT4577_132231C.1
cgtcccattgcccaggtcgagcacctagtagcgacctgctcgatcatcagtgtacagtgacgttaggtgtctgcctctcttagtgaatggatgcaacgaacatggcgaccacagctcgaccgatgaacttgctgctgctgcaactgccactgatgacggcctactcacttcaaccagcacaactagccaccaacgaatacaatccc

SEQ ID NO: 35343 - DNA, 306 bp, Zea mays
  unsure (1)..(306): unsure at all n locations
  Clone ID: MRT4577_132232C.1
aaatttcctttgctcccccaaanctaccggtaatgggaattcattttgatctttaaactttgtaaccatcttttacttgagcttcatttaatcaatttgatgcactgctcattaaattaattggaacataactttctgtcactagatctggttgagcagctttagaactctaacatatctaaaagcataagaagttaatgtattttataatcaaaatgactcatcttgacaaaattgaattacttctggattatggttcaccttatgatatttggagctgctgattccaatattattttcaatctt

SEQ ID NO: 35344 - DNA, 350 bp, Zea mays
  Clone ID: MRT4577_132233C.1
attttcagccttaacaaacacaccaagctaagcgcactatcaacaccctaactacaatggctaccaagatattagcccttcttgcgcttttagcccttttagtgagcgcaacaaatgcgttaattatttcacagggctcaattgctactagtgcaaatattctacaactacttacaccaattactttaatgggtttagaacatccagcctagcaagtatacatgctacaactagcgcttgcggtaagcgtattacaacaaccaattgcacaactgcaacagcaatatttggcacatctaaacctacaaaccataccaacgcaacagcaactacagtttctgacatcactg

SEQ ID NO: 35345 - DNA, 263 bp, Zea mays
  Clone ID: MRT4577_132234C.1
gggcaccagcttacctaaccaaccgaagtaaaaccggtacaattcgccttcacccgaggggcttgctcaacttcataaccaaggcatcgattagggagtaaatttgcgacctgcaatttccaccgagccttgtaccgaccgaactgtcacataaaatgcctattgcgaccatccctatttaggcgggggacaccaatctacaactgaaaaacccggaccaacttcaaatccgccgacccagggttgtcagttgacccactggg

SEQ ID NO: 35346 - DNA, 376 bp, Zea mays
  Clone ID: MRT4577_132235C.1
cgctcccacctgctgtgaggtgtgctgtctcgcagctttggctggaggctttgtggtggctcaggcggcaaccgcgaggggcacgatggccggtcatgagctcgtgctgagtttctgggagatggtgatagactttgagcgctccacccagggtgtctagctgtctgactctcctgacttcgttatggagccgggtggctcgcccggcaccgttgccatggtggtatgtgacctctggcgacccatcctgtttatcgtcacggtggatgactagctgttggtcctcttgctctgcaacataatcggcgacatcgggcctgtcgacaaatgtgacctacaccatgaacacgatggcaccattatctgcgctagacat

SEQ ID NO: 35347 - DNA, 379 bp, Zea mays
  Clone ID: MRT4577_132236C.1
ttttttaccttttttttttgaagataaacatactcctgcagacactcagcatatgaggataacgcacggacacgatacaactccaacttaaataaaagtagctgggtgttgcacagacacaggctacttgcaaaattattagaactttttgccgacgattgttggcagtaaacaatggaggtgggggccaagtaaaggaacatgccggagaacaggcgaacgctgtttcaaaagaacaggctaatggctggagattacatactgctaacttatttctgtccatgaatgaaaaccgtgcccgaccttgttggcgacaaataccggtggtggccatgccccaagaaacaatgccgtgctcttaaaaccccggtgaatccgg

SEQ ID NO: 35348 - DNA, 756 bp, Zea mays
  Clone ID: MRT4577_132237C.1
aacaaaaagaaaaaaaagcgaagttgtacagaagagaaaagtataagagaagagagcagccattcaatttagcacttgaacgagtaggcatccagtagcaaacacgagtaacatattaggcagaacacctcacagcatttaactgtatcaagatatagaggaaagtacgacgttcacataacacaaataattgcacatagcatccaaaagaaaaacaatatggaagttatggcagcaagatccagcacaaaggttctccatgatagctgctgatgtatagttgtaatcattaacctgccattacactgagaaccaaaagactcatttctttctcccaccacgctcccttagtgttagattgatcaccactccaggacccacattgtagtaagcaagagtaaggttgtctttgaggaaactagtcctcacactcagcttctgcttattagcagggagctgtaactctccagcaatctgctccttcagactaccaactgtgtctgacagtgattgaacaggaatctgcaaaacttggcctcgcaagttcccttcatcgaggttgggtacagatacagagatgctagcaggaccctgatgctgagcaaggaactgctcagctgggataagagaaccatcgtctgttctctgcctcttaggttcgggttcatcgggtggaggcagttgctcttcagcaggaggttgcggaggcagtgggggtgctggaggctgagggattccaatgggattatcatgccg

SEQ ID NO: 35349 - DNA, 2254 bp, Zea mays
  Clone ID: MRT4577_132238C.1
acaacatgcagttccacttcatccggcccacgcacagcatgttccccttctttacggagctcacagatgcgtactccagggtgctgaggccggcagagggggtgcctgcactgctaaaagagctgagggaggggtcaaaggacctgactacagtgttggagagatgcttgaaccggttggagtgggatcggtcgcaggagcaggcaaggcagcaggcagaggatgaggttgagcaggaacggatgcaaatgtcaatgattgattggcatgattttgttgttgtggagaccattgaatttgcagatgatgagtatgaggggcttcctgcgccacttacattgtaatgattgaatcgtcagggaacattggagaacttgctcgcactcgccctgatatttttggaaccactgaggaggaggtgtctaacgccgtcaaggcagaaattgagaagaaaaaggatgaacagccaaagggcagcacggcttgaggagaatgatggagcatcacaagttagcttgccgggtgatgacgaggcacctatgaggattgtcaagaactacaagaggcctgaggagaggattccggcagagagagacccaactaagtttgttgtctcgccaataactggggaactcattccgatcagcgagatggaggaacacatgcgcatctcactcattgaccctaagtacaaggagcagaaagagaggatgttagccaagatcaaggagactacccttgcacctgatgatgaaatatcacggaacattgttggccttgctcgcactcgccctgatatttttggaaccactgaggaggaggtgtctaacgccgtcaaggcagaaattgagaagaaaaaagatgagcagccaaagcaggttatttgggatggtcattctggtagcattggtcgcactgctactcatgcattatctcagattcagggtggtgaggaacagtttgatgcttccaatgttgatgggagacctgttcctggtccagctccacttgtccgacctggcatgccgctgccccgacctcctcagccacttcctcttgttaatgttcctcgttttattgctccaccagcaccatactctgttccacccccaggttctcatatgcctggagttccacagatgatgcctcacatgcatctgcacccacagcagatacctgggcaaccgccgatggttaggatgccaggtcaaatggttcatatgccaaccagcattcctccgcctcctggccaaactcagtttatgcctggtccaccaccacacacatttgctatgcccccatcatcgcacatgccacacatgatcaatcccattggaatccctcagcctccagcacccccactgcctccgcaacctcctgctgaagagcaaccgcctccacccgatgaacccgaacctaagaggcagagaacagacgatggttctcttatcccagctgagcagttccttgctcagcatcagggtcctgctagcatctctgtatctgtacccaacctcgatgaagggaacttgcgaggccaagttttgcagattcctgttcaatcactgtcagacacagttggtagtctgaaggagcagattgctggagagttacagctccctgctaataagcagaagctgagtgtgaggactagtttcctcaaagacaaccttactcttgcttactacaatgtgggtcctggagtggtgatcaatctaacactaagggagcgtggtgggagaaagaaatgagtcttttggttctcagtgtaatggcagttaaatgctgtgaggggttctgcctaatatgttactcgaggttgctactggatgcctactcggtcaagtgctaaattgaatggctgctctagcttcttctactagattcttctgtacaacttcgatggtggtacaatttgttcagtggttattttgaaagaatggcttggcatccatcgcgtcgctgctgctgaaatatctaaagtagaattttttttatttgtttgtataagctgaaatatctgaagtaggactaggaattatttttgtttgttatgtacattctctggtcgtttccctgtgctattgcctattgaactgagctaccctgcaaagattgttgtacgctaaccaggttttttgtactgtatgttctcacaagtcactgtcgtacctgtttttttgggtatagtgtgtgtgttgcatacaactttccagtatacgatattattcgctcccagagaattatgtttgtt

SEQ ID NO: 35350 - DNA, 730 bp, Zea mays
  Clone ID: MRT4577_132239C.1
gccaaactcagtttatgcctggtccaccaccacacacatttgctatgcccccatcatcgcacatgccacacatgatcaatcccattggaatccctcagcctccagcaccgccactgcctccacagcctcctgtgaagagcaaccacctccacccgatgaaccagaacctaagaggcagagaacagatgatgcttctctcatcccagcagagcagtaccttgttcagcatccgggtcctgctagcatctctgtatctgtacccaaccttgatgaagggaacttgcgaggccaaattttgcagattcctgtccaatcactgtcagacacagttggtagtctgaaggagcaaattgctggagagttgcaactccctgctaataagcagaagttgagtgtgaggactagtttcctcaaagacaaccttactcttgcttactacaatgtgggtcctggagtggtgatcaatctaacactgagggagcgtggtgggagaaagaaatgagtcttttggttctcagttggcagtttaatgcttacaactataattcagcagctatcatggagaaccagttcgtatctttcatattattttcttttgtatgctatatgcaatcatttgtgttatgtgaacatcgtactttcctctatattatgatacagttaaatctaaaaaaaaaaaaaaaaaaaaaaaaaaaaaaaaaaaaaaaactcgaaaaggggcgccggtacc

SEQ ID NO: 35351 - DNA, 110 bp, Zea mays
  Clone ID: MRT4577_13223C.1
ttatcttagcggaaacaccagaacgcgtggggtggttctttcaacacacgcagcgtctaaagtaccagcacgtctcaacactgcatgtcacagatgctaatgtgcgaaca

SEQ ID NO: 35352 - DNA, 3264 bp, Zea mays
  Clone ID: MRT4577_132240C.1
ggacgcccgagcagtacggcagaaaaaaaaaaaaaaaaaaaaaaaaaaaaaaaaaaaaaaaaaaaaaaaaaaaaaaaatgggcgaccgatgccggggggggtacttcggccagttgggcggccaaagcagcggcccccttatctccagggaccaggggaggtcgcacaccaacgcaccgtccttccctttcctcctcctcctccctctcctcggaaggtcaagtgacggtatttgtgaccatggcagggaccttactccagtcagttgccctgggaacaccatttgggggtcgcatgagaacccattgttggaggtcccatggcaccaggaggcctgcctctatgttggcagtgtcacttagccgccctgtcaagatgtcagcatttgtgggtctaagatcagtgcatagcttctcggtcacaccgacggtgtccaattccaggtcggcagttgcatcttacaggtcatcgcgacagacaagacgatctcgttttgtcactcgggcaatgtttgagaggttcacggagaaagctattaaggtcatcatgcttgcgcaagaggaagcaaggcgcctgggccacaactttgttggaactgagcagatcctcttgggtctgattggagagggcactggtattgcagctaaggtgctcaagtccatgggaataaatcttaaggatgcacgtgtggaggtggagaagattattggccgcggcaatggttttgttgctgttgaaataccattcacaccacgtgcgaaacgtgttttggagctctccttggaggaagctcgccaattaggacataattatattggatctgagcacctgctccttggactgcttcgtgagggtgaaggtgtggcggctcgtgtgcttgagagtctcggagctgaccccagcaatatccgtacacaagttattcgaatgattggtgagaccacagaagctgttggtgctggagttggcggcggcagcagtggtaataagatgccaactcttgaggagtatggaactaatttaacaaaattagcagaggagggaaaattagatcctgttgttggaaggcagccacaaattgagcgtgtggtacaaattttaggcagacgaaccaagaacaatccctgcttgattggagagcctggtgttggaaaaactgcaattgctgaaggacttgctcagcgcatttctacaggcgatgtacctgaaacaatagaagggaaaaaggtcataacccttgacatgggacttcttgttgctggcacaaagtaccgtggagaattcgaagaaagattaaagaagctgatggaggaaataaagcaaagtgatgagataatactctttattgatgaagttcacactctgataggagcaggagcagcggaaggtgctatagatgctgctaatatcttgaagcctgcgttggccagaggtgaattacagtgcattggagccactacactagatgaatataggaagcacattgagaaagacccagcacttgaacggaggtttcaacctgtgaaagtgccagaaccaacagtagatgaaaccattgaaatcctcagaggactgagggaacgatatgagatccaccataaacttcgttacactgatgaagctctgattgcagctgcaaagctgtcatatcaatatatcagtgatcggtttctcccagataaggcaattgacttgattgatgaagcaggttcccgtgttaggctacagcatgcacaggtccccgaggaagcaagagagcttgacaaggagctcaaacaagtcacgaaacagaagaatgaagctgttcgaagccaggattttgagaaggctggggaattgagagaccgtgaaatggaattgaaggcccagataacagccctcattgacaagagcaaggaattgagcaaagcagaggaagagtctggagagacaggacctatggtcaatgaagaagatatccagcacatagtatcttcatggactggcatccctgtggagaaggtttccagcgatgaatctgataagcttcttaagatggaagagactttgcacaagcgtgtcattggccaagatgaggctgtggtagcaattagtcgctccatccgccgtgctcgtgtgggtctcaagaaccccaacaggccaattgcaagctttatttttgctggtcccaccggcgttgggaagtctgagcttgcaaaggctcttgcagcctattactttggctctgaggaggctatgatccggcttgatatgagtgaattcatggagagacacacggtatccaagctgattggttcacctccaggatatgtaggatacactgagggtggccagctgacagaggcagttcgacggcggccatacacagttgtgctctttgatgagattgagaaggcacaccctgatgtcttcaacatgatgcttcagattttggaagatgggagattgactgacagcaagggaaggacggtggacttcaagaacacactcctgatcatgacctcaaatgtagggagcagtgtcatcgagaagggtggaaggaagatcggatttgaccttgactctgatgagaaggacagtagctacagcaggatcaagagcctggtcatcgaggagatgaagcagtatttccgacctgagttcctcaaccgtctcgatgagatgatcgtgttcaggcagcttaccaagctcgaggtcaaggagatagcggacatcatgctccaggaggtctttgacaggctgaaggccaaggacatcaatcttcaagtgaccgagaagttcaaggagcgggtggtggacgaaggctacaaccctagctatggtgcacgcccgctgaggcgagccatcatgaggctgctggaggacagccttgctgagaagatgctcgcaggggaggtaaaggagggcgactctgccatagtagatgtggactcggaggggaaggttgttgtgctcaatggtcagggcggcataccggagctctcaactccggcgatcaccgtttagctcgtacataacaaatgacaaaattaatagcatagtttttgttcaaacacattatcatttatggttagaatatctgtgtatatgtagtggtatagtcaatggggaaatcgttcctgcctctaaattcctttttttcaagttaaggtgtttcttttgtcgcaagttaatctgcctggttattaagatattattgtttacagagtgatggaaaaaaaaataaaaaaaatgaccctagtaaagaaaaataatttcgagctt

SEQ ID NO: 35353 - DNA, 263 bp, Zea mays
  Clone ID: MRT4577_132241C.1
ggaggcaagccatactggtgcaaaaaagttttgggtccaacacaaaggacccaacaggtccattaaaccaacgaagccccaaccacgatttatgacacacaaaccacagatgtttattagacgacgacctccatattgaggtccaccagagggccccaaacgacgcaaatccccaggtacagcagcagcttaaatgaaccatgggttactgaccaccggggggggggagccccagggggagagtgctccgaacccttgggtta

SEQ ID NO: 35354 - DNA, 399 bp, Zea mays
  Clone ID: MRT4577_132242C.1
gttgttgggtgtagtgataaaagtcaggaagaaagttgaagaattcataccctaccaccaactagtatattcataccggggggaggaggggaataaacgttaacagaggaaaaggatggaagcaacacctgcgggtcctacatgctcctagaccaccgctgcagcaaaaaccaaaagaacaacagctaaaagatgcaggcattacccgcccaggaaatacaatgcagaaagaacgaacaaaccacgggtcatgccaccaagaaaaacagcatcatgacacccccccggggcgccccctttggtgcaacatgcggagaagacaattattgcggtagccttcagaggaaactaaaaccctcatgcttttggggggcacttacgcggccgtcggaggagacc

SEQ ID NO: 35355 - DNA, 557 bp, Zea mays
  Clone ID: MRT4577_132243C.1
ggatgggattcatctgcagcaccaaagtctgcagattggatcgatggagtcaaattcggcactgggtcttgagccaattgatctgtcatcaccctcgccttgtgctgctcataaaccccaggctgctccagaagcaccaccactgtgtatggaggcagaaagaagagccctttgggatataagcaatttggtcgagaaagaaccctcctgttgcaagcatgaacctggaacaaatgtgcaggtggaagagtcaccattgttcaggcatgggactgggatggcaggcgaagctgattcttcacggagaggcgatgcgcagagtagggaagtagtagaagctgccatgatcgacctctcttctccatcaccagttaaagtcgataatagtagaaggaatggtaagaaggattgtgaggctggcagcagcagtcagtctccagaacacgagaggaaagcgagggagctcagattgttcctagacagtataagagacgagttgtattaacattcgattggattgtatgtaaaccgatatgtgcaatgatgatgtgtgttct

SEQ ID NO: 35356 - DNA, 311 bp, Zea mays
  Clone ID: MRT4577_132244C.1
cccggtcgaccccgcgtccgcccacgcgtgcgcggacgcgtttccgttcgcgtggttggtcatcgattaatgcgagtggtttctcaaaagagatccaacgcatctaaactattggtcttggctgatccgtttgctgatgcttaccctgatatgcatgacaatgtattcatcatgattcacctacttgagttcctcatatctgattacatgcaagtttggctatgctgagaacatattaccacaatacattcttaagaatgctaccatatctattatcaatgcacgcactgatttgctaattctgaacaaca

SEQ ID NO: 35357 - DNA, 488 bp, Zea mays
  Clone ID: MRT4577_132245C.1
gttgagacaggcaggtgatgttttgcagcaggagttcgaggatgtggtggctgggcagcaggagttcgaggatgtggtggttgggcagcaggagttcgagggagctgaagctgttgatgttgggcagttaaccccaccaaggcacaaaaaaagagcagtaggaaagaagttgacgccgaaaaagaaaaatgtgtagctgtgtgtatttctgaaccagtagtgtgtatgtgtattaattgtctcctgtttgcagtgaactagaaatgtgtagtgaacctgcagtgtgtatctggtagctgtgaagtgtagtttctggtagctgtgaacctgcagtgaactagaaatgtgtagtgtgaacctgcagtgatttctggttgctgtttctggtagctgtatctggtactgatttctggtagctgtaatgtgtagtttctggtgtttgcacagccaaaatggtaatgactgaaacacactgctggatgttgggt

SEQ ID NO: 35358 - DNA, 352 bp, Zea mays
  Clone ID: MRT4577_132246C.1
gttgggaattcttgatcaggttggcagagcacatgctttttggtggcggtcgaagatgtctggcctagcttctcaggcccgaaggaaaaaagagcgctcaacgccggcctcacgaagatagggaacaacggtgttcccatctgactgccactaaagccagccgggctgagggtccattgtattgtctcagatttaagccaaagaggacatgttcgatgtgcccggcgaacgctatactgtccacttggaaaagagaaaaggcaaagagaatgacccgtgacccacccggatgggtaatgtcgcaaaagcgacacccctgaaacctgagttacagagggcatgttgctatcgc

SEQ ID NO: 35359 - DNA, 293 bp, Zea mays
  Clone ID: MRT4577_132247C.1
attcatatattttttttttttttttttttatttcttttatttttttgggtttatatattgagaaaaggaggattccaatcaatttagccacactcctataaccctacaacgttccacactaaaacaaggcaacagctaattaatgacgccagcaaaccagcggaacacccacaccaagacaaacccccatgatgaaacaaaaaaaaacaccccccaccacatatacccccccacaaatcaggcaactacacgtaagaacacgtagccagcaaaatctacaaccgagcaaaaac

SEQ ID NO: 35360 - DNA, 699 bp, Zea mays
  Clone ID: MRT4577_132248C.1
tgggtacctcgaggccggccggggacttagatagctactaagctatgtgctcggagggtgtgggtgcgctcccggtctagaccgtgcgaggaaaggagtccaggccactcactaccccctctgctccgatcgggtgccgggccatcctcacccgaggcatgcgcacaacgatgatgacgcaccgcaagaaatggagcagatcgccaggctcctcctcctagtatctgttaatgtaattgcgctcttcctcttcctgtctcctgatgaccccttctgaagggacatcaagaagcgagctacgcagcacttctccgcagagccctacaacatgacgctgctcaagtgcctccgatccggttggaacggtctgccggtcatgccgccgaacagacatcctggagacgaacatcaacgccatactatcgacgatcaacgacatctacaagtcgtatacttacctcttcttcgctcgcggaccgaagcgctcaaacctcaacatggtggggctcctgggacatcgtcgcctacatattcaccgccgagctgctcgactcgctgctggccctgcacgacaacgcccgcaaggccttctgcgtgctccgcggcgacatcttctccatgtgaatgcatgcctcaccgatctccatcatgagggtgtcgaccaatacgaacagagcgcgaatcttgtcgatcctgctc

SEQ ID NO: 35361 - DNA, 290 bp, Zea mays
  Clone ID: MRT4577_132249C.1
tcgccacagcgtcgcccacgtcgtcggcacccttttgcaggcttgcagctaaagtcgatgccactcaaggatacacctggagaaccgatgagcagatagggtggatgctgaaatatgtaagagagaggccctgagctacccacctctttattgattgctggataaatgccggtgtcaataggcaagcgtcgtcactagagaagaggcccttctaacgataaccgcaaggatggttacaatagctgctactggacagtacgaggacttgatggccgctgggatcattgatc

SEQ ID NO: 35362 - DNA, 105 bp, Zea mays
  Clone ID: MRT4577_13224C.1
aagcttccggaacgccatacgtaggacaagggagctcataggcggtcccgcgcggcgcgtaagcccgacagccatgaggcaatagcacgcaatactttgggctgc

SEQ ID NO: 35363 - DNA, 322 bp, Zea mays
  Clone ID: MRT4577_132250C.1
aaaaacgggaatttcagttctcatagccttttcatgaatctcaaaactttacgggggacaccctatttaagccggggccccatggggttcacaaacccccccctaacccgttaaattaaactgggggcgttccttgataaccttagaccccccctcaattcccccccttttttttcaaatccaaaggacccgccccagggggagtcccctataccggggggggggcggcccacccgaccctatcagagagttctgggagagctgtccgcagtcagcgcccttgacccccttggagggggacccgttgcgggcccccaccttt

SEQ ID NO: 35364 - DNA, 303 bp, Zea mays
  Clone ID: MRT4577_132251C.1
ggtggtagtgtttttttttctttgtttgcaaaggcaaacaccaacaggcaccgcgttgtaggactggtcaattacaacatttattaacccaaatgaacaaggggatgaggacccgtgcgtttttatctgtatccgaggttggacactaacaatttttcaaatcggggggtcaaattaccggtagaccaaaattggactatggagcatggtacgagctgtctaaatacctgacacaaagggtagttagcttgtcaccatcatctggacgcacgcctgcgagagcctggttagcgtaaaacctta

SEQ ID NO: 35365 - DNA, 346 bp, Zea mays
  Clone ID: MRT4577_132252C.1
tttccgtttgaactacccgaccggcaaccccgggtacggtgagttctgagagagggagggtcgcaagcaccgagccctgatggacgagaagagctgggcccggctcatgctacgcatggagaggcaccaccctaggaggtttcacttgaccactagaaccggacgatcattccggaggacgaagcatcattcggaataggctcaccgcgctaactcggcgatggacatcgaggtgcggatggtaaagcccatcaaggacgagtttccaagcctcttttacgccggagtctaccaagatcgagggagtagctgtcgtgaaggttactgaaggaccttgaattcccat

SEQ ID NO: 35366 - DNA, 712 bp, Zea mays
  Clone ID: MRT4577_132253C.1
gtcatggatgggttgcccagagagctgtgcctcaagatcttccacctcctggatcaccagtccctcgcctcttctccccaagtttgcaggaaatggagggcgttgacctcggatgatgaactgtggcgcaagctgttcaacgacaggtggggagcggacgctgcagcgttctacgcgccggagggctccaagtcttggaaggacgtcttcgccgtgcaggaccggtgcgaccgatacggactgtaagccgccactcgcccatctgctccagctccactgcttccgattgccatcagcagctggtgttactgctgtcgaccaacagggtgtcaggatcatcagggaagggaaggactactacctgatctaccagggcgagatccagaggtacttgggctcccgccaggacacggatggcgactgcggcgaggacgcgccacggcgggacgctggagacgagcatcggcagatatccgaccggatcctgttcttcctcggggatctggagaaagcctgcgccgacgccaaacgtgttaaggcctgaacacgcgctacccttgtgcccctgatcatcatcagcacaatattccacgctgagtcttgttaatttgtgcatgtctcgtgcatagtttctcaccatcaattcatgtagttggaaatcatgctcacatcgacactgaaattataattcaagtacagtcgtttagagggt

SEQ ID NO: 35367 - DNA, 853 bp, Zea mays
  Clone ID: MRT4577_132254C.1
cattgggtacctcgaggccggccgggataattgctccagtgaataactaaaaaaaaaacccctcgtgctcgtctcactcttcacctccagctccggatctgaaaggccgagcagtctttcgtcgtttcgagtcttcagccagagcttctcggtgagtgcgagaattcgggccggagaactgggaaagcctcgaggagacatggatgggttacccggagagctgtgcctcaagatcttccacctcctggatcaccagtccctcgcctcttctccccaagtttgcaggaaatggagggcgttgacctcggatgatgaactgtggcgcaagctgttcaacgacaggtggggagcggacgccgcagcgttctactcgccggagggatccaagtcttggaaggacgtcttcgccgtgcaggaccggtgcgaccgatacggactgggtgtcaggatcatcagggaagggaaggactactacctgatctaccagggcgagatccagaggtacttgggctcccgccaggacacggatggcgactgcggtgaggacgcgccgcggcgggacgctggagacgagcatcggcagatatccgaccggatcctgttcttcctcggggatctggagaaagcctgcgcggatgccaaacgtgttaaggcctgagcacgtgctacccttgtgcccctaatcatcatcagcacaatattccgcgcatcatcagcccaatattccccgctgagtcttgttaatttgtgcatgtctcgtgcatagtttctccccatcaattcatgtagttggaaatcatgctcacatcgcccctgaaattataattcaagtccagtcgtttagagggtaacc

SEQ ID NO: 35368 - DNA, 927 bp, Zea mays
  Clone ID: MRT4577_132255C.1
acggggcacctcgaggccggccgggctccttcccgcatgttcttgtcccctcccctccccttcgctcgtcgtccagccctcgtgctcgtctcactcttcacctccagctccggatctgaaaggccgagcagtctttcgtcgtttcgagtcttcagccagagcttctcggtgagtgcgagaattcgggccggagaactgggaaagcctcgaggagacatggatgggttacccggagagctgtgcctcaagatcttccacctcctggatcaccagtccctcgcctcttctccccaagtttgcaggaaatggagggcgttgacctcggatgatgaactgtggcgcaagctgttcaacgacaggtggggagcggacgccgcagcgttctacgcgccggagggatccaagtcttggaaggacgtcttcgccgtgcaggaccggtgtgaccgatacggactgggtggcaggatcatcacggaagggaaggactactacctgatctaccagggcgagatccagaggtacttgggctcccgccgggacacggatggcggtacttgggctcccgccaggacacggatggcgactgcggcgaggacgcgccgcggcgggacgctggagacgagcatcggcagatatccgaccggatcctgttcttcctcggggatctggagaaagcctgcgccgacgccaaacgtgttaaagcctgagcacgcgctacccttgtgcccctgatcatcatcagcacaatattccacgctgagtcttgttaatttgtgcatgtctcgtgcatagtttctcaccatcaattcatgtagttggaaatcatgctcacatcgccactgaaattataatccaagtacagtcgtttagagggtaaaaaaaaaaaaaaaaaaaaaaaaaaaaaaaaaaaaaaaaaaaaaaaaaaaa

SEQ ID NO: 35369 - DNA, 1051 bp, Zea mays
  Clone ID: MRT4577_132256C.1
ttgggaccctcgaggccggccgggtctccttcccgcatgttctcgtcctctcctctcctctccgctcgtcgtccacccacccctcgtgctcgtctcactcttcacctccagctccggatctgaaacgccgagcaatctttcgtcgtttcgagtctcatccagagcttctcggtgagtgcgacaattgggccggagaactgggaaagcctcgaggagacatggatgggttgcccagagagctgtgcctcaagatcttccacctcctggatcaccagtccctcgcctcttctccccaagtttgcaggaaaaggagggcgttgacctcggaatgatgaactgtggcgcaagctgttcaacgacaggtggggagcggacgctgcagcgttctacgcgccggagggctccaagtcttggaaggacgtcttcgccgtgcaggaccggtgcgaccgatacggactgtaagccgccactcgcccatctgctccagctccactgcttccgattgccatcagcagctggtgttactgctgtcgaccaacagttcagccgcctcctttccctttgtttttgtttggcctgtgagtgtgtgtgtgtgacctcctttccctttgtttttgtttggcctgtgagtgtgtgtgtgtgaccgcgccgcgtcctttccaggggtgtcaggatcatcagggaagggaaggactactacctgatctaccagggcgagatccagaggtacttgggctcccgccaggacacggatggcgactgcggcgaggacgcgccacggcgggacgctggagacgagcatcggcagatatccgaccggatcctgttcttcctcggggatctggagaaagcctgcgccgacgccaaacgtgttaaggcctgaacacgcgctacccttgtgcccctgatcatcatcagcacaatattccacgctgagtcttgttaatttgtgcatgtctcgtgcatagtttctcaccatcaattcatgtagttggaaatcatgctcacatcgacactgaaattataattcaagtacagtcgtttagagggt

SEQ ID NO: 35370 - DNA, 128 bp, Zea mays
  Clone ID: MRT4577_132257C.1
gtcaatttggtgggttttttcctttagtgctacacttatttgtcgacgtcgtccactttttcttcgacagcgctcccagaagagaccagccggaaagagtgatccttcctccaggggtcaacaagagg

SEQ ID NO: 35371 - DNA, 603 bp, Zea mays
  Clone ID: MRT4577_132258C.1
ctattctaaattttatgatattttagcttttttagatatataatttttactatacactcaaatatgcactatatctaggtctataatatatctaaaagagtaaaaacaaattataagttgaaacacaaagcatatatagacatactgaatatctatgtacataacaaataaaaggtatgtatttaagaagacacaagaaattatcaattaaaataaagaaagtgtttcattgctcatcatgtacgtgtatgtatatatatacgcaaaccccttacataagttacaacaattgttttgctgttatttatccacacaggtagcaaggccaacttaaaactgcccgcacctagttagattgtagcgcagtctctctgccggccggtctctactggatattcagatgggacgcagttcatgatcaatcaaggtgggtccttttgcacgcaaatgatattgtccatcattcatatacagtccttcgagaagaaaagttagctaccaagaacaatatatgtatattgcacctcaagcaagtacgtacacatatgtccttgcaacataagagagcgtacagtacatgggcggttcagattggattatgag

SEQ ID NO: 35372 - DNA, 307 bp, Zea mays
  unsure (1)..(307): unsure at all n locations
  Clone ID: MRT4577_132259C.1
accacaccaannacaacacaggcactttaaacttttgggctccaacacccacaatgcatcaatacatcccatttactttccaaagtttgacaaacccattcataataataatgggagaaatgatagccatcaaacggctctctatcgacgaatctgaacctctttataaaggaagatcttacttgagagcatttttatggtgacaaggtacttattatcttactcaaagtaaagaaaccattaatacacaaataactccccatttctgaaccaatacttattatgataaaacgacgtccgctaggaa

SEQ ID NO: 35373 - DNA, 302 bp, Zea mays
  Clone ID: MRT4577_13225C.1
cccacgcgtcccgacattctctcttgattcaccggacacagaggatcctggagataggacatacaccaatattcggcacagcgatatcagatgcacttcgagcttacaaatcaacctctctgccatgcctctaatatacctattgttacaccgtgactcatctgatcggctacaccactattatcgccgatacatgatcaaactactcccattctcacttgcatatgctgcgcttctatgctgtcatgcacaccctgataaactcactctcctctctcaaatacatcacatgccacactctc

SEQ ID NO: 35374 - DNA, 658 bp, Zea mays
  Clone ID: MRT4577_132260C.1
attgggtacctcgagccggcgggaactgtgttccttatcctggctaagtgtaatactttccattctgaaaggctgtcgtcggcgtccctcagagctcggctcctacgccaagccgcttgcaccccttcctctcctctctccgatcgtgtacgccgcggtctctgaggataggcgcccgttcccctccaccgccgactacatgcggacacctgatgcactgacgtgaccactcgcccgacggttcctggatgatcagcacccggcatcctcctgaacggagtcgctgaatgataacctgaagggcatcctcaaggctgacaacgagtgccttgaccagacgagaggagagcaacacctacgagcacactgtatctatcggaggacttcccttttagagatcatagacaatactggtgatctgacgctaaccctccagaggcacaatcgagtggagacgaatgacagatgaagtatacacgaactttgagacagatgaacatactgatgatgtggatgtctcaagtggcacacatgagggatctttctgaacactacctcagatgggtgccactattacaaaaacagcatgtccaattctagaggttgactgcgactttgatgatgatagactaacaattgagcatatgagggagctgaa

SEQ ID NO: 35375 - DNA, 191 bp, Zea mays
  Clone ID: MRT4577_132261C.1
gctacaccacctcaacttctttcactacacaacacctatcgacctcattctgcttccgcattataggtacgctggccatcttcacccgtctcaaatcgtagtatttagctggtgcaggcacataacaaaatatgatatccgtgtggcttcgccgcccggaccccagtcccctaccttcttacctcacgcaa

SEQ ID NO: 35376 - DNA, 415 bp, Zea mays
  Clone ID: MRT4577_132262C.1
attaaattgctcccacagcaaatccaaaagttgagccctgagtagctcgccgcagcgggcagggcatcttgtcccgttgctctttccttgatcgtccatccatgcatccatggaccacggtgcttttgcagctgcagcaaggctctcccctccggctactatagcggttactagtgcgtgaatgctccttctgcacctcgcttgccatataccttgcatcagcagcagctacccagcagctcgatcgcgctcccgcgagtacactagaagatgaacagtgcagtggaagtgtagtggagttgcagccattatcgatcgccaccacactgctcctactcatcacctgcagcacctagatcaagagcgatatgatctcgagcgagagcgcatggagcggcggcgtgggtgccggcga

SEQ ID NO: 35377 - DNA, 161 bp, Zea mays
  unsure (1)..(161): unsure at all n locations
  Clone ID: MRT4577_132263C.1
ccgcagggcagngttctgtcctcagccgcagtccctgatttggagttgtatgagaactcacgcctcccagatagaactacttgagacaagctctacgcaggaacctctcaacgcttcggaggccttttgcccaatagactgcatggtacaagtggtgtttc

SEQ ID NO: 35378 - DNA, 397 bp, Zea mays
  Clone ID: MRT4577_132264C.1
tcgtccacgcgtgcgaagcataataagatgggggggcattcttaaaatcttcgtggttgacggcacttgcacgccaaaggcacattgaatgatgctgaggctggagcacccccttccttggcgtggcaacgaatgggagacaaatatcctagcgaacgcacaggatggttgatacccaccccactaatgtcagattcaagcagcgctatgttggttcgccccgctacgtgaaacatcttgcatggatgtatcatgtatgtctgacagatgatgacgctgatacgaccctgttgttgaaaaaaaaatgtgtttgaggggactgtagagttccctccacctgatggagtggaagatataccaatatgcactgattgtctcgcaaaaaaaagagaataag

SEQ ID NO: 35379 - DNA, 897 bp, Zea mays
  Clone ID: MRT4577_132265C.1
atcccacgttacagtaaccttttcatatggctaaccaatcataataattctgcattttgaatgcttaggactgcacttctggatattggtaagcactactagaaatattcagagacaacatgaatggcttccaaagggctgggtgatggaggtaagagctggtggggagaaggcggacaagatgtacaagttttatgtccactcaatcactggtctacgattgctatcaaagcaagatgtactactctatatcaatgaggcaaaagtctctgggtgcgacaccaatggacaatgtgacacaacttctgaagataacatactttcaaaagtggactttcggccaagtggattgcctgaaggttgggtgaaagaactagtgtacagaaaaaccaaggaagggttgatcaggagagatccgtactacacggatcctgctagttcctacacattccgcacgctgaaatctgcattatccttcctagcaactggaaaggtatccgagcgtgcatttattcaaaggacgagtgttcatgatctgtactcttttgaaatatctgcagacatggcaatgggtttatgaaattattaaagccggcactatcttacgatcttcctgacataaaaactgaaggctctagagttgtggaactcaaggggaagtacaagagctttctatccagcaagtttgaccaatgtttacccgaggaattctctttttaggagatacatcctgaggttgcaatgaacatgtatatttactggcataggtctacattttggtttgaaaaagtgtcagtattcccattctgtctcagtttcaatgaacaagcactgttgaaaaaagaggccattcagaaattaatgaagttcttccaagattgcctagaacagtatttt

SEQ ID NO: 35380 - DNA, 418 bp, Zea mays
  Clone ID: MRT4577_132266C.1
gcgggcccccccccccccggccccccccccccccccccccccccccccccccccccccccccccccccccccccccccccccccccccccccccccccccttaaatccccggaggggcaaaacaaaaagggaaaacccggcggaaaaccccagaaaaaagggggccccggccaaaaatagccccccccaaaaaaagacccaacccaaaaggggcaaaacgttaaaaaattcgggggcaaagggcccggacccacccggaaaacccaaataactggcaaaaagagcccagggcccccaaataacgccaaaaaacgcccccaaacgcagcgaaaacacccccggcgaaaaacccttcccaaaaaacgtaaaacacatcaaaaaacggtcaccccagaatcgcaccaaacccaaccccccg

SEQ ID NO: 35381 - DNA, 702 bp, Zea mays
  unsure (1)..(702): unsure at all n locations
  Clone ID: MRT4577_132267C.1
ccgggacctggccagcgctccacctgcttttttggtttccacatcggaattggcttctattgctttatgcatatataaccttcttggaattccttgtatcttggtctcatacaatgaaggaaggggtgtaagctaaaacacactctctatacacctatcgaagacagactacccttacttacccatgcccaggactacggggacaaattttttgagggcctgctagaatcttacactatacggctcattctatgtatacatactacctattccgccccacaaggatagaagttcgtctacaacgaattaattataactgccacatgacaaaaaaatgtgatcggtacttgtgaagaaaatcatcctaatggaccgctatgcattgcttgcatcaggaaatatattaattgccaattccgagtaaccggcccggccgctcacgtagctaaagtactgataaattctgtcactatgatagatcctaatgacatgccattcgattcccaatctccagtgtaaatcgagtacatctatccatttataatcctcctttaattggattaagagatcctacacttggaatgataacagaatgcataagtcattagcaggcattctaataaacaaatagctatagtataccacctaacgattgtatttcctttatgaagttaaaagaanattaatgaacctgcaaatatc

SEQ ID NO: 35382 - DNA, 573 bp, Zea mays
  Clone ID: MRT4577_132268C.1
gtgtcatttccaatttccctaagttgtgcctttgggataaacctaaattctcacatcattattatatttctattagtgtcacttttattatatttcaatgcacaaacaaaatccaatatgatgcaatgatttaattgtctcctagtaaggatttactcattttttttagacatggtcagtcacatgtgatgatcaatggagatgcacatacattcaaaggagacaattcctccttttattctcccttgcaatatgagtattacaaatcctaccccccttaaaaataatctcgtcctcgagatttaagaagatctagggaaaagatggggaaagtctatgcgaagctcttcttctctcttccaagtatcttcttcttcgccatagtgacgcaattgcactttgcacatctttataaccttatttctcgtgacaggagtcagtgtatcaagaatctttatgggatactcagcataagtcaggtcatcttgaacactaagatcctctattggtagctgctcttcaggtacctgagacacttcttcagttgtgaccggacgcgtggtcggacgcgtg

SEQ ID NO: 35383 - DNA, 141 bp, Zea mays
  Clone ID: MRT4577_132269C.1
aaaaatgacttgggtggtgcgagtaaactggaacgctattcatttactattctttcttgtagcttgtgtcttggccactcctgacttaggcggttgacatcgattcgataattgtgatgattgtatagttgcctctgagtg

SEQ ID NO: 35384 - DNA, 393 bp, Zea mays
  Clone ID: MRT4577_13226C.1
gggtacctcgaggccggccgggaatgcttcttgttgccaataagaatcaaaagcagccccaagccccacgcactgtcatgcagcatgagactaccccaatgccccacgtacattcgcggtaatacccttatctgcacgccgcgccatggccgccgccgcccccaacgcggtcgcccacctctccatcaacggacggatccgccggtcaccggaacatcgggcgaccatcaccaccaccagccagctcctcctcttcctcggccgctcagcgaccgtgcctgatgcggggccgcgcgatcgagcacaaagccgccgacagcgacccaggtgaggccgacgcgctgaagcgcatgaatgtgcgctgtctgtacacgctcaaggggacgatccagg

SEQ ID NO: 35385 - DNA, 1112 bp, Zea mays
  Clone ID: MRT4577_132270C.1
cgtctccttcctcggcccactggctgagcttggtagggagcgtctggctccagaccatcaacggccccaacgccgacttcgccgtctactcgtcgcagctcaaggagaccaagggcatctcgcaggtgcagctcaacttcctcgccttcgcctccgacgccggcaagctcttcggctggctcgcgggtgtggccgcgctgcgcctcccgctctgggtggtggcgctgaccggggccacgttcggcctcgtcgggtacggcgtccagttcctgttcctcgacagggccggcctcgcgtactggcacatgttcgcgctcacctccctcgccggcaacggcatctgctgggtcaacaccgtgtgctacctcctctgcatcaacaacttccctgcccacagccgcgtcgcggtcagcctggccacgagctacctcgggccgtgcgtcaagggttgcaccaccatggcggacaccatccccagggcggcgagggcgaggtactccaccacggaggtgtacctcctcctcaatgccgtcgtcccgatggccgtcgcgctcgtggcggcgccgtccctccgggtggtggaacccaaggagggccgcggcaggaggaccgaagcgccgttcctcgccatgttcgtgatcaccctggccaccggagcctgcgccgtcgtcggcagcgtaggggccaagtccatcgggctctcgtctagagcacacatggtcagcctctacgtgctgctcgccctgcctctgctcatcccagtgtggctcagagtcagggagggcacggccaagatacgcgagagtatgtgggagaaccgggtccacgatcacgactccgacgggcccgagtccgagacggcggtacccgcgccggtgtcggtggtcgagattgaggcggaggacaagcaggaggaggcaggggcggagctccaacgacagaataatggtcaacaagaggaggtcggcggcctccgcttgctgagactatttgacttctggctgtactttctcagctacatgttcagcggcactctgggtctggtcttcctcaacaacctggggcagatcgcagactcgcgaggactcaccgatgcgtccactctagtctcc

SEQ ID NO: 35386 - DNA, 113 bp, Zea mays
  Clone ID: MRT4577_132271C.1
gccatcggcaccgtactggatcctggccaccgactatgagaactatgccctcgtgtattcctgtacatgcatcatccacctttttcacgtggattttgcttggatcttggcaa

SEQ ID NO: 35387 - DNA, 370 bp, Zea mays
  Clone ID: MRT4577_132272C.1
atgaaggattcgttcgtttcttccccaggggggggttttttttttttttttttttttttttttttttttgggggagggtgttgttttcccatttttttaaaaaagggctgggcccaaacaatgggttgggaaatttggcatgaaaagggaccccaaggcccagggggcttttttttagggacccccaaatttccgggaaataaaattctttggatgacatggggttttagtatgtccagttttaaacaaattagttacgggccttttttttaaccaccccactttgtgttttaatgggggtttatagccgaaaccccccaaaaaacaaacggttgggttgttataaaaccccatttttttccggtttttc

SEQ ID NO: 35388 - DNA, 2362 bp, Zea mays
  Clone ID: MRT4577_132273C.1
ctggccgggatcggaccgccagcagtcgccagccccagcaaggcagagcagcgagcggctatgggaagagagacgccggcgatggcggtagcgctgctggcggcgctggtcgcttccgcggccatgttcatgttggcggggaccgcgagcgcgtccccggcggaggggatccagccgctgtccaagatcgccgtccacagggccaccgtcgaaatgtagccgtcggcgtacgtgcgggcgacaccgtcgctcctcggcgagcagggagaagacaccgagtgggtgacggtgaagttcggctggaaagagccatcagaggacgactggatcggcgtcttctctccgtctgaattcaactcgtcggctacatgtccgaacccatggccagcagaagaaccctatctctgcacagcacccatcaagtatcagttcgccaactactctgcgaactacatctactggggcaagggcagcatccggctgcagctcatcaaccagcgctccgacttctccttcgccctcttcaccggcggcctcagcaacgtacgtacctctggccgactacacgcacggaaccgaaaccaaagggtcttggactcaccaccactcacgcatatccatgtccacgcgtgcagccgaggttgatcgcggtgtcggagcccatatcgttcaagaaccccaaggcgcccgtgttcccgcgcctggcgcagggcacgtcccacgacgagatgacggtgacgtggaccagcggctacgccatcgatgaggcgtacccgttcgtggagtggggcgccctggtcgccggcggcgtccggcacaccgcgcgcgcgcccgccgggacgctcaccttcaaccgcggcagcatgtgcggcgagccggcgcgcaccgtcgggtggagggaccccgggttcatccacaccgccttcctcagggacctctggcccaacaaggagtaccactaccggatcgggcagccgtctctgcagcgcgtgatcgtgttcggcgacatggggaaggcggagcgggacgggtcgaacgagtacgcggcgtaccagcccgggtcgctcaacaccacggacgcgctgatcgcggacctggacaactacgacatcgtgttccacatcggggacatgccctacgccaacggctacatctcgcagtgggaccagttcacggcgcaggtggcgcccatcaccgcccgcaagccctacatggtgggcagcggcaaccacgagcgggactggcccgacacggcggcgttctgggacgtgatggactcgggcggcgagtgcggcgtccccgccgagacctactactactaccccgccgagaaccgggccaacttctggtacaaggtggactacggcatgttccgcttctgcgtgggcgactcggagcacgactggcgcgtcggcacgccgcagtacgacttcatcgagcactgcctctccacggtggaccgcaagcaccagccgtggctcatcttcgccacgcaccgcgtgctgggctactcctccaacgcctggtacgccggcgaagggtccttcgaggagcccgagggccgcgagaacctgcagcgcctgtggcagaagtaccgcgtcgacatcgccttcttcggccacgtacacaactacgagcggacctgccccatgtaccagagccagtgcatgaccagcgagaagacccactactccgggaccatgaacggcaccatcttcgtcgtcgccggcggcggcggctgccacctgtccagctacaccacggccatccccaagtggagcatctaccgcgactacgacttcggcttcgtcaagctcacggcgttcaaccactcgtcgctgctgttcgagtacaagaagagcagcgacagcaaggtctacgactccttcaccatcgacagggactaccgcgacgtgctcagatgcgtgcacgacagctgcttccccaccacgctagccacctagttaattaaactaattaatgagacgccgccagttttaattggctttcatccgaataaaactaaacgacgtgtcaaccacttattggtagaataatgtgccccgtcgaggcacactgtactgtagctgtatgtattcatgatagcgcacgcagggtcagggagtggtgttgctgtgctcctgctccctcgatctctgtattaaatatcactagctagcccgtgcattaccacttattctcagttggtgccgtagggctttgtgtgctggtgtggtttaatttccagataaggaaaatgggagttcaaacccctatgctcctgttcatttcaggaaactatgaaaatatggcttctttgtagcattgattgaaatgttctaagtgtttctgccgaataccc

SEQ ID NO: 35389 - DNA, 344 bp, Zea mays
  Clone ID: MRT4577_132274C.1
cacgcacttagggaccgccccatcggcggccgcggacattgctgaacgctgcggcagtcccaccgactagcaagccgccgtccggtccgtgcgcaagaccgcgacgggcgtcgcctggagaggctcccgtcttgccgccctgaggatttcatgggggggggacacccgcttttttgtcaacgggaccagatgcatagacgacgaacctgattcttgaggtgatatgccccacccacgagggtgcgcaggccacttggttcacatgggatcttcacgacgtggcagctaactgtcagacagcgagggttcctaaacagatgtacgcgcggagggcgatgcccgca

SEQ ID NO: 35390 - DNA, 2577 bp, Zea mays
  Clone ID: MRT4577_132275C.1
ggccctggttggactgtattggcgtgccggccgggcatggtgccgtgcgcggcatcagaccggcagcagtcgccagcccagccaaggcagagcagcgagcgtctatgggaagagaggcgccggcgatggcggtagcgctgctggcggcgctggtcgcttccgcggccatgttcatgttggcggggaccgcgagcgcgtccccggcggaggggatccagccgctgtccaagatcgccgtccacagggccaccgtcgaaatgcagccgtcggcgtacgtgcgggcgacaccgtcgctgctcggcgagcagggagaagacaccgagtgggtgacggtgaagttcggctggaaagagccgtccgaggacgactggatcggcgtcttctctccgtctgaattcaactcgtcggctacatgtccgaacccatggccagcagaagaaccctatctctgcacagcacccatcaagtatcagttcgccaactactctgcgaactacatctactggggcaagggcagcatccggctgcagctcatcaaccagcgctccgacttctccttcgccctcttcaccggcggcctcagcaacccgaggttgatcgcggtgtcggagcccatatcgttcaagaaccccaaggcgcccgtgttcccgcgcctggcgcagggcacgtcccacgacgagatgacggtgacgtggaccagcggctacgccatcgatgaggcgtacccgttcgtggagtggggcgccctggtcgccggcggcgtccggcacaccgcgcgcgcgcccgccgggacgctcaccttcaaccgcggcagcatgtgcggcgagccggcgcgcaccgtcgggtggagggaccccgggttcatccacaccgccttcctcagggacctctggcccaacaaggagtaccactaccggatcgggcacgagctccccgacgggtcggtggtgtggggcaagccctactcgttccgcgcgccgccgtcgccggggcagccgtctctgcagcgcgtgatcgtgttcggcgacatggggaaggcggagcgggacgggtcgaacgagtacgcggcgtaccagcccgggtcgctcaacaccacggacgcgctgatcgcggacctggacaactacgacatcgtgttccacatcggggacatgccctacgccaacggctacatctcgcagtgggaccagttcacggcgcaggtggcgcccatcaccgcccgcaagccctacatggtgggcagcggcaaccacgagcgggactggcccgacacggcggcgttctgggacgtgatggactcgggcggcgagtgcggcgtccccgccgagacctactactactaccccgccgagaaccgggccaacttctggtacaaggtggactacggcatgttccgcttctgcgtgggcgactcggagcacgactggcgcgtcggcacgccgcagtacgacttcatcgagcactgcctctccacggtggaccgcaagcaccagccgtggctcatcttcgccacgcaccgcgtgctgggctactcctccaacgcctggtacgccggcgaagggtccttcgaggagcccgagggccgcgagaacctgcagcgcctgtggcagaagtaccgcgtcgacatcgccttcttcggccacgtacacaactacgagcggacctgccccatgtaccagagccagtgcatgaccagcgagaagacccactactccgggaccatgaacggcaccatcttcgtcgtcgccggcggcggcggctgccacctgtccagctacaccacggccatccccaagtggagcatctaccgcgactacgacttcggcttcgtcaagctcacggccttcaaccactcgtcgctgctgttcgagtacaagaagagcagcgacagcaaggtctacgactccttcaccatcgacagggactaccgcgacgtgctcagatgcgtgcacgacagctgcttccccaccacgctcgccacctagttaataaaactaccacttattggtagaataatgtgccccgtcgaggcacactgtactgtagctgtattcatgatagcgcacgtacgcagggagtggtgttgctgtgctctgctccctcgatctgtgtattaaatatcactagctagcccgtgcattaccacttattctcagttggtgccgtagggcttttgtgtgctggtgtggtttaatttccagataaggctatattcggtttcctggaatataatttaagacttgttcggttaagaaaaaaaaagaaaaaaaaaaaaaaaaaaatttgaatttaaatacttaaaaactctcggtgaagtccatgctgacccaattaaagtcagcgttgcacaagcgaaatggacaggatttcgcggtggttttcacttttcagacaagggattcggtccgtgcggtgggtctcttgcagggcagcagcgattcaagttactgtacatagttttttttttctttttttctttttttggaagtgcgccaataaatgaggcttttctttactgcctccgttacctgcatgtgaaactatgttgttctacccgtagctaaaatatgttttagt

SEQ ID NO: 35391 - DNA, 326 bp, Zea mays
  Clone ID: MRT4577_132276C.1
gtgcacagtgggtctcctactcggctattcagttctcctgctctactctccggaaaccatggctgttgtggagctgaaggttggaatgcactgtgagaggtgcatcaaggccatcaagaaggcaatcaaaactattgacgacatggagagctatcgccttgagacggagataaacaaggtcacggtgacggggagcgttaccccagaggaagtcgtcaaggctctccacaagatcgggaagacggcgacatgctggacccaagactgaggagggcctggttgattcggacgtccctgagaatgagattttgttggctgtgggttgg

SEQ ID NO: 35392 - DNA, 1593 bp, Zea mays
  Clone ID: MRT4577_132277C.1
ccgggacacagacacacaaacacaagtcgtcgtaggcagcgagcgtctctcctctcccacgcatcgcgccaaggaagagagagagatcgccgctccccttctcggcgtcggtggtgcgggtgccctccctcctcgagcgagatctgtctggtcacagatctatctgacaaaatggtgaagatctgctgcatcggtgctggctatgtcggtggcccaaccatggccgtcattgccctcaagtgcccagacattgaggtcgtcgtcgttgacatctccaagccccgcattgaggcctggaacagtgacaccctgccaatctacgagcctggtctcgatgatgttgtgaagcagtgcaggggcaggaacctcttcttcagcactgatgttgagaagcacgtcgctgaggctgacattatctttgtctcggtgaacacccccaccaagacccgtgggcttggagctggcaaggctgccgacctcacctactgggagagcgctgcccgcatgattgcggatgtctccaagtctgacaagattgttgttgagaagtccactgtccctgtcaagaccgctgaggctattgagaagatcttgacccacaacagcaaggacacgaggattggccccaagttcctgaacgccagtgttgggttcggtgggtcttgcttccagaaggacatcctgaacctggtgtacatctgcgagtgcaatggcctgcccgaggtggccaactactggaagcaggtgatcaagatcaacgactaccagaagagccggttcgtgaaccgcgtcgtgtcgtccatgttcaacaccgttgccggcaagaagatcgccgtcctcggcttcgccttcaagaaggacaccggcgacaccagggagaccccggccatcgatgtctgcaagggcctgctgggtgacaaggcccagatcagcatctacgacccccaggtgacggaggaccagatccagcgggacctagccatgaacaagttcgactgggaccacccgatgcacctgcagccgacgagcccggcggccgtgaagcaggtgagctgcgtgtgggacgcgtacgaggccaccaagggcgcccacgggctgtgcatcctgaccgagtgggacgagttcaagaccctggactaccagaagatcttcgacaacatgcagaagcccgccttcgtcttcgacggccgcaacatcgtcgactccgagaagctgagggagatcggcttcatcgtctactccatcggcaagccgctcgacgcctggctcaaggacatgcccgcggtcgcctaatcccacccccctcacccatggattggattccgggaaggaagaggagagaagctggttgaccgttctttattacagtttgtttttgcaggctacgctaccgattttctcttgtgtcaggcataaaaaaaggttggacgggctgctagtattccctgctgtttggtgttttcgtatcggaggacgtctgtagatgtacaattcctcaggccccttgtgttcggcttgaggaagtttccgttgtaccctggacctgctatagccggttgattcttcaattgtattcctaaaagttactacacg

SEQ ID NO: 35393 - DNA, 177 bp, Zea mays
  Clone ID: MRT4577_132278C.1
ccggtccggattgccggacacccgctcgttcaagatcgcctacgtgccgaacggcaaggtctacgccgagatcgtgtgcccagaccgtcagtcgcagggcggcgagagcgagcgcgagcccgacaaggccatgaggagcgaacaagaagaagaagaatcgtctgaggagcagaagga

SEQ ID NO: 35394 - DNA, 125 bp, Zea mays
  Clone ID: MRT4577_132279C.1
ttttccgatgtatctgctggaccccgaggacggggaccttgtgcctgttgatgaccgtaagccaggcattacgcccgaagagctacgcctcacaaagatccatatcggggctcccataattggag

SEQ ID NO: 35395 - DNA, 346 bp, Zea mays
  unsure (1)..(346): unsure at all n locations
  Clone ID: MRT4577_13227C.1
gncgtcctttttttttttttttcttttttttttttttttttttttttttttgttcccttttcttttcttgggggcatagagggagtatcccttttttttttcaaagcaacgggaaaaccggttttaacaatagcccagccgcaaactcctcactcccaacaggggattaacggggctttgttaatcccctttgaaagagtgaaaaagtttgggccctaggaacatgactgttgctttgtttgatttaacccaaaaaaaatgggcggtttgctttttttttcgccctgcagggttcaccccaccccggacggaagccgcaacaccatttggccaccaaaaacccttt

SEQ ID NO: 35396 - DNA, 831 bp, Zea mays
  unsure (1)..(831): unsure at all n locations
  Clone ID: MRT4577_132280C.1
attgggacctcgagccggcgggaccgacacacaaaccaagtcgtcgtaggcagcgagcgtctctcctctcccacgcatcgcgccaaggaagagagagagatcgccgctccccttctcggcgtcggtggtgcgggtgccctccctcctcgagcgagatctgtctggtcacagatctatctgacaaaatggtgaagatctgctgcatcggtgctggctatgtcggtggcccaaccatggccgtcattgccctcaagtgcccagacattgaggtcgtcgtcgttgacatctccaagccccgcattgaggcctggaacagtgacaccctgccaatctacgagcctggtctcgatgatgttgtgaagcagtgcaggggcaggaacctcttcttcagcactgatgttgagaagcacgtcgctgaggctgacattatctttgtctcggtgaacacccccaccaagacccgtgggcttggagctggcaaggctgccgacctcacctactgggagagcgctgcccgcatgattgcggatgtctccaagtctgacaagattgttgttgagaagtccactgtccctgtcaagaccgctgaggctattgagaagatcttgacccacaacagcaagggcatcaactaccagatcctttccaacccagagttcccttgcggagggcactgccattgaggacctgttcaagccatcgatgtctgcaaggnncctgctgngtgacaaggcccagatcagcatctacgaccccaagggtgacggaggtccagatccagcgggacctagccatgaaacagttcgactgggaccacccgatgcacctgca

SEQ ID NO: 35397 - DNA, 642 bp, Zea mays
  Clone ID: MRT4577_132281C.1
cggccgggccgggacttaccaacacacaaacacaagtcgtcacactgagcgagcgtctctcctctcccacgcatcccgcctaggaagagagagagatcaccgctccccttctccgcgtacctggtgcggatgccctccctcctccagcgtgatctgtctggtcacagatctatctgacaaaatggtgaacatctgctgaatccgtgctggctatgtcgtgcgtgccaaccatgcccggcattgccctcaagtgacctcacattgaagccgccgtcgctgacatctccaaaccccgcattgagggctggaacagcgacaccctgccaatctacgagcctggactcgatgatgttgtgaagcagcgcaggcgcaggaacctcttcttcagcactgatgatgataagcacgtcgctgaggctgacattatctttgtctcggtgaacacccccaccaagacccgtgggcttggagctggcaaggctgccgacctcacctactgggagagcgctgaccgcatgattgcggatgtctccaagtctgacaagattgttgttgagaagtccactgtccctgtcaagaccgctgaggctattgagaagatcttgacccacaacagcaagggcatcaacttaccagatcctt

SEQ ID NO: 35398 - DNA, 511 bp, Zea mays
  Clone ID: MRT4577_132282C.1
gaccagatacacaaacacgagtcgtcgtaggcagcgagcgtctctcctctcccacgcatcgcgccaaggaagagagagagatcgccgctccccttctcggcgtcggtggtgcgggtgccctccctcctcgagcgagatctgtctggtcacagatctatctgacaaaatggggaacatctgctgcatcggtgctggctatgccggcggcccaaccatggacgtcattggcctcaagtgcccagacattgaggtcgtcgtcgtcgacatctccaagccccgcattgacgcctggaacagtgacaccctgccgatctacgagcctggtctcgatgatgttgtgaagcagtgcaggtgcaagaacctcttcttcaccactgatgttgagaagcacgtcactgacgctgacattatctttgactcggtgaacacccccaccaagacccgtgtatttgtagctggaaaggctgacaacctcacctactgagagagcgctgcccggatgattgtcgat

SEQ ID NO: 35399 - DNA, 224 bp, Zea mays
  Clone ID: MRT4577_132283C.1
gaacaatgaaagctcatacttatatcaaaaacagtactagcaatcatgctaattcacggtgttgaccagattgacagcaaatatttcttcaagtccagatggccctcaaaatattgggcaatctgacataagtcttaacaatgcaccataaatttcaggatcccttaaacaatgcatcatacacttcgggataaacacatttggctcgcctaccactgaatccc

SEQ ID NO: 35400 - DNA, 432 bp, Zea mays
  Clone ID: MRT4577_132284C.1
aaacacaagtcgtcgtaggcagcgagcgtctctcctctcccacgcatcgcgccaagaaagagagagagatcgccgctccccttctcgacgtcggtggtgcgggtgccctccctcctcgagcgagatctgtctggtcagagatctatctgacaagctggtgaagatctgctgcatcggtgctgtctatgccggtggcccaaccatggccgcgattgccctcaagtgcccagacattgagctcgtcgtcgctgacatctccacgccccgcattgagggctgcaacagtgacaccctgccaatctatgagcctgatctcgatgatgttgtgaagcagtgcacgggcaagaacctcttctacacaactgctgttgcgaacctcggcgctgaggctgactttatcatttgcctcgacgaacaaccacacacaacacc

SEQ ID NO: 35401 - DNA, 318 bp, Zea mays
  Clone ID: MRT4577_132285C.1
aaaaaaattgaccttcttgctttcccaaaatgaaaactggaaaacttattttgaatgaggacccctttttttttttcaggagtaggttttttattgcaaatctaaaaattcaaataatgtgcaccaagagttcaccaacaaatagtttccccgtccttttgctggtacagttttttacttaccaagcaaaaacagccagccccaatcagtcaagctttcaatacccccttggggatcatcgtctccttgtgtatttggggacagcttttttctaaaggtcaaaaaccttctcaaggtttttaccccaccagttaagtg

SEQ ID NO: 35402 - DNA, 2385 bp, Zea mays
  unsure (1)..(2385): unsure at all n locations
  Clone ID: MRT4577_132286C.1
gcggtacaaaaggatccagatcattcttactattggacagatatttgtattttctcatgagtcttcaaatcaaatgtatttattttctgtcagtctgaaagtatatgaagcggtgtgtagggttaatgttactcataagcagagaaatatagctttctcttttgtactttgtggagaaaaaaaaaaaaaaaaaaaaaaaaaaaaaaaaaaaaaaaaaaaaacccggacacacaaacacaagtcgtcgtaggcagcgagcgtctctcctctcccacgcatcgcgccaaggaagagagagagatcgccgctccccttctcggcgtcggtggtgcgggtgccctccctcctcgagcgagatctgtctggtcacagatctatctgacaaaatggtgaagatctgctgcatcggtgctggctatgtcggtggcccaaccatggccgtcattgccctcaagtgcccagacattgaggtcgtcgtcgtcgacatctccaagccccgcattgaggcctggaacagtgacaccctgccgatctacgagcctggtctcgatgatgttgtgaagcagtgcaggggcaggaacctcttcttcagcactgatgttgagaagcacgtcgctgaggctgacattatctttgtctcggtgaacacccccaccaagacccgtgggcttggagctggcaaggctgccgacctcacctactgggagagcgctgcccgcatgattgccgatgtctccaagtctgacaagattgttgttgagaagtccactgtccctgtcaagaccgctgaggctattgagaagatcttgacccacaacagcaagggcatcaactaccagatcctttccaacccagagttccccttgcggagggtactgccattgaggcccaattcaggcacgaggaattcaacctagtacgagaggaaccgttgattcacaattggtcatcgcgcttggttgaaaagccagtggcgcgaagctaccgtgtgccggattatgactgaacgcctctaagtcagaatccaagctagcaaccggcgcctctgctcgccgcccgccccgacccacgttagggcgttcgcgccccaagggcccgtgccattggctcagcccgcccggccgacgcgccgcggcgggccgcctcgaagctcccttcccaacgggcggcgtgctgaatcctttgcagacgacttaaaacgcgacggggcattgtaagtggcagagtggccttgctgccacgatccactgagatccagccccgcgtcgcacggattcgtacggccgccgccagcatcaagctccttgctccccgaccaaaccctacctgtacccgccgccgccgccgcagcagccatgccgcccaaattggacccctctcaggtggtggaggtcttcgtccgcgtgacgggaggcgaggtcggcgcggcgtcgtcgctggcccccaagatcggcccgctcggtctctccccgaagaagatcggtgaggacatcgccaaggagaccgccaaggactggaagggcctccgcgtcaccgtcaagctcaccgtgcagaaccggcaggccaaggtctccgtcgtcccctccgccgcggcgctcgtcatcaaggcgctcaaggaacccgagagggacaggaagaaggtcaagaacatcaagcacagcggcaacatcagcctcgacgacgtcatcgagatcgccaagaccatgcggaacaggtccatggccaaggagttggccgggaccgtcaaggagatcctggggacctgcgtcagcgtcgggtgcaccgtccgatgggaaggaccccaaggacttgcagcaggagaatgatgaagcagaagtcgccaagccctcagcttaaggccatacaactagagatcatcggctgggtttagaccgtcgtgagacaggttagttttaccctactgatgaccgccccgcgatagtaattcggcacgaggtacgagaggaaccgttgattcacacaattggtcatcgcgcttggttgaaaagccagtggcgcgaagctaccgtgtgccggattatgactgaacgcctctaagtcagaatccaagctagcaaccggcgcctctgctcgccgcccgccccgacccacgttagggcgttcgcgccccaagggcccgtgccattggctcagcccgcccggccgacgcgccgcggcgggccgcctcgaagctcccttcccaacgggcggcgtgctgaatcctttgcagacgacttaaaacgcgacggggcattgtaagtggcagagtggccttgctgccacgatccactgagatccagccccgcgtcgcacggattcgtccctaaaaaaaaaaaaaaaaaaaaaaaaaaaaaaaaaaaaaaaaaaaaaannnngggggggggg

SEQ ID NO: 35403 - DNA, 2434 bp, Zea mays
  Clone ID: MRT4577_132287C.1
ccggccgggatggactcatgtgagagccttttgattaatgcaagtttggtgctgtggcatgaaagagcactcgtcgtccacctcaccactctctctgtctctcctctctctctccttcagttgctctggtttctgaccagccttgacgcggttgctacttttttttctttctttacgggacacggcacggttattttttgaagcggaggggtagatctgaatcggtgggttcgcgggacggggtatttaaggactcgtggcctcgcccctcctctgcacacagacacacaaacacaagtcgtcgtaggcagcgagcgtctctcctctcccacgcatcgcgccaaggaagagagagagatcgccgctccccttctcggcgtcggtggtgcgggtgccctccctcctcgagcgagatctgtctggtcacagatctatctgacaaaatggtgaagatctgctgcatcggtgctggctatgtcggtggcccaaccatggccgtcattgccctcaagtgcccagacattgaggtcgtcgtcgttgacatctccaagccccgcattgaggcctggaacagtgacaccctgccaatctacgagcctggtctcgatgatgttgtgaagcagtgcaggggcaggaacctcttcttcagcactgatgttgagaagcacgtcgctgaggctgacattatctttgtctcggtgaacacccccaccaagacccgtgggcttggagctggcaaggctgccgacctcacctactgggagagcgctgcccgcatgattgcggatgtctccaagtctgacaagattgttgttgagaagtccactgtccctgtcaagaccgctgaggctattgagaagatcttgacccacaacagcaagggcatcaactaccagatcctttccaacccagagttccttgcggagggcactgccattgaggacctgttcaagcctgacagagtgcttatcggtggccgggagacccctgagggcaggaaggccgtccaggctctcaaggatgtgtacgctcactggggttccccgaggacaggatcctcaccaccaacctgtggtctgctgagctctccaagctcgctgccaacgcgttcctggcacagaggatctcctctgtgaacgccatctccgccctctgcgaggccaccggcgcgaatgtgactgaggtggcttacgccgtgggcaaggacacgaggattggccccaagttcctgaacgccagtgttgggttcggtgggtcttgcttccagaaggacatcctgaacctggtgtacatctgcgagtgcaatggcctgcccgaggtggccaactactggaagcaggtgatcaagatcaacgactaccagaagagccggttcgtgaaccgcgtcgtgtcgtccatgttcaacaccgttgccggcaagaagatcgccgtcctcggcttcgccttcaagaaggacaccggcgacaccagggagaccccggccatcgatgtctgcaagggcctgctgggtgacaaggcccagatcagcatctacgacccccaggtgacggaggaccagatccagcgggacctagccatgaacaagttcgactgggaccacccgatgcacctgcagccgacgagcccgacggccgtgaagcaggtgagctgcgtgtgggacgcgtacgaggccaccaagggcgcccacgggctgtgcatcctgaccgagtgggacgagttcaagaccctggactaccagaagatcttcgacaacatgcagaagcccgccttcgtcttcgacggccgcaacatcgtcgactccgagaagctgagggagatcggcttcatcgtctactccatcggcaagccgctcgacgcctggctcaaggacatgcccgcggtcgcctaatcccacccccctcacccatggattggattccgggaaggaagaggagagaagctggttgaccgttctttattacagtttgtttttgcaggctacgctaccgattttctcttgtgtcaggcataaaaaaaaggttggatggcgctgctagtattccctgctgtttggtgttttcgtatcggaggacgtctgtagatgtacaattcctcaggccccttgtgttcggcttgaggaagtttccgttgtaccctggacctgctatagccggttgattcttcaattgtattcctaaaagttactacacagtcgatatgttccttttcttttttgcatagtagcaatacctgtcccacatcagtcacagtaaacatgcgctgctgttaaggaaatgcgtgcagggcattttctttgataacggtgtaatctctctatttcccccttccactgtttcacatgaatcgtgaacggctcacgtgtatatggtttcgtacctgcctgaggtcggttgcctgtaccgaaatttggcttaagagtttttctgtttccact

SEQ ID NO: 35404 - DNA, 244 bp, Zea mays
  unsure (1)..(244): unsure at all n locations
  Clone ID: MRT4577_132288C.1
cgcccgctgatcccagcccgatacctctcctctctactctcccaggagactctcaggcccagtgtgactctggggcttggctgagatgctgacccagncccagggccagcaccacgcagacagaggctcaggggagtacccttcagttattcaaccacagtaggtagcttgtgcttacactgtgtcagcaaacccagctagagggctgggaccccgattgcctttgccactcagaagacctcat

SEQ ID NO: 35405 - DNA, 450 bp, Zea mays
  Clone ID: MRT4577_132289C.1
gataaatgaagaatttagaaaaaaaaggtataaaaaactaatgcatactataaaaatcaaaaatactactacttactgacagattggtaggaaggaaaactctgtaatcggcagcttcggtcctgaagagcttgtcttcattagctatgcagatggcgtagtagtacacttggtcattgcttctcatttcgccatctgcacatgcttcataaatctgcttactgccaattaagttgtactccaaagcaatcacatcttctgaatcatcctcaggaaggaacttttcaacatatgtaaagtatgtcaactgtggatgagcaatcctcttctcaagaatttctgccaccatcctcaaagctgccttctttgcagccactttgcgacgccattcaggtctgaatagtgacacgagtccaccatatcaacctgaggcagctggtccaccataac

SEQ ID NO: 35406 - DNA, 527 bp, Zea mays
  unsure (1)..(527): unsure at all n locations
  Clone ID: MRT4577_13228C.1
accggttccggaattcccgggntctacccacgtcgtccgctcgacgtcctctctctctttcctccgagtcttctcgaaactcctaggtgtcgtgtccgactcggtcggcggcggctgagggtgatggtcgatggactccggtacgtctgtggtcgaaagtctcttcgtggagcatctactactcggactgttcgacaccataccgcgcggcgtctggtggggtctgtatcagngagactctccatgtctcactcttcgagggctcagaagttccagggtcccatccgccattgctcggcaagtctcggatctcnttcccttccaggtcctgcgagcacctagatcgtcactcgtcgacttgccagccgtcggggccccaggganggcatggctcgtcttcgtctctcggttccattccgcactcggctcccgtaggagcatccccatcaaggttctctcagggcatttccatttgctgccggcaagctgggtcccttcttcgtgcagnaatgatcatgttccgcctg

SEQ ID NO: 35407 - DNA, 1345 bp, Zea mays
  Clone ID: MRT4577_132290C.1
gggctgtttgttttgacaaggcaaagcacaaattttattaattttgatcaacgatcagctaatattatattgcaaaagaaagctgaggattaaatccaagggcggagcttcagtgtgtgcgtataatactccagtttatatcctgatgaacatctgtactgtccggcatgttaacctagatccgtctcggctgcgccctcctgttcttcttgctgctgggatctggtagactcgagggagtcaacttccgaagcgaggcgtgcaacatcatcaacgcatagctcaatccgatggcgtacacgagagcaaactgtaggttgcagacgtacaggagtatggcggtagcaatctgcgcacagtgcaacagagcctgggcaacccctggagccctggtggtaagaccccaatggtcccggcagtagcgcacgccctcccagacggcgaggctgcgaagatgaagttcaggcagtatctccttcgcgagtgcccctgccaaggaggaacaggagaaccaggagggaacctataacagtggttgacttggaggttgaagctagccgggaagggagcaaacgccagagggttgaaccagtaggacgtcaccccgcgtccgattggggagcaaggtctagcttgcagtcaaatgccgcacaaaccagcaaagagcctgccaaggaggtccccgaggaaccatcttttacctgcccaatatgttggaataagatggaggagccttccacgacgacttgtggccatgtcttctgcgacacgtgcatcaagcaggccatcaaggttcagaagaaatgccctacttgcaggaaggggctgaaaatgaatagtgttcatcgtatttaccttccgaacggttctagttaagctgagcagctttacatatctgatggcttgtaactttgggggcaattagcttaacctctgttatccgatacatgccgactggctttgtcaaagaaacttctggtaacgtaaggctgtgcaatgtactgtgaggatcagaaattcttagcctgaacaacagatagatgtttcatcccagtctgtattatttatcggcatcaccaggagttcatcatgagaacttcctgactagggaagtcgatatcagcctcagttttactctgcatccatggttcccagaatgttttgttaggatgtgaccataagatgatgcatataaccgtgcaaaacattattttgcaccctattatgtattatttatatcctattatgtattatttaaaaaaaaaaaaaataaaatataaatgatgagtaaagctggtgaagatagccttatatatattgggttattgtcttgggggattattgt

SEQ ID NO: 35408 - DNA, 101 bp, Zea mays
  Clone ID: MRT4577_132291C.1
ccgagctcgtgaagcacagctttcatcgtatgatgtcgagtaagaggacgaagagggtcacagaagaatgtgctgtgagcgaagcactgctgctcgtcaca

SEQ ID NO: 35409 - DNA, 561 bp, Zea mays
  Clone ID: MRT4577_132292C.1
gccaaacaacaggagagctgcatatcattatatcaagaataaaaaaagggaaagaagccttacaacacacacactctgactcaccaaaatacaatatttacagtacacccaaaatcacaccaggggcaaaaacacaacctcaaccaaactacaaagcagcctcaagagatccaacatcctttggaaaaggttcaaagaccgttacagtatggggacttgctgattctcaatcttgaaaaaatgggttgggccttgtgcatcaggtggttttggctgaataaaacagattcctatctctcatgggaaggtctaccaatacaggtgcctcacaacgcccaggctctctttgctgctgctgcacgtcaggaaaggagaagacaccgaccgagttctggacataccggtggttgaacggtagctctgttgctgaactagctcctaatcttaataacagatctcccaaagagcaaaattgcagctcatggtgtcataggctttgagcagtagaaggtgggtaacggacattcaaggagctctaaccacccaggttatcaatatctg

SEQ ID NO: 35410 - DNA, 906 bp, Zea mays
  Clone ID: MRT4577_132293C.1
gtcatgctttctaacatatactcgaacatggaagagggaagagctgcaagcttagttggaaatgaagcaaggggattgagaaggtccctgcatctagctgggttgagcttgatggtaaggtccacaagttctatgttggggacgattcacatcctctctcagataagatttatgcaaagcttgatgaattgggcatggaaatgaaggccatggggtatgaacccactactgaggtggtgatgtttgatgtcgaaaatgagagaaggaaaacacactagtgcatcacagcgagaagattgccatcgcattcagtctcatcactactgaaccaggagagaccattagggtcaccaaaaacctccgagtttgcactgactgccactctgccatcaagctcatatcgaggataacctgtcgtgaaattgttgtacgagataacaatagattccattgctttagagatggtcattgttcttgcaatgactactggtagtagacctacatgttgcagttgcgagcggcatggagagctggaagcatgtccagtccatttttgtttgatgtaaaacttttatcacctagaattttgaccgggcatagaagaggcagagtattaggcgtttggatgtcagttcctttcccagtgtataatttctgctagagccctccggcattctgaaagatctggatacagtgatacacggcagcggtggtatagatatatgcaagttctgagaagacaattgttctgctgacatacacattcttgcttccttggcagccagtaaaaaacacatctgaaactctttgtcatgttgcggcatctgggactggaaacagtttgattttttttttgtaataacgtttatctgtgaattctagctcaaagttctgaggctgcaatcc

SEQ ID NO: 35411 - DNA, 295 bp, Zea mays
  unsure (1)..(295): unsure at all n locations
  Clone ID: MRT4577_132294C.1
ggccgggccggngattctctcagattgatgtagccgcctatgtcttagtactatcaccgcagaacgagcagagccgaaaagatccggatccttgggaggacactgacagggaagaccagtcatcctcgaggtcgagagcagcgacaccatcgacgatgtcaaggcccagatccaggacaaggaaggcatcccgccgcaccagcagcggctgatctttgccgtgaagcagctggaggatggccgcacccttgcggactataacctccaaaagtaatctacgctcctcttcgcacct

SEQ ID NO: 35412 - DNA, 333 bp, Zea mays
  Clone ID: MRT4577_132295C.1
cggctaagcaaggttacggtcggctacacgccgcggtcgtaagggctgaggatttttggtccgcacgctcctgctcctgactcaccgctgttcgctctcgccgaggaacaagtcggtcaggaagcccgcgcgcaacagccatggcttttaaggataccggaaaaacacccgtggagccggaggtggcaattcaccgaattcgaatcaccctaacaagccgcaacgtaaaatccttggaaaaggtgtgtgctgacttgataagaggcgcaaaagaaaagaatctctaagtgcaaggaccagttcgaatgcctaccaagactttgagaatcacta

SEQ ID NO: 35413 - DNA, 268 bp, Zea mays
  Clone ID: MRT4577_132296C.1
tcgccgatctgctgcgggaatggggtgcacggcgtccaaggtggagcaggaggacacggtccggcgctgcaaggagcgccgccgccacatgaaggacgcggtagcggcgcgccagctgctggcatccgcgcacgccgactacctccgctccctccgcgtcaccgccgccgcgctctcgcgcttcgcgaagggccacccctcgctcgccgtttcgcaccacactacccccgtcctcctctccgccgccgcgccgccgccgacagcaacg

SEQ ID NO: 35414 - DNA, 109 bp, Zea mays
  Clone ID: MRT4577_132297C.1
ttcgcccttcctctaataatccccctgacgaacaagttttaacgaggggaaattttgaactgttgtgggttctcattcacaacacggaacaacatgaacatgatcacat

SEQ ID NO: 35415 - DNA, 422 bp, Zea mays
  unsure (1)..(422): unsure at all n locations
  Clone ID: MRT4577_132298C.1
agagggtcaaaagnggatggcgagcattcttttatgggattggatctttctttaggttactggttcctctggcaccaccttgacgggctccgagagctccattatactcctccgaccaggaaactcgataagaagcacctgtgagcgatacttatgtgcttgttttgatattttctaccttctctgagtacgagatctctgcgtgatgatgttagcgcatacccttgtactagctataaacatggactcatgcttgaaacaggtgggacaatccatcgggtttttctttgtttggttcacgcttatggagtaggaaatgctagtgccttaatgagatgatagtaggcttgcaggatgcattgacagatgaagaacgttcaaatagcgcgttcgaccgagagattttgagcatggttgaacac

SEQ ID NO: 35416 - DNA, 243 bp, Zea mays
  Clone ID: MRT4577_132299C.1
cgtgcgcgcactttgacccagatttaaccgttcagcttgcccgctcggacccgccaaccgcgtcaccagagcgtctgcattctctgtcccccttccacacgctcttgctgaccagctgatctttctaagacgcgatagccatggacacactgacgaacatatctctcctgatcaggcattggcctgccggcaaaatcccctagtctgatgagtatgctatctacaacgacgtgcgagacattg

SEQ ID NO: 35417 - DNA, 597 bp, Zea mays
  Clone ID: MRT4577_13229C.1
ccgtccgaaaaaaaaaaaaaaaaaaaaaaaaaaaaaaaaaaaaaaaaaaaaaaaaaaaaaaaaaaaaaaaaaaaaaaaaaaaaaaaaaaaaaaataaaaaaaaaaaaaataaaaaacacaaaaaataaaaaaaaaaaaaatataaataatggggggccctttttgggggtccctgtttgggttcccccttcttgccgcctgttaattttctttttgggtcccctttttttaatccttggggccgttttttttcccgccttttttgggaaaacccttggggtccccccttttttccctttttaaaactttccccttttgactgccttttggaacgcgccgtggccccgcccatttcccctttccaatgtgtttgccaccctgatggggaccgggtccctcccttgtgccctccctttagcccctttggttttgttggttccctttgtggtccccccccccttttccccccccttagccccccctctttggctttttttttttttttttttccccgcttttcgggcctttccccccaattttttaaataggggtttcctttggggttcccttttagggccttaatggacctttttcccc

SEQ ID NO: 35418 - DNA, 390 bp, Zea mays
  unsure (1)..(390): unsure at all n locations
  Clone ID: MRT4577_1322C.1
gggcgggctttttttttttttttacaaaatttccaagagtgctttatgtgtttgaccgcaatnacaaatgcgaatactggagcagttcaacaagtgatgatggaaggaaacacccaaacattacccaggacacaaacaaaggtttttcaacaccacaacctggctcgacagccaaacagattcatgcaagcagatcagtattcctcctcctcgtcgccgtcatcactgccgccctctgcggcgacctcctcgtagtccttctccagggcggccaggtccttgcgtgcctcggagaacttcccctccttcatgccctcggcgacgtaccaatgcacgaacgcgcgcttggcgtacatgaagtcgaacttgctgttgatgcgggagaacacc

SEQ ID NO: 35419 - DNA, 248 bp, Zea mays
  Clone ID: MRT4577_132300C.1
gattgcagtcgcggtcaggttgaataggaccaagaagcggctgcaagcgaggatgccatgcctgaacgtgtcgaccaacgtgaacctggagggtgtggacaccttcgtcatcctggagcaaatctccatgtccttcatcaacatgatctgcaagcccaaggactacgtgatggttgctatcatgggttcggctcctatggcatttggaggctccgaggagccaacatcttactgtgtagctgtttcca

SEQ ID NO: 35420 - DNA, 180 bp, Zea mays
  unsure (1)..(180): unsure at all n locations
  Clone ID: MRT4577_132301C.1
cnggaagagagatcatttggncgagtaccgtcnccnccnccnggntcnagccgccgccgncgcaganngagaggncntacccanaggaanngnagcangaaccaggagaggagacggtcncgcccaaagtcncgncacctatctatcgtatcgtcagtctttagcgggaagagagtcatt

SEQ ID NO: 35421 - DNA, 177 bp, Zea mays
  unsure (1)..(177): unsure at all n locations
  Clone ID: MRT4577_132302C.1
aatanttttttttgctatgttatctaattgagggggttatttttgtaagggaaacacattaaaggaaccccggagtagaactctttgtactactacacgaaatgaaacggaccaacaaaagcctttttcaaccgggttcgatggctcagcaactcgtgcccaaaatagaaaacccac

SEQ ID NO: 35422 - DNA, 651 bp, Zea mays
  Clone ID: MRT4577_132303C.1
cctttatctcccagccccgctccccctggttctcattgcccagcaccaggaacgcatagcctcctctcctcttcagccatggccgtcggcctccatgggactgagctcctctcttgctcctcccggcgctgagctccatcagccactgctcctgaacgccggcgccaaccccatctctgtatctcgcccagccgagctccctctcctatggcgccctcgcctccatggcgttgccgtagagctcgcccggtttcgaccttcgcgtagcccttgacccccactcgtccgttcctgttccgacgcccgagctcacctccgctctgttgtgcccctgtgttcggcctcctccctccatcagcgaacttgctcggtctcgctcacctcgccaaggccccggccacgatgtcatccccggtgagtcccttgctgtgcactcgccgagctcgcctctctccgctcgtcttcaaccattagtgaccgagctgctccccacaccgtgtggttcccttgctccctgttgtttgatgctggttgtcactctatgctattggatgtggagagaaaaccccagaatgtgtggagaagtaaacaatctggtgtgatgctcttcttgtgtccggtgaaatgcctcaatcgaaaatcatcggtctc

SEQ ID NO: 35423 - DNA, 330 bp, Zea mays
  Clone ID: MRT4577_132304C.1
ccccccaggaagccccctaatgcaaccctttttatttttccccctgaaaggtttatggcaaaagggatccccccccccacctaaaaacaaataccctaaagcagcaaaacacctgattaaccccaaagctgaacagttcctaccctgttggttaactttccccctacacaggaaagcggagggtttttttgatcccaggttccctctcctcggctttttaaaaaggaccactggccttctttttctaaaagggggacccaagagcccattccaaaaggggctcccaaacaaaaaagatacccctgggggggaagatctctttttttccgg

SEQ ID NO: 35424 - DNA, 282 bp, Zea mays
  Clone ID: MRT4577_132305C.1
gttgaagttcccaaatactttataatagtgtatcagatatctctaatttggctatgtccagtttatacagtttacaaaatatagcagatgcaatattatgggggaaatcctatattcagagtactctataaatttgtgtgtatgtgtgtatgtgcgtgtgattaacagagaactactaaaaaaaccaactgctttttagatcctattgtgtagttaaagtgtcatgccttgaccaatctaatgaattgattaattaactaggcctttatacttaactaaata

SEQ ID NO: 35425 - DNA, 323 bp, Zea mays
  Clone ID: MRT4577_132306C.1
gaagaggagctgagacggtgcgtcgcctgctgcgacatgatggtcgcgagcgcggagacattctagaacttatagcggcagctgaccgccactatgtgggacagcaactgtattagcaaaaacgctagcctgcggtgtctccaggcgcgctggcattgactataactcgacggaacgcacggcttcagggcgcgttacgcatcattgaaatttgtcacctataaaccttcgatggtatgataggggactaccatcgtggtgacggccgactgataatcttggttgaactccggagatggaacatgacaaacgggtaccacatc

SEQ ID NO: 35426 - DNA, 418 bp, Zea mays
  Clone ID: MRT4577_132307C.1
aaaaaggaccatacgggttaatattatcctcccaaaaaccggcccttccccccttaaaaagaataccaagggttcccttgcccctaattctttttcgggaacaaaacaaacacccaaaattttccccggggggggaaacccccaaaagaatttaaaataacggggggaccttccccggctaccataacaaaaataatcgttggcaaaaggaaacctaaacgaaaagggaccccccccggcgggccgtccaaagggcgaaattccggaccacggggggccgtaacaagggaacccaacctggaacccaacttgggggaaataagggcaaaagcgggtcccgggggaaaatgggattccgttaccaatccacacaaccaaccaacccgaaaccaaaaggggaaaacccggggggcccaaa

SEQ ID NO: 35427 - DNA, 375 bp, Zea mays
  Clone ID: MRT4577_132308C.1
ctcacctttccttcacttcttcttcaccaaataatgtcccgcccttggcgggcttcttaggtgggacaggagagtcatctccatgtcctctattccggctactaccttctccgtcatcttatccgttcccttctagtgccgaagctgacaccgccatctacaacgaccttcattactacacatttcatgtccgcatctactgcgacacctgccgcgccgctttcgtgaccaatgtcaccaagtacatcgtgttcgccaaggtgaggcttgagtgcaagcacttattcaccggcaagctctagcgctccatcgactgtgtgacctactctaactgcacttacacgatcgatctcaatgacagccactatgaggaca

SEQ ID NO: 35428 - DNA, 364 bp, Zea mays
  Clone ID: MRT4577_132309C.1
gactagcaaaaaagattttgaactcgctagcttctgctttaaaaaggtttcaatatccaatttctcatttcccaactttctctagtattgacattgtcctaaaaatttgggcaagtttttaaaattgtgatattagtaaaaaataacaacttgcaatggccataaaactgggacaacaaaactgggagaaaacgcccagttaaaaagatcaaaccacactgtccaatgcaccagcttatttgcgtcccttgttcttttgcacacttcagcataagtaataaatattttcatattgccacgttttcttcgctaactcttgaattgtgtaaaaatgcagaaacttattggctggtgttaatattgc

SEQ ID NO: 35429 - DNA, 355 bp, Zea mays
  Clone ID: MRT4577_13230C.1
ctatgcgactgactctcctcctccagagctcgtcgccaccggccatccgccaccctcgatcacgccgtgcgacgagggaaggccataatgatgacggccagggcgaccacccaagcgctcaagacattgtacaactgtgacaagaccggcaagaggaagtcgtgatcacggcaccgtcctggacatcttcaaggtcctgacgggcatggagggagacggctacattggagaggttgagtaacttgatgaccactgagtcggggaagatagaggataaactgtacgccttggtggatctatgcaattataaaaactcgaaagagaatattttttttttttcccccccccccccccc

SEQ ID NO: 35430 - DNA, 617 bp, Zea mays
  Clone ID: MRT4577_132310C.1
ccatcacccaccactcccctcgagcccgagggtcacaacctccctccccttccgcatcggtgccccgcaccaccaccacctaccccaagcccggtcgcccaccaccactcccacagccggcggccaccgcggcgccacaccccaacaccaccagaaccccgcccctctcccaccccaccccgcgcaccaccagcctccccctgctccgccttctaatcccacgcaccgccggcgcatagagccatggtccgccgcccagctagctacctccggcggccaaccaccggagccgcgacggcctggatccgacctcgcctcctccacacgagccccctttccccacctccctccaccatctttcctcctagcccctcagcttcctccacatctggtggcccgattagcaccagatcctgccgatgccgacggagatggccgcctccaaccaccacggcccggatccctggctctctccatcgttctctgactctcgccgacgtccaccgggatcgacctcctgacttagccgtgcggttaagtagcaaagggaggttcgctggcttccgtcgagcagttcgttgcacctccccaccgctagtcacgcatcctccgccgtc

SEQ ID NO: 35431 - DNA, 381 bp, Zea mays
  Clone ID: MRT4577_132311C.1
tcccccaaccctagctcccgatgtcgatggcgaaccctcgcgtcttcttcgacatgagcgacggcggagccccggcgatccgcatcgtgatggagctgtacgccaacgaagcggcgaagaccgctgagaacttccgcgcgctgagcacgggggagaaggtagtggacaaacccgctaagtcgctccactacaaggggtccgccttccaccgaggaatccccgagtgcatgtgccatggagctaactgcgcccgcagcaacggaaccggagactagaccatcaagggtgacaatgtccccgacaaaaagctcatgcgaaagaacacgggtcgcggggagctctgcatgttcgacggcgtgaaccatacaccagacggctccc

SEQ ID NO: 35432 - DNA, 274 bp, Zea mays
  unsure (1)..(274): unsure at all n locations
  Clone ID: MRT4577_132312C.1
gaagcaatgnggctcctgtgtgtggcgttggcggacttggcatggngctncctctggntttgggactcctcagaacgaatgaagagtcggtagcaggnaggactggctgggagccgaaagccgnaccctgctggtcatagcgcaccctgacgatgaagccatgttttttgctcccacagtgctaggcttggccgctaaggcactgggtgtacctgctttgcttctctgcagacggagcttgctctgtcgctagctggagtgcagtgcccaatct

SEQ ID NO: 35433 - DNA, 259 bp, Zea mays
  unsure (1)..(259): unsure at all n locations
  Clone ID: MRT4577_132313C.1
tttttttaaanagcaccgggccaaataaaaaggaccatctacggggggttccgncctttttaagttctctccaaacaaaaccaggccaataaaaggggggaaagttaaaaacaacccactaaaaccccaagtgttcaaaaaaaaaaatgaaaacccaaggggaacccggcaaatacaaaaaggcacgaccccccccaaatggacacctttaagaaaaaactttccccctccccacaaaaaaaccctgaaaccccttccc

SEQ ID NO: 35434 - DNA, 404 bp, Zea mays
  Clone ID: MRT4577_132314C.1
ggctgtacgtcgaatcaagacttgcccaaattgcgaactgggcactgggcagcattgacatcgcgccaggaggcataccgctggggtgcaaggctgccttttttggcccctcgagatgaacgcccacgaaccaccaaattgtttttatccgcggcaacgtcaggagggacgaaacagaaaaggaccacgtggttttgtgacactcgctgcacaaccaggcgcccggttgatggatatgccggaactgcaaccctgtaggttagatggggtaacgggcacctctgctggtggggcctatggcccatttctggacgcgggctttggtttccaccctgtccgggggggaagctccgtcgacgttgctccctggggcgacgcgctcctctccaccggggaaagaaccc

SEQ ID NO: 35435 - DNA, 1641 bp, Zea mays
  Clone ID: MRT4577_132315C.1
gctggtcaacgtatgtacatatattgcgtacctcgagcccggccgggaacagctgcgagtcagccgatcctgatccctagccggaggtgggaggtcaccgtcaccgcgcctcgccgccggggcgtcacaatggcctaccgccggaagcctcagccccatccccagccccagcccacgccctcgttggagcaccactacccgtcgtccgtgggccccgcctcacccgactccctcgccgcgcaggccatgcgcgcctccgccgcacaccgcgatgcctcctccctcacctccgcctactccgcctcagcctcgctggcggcctctcgccggagccaccacgagccctccgtgtccacaccgtccctggatagttcaggctatgaatacacgtccatgaagaacctcaacgaggccaagtatggattctggggcacacttgcgcggaaggcaaagtcatttcttgacgaggactgctccccggagcagtacaaatcgccaagagatgatgtgcatgttggtgtccagcttccacattcaaaacaattgccaggagagacgtggaaacctgagacacctccatctcagaagagatctgagtctataacttcctcccttacctatattggaggcacaataaaaaatgcacttgaagaaggtcggaccattgtagagaataaaacggctgacattattcaggagacgcgtaaactgaacataagaagaaaaggagctggtctaaatacacaaggagaagctggccacaaaattgctcaaagacaccttcctcaaaatccacttgaccatgaaactcagttgaaggcatctcgcgacgttgcaaatgccatggctgcaaaagcaaagttgctattgcgggagctgaaaactgtgaaggcagatttagcttttgcaaaggaacgatgtgctcagcttgaagaagagaataaaatgttgcgtgagagttatgacaagggtgataatccagaagatgatgatctgatccgcctccagttgggaacactactagctgagaaagcacggcttgcgcatgagaactcagtatatgcacgagaaaacagattcctgcgggaaatagttgagtatcaccagctcactatgcaggatgtcatatatgtagacgaaggcatcgaagaggtcaccgaggtgtaccctacacaagtactacctcgcactgggtcgagcgtcagtcgtgcagccactgcagctacaccgaaatctgctccgacgtcaacataatcttgccctgtcgtacaagcttctacaaatacactttttcgcggtcatctctgagcaatagatcaaagcgcccacctccaaccttcacggaagagtaaggtggttgtttggttgtgacgggaccacatagtttatgctgctactgttcaatgtaaacaaggattcactgttgttatgcctgtttgttgtcgtgactgagctgtggcgaaatatgaatgaacagtagcttctgactttctatatatattgtctcttaaccgtatttatggtcagagactcatggttatattatagtctcttaattgtctcttatacttggaaaaacaatgtacatgctctaagaagtggtattggacgacaaatagtcatgggaatgcattgttgtcc

SEQ ID NO: 35436 - DNA, 1725 bp, Zea mays
  Clone ID: MRT4577_132316C.1
aggaattcggacgaggcaacctcctcttttctcgccgcagctcccaccattcccgcagacgccttgtccccttcccagcttcccctccccaccccgccgcacgtccgcaagccccacgccaccgtcatgtctccgaccaccaccccgccgcccgcgcccgtggcagccccgacctccaagggcgccaagcgcagcctcatgtcctcgctcatggacgccactgcgctgctccgctcctcctctttcaaggaggactcgtacgtcgcggccgcgctcccggcgtccgagctccgcgcgctcgccgacctcaaggcgctgctcgccacccacccggaccccatctccatctggggcgtcccgctgaaccctcgctctcctcccgccgcggcggacgacaccgcccctgccccaacccccgtcccggtcgacgagcgcgccgacgtggtgctcctcaagttcctccgcgcgcgggacttccgcgtccgagacgcccacgccatgctgctccgctgcgccgcctggcgcgccgagttcggcgctgacgccgtgctggacgaggagctgggcttcaaggacctggagggcatcgtcgcctacatgcacggctgggaccgcgacggccaccccgtctgctacaacgcgtacggcgtcttcaaggacagggacatgtacgagcgcgtcttcggcgacggcgaccgcctcgcgcgcttcctccgctggcgcgtccaggtgatggagcgcggcgtgcgcgcgctcacgctcaggcccgggggcgtcaacgccatcatacaggtcaccgacctgagggacatgccgaagcgggagctcagagccgccagcaaccagatcctctccctcttccaggacaactacccggagatggtagcgcggaaggtgttcattaacgtgccgtggtacttctccgtgctcttctccatgatctcgcccttcctcacggagcgcaccaagagcaagttcgtcatcgcgcgcgagggcaacgtcgccgagacactgtacaagttcatccggccggagctggtgcctgtgcagtacggcgggctgagccgcaccggggatctcgagaacggacccccgaagcccgcgtccaagttcaccatcaagggtggcaagagggttttgctggaggtggacgggatcgacgccggcgcaacgataacgttggatctggtcgtcgggggctgcgagctcggctacggcgccgagtaggtgcccgcggccgacgccggggaccccgtgcgcgtggccaacacgagtagggaagccgccaagatcgtccaggccatagacaatcctgtgcacagtgcgctcaaggttgcggaagccggctagttcgtgcgcaagtcgtccgcgtaggcatgctgatgtcttgtggtggtcgtcgcggccggcaccttgccggcaggtagccgcgagggggaggttaacgtggaacaactggtgaagtgtttacttgggcttgtgggatttggtggggagaggtcaagttaggctgtttaattattagtgctataacgacatgcatgtattatgccatatgtagaatataatgtactccgtaagagctgttgcacttttgtcatcaccactgttataaagctaatgatgagttaagttttttgggcttaggctattttattattactccggcctataacgacatgcatgtattatgccatgtgtagagtataatgtaagagatgtcga

SEQ ID NO: 35437 - DNA, 202 bp, Zea mays
  Clone ID: MRT4577_132317C.1
tagggtttacccaagttctaccaaaaacattatgataatcaaacattctcaatatctcatgctgagcttggaaatactatataagaaaactgaacccccactttctacacaatagttctttcattgatcatatcacacgcctgataaattatctaaatcaacttataactccttaccgtccacaagtacttgcaccaatgat

SEQ ID NO: 35438 - DNA, 513 bp, Zea mays
  Clone ID: MRT4577_132318C.1
acccgctacttctctccgcttgcgacgatcggcttgccccgacggttgcggacccgctaggccacatcgactccattgatccgtcctcgcgtgaacgatgtgttgatggccacgacatcttctataatggagcactatctccagagaaggcgggacatatgtgtcatatcaagcatactatcccagctgaatatctgcgatccgttgtaaagctgtcagactgccgtcgccggaatgaaagaagaaataccttggctctggtgatgtcactgtctgccagctccgtctatgcatgagaggaagagaatcaacctgagcccatagaagggcatgtttgactgtgggaaaaacaccttgccaccaactggctctttgatgtctgatatctactgatagaacacggcctatgactgctggctttacatgacctacagcgatgaaaacaccttctgctatgactagagcaagcgagcctgccactgtatatatacgagcatgatgaggctgctgcta

SEQ ID NO: 35439 - DNA, 2328 bp, Zea mays
  Clone ID: MRT4577_132319C.1
aggggccgcgctagcagactgtgatcctgaggcagcagcaggctcacaggctggtcatctcgtctcgtcttcctcctcccccgccccaacccggcccaaccccactcgagcgaggcgcggcgcggccatcataacgtccccccttcacgttcttccgctccactccaaatcctcctcccatttgaaaacctcttcttttctcctctcctcgccgcagctcccaccatttccgcagacggacgcttgtccccttcccagcttcccctgaccactccgccgcaggcccgcaagccccgacgccagcggcatgtcccccgccaccaccccgtcgcccgccccagcgtccaagggcgggaagcgcagcctcatgtcgtcactcatggacgccaccgcgctgctccgctcctcctccttcaaggaggactcgtacgtggcggcgtcgctcccggcgtccgagctccgcgcgctcgccgacctgaaggcgctggtggccacccacccggaccccatctccatctggggcgtcccgctgaatccccactcccctcctcccggcgcggcggacgccgccgccgtcgccgacgacgagcgcgccgacgtggtgctcctcaagttcctccgcgcgcgggacttccgcgcgcgcgacgcgcacgcgatgctgctccgctgcgccgcgtggcgcgccgagttcggcgcggacgcggtggtggacgaggagctgggcttcaaggacctggagggcgtggtggcgtacatgcacgggtgggaccgggacgggcaccccgtgtgctacaacgcgtacggcgtgttcaaggacagggccatgtacgagcgcgccttcggcgacggcgaccgcctggcgcgcttcctccgctggcgcgtccaggtgatggagcgcggcgtgcgcgcgctcacgctcaggccccgcggcgtcaacgccatcatacaggtgaccgacctgagggacatgccgaagcgggagctcagagccgccagcaaccagatcctctccctcttccaggacaactacccggagatggtggcgcgcaaggtgttcatcaacgtgccgtggtacttctccgtgctcttctccatggtctcgcccttcctgacggagcgcaccaagagcaagttcgtcatcgctcgcgagggcaacgtcgccgagacactgtacaagttcatccggccggagctggtgccggtgcagtacggcgggctgagccgcgcaggcgagctcgagaacggaccgccgaagcctgcgtccgagttcaccatcaagggtggcgagaaggtgttcctggagatcgacggtatcgaggccggcgcaacgataacgtgggacctcgtcgtcgggggctgggacctggagtacggcgccgagtacgtgccggcggccgacggcagctacaccctctgcgtggagaaggcgaggacggtcccggccacaaccgccgacgccgacgccgggccgctgcacaacgccttcacggctcgggaagccggcaggatggtgctgtccatagacaactccggttcccggaagcggaaggtcgccgcctaccgctacttcgtgcgcaagccgtcagcgtagcgtaggccttgcggttgctgtgctcgtggccggcgtcttgccggccggccgcgccaggggggaggcaaacgtggaaccaccggtgaagtgcctgcatgcatgctttgcttgggcttatatttgtcggacttggagaggagaggttaagctaggctattttattattagtgctatatataacgacatgcatgtattatgccatgtgtagagtataatgtaagagatgtcgaacttctgtttttttgtcaccgccgttataaagctgatgatgagctaaagttttctttaaaaaaaaaaaaaaaaaaaaaaaaaaaaaaaaaaaaaaaaaaaaaaaaaaaaaaaaaccttggggcttttaagtttttccataaccggccatcctttttttcaagtacgccaccgcgggccatccttgcttccgccttttcttagttgggccagttgcctttgttcgccgttttccccgacgttgaactttccaatcgggccaaaaattgccgccatggggttttgttcgaacctccccggtcccgttgaaccggccgtgggcctcctattcgcctgttggggcccttttgttcttccttaatggaacaacaaggtttggccgtggcccttatccttttaaagccgccgagtgataaccttgttttttccccgggcaagccgccctaaggcaattttccttagttgtggaaccccttaacgcattcctttcttacacaatcgggccgttg

SEQ ID NO: 35440 - DNA, 657 bp, Zea mays
  unsure (1)..(657): unsure at all n locations
  Clone ID: MRT4577_13231C.1
gtgctgtcttcttcatcctcctcatcttctaacccaatatcatacatttcttctataaattcatcaagcgctttctcaatgacacaagcatcaccggttacaccttccatgtcagaccttctccacttcaccaatacttcatcactacttgaatcactcatgccttccaatcccacatctattgaatcaagatcaatttctgaattttcagattctagcatggcgaacagatttcggggtttcattcttacaacagtgcaccaatcttttnncnnngnaccattgacataaaatacctgctcagcttgtgaaccaagaatataaggctcatctaaatagcacaaccgagttttatcaatatcaataattccatactgatccctttggtcgcctctcaggttttcatttggtagttgttcgcagggaaccatatgagaattgcaatgtcaatcaggtgtttgccaataataattgggtggtttctgctcttgctctggtcattaccatgcattttttattctgttggtgagttggtcgatttattatctcctgcagtcctgctggcactgccggtggtcgtttgattatcatgtatgaatcttcctggagactgttgctcgattaaaaaaaaataaaaaaaaaaaaaaaaaagcggcc

SEQ ID NO: 35441 - DNA, 1853 bp, Zea mays
  unsure (1)..(1853): unsure at all n locations
  Clone ID: MRT4577_132320C.1
cctcgaggccgattgggcctcgagggctttagggctttatatttgtatgggagggagtactccaaatcctcctcccatttgaaaacctcctcttttctcctctcctcgccgcagctcccaccatttccgcagacggacgcttgtccccttcccagcttcccctgacctctccgcagcaggcccgcaagccccgacgccagcggcatgtcccccgccaccaccccgtcgcccgcccccgtggcagccccgtcctccaagggcgcgaagcgcagcctcatgtcgtcgctcatggacgccaccgcgctgctccggtcctcctccttcaaggaggactcgtacgtggcggcggcgctcccggcgtccgagctccgcgcgctcgccgacctcaaggcgctggtggccacccacccggaccccatctccatctggggcgtcccgctgaatccccactcccctcctcccggcgcggcgaacgacgccgccgacgacgaggagcgcgccgacgtggtgctcctcaagttcctccgcgcgcgggacttccgcgcgcgggacgcgcacgcgatgctgctccgctgcgccgcgtggcgcgccgagttcggcgcggacgcggtggtggacgaggagctgggcttcaaggagctggagggcgtggtggcgtacatgcacgggtgggaccgggacgggcaccccgtgtgctacaacgcgtacggcgtgttcaaggacagggccatgtacgagcgcgccttcggcgacggcgaccgcctggcgcgcttcctccgctggcgcgtccaggtgatggagcgcggcgtgcgcgcgctcacgctcaggccccgcggcgtcaacgccatcatacaggtgaccgacctgagggacatgccgaagcgggagctcagagccgccagcaaccagatcctctccctcttccaggacaactacccggagatggtggcgcgcaaggtgttcatcaacgtgccgtggtacttctccgtgctcttctccatggtctcgcccttcctgacggagcgcaccaagagcaagttcgtcatcgctcgcgagggcaacgtcgccgagacactgtacaagttcatccggccggagctggtgccggtgcagtacggcgggctgagccgcgcaggcgagctcgagaacggaccaccgaagccggcgtccgagttcaccatcaagggtggcgagaaggtcttcctggagatcgacggtatcgaggccggtgcaacgataacgtgggatctggtcgtcgggggctgggacctcgagtacggagccgagtacgtgccggcggccgaggacagctacacgctctgcgtggagaagacgaggatggtctcggccaccgccgaggagcccgtgcacaatgccttcacggctagggaagccggcaagatggtgctgtccatagacaattctggttcccggaagcgcaaggttgccgcctacaggtacttcgtgcgcaagtcgtcggcgtaggcatgctgatgtcttgtggtggtcgtcgcggccggcaccttgccggcaggtagccgcgagggggaggttaacgtggaacaactggtgaagtgtttacttgggcttgtgggatttggtggggagaggtcaagttaggctgtttaattattagtgctataacgacatgcatgtattatgccatatgtagaatataatgtactccgtaagagctgttgcacttttgtcatcaccactgttataaagctaatgatgagttaagttttttgggctgnngnaaaaaaaaaaaaatagaaggatttaatatagagaaaagaatgaattttgttaaatcatataaaaaaataaaaaaaaagtggggggccttttta

SEQ ID NO: 35442 - DNA, 381 bp, Zea mays
  Clone ID: MRT4577_132321C.1
gcgcatggatgtacatactccgagtgctctcgagcggcctgggctatgcacgtcgctccacggaaaaacacactgccttccacaacgccttcataatctacggctaggtcctttggtactagaacactcctctatcggcatactctctaccccttcttatcctgataaagcaccttctcctagggagatgaaacctataaacatctttagggtatcatcggctactacctgcatgggcaccaactaagcgtaaaccaggactattcacctggtggccatggactacgcctttgcggctactcttatggcctgactcaccctgcgtacaccaaccttgcgcaccaaaacttcggttgtcggtacattggatgctcaccaatg

SEQ ID NO: 35443 - DNA, 492 bp, Zea mays
  unsure (1)..(492): unsure at all n locations
  Clone ID: MRT4577_132322C.1
gcgtccggncagcagcctgcagtgaattggngnatggaggcgtccttggtggggtcaaactggagcagcagatggggcagcctgatcagagtgtttccgcacagatgctgcgcagttcgagtggtggtgtgaagctcgagccacagttgcaagcgttgaggagcttgggtgctatcaagatggagcaccaaagctcagacccatctgttttactacagcagcagcaacatatgttgcagctgtctaagcagaacccccaggctgcagctactcagttgagcctcctacaacaacagcagcgtttcttacaactgcagcagcagcaacaacagcagcagattctcaagaacctgcctttgcagagaaaccaattgcagcagcagcaacaacagcaacaacaacaacagcaacagcagttgcttcgtcaacaaagtctaaatatgagaaccggtaaatcagctgcttatgaaccaggaacctgtgcaaagaggt

SEQ ID NO: 35444 - DNA, 3652 bp, Zea mays
  Clone ID: MRT4577_132323C.1
gcgcccgcgtcccccaatacccgccccggctcctcgttgtaatcaccggagcggccagatctgacctcgcccgacccatggcatgcgcccgagctgcccgcgtcccccaaaatccaccccgtgtcctgtcccttacccacagcgcgcgtcgacatcctactgcgctttcccaaatttggagatcttccatcgccgatcttcaccacatcgcggtgattgcggacgcgcgcgccctcgacccatggcgcccgatctgcccggggattgatacgataaatctgaagaagtttgaacgttcgttggtgaagccagggtctctctgccgagagattccaatctcaatcggactccctacctgggttttaaacttctataccaccttgcgccaaaagtactcctatcgaacactgtggggtgactctccaattgctggctcttgctgccagcctatagtgcagttttgctctttggcaggctctgtgtctcctaatgataatggggattcacagattaaacacataatgctgatattatctgctgttgttcaatggattgaacctcctgaagtaatcacagcatcaatccgaaatgggggaagtgaaagtgagttcatagatggttgccatgccttgctttcaatcgcatctttaactactggctcactttttgacaacctcctaaaatctataaggccctatggtacagttaatctgctttctgctttgacgtcagaagctgtcaagtcggttctgaataaccagagtgaagaggaaacctggggcatagattcccttgatattttgttagaaacatggaatgttcttttgggggacgtagatgccgataaaaatccaatctcaaccgatggagcacttgcatcttcaagtttgtttaagatgattgtggagtcacacttgaaggctgctgctgattctgcgttcgaggatactgatgatactgaatattttcatgtttctgtttcaagtatgcttaaattcccgacagttcatctgttctagtatctctacctcttttggattcatcaaataataatgaagtacttcttccagaacgtgatgaacagttagccttgtatgctctaatagcacgggcttctgcaaatactactattccatttcttgcacagttgttttcagaacgatttgcccggctaaatcagagaaatggtgaaagtgatcctactcaaacactggaagagctctattggctgttgttggttactagtcatgtcctaactgactctggcgaaggagaaacactacttatccctgaagcattacaggctggattccctaatgtgattgaagcagcacatcatcctgttgttacactctcctggtctataataaatttttccaggcagtgtttagatccaggaattagggcaaaatacttcagtccacgactaatggaggctgtgatctggttcttggccagatgggttgcaacctatttagtgccacttgacgtgagtagaggaaaagtaagcagagaaattgataatgtgggtacaaatggatcccaacattccagaaaactgctaaacagttttgcttgggaaaataaccaaggagagcttgttcttgattttgttgttctcatttcaatgttagctcttactacctatcagggagaaaatgagttgcagacactgacatgccagaagctacttgctacagtcgttcgccggaaacacacatgcacttatcttgttcaactggattcatggcgtgatcttacaagagcttttgcaagtggacggtctttgctttcattgagtggacgtttacaaaggtctctagcagaaacacttgcctctggagcttcctgcatcaaagatcctgaagcatctgcacagtacctgagggatctcatgggaccagtggcagggtgcctggtagaaaatgctagcaggagtgatctaaaatctgtggcacagcaagcagatgttatttacatggtctgttgcctattggaacgactaagaggcgctgctagagctactcaaccccgaactcaaaaagttctatttgagatggctcatactgtgatgaacccacttttgactcttctggaggtctacaaaaatcattccacagtcgtatacatgatactcaagtttgtggtggactttgttgatggtcaagctgtattcctggatgctaaagagacatcagctttggtgagcttttgcttgcaactactccagatatactcctctcataacattgggaaggtaatgctctctctttcttcaagtctgcgtaatgagtcacaagcagaaaaatataaggatctgcgagctttgcttcgtcttctgacaaatatatgttcgaaggatttggttggctttctgtctgattgtggcggtgaaggttcacctgatatcgcagaggttatctacattggtcttgatattgtgacccccttgatatctttggatcttctgaaataccctaaacttagtcgtgattattttgtgcttatatcgcacttgttggaactgtacccggaaaaggttgctcacttaaatagtgatgcttttacaaggattattggaagtcttgacttcgggctccgtaatcaggatagcgatgttgttgagaggtgcctggcagcagtaaatgctcttgcttcatacaatttcaaagaaagattaggagggagaggaagactgaactcgcagctcatggaatctgaaggatctaatggcaaactgcaggaaagcatatcaagtcacttcttgagacttctgttgcaaatacttctttttgaagatttcagatcggagttagcaggttatgctgccgatgctttgcttcctttattgttctgtgaacaggagctatatcagaggttggtccatgagttgctggataaacagcagaatccgaccgtaaaatcaaggctggcaactgcgttccataaccttacaagttcaaacaatctctcaagctcactcgaccggccaaacaggcagagattcaggaaaaacctccttagcttcatggcggatgtatcgggcttcatgcagataaagtagatgcgatggcagggaacaggtgatgtttgaccggtcaattaaaccccgaggaagcactgcaccactgtggtaggggtgcatgtgggcaccacatgtctgtggattgatgagagcgaagactgccacgacaagtctagtagatcttgaagagctagtgtcaccagaaaagacagggagatgagctagtcttagggttggcattcatagcgcatttgctggacaagatggaggcgtccctggccacgagatcgtcgtgtaaatgcgtttgttagacgcacagaaacggtggggattttgtggtggcgactcgttttgttcaattcccacaggcagaaggtagagatgttaagttgatgtaaataccgtttgatttaaacatgccttattcgtaggagaaagcgacacggcttgctgtaacttagggtttattactctttctcgtggcataggatccccaaagaagtctttgctggggtatttgcagccaaacgatgaccagtatgattgcgagaggttttcaatcttttgtaccaaatttggcctgcagttatgatgacactgagtgccgatacaggcatgaggcattcc

SEQ ID NO: 35445 - DNA, 412 bp, Zea mays
  unsure (1)..(412): unsure at all n locations
  Clone ID: MRT4577_132324C.1
ttttntttttnnttttttttttctctcagtttgtttctattttcgtttatgtcttggtttcttcatttttctttattctgtgttcacgtttagggttcatgtccggaacatgaagcatgttggatattttggttaaccactactgggggcactccaagagccacccctgaaggacgcactaaacagtttttcaggacttgtgcctacataaaagaactcgcatacggcccggggaactggggtacccccgcgcgcggactttggcacctggggaaaagatactctcaccaacctattctttaatgataggagcctggtgccttatggaagtaacacacattaatgcaggtgaccaaatatgtggctaaaaccaaacccaaaacagacctgaatgacacaaaaaatgggcatg

SEQ ID NO: 35446 - DNA, 575 bp, Zea mays
  Clone ID: MRT4577_132325C.1
gcgttcgttaataatgaagtacttcttccagaacgtgatgaacagttagccttgtatgctctaatagcacgggcttctgcaaatactactattccatttcttgcacagttgttttcagaacgatttgcccggctaaatcaggtcttcttgttatcttgtaatttacctgagttattaagaaaggagaagctactaagctatactgcttcagtagccttgtacattctactgttttgtggtggtgtatttttacagttaacatttaatagatttttctaagcagagaaatggtgaaagtgatcctactcaaacactggaagagctctattggctgttgttggttactagtcatgtcctaactgactctggcgaaggagaaacactacttatccctgaagcattacaggctggattctaatgtgattgaagcagcacatcatcctgttgttacactctcctggtgaaaaatcttacctcaatctattccccttttcatttcgttgaaaatcaggaatctgtttgttgctgtttttagagttttttagtgcaaagactttgacctgctgttttttggg

SEQ ID NO: 35447 - DNA, 693 bp, Zea mays
  unsure (1)..(693): unsure at all n locations
  Clone ID: MRT4577_132326C.1
cagcataaagctcttgcttcatacaatttcaaagaaagataggagggagaggaagactgaactcgcagctcatggaatctgaaggatctaatggcaaactgcagngaaagcatatcaagtcacttcttgagacttctgttgcaaatacttctttttgaagatttcagatcggagttagcaggttatgctgccgatgctttgcttcctttattgttctgtgaacaggagctatatcaggttcctccccctcccttccctcggacgcgtgggcggacgctatggtatgcatattataatcttagtaacatgagcattggttctcctttggtattctaccgtatgtttttaatttatagatgataaaataccatgaagacaatgttataccaatacgtccattttattctgtaatggattaacagtcatcagatcaggcgcaaacgtgatactagttgtgttctttgctacatatcgtcaccttgcttttgtctgcagaggttggtccatgagttgctggataaacagcagaatccgaccgtaaaatcaaggctggcaactgcgttccataaccttacaagttcaaacaatctctcaagctcactcgaccggccaaacaggcagagattcaggaaaaacctccttagcttcatggcggatgtatcgggcttcatgcagataaagtagatgcgatgg

SEQ ID NO: 35448 - DNA, 518 bp, Zea mays
  Clone ID: MRT4577_132327C.1
cccacgcgtccgctttagccttatcattccatcacactgtgcgattgatccaaaataccaaatactgcataacttgaccaaacattaacaatgccatcaactttcaagatttctcattagagtgttttcactagcgttagacaagataaaagtttccaatgtcccttatatgttgttttgattcctgttcacagacactgacatgccagaagctacttgctacagtcgttcgccggaaacacacatgcacttatcttgttcaactggattcatggcgtgatcttacaagagcttttgcaagtggacggtctttgctttcattgagtggacgtttacaaaggtctctagcagaaacacttgcctctggagcttcctgcatcaaagatcctgaagcatctgcacagtacctgagggatctcatgggaccagtggcagggtgcctggtagaaaatgctagcaggagtgatctaaaatctgtggcacagcaagcagatggtatttacatggtctgttgccta

SEQ ID NO: 35449 - DNA, 153 bp, Zea mays
  Clone ID: MRT4577_132328C.1
ctgacgcgtggggctaactgcgcgacctccaggaaaatccgggagaatgagggggatactattcgggccccggcggtaagctcagaagctccctctattgcccgacggcaagcgcttctcggtacccgcaaacgcttttttacatggggttta

SEQ ID NO: 35450 - DNA, 386 bp, Zea mays
  unsure (1)..(386): unsure at all n locations
  Clone ID: MRT4577_132329C.1
agcaagtgtttgggctcctgatggagcagaggcctgggtgaaatatctttgtttggcagcgcatcnnattgattctgattggaaacttcaaaggaaaaccatcaaatttggcgtgttttggtccttgcctactagtttggaaaggatgatacagtttaaggaggcctgtgtgctagattctgatattggaccatttaatgtcatacaggaagctttaagggattggaatcttgatcagaagcatttcagcttgacatctggcagtgaaattagaaacgacgagggaacctcaaagctgatggacttgctcatccaaaggaaatgccttcctataagaggtgagctatacaatatcgattgtgtgaatgatgtacttaacaacattg

SEQ ID NO: 35451 - DNA, 1194 bp, Zea mays
  Clone ID: MRT4577_13232C.1
aggccggccgggaaagaggtcaggacttggcacacgacacccatcaaaggtggaccgtcacaagaacacacacacacacaaaggcaacacgacggcctcaattctccacaccacacgacgaccaccacccagctcagctctcgcagcactaaaccccatccactcgctcctttatcaccgtgtccaccccctccctggccggggtctccctccccgcgccggccgggctcaggctctcagctcagctgcgtcctcctgccacccatggcaaacgcttctctgcagtccttccttctcccgcacgaccattctttcgccggcgccggcggcagccgtgacggctccgcgtccgccgtgcacaagctctccaccaacaccagcggcagcatttccttcaggctctacaccaaaacctccccctcggtgacagcagcctcagccaccaattcgtcagctccgactccagttgccccggcatctgcaccagcggcaggggacgaagaagaagaagaaggcccctctctcgacctcctccgccgccagctcgccgcgggcgactaccggcaggcggacgagaccacgcgggcgctgatcatcgacctcgccggcgagcccgcgaggcgccgagggtacgtcttcttctccgaggtccagttcatcccggccgaggacctcgccgccatcgacgggctctggaaggagcacagcggcggcaggttcgggtacagcgtgcagcggcggctcggggaagaagtcgcggcgcgacttcaccccgcttcttcatccgggtcggctggatgaggaagctggacacggaggtggagcagtacaactacagggccttccccgacgagttcatgtgggaattgacggacgacacgcccgagggacacctgccgctcaccaacgccctcaggggcacgcagctcctggcgaacatcctcacccacccggccttccaggaggaggaccagggagacggagctgctgctgcagaagagagtgcaaacaccaaagatgataacaaagggagggagagacccaggtccatgagagatttcaagcctgattattctttttgattcaggctggcgaaggaaacaaaaaaaaggggcaatgggagtttgtggtgcagagatgctggcatggtgtaattgatttaaaagatcatgtatccgtagttttgtttgggtt

SEQ ID NO: 35452 - DNA, 192 bp, Zea mays
  Clone ID: MRT4577_132330C.1
cgaccacgcgtccggtggtataaattttcggactttaatgccttcacatgacgagtctaaataaatcaaggggtcttgacaagcaagttcagctgctacgcgcaatatacctcttctggagaattccagacaggtatgaagtgtttctcatacatcttttggagccagatcctatcatctccatatattttg

SEQ ID NO: 35453 - DNA, 649 bp, Zea mays
  Clone ID: MRT4577_132331C.1
atggatggttcctccctgcctcctaccggagcggcctctctctcttcgcactatcccgcttacaccgtggtgatggaggatacctaccactatgatgcctacatcatccactacatggacgactgccgcgacacgctacctctcctacatcatgatgaatcgcctcccgctgctcccgctccatgatcttgtgggccccatgcgagaaaaggaaaaatacctctatctaaagtctgatgacattagtgaatgatggacaactgcataggaaaatgatatacgcctagaataataccacccatgatcgtcactgagcttagctatccagtatgtacctcactgtggacatagagaagaacatgtccacatccacgtcactcccgaagacagaaaggtgaatctgagatgaatgacgatatatatgatgggaaagatgtgagggataaagaattgaaggagaagcttgacctgccacattgagaggaaagataggagcctggaagacatcgataatgaggtcaatgagcaccgaggtctttttattgagcttctagagctgagctgactgcatagctagaaaccaaggtggctacctgatcttcattgatgcacgctcaactatggatgcgcacatgatatagtgatgatg

SEQ ID NO: 35454 - DNA, 291 bp, Zea mays
  Clone ID: MRT4577_132332C.1
taaaaacaaaatttacaactctaaacattccttctctcatattaacgggataacaaaaaaaaactgcgcttgggcccatataggatgcgcccccttatcatatacccaatcttacttcctcaagccattcgacatcatagaattcttaatagcatacattaagccaattataacacacattatttaactcataacaatcttccaaaccttacgaatactgaccaacatcttttccaaactctatttaccataaccaccataaaatacaacatttcagttccgaatcccttt

SEQ ID NO: 35455 - DNA, 112 bp, Zea mays
  Clone ID: MRT4577_132333C.1
ccataatcatacccccacaacgcagccaactttttaaccaaagaagacggacatgcttgattacccggccgtaccaaactgctacatgagagtgttgacggactgagcacca

SEQ ID NO: 35456 - DNA, 947 bp, Zea mays
  Clone ID: MRT4577_132334C.1
cattgggacctcgagccggccgggagaaatctccagccgctgccctccatctgatatttcgtatatctgctggctagcgctcggcttctttcgcacacgctcctgctgccggtacccagtcctacggcccctcctctctccacctcgactcgccggcgttgctcggctgcagctcgtcggagcttcctgttctcagcgcgccgacctccctcttctccttcatgtccggccgccggtctggccgaggaccctggtcgtggggtcgcgtcctcctccctcgtcgcggacctgccgtgtcctgggcgccattccagcactgccaggttccgcgccatcgtgcctctgggtcctcgccgcggttcaggccgtcgatgcctgttgccccgacgctccctcacgctcctttatcagcctcgcctagacctccgcctcctcgtcggactgcacacacgccgccgccatttcttgcagtttcgtcgcgccatcccctctgatttccttgtcctcgtcggcttaaactccgttgacgtaccctgcaagcaggtttgacgccctctcaattattctgctcgtttcactaaccgatgcctgtgccttgaggttaactatgtgtatgtgtgtatgtatcgagagaaaatctaaatcatgtagaatagtgaagtccagttcgtcgctcgccggtgctcgatatattgcctgagtcggatttgtcaccattttcgcgagtcctgactcgatttaggtattgtataagtttagattcgcttgcagtgaagtttagttcaatcagttagtcttcgaatatttgcgcaattagaaatattttttttccattagtgaaataaatcacacaatggaagtaataaaatgaataatttgttgtatctgattttgggattgaatggagtccatggaccacaattcacaagttaaaaaaaaaaaaaaaa

SEQ ID NO: 35457 - DNA, 515 bp, Zea mays
  Clone ID: MRT4577_132335C.1
agcaaaatgctccatataacatgaaagtatgacatgtttgccggcacaagagccagcatgcagcgcacgctctgaaagttccacaactccgacaactcaaactcaacagaaaaactcgttccattatttagacatcagacgcctatcatgttaacaggaaacactaccgaatacagatggatctggattcttgtcttgatgctcagcactcaggcctcgcttgggagggacacaaactagctcctcttgtcggcgaagctgtcaggctcatcatccttgaacatatcctccatgatttcatcattcttgttaccactcaagtcgccaccaaatgtgccaccagagaactcatcggcgccagtggaaccaccgccaaagctaccagcagggtttccaccaaaaccactgtcagcaccgaagttactgctggcaaagctgttactacctccagcagcaaagttgcctccagctccacctgcagctccataatcaccaacaccaccaccatagccacc

SEQ ID NO: 35458 - DNA, 219 bp, Zea mays
  Clone ID: MRT4577_132336C.1
cgacagtctgcctgggccacagccctctcaccctggtactgcatgcacgcaattgtagctgcgcctctcgcgtcctgggcaccccgagtctcacccgaccccgggtcccaggtatgctcccacctccacctggtccactcaccacctctgctagttccagagtcctccacgcctacctggtcgtctcccatcgcccacaaaagggtgggcacgagggac

SEQ ID NO: 35459 - DNA, 1247 bp, Zea mays
  Clone ID: MRT4577_132337C.1
atgacggaggtgatgacagcagctcgagccacaacaccgacctttcagagcagcaggagccagagggatgggttgctcgacccatcactcgtgacgccgctcgtgggtgtcacttgcttggtgcgtcgtccggagaacagtctccagagtgtggaggtctgctcagaacattactctatttctgagcgggactcaactaaggcggccatgcaagatgtcgcacgacgtgcgctttcgcactactactcagtgctcggttgggtggccgacgatcttaacctgaagtattacccccgtcgtccatttggcagcacaggaggcgtggttgtctcacctatcgatgggcagactgaaagaaccaatcaaatactcgaagatgtgttgatagcctgtgcgttgcaagatcagaccggatgggacaagaggagttgtagaactctattgcaatgggatcagcctggagaaaagcaagtgtttgggccagatattttactcgaagctgaagagaacatcaagatggttcgggcaaacatgaagataacacaatcaaggcagcgaagttacacagacacaagaaggagagagctgagttttgaagtcagagattttgtctacttgaaaatatcgcttatcagaggagttagaagattcggagtcaaaggcaagctagcaccccgctatgttggtccgtatcaaattctcgcaaagcgtggagaagtggcctatcaccttagtctgccagaagaagagcagttcccagtggaaggtctggaagtccaagaagacttgacctacatagagaagccaatgcagattcttgagactgcagatagggtcacccggaggaaaactatcagaatgtgcaaagtcagatggggtcaccactctgaggaagaagcaacctgggagcatgaagatgatctgatggctaagtatcctgaactctttggtggccaatcttgattatggttcccctgcctgtaagaccaggatagatctggatccttagatcgttagcgtcgaagtttgtaataattcttaagtcagatgtctcagtcttaaatagttagtttagtttgcttatcagttgcttccatttagcttagtttgcttagcagttgcttacatgcttgttatgatgaacttgtgctggatttgaatctttgtaatgactgttgccaacctgtgggtttctcctgcagcttggcttagctagtaatgttaatgaagtcagttatttagttggg

SEQ ID NO: 35460 - DNA, 213 bp, Zea mays
  Clone ID: MRT4577_132338C.1
gggccactggggtccaccaacgaaggtgcgaccgggaaatggcggaccaccagctggccccaaaatgagtaatcctaaaacgggcggaaagaaggggcaaggctatcgcgggcgaaaaagtgttctggggtaaagagtcaccgcacaaaaacgcccggaagcaaaaagcggaaaacccggagggataaaagggggggcgcccaaacaaaaatg

SEQ ID NO: 35461 - DNA, 226 bp, Zea mays
  Clone ID: MRT4577_132339C.1
gcttaattctcatcgtgtcgtcgattccgccggctatcgtcgttcgtcattgcgtcgcgtgtgtagctctatataagtcaccctcctgtgtcgccgtcgttccgcgcgtcagctagaaatctcaagaggcgggtgacgaaggagccagcagtgtggtattcaccaagtgcgcgacataaatctcggacatccagagcgactcaagttcgactcgtcagaattatta

SEQ ID NO: 35462 - DNA, 364 bp, Zea mays
  Clone ID: MRT4577_13233C.1
caatccttcgtcatcctccgtctctattctccactttgggttctcttggcgcgccactccccacaagaaatggtactctcttttttgggatttccgttccaccggtaccagccttgccttgtcttggagtgttgacatctctgcgtgctcgcttcgctggcctgccgctcggcgcttgctgctgttgaccgagggttccaattcaaacctccttcttggctggtcgacgcactcgttttcccagcaaaagcaaaaaggatctactaggtggggccgacgacgacgaggccggaggcatggtggcggagccggagccgcaaccgctggtgcacaaggtgttctcgatggcggcgacgtcgccgtc

SEQ ID NO: 35463 - DNA, 260 bp, Zea mays
  Clone ID: MRT4577_132340C.1
cccgaaatttcggataaacccgaacgcccagtcctaactacaagtcaatatttcttcgggtgtctagctatttaaaaacggcatgatttggcgagccggggatggagcaatcaaatacataaaatggactggatcgtggatctctcataggccattacaagcagaccaatgaaatgcacggttaggagaatcattttaaaaggtaatcatactatcatgacgctaatccgaaaacataatctactcttatatctgatact

SEQ ID NO: 35464 - DNA, 848 bp, Zea mays
  Clone ID: MRT4577_132341C.1
tccacccacgctcgcgctctggcgggctctttctctctctctctctctctctctctctctctctgcgagtctgcgacgacggggctaccgccgcctccgtacgccaggtgacgaggtcttcgttggtcctttcgccggcgacgacatccaccagaaattatatcatcaattcattaccgggtgtacatttgtacacagtacacccatgtccttcactggttccgcccctgtagtgaggataatatctttggagtttcggagggggcgcgctagaaggatggtttccaaaatgagatttcggaatgctctcggttctagaccatttcagtgttgttcgcgtgagaatcatacatatgtccggaagctgttggaccgagtgtcggagagatcaaagctccttaaaaaggtgtctgttttggtgggttacagtaatccacaagatttagttgagaaacaaagagcccctggggaatcttctgcagagttgattagtgccttgaaagaaatcgatttcccagaaattactgcaaagtttccatgcataaaagttggtgatgcatcacctgttgaactgtatgaggattctactaacatgaagtttaaagaagctgcactttctgaaaagctcacaaatttcatccaaggctcagctcgaaatttggagacagcttatgaattccataatgactgtcatccattgaatcaaaccccacaactgcaggtgatctttcaatcagtgaagagatccctctcattgaaccaataggttgataagaagtcccccgagtcattgtcagatgctataacctctgacaatagtatactggataaaagtatcaggtgcttgc

SEQ ID NO: 35465 - DNA, 679 bp, Zea mays
  unsure (1)..(679): unsure at all n locations
  Clone ID: MRT4577_132342C.1
ccnggccggggaagcaacaacctcacccaccagctcagcccatcatgaactctttccgcatcgcccgtgcggctctccgagctcgccctgccgccgtccgagttcccctccagcgaagaacctacgctgaggccgtccccgacaagatcaagctgagccttgccctccctcaccagtctatctacaagtcccacgacgtcgtccaggtcaacatccccgccgagtctggagagatgggtgtcctcgccaaccacgttccttccattgagcagctgaagcctggtctggttgaggttgtcgaggagtccgctggctccaagcagttcttcctctctggtggattcgctaccgtccagcccaactccgtccttagcatcanacgccgtcgagggttacccccttgaggacttcagcgctgaggccatccgagctcagatcgccgaggcccagaaggttgccaacggcagcggaagcgagcaggatattgctgaggccaagaccgnagttggaggttctcgagaccctgtctgctcatgtgaaataagcgtgcagtntagtttgtgggtgacggaggcccttgtacatcaaaatattctacccatcttagcacggaagctgtgacaattgataccaggtcctggttgtgctacctcctaaaaaaaaaaaaaacccgcggccc

SEQ ID NO: 35466 - DNA, 246 bp, Zea mays
  Clone ID: MRT4577_132343C.1
acaagggtattacaaaactcataaccatgtatgccttacagtcgatgttccataaaaaaagtgtagtcttaataacatcacgggttcaaccaaagtaataattccttaatgcccagccaaacattgccttattaaattacttgttcacccaccacctgcagggttgtcaacaagacaagattttttaagcttccacaaggtacccaccaagcaagcccagacccagccaaatggatcttttttttt

SEQ ID NO: 35467 - DNA, 444 bp, Zea mays
  unsure (1)..(444): unsure at all n locations
  Clone ID: MRT4577_132344C.1
agcagtggtaacaacgcagagtacgcggggctatccctggacctacatctaccgtccgcacgcgtgtcgtgctaggtacaagaaccggtgggacaccaagcagctggtgggctccgatgggatgtcgtcctcgcactcggtcaccgtcaccgagctcgccgtctccgtcggcctgtaggagggtttcacaagctccctcttcgcctccgtggttcccctcgccgctccctctccctccctctccacgcaaaacgagttgaccatctttggtgcgcggtgggtttggtaacacctagccacatttctgcttgattgcttctctttaagatgtactgtcagatcatgtgtctgagatgctgcactttgtttcatgtaccttcagatggnaaaaaaaaaaaaaaaaaaaaaaaaaaaaaaaaagtactctgcgttgttaccactgct

SEQ ID NO: 35468 - DNA, 1448 bp, Zea mays
  Clone ID: MRT4577_132345C.1
gctcggaattcttctcgtgctaagattgataggttagatgaagcttacatgctttttgaggaagcaaaatcaaaaggaatagaattgaatgttattgtgtatagctctctcatcgatgggtttggaaaggttggtaggatagatgaagcttatttgatattagaagagatgatgaagaagggtttggcaccaaatgtttacacatggaacagccttatggatgctttagtgaaagctgaagaaatcaatgaagcacttatttgtttccagtcaatgaaggaaatgaaatgttccccaaacacttacacatatagtattcttataaatggactttgccgcgtacagaagtacaataaggcttttgtgttctggcaagaaatgcagaaacagggattggtccctaatgttgtgacttacacaaccatgatttctgggctcgcaaaggtagggaacataaccgatgcttgcagtctctttgagaggtttaaagccaacggtggaatccctgacgctgcaagtttcaatgctcttatagaggggatgagccatgcaaatagagctattgaagcatatcatgtatttgaagaaactcgattacgaggatgtaggattaatgtaaaggcatgcatcagtcttctagatgctttgaacaaagctgaatgtattgaacaggctgctgttgtaggtgcagttttgagagagattgccaagtcccatcatgcttctagatcattgtaaaattcagcttgacttggtgatagtttgacagtattggcattgatatgatgcttgggttagcacaggacaaattacactgtaagccaaattgatgtggcttgtatagtctgtactgtttgactggttgagaataggaagttttgacattattgtgatccagcattgagatagtgctctaggatttggtgagaacactcatgcatttctaccactggtggtattggacagcaggtctggatctcttgatatcagctgggcaatagttgaataatatcggtcgatcagtgtcttgctctaatgctacttggtaccttcatatttgccaactggaggatttttctccagatatgtcaaaacatctctggttcagcatgttgattcaaaaaatttaaatgaaacttcaagacaggaaagcgggggagcgtcttgttatcatttggagagacatgatgattatccgctagagatccctgtcaaatgctctttggattggattcgtccaagatgaaggattttgtatgaggacgcaacagctgtgtttcgcagtgtcaaatttctatttcaagttcgataaataatatagaatagcttttcagctagtttctaattcaagttcgaccaaggaaaataatctagaatagctttttgtgctaacattgtaattggcgattgcggataattcgttgcttggacaaattacagctatttcg

SEQ ID NO: 35469 - DNA, 351 bp, Zea mays
  Clone ID: MRT4577_132346C.1
gaagccaacccagtctggatggatgacatgtgggcctgcgcgggtgcacaagctaacaagcacttgcggaaactatttttacaatcccaggatccggcgaaaacactaggagcgcaaagtccaaaatgctaaaacaaagattcctcgtaaaacaaggcgacacacaacaaccgcctcctgtttaaaagcaaattctgcaggttctacgcaccattaaacaccacctgcatgttccacagcaccggcgaactgattagctgcaacccacccttcatcagacggctagatctactagacggcttcagcccaggcgccccatttggcggcgctttcaacacggggcattgaatt

SEQ ID NO: 35470 - DNA, 867 bp, Zea mays
  Clone ID: MRT4577_132347C.1
attccatctcatcgcaacgttacgcaagcatcctccacctcctgccttgactgcctggctgcgtcgtagtttgcacaccgcaaccgcgttcttccctctctctctctctccctctcgtgcctgagaaagcgccgccgctctacgttcccctcgcttgcgctcggcccggcaaagggccgtccttccatgggcatcgcctcccgtgcaacgaagcgcgcgctgaccaccttcgccgccttcctcctcgaccgcgtgcgccgcgggtccgcctccggcatgctcgccacccacaacgaggagtcaggacaactcgcggcggcgcgtgcccaggagctggggatccccaagggagaccgcaacctgcaattcgcgcagctgatgggcatggtggacgggctgtcgctgagcctccgcaacgccgggatccaggacagcaagtacctgccgtacgggccggtggagcagatcatcccctacctcatcaggcgcgccgaggagaacaggggtctcctctccgcctcctccttcgacaggaagctgctccggaaggagttgatgaggagggtcaaggacatggtggagggacgtgagtgaagtgcttgtcgagcctgtgtgtgctatagaattatcaccaaatgtaaagggcatgtatgtaattttgtatgggttgtaccccgtgcctataaataggtgaacagtacccccgtactgttcacgcggacttggcattaaaaaaaaaaaaaaaaaaaaaaaaaaaaaaaaaaaaaaaaaaaaaaaaaaaaaaaaaaaaaaaaaaaaaaaaaaaaaaaaaataaaaaattaaaaaaaaaaaataaagaaaataaaaaataaaaaatttaatacaat

SEQ ID NO: 35471 - DNA, 194 bp, Zea mays
  unsure (1)..(194): unsure at all n locations
  Clone ID: MRT4577_132348C.1
cccacgcgccccgaaaaaaaaaaaaaaaaaaaacaaaaaaaaaaaaaaaaaaaaaaagagcgaaaagggctaaagggtccagggggacagaccctccgcacgcaaggtcagagaccccgcgatagcggcaccaaaaagaaatatatagaacaggctaacaaaagggggttganaggcaaaacacagtctttgcc

SEQ ID NO: 35472 - DNA, 484 bp, Zea mays
  Clone ID: MRT4577_132349C.1
ggccgcttttttttttttttttttctttgtagtcttttttttgtttttgtttgatctttcttaaccctgggtctttttttgtttattatttgagccgagggggaaacaaaacagggggccggggaagaaatcacagacccagggacgcccaaaggaagacaagaggggccgaggcattaaagcaacaggggccgaggggaagcaaacccggcccagccaaggacctgtaaaccccggaaaaggaaggggaggggccccagcccggcagggggggggcacccttccgggccggagggtcggaaacaaacgggaaaaaatggacagggggcacggaccgagaattgggagggccagaccaggggcaaggggacccccccctacgagaccgattgttagggggggggccaagaagaaaatggggggcagagaccattggaagtttaaagaagtcaatagaaaggggtggaaaagccagggcccaggg

SEQ ID NO: 35473 - DNA, 492 bp, Zea mays
  Clone ID: MRT4577_13234C.1
aaatctactcctcctgacctcgcgccgccgcaccccgcaccaaccagcgccgccgccgccgccggagaaggagacggagcagccgcagccatgggtcgcgtccgcaccaagaccgtgaagaagacctcccgccaggtcatcgagaagtactactctcggatgaccctcgacttccacaccaacaagaaggtgctagaggaggtctccatcctccagtcgaagcgcctccgcaacaaggtggccggcttcaccacccatctgatgcgccgcatccagcgcgggcccgtgcgcggcatctccctcaagctgcaggaggaggagcgtgagcgccgcatggacttcgtgccggagaagtcggcgctcgaggtcgacgagatccgcgtcgacaaggagaccatggacatgctggcgttcctcggcatggccgacctccctggcgtcgagcgcgcccccgaggtcacctcctccgccgccccctaccgtcagccgttc

SEQ ID NO: 35474 - DNA, 173 bp, Zea mays
  Clone ID: MRT4577_132350C.1
cccgggtctacccagcgtcctccccgcgtccgggtggtgctatgtttagcagctgttagggtttcgtgtcgtctggtgtctgtgctatctggctgtcttgtgcaaagttatctgtcctgttttgtgtgtattggaacaatgctagatgaatgaaatggatctgtgttttagtt

SEQ ID NO: 35475 - DNA, 1100 bp, Zea mays
  Clone ID: MRT4577_132352C.1
acaaaacatatttttacaattccaaatcttaagttttacatcatagaaagagttgtaattattacaagtcctgatagtacccaaagtgcatgacttaatacacaattgggaaaggggaagcctttccataaaaaatacactaaacattaaaaacttccaggcctccccacgaagcaactattaggggctaaagatagcaagaatccctccttattacagtaggaaatctgagatcttctattacgataagcagttagatggaatccaccactggatcagcagaactagaacaggctccttcttcacaaatcacttcttcttggtactctatatgaaatgtcatgattatgaatgcctgtgtctatgctactagcaaggaaggtattacgaagcattacgaaattacaattacaagctatcaccaaaagccataactaccagggagctacttatccttagaactcatctaaccatccaaaacatgctaaacaacttcattttacacgaacacattagatgcccatttttctcggactttctcccacatttacgtatatatccgaaccatacctgctctaacacgcggaaagccgatgaagcgagagaaccacatggagaaagtatgccgagcatgacggccagcgagacaggcagctagcagctttacgatgacaccgcgagcacgacgaggtcggaagagaggctgtgggtcaaggaaatcaacgacgcgaaggagctgcgaggttgagcgtggccgatgaggagacaacaaccatgagcatgttgcagctcacagcatgatggggaactgcggcaagcacaacaagcaaggctgcacgacgagcgtcggcacggcgtggaagctgcaggacgacgtcagccctcaccaacgaggtcggcggatggcaaagcgtggagttggaagacggtaccaggccggcgagctggaacgtgtgcgatggagcagcgacagatggtcggtcgagcgcgtgaggaagcagctcaaggcatggaagagcagcaacagcgcccaagccagcgtgagaagggagctcgcgtccaggctcagtatctgggacttgagcacagggtacaaggcg

SEQ ID NO: 35476 - DNA, 274 bp, Zea mays
  Clone ID: MRT4577_132353C.1
aaagcttgctacttgttttgaagtggcatctccagaatatcagaaactgcaggattccagttcttgttatgagtgtcttgctctccatctcggcatgaaaaggtaggaagcagaatacacactgggcttctggaagaccttccccggaaaaatgacggattccttgaggaagccagagttttgactgctgtgcgagagtaataaccgaggcctgtctctgcagcatgactgggagttttccgtgaatgggttcatctctttaatgatgccctgg

SEQ ID NO: 35477 - DNA, 169 bp, Zea mays
  unsure (1)..(169): unsure at all n locations
  Clone ID: MRT4577_132354C.1
cgcaaatcatgcttgggcggctactgcaacaatttgcctggagaatacgagtgccggtgcccgcgangaatgcacggcaacgcttatgcgccgggcggttgcatcgacaacaagttcccgacangtttagttattggtttgtcagttgctagtggcccggcgctgtttc

SEQ ID NO: 35478 - DNA, 612 bp, Zea mays
  Clone ID: MRT4577_132355C.1
gattttttttttttttttttgggagaacagtggtggcatggcaggcattgccactacccttgctttcatcacatttcagagaacacccaccactcactcgtcactgctcactactctacttgctcccacacactcactagctactcctccaagtggctgccacccaaagaattgaaagaatcaaattttgtatatatcagtttcattgatatacatatttatatatatcccaatatattgatcccaatatatcgatatataggaataaattgtaagtatagttgaggatagacctattaatttatccccaaggaggagagagaagaagaagaattaaagagatcaatcagtacgttgcgtgtttgttaacaagcaaaagaattcatgaggctggctgctagctaaggccaggcatgcagatgcagggccgcgctcatgtcgtcaataatggcaatccaccagtgctgaggctgtcagcatatgcccagccttgctgccgtcgttgaactggccgagaccgagcatgacggccggcggcggaagaagcgacacgacggcttcctcgtcggacggcgccggcaggttgaggtccagctccaggttgactcgtgc

SEQ ID NO: 35479 - DNA, 564 bp, Zea mays
  unsure (1)..(564): unsure at all n locations
  Clone ID: MRT4577_132356C.1
gtcgccgaggaggaggacatggcacatcaagccgcacgagtaggcaggcatgcaggcagggcatagaggaaggatagaggaagaggagggggaggaggagagcgcgtggaggatgcgagggggggggggatgcggctggctaggcctccgccggtcccggtcccgacggctccgggtgacgcgggggggccgtatgtgtagtacctacgggtgaggcggtgtccttcttggcccttctctgtccttatccgtgtcccgttcatgatgaccccgatcttgctttttgccttcttctctcctgctgccgctgttccttcctatgtctcctggcctctttacttgtcctggctctctttttgtgttcttttcttctgtaattctactatgttnctctttttttccccgctcttctgcttcttttaatttcaattattgtcgtcttttttggacaccttgtattttgttttctactttttgttgcttttttctcttttttcaaattttttttttttttcttttgttttgctggttttctctttttttcgcgttcttttcttttttttt

SEQ ID NO: 35480 - DNA, 770 bp, Zea mays
  Clone ID: MRT4577_132357C.1
cgggatacaatttaactggataccacaaaagctcgccgcaggtgtatacatactctctcgccaaacgatcttatcttaggtactatgaagtctgccatggttgctgctgtagtactagccctactgctctatgggactggaaacaccaactgcgcaacgctgcgtcccaccagcaggaacagcacggacgacatgctctccctggtcgacttcagaaaggaaatcagcagtgatccaagaggtttcctcacatcctggaacactaataacagtagcgccgccgactactgcagctggaatggcgtcacatgcagcagaacgcacccagggcgggtcacggagctcaacctcagcagccaaagcctgcgaggccgaatctctccatctcttggtaacctaaccttccttcgaatactggacctgtcctacaacagcttctttggccagctgccccttcttagccgccttgtcaggcttcaggaccttgttctaaacaacaaccagctgcaaagtttccccattgacgcacttacgaactgctccagcttgcacactatagccctttcctccaacatgtttactgggccaataccagcccagcatcggttctctccctaaccttacgtacttgtaccttgatggtaaccttctcagtggaggcatcccatcgagcctgctcaacatctctaaactcaaggagctcgacctttcttcaacatgctagatgggccaataccgcctaatatgttccctcatgagccttacacttc

SEQ ID NO: 35481 - DNA, 202 bp, Zea mays
  unsure (1)..(202): unsure at all n locations
  Clone ID: MRT4577_132358C.1
gtgaaaacttatggcgtggaaggctgtaagctatcttgccttgcgaatggatcgtttctaagcttcgcttagagtcgtggttgtgtaaaagtaaggaacaactgaactctactgggtaatgcgcctattgtaaagccgttagcacgtcatgtttatatcaatcagtttacctatgagaaaattgccatttggcattgntgtt

SEQ ID NO: 35482 - DNA, 1061 bp, Zea mays
  Clone ID: MRT4577_132359C.1
cattgggaccctcgaggccggcccggccgggataaaattacccacacacccagcagccagcaccgatcgagtcatccttaattaccgtaataatacgaaggcggccatgattgttgttgcagtagtactggcgctgctactgctgttctatggggcgggacacgccgactgcgcaacggcgaccatcccccagaacagcagcagcacggccgacatgctctccctgctcgacttgagaaaggaaatcagcagtgatccaggaggtttcctcacatcctggaacactaattataacagtagcgccggcgccgccgactactgcggctggaatggcgtcacatgcagcagaaagcacccagggcgggtcattgaactcaacctcagcagccaaagcttgcaaggcctaatctctccatctctcggtaacctaaccttccttagaatactggacctgtcctccaacatgctagctgggccaataccgcctaatatcggttccctctttcaccttaaaattctcgaccttgattctaacaacttcactggagccatcccgtccagcctgggcaacatctccaaactagaactgctcctgctccaggataatcagctcatagggaccatacctcaagatcttggcaagttatcaaatctgtacgaattgttgttagggcataatagtctatcaggtagcatcccgacaaccattctgaagcaacgtaaccttaggattctggacctgggtgagaattctctacgtatgatgttgccatctgatattggccatacccttcctcaactcgtcgcgctttccctgtacaataacatgttctacggtccaatcccagcatcgctaggaaacgcttcaatcctcgtggtattagacttcacatctaacagtttcactggaaatgtacctagttccttgggaaatctaacctacctgaacttcctaaaactagaacagaacaaccttgaagcaaaaaacaatgaaggctgggaattcatagatgcattggccaaatgtacgtatctacaatacattttattatctgacaatc

SEQ ID NO: 35483 - DNA, 519 bp, Zea mays
  unsure (1)..(519): unsure at all n locations
  Clone ID: MRT4577_13235C.1
tggctgccggncggcccagctgaggcatggcttcgcgaactactctatccgcgcaccacaacagtccctaccaccgcctagtaatagcactaccacccatcttggaacgccgtaactacaacaacaccgtttctgcctcagcgatcactccgatccctgccgtataaatacagccacctaagccgccagatagaccgaagtaagggaggcacagttcagtgcctgtcacaaaataacgcacactaacgcggtacggaccaacaatgctaataacagctcacaagacggctatcgactgcatataaattcagtagtgccgcaaactgcgaaaagtgatcgggcaggcaagacacggcacgtgtatcttaaacaagaacacatggtgaatgaagtatccggacggtactgcgagctaacaacaaagcgattcctgaacctgactgcactaccgatgcgacccagattatacctgtgggaccggacgaaacggcgagaacctgttacactgagacagcacaa

SEQ ID NO: 35484 - DNA, 865 bp, Zea mays
  unsure (1)..(865): unsure at all n locations
  Clone ID: MRT4577_132360C.1
nctcgaggccggccgggagagcatacaatttaactggataccacaaaagctcgccgcaggtgtatacatccttaggtactatgaagtctgccatggttgctgctgtagtactagccctactgctgctctatgggactggaaacgccaactgcgcaacgctgcgtcccaccagcaggaacagcacggacgacatgctctccctgctcgatttcagaaaggaaatcagcagtgatccaggaggtttcctcacatcctggaacactaatagtagcgccgccgattactgcagctggaatggcgtcacatgcagcaggacgcacccagggcgggtcattgaactcaaactcagcagccaaagcttgcaaggccgaatctctccatctcttggtaacctaaccttccttcgaatactggacctgtcctacaacaacttctttggccagctgccccttcttagccgccttgtcaggcttcaggaccttgttctaaacaacaaccagctgcaaagtttccccattgacgcacgaactgctccagcttgcacactatagccctttcgtccaacatgtttactgggccaataccattaccagccagcatcggctccctcagtaaccttatgtacttgtaccttgatggtaatagcttcactggggccatcccatccagcctgctcaacatctccaaactacagcagctcgtgctcgagaatatcagctcaatggcaccatacctcaggatcttaagttatcaaatctgaataggttgctagggcataacaggctatcaggtcacatcccgacaacaattctgaaccagcccccttgaatttctgggcttgctaatatgttccctcatgagcctt

SEQ ID NO: 35485 - DNA, 882 bp, Zea mays
  Clone ID: MRT4577_132361C.1
acgccggccgggataaaattacccacacacccagcagccagcaccgatcgagaggaccaaaaacactccggccatcattaattaccgtaataatacgaaggccgccatgattgttgcagtagtactggcgctattgctgttctacggggctggacacgccgactccctcccccagaacagcacggacgacatgctctccctgctcgacttcagaaaggaaatcagcagtgatccaggaggtttcctcacatcctggaacactaataatagtagcgccgccgactactgcggctggaatggcgtcacatgcagcagaacgcatccagggcgggtcattgaactcaaactcagcagccaaagcttgcaaggccggatctctccatctcttggtaacctaaccttccttagaacgctggacctgtcctacaacagcttctttggccagctgccccttcttagtcgccttgtcaggcttcaggaccttgttctaaacaacaaccagctgcagggtttggctcctgacgcacttatcaactgctccagcttgtactgggtaaccctttcatccaacatgttagctgggccaataccagccagcataggttccctctctaaccttatgtacctttaccttgattctaacaacttcactggaggcttcccatccagcctgctcaacatgtctaaactagaggagctcgacctttcttcaacatactagctgggccaataataccgcctaatatcggttccctctttaaccttaaaattctctaccttgattctaataacttcactggagccatcccatccagcctggtcaacatctcgaactacagcagctcgtgctccaggataatcagctcatagcaccatacctca

SEQ ID NO: 35486 - DNA, 638 bp, Zea mays
  Clone ID: MRT4577_132362C.1
ggggggggggggggggaattttttttgcataaagggcaagctaactattttgccaatattgtttacaatcatacaagattttttttgacatgacaaaaaactagccctgttttcgggacttcaaacacttggaaccattaacctttaaaaaaacattgcccgactcttgttaaaacaggtctgcgtaagccttgggtgaaggaaaaatgaaaggggatctggcgatgggtcaatcgttggctccttcccgatgcgtcgtcaactatgagaaggacatttttttggcaaggctttcataaaagagtacgtagtcatcatcagtgttaccactgaacttctacggggaactcctatgttcagtgctccgaattaatgcaataaaaaacagaaataataaggcgtctttaaggtggtatatgtatgagtacatgatgaactacatagtccaaatactcagctgacttcaaaaaaaaatcgacagggccttccctactccctgcatgcaaccacgggttttatgttatcatcagtcgtcacagggcaccagttgtaaaatatttaaatccattctactactgctaatgaatgcatatgacaatctagagccggtattttatacctcaattctccattttaaa

SEQ ID NO: 35487 - DNA, 746 bp, Zea mays
  unsure (1)..(746): unsure at all n locations
  Clone ID: MRT4577_132363C.1
ggccgcttttttttttttttttttgggatgcttcctgatagcctattatgccctagcaacaatctgtacatatttgataacttcccaagatcttgaggtatggtgcctatgagctgattatcctggagcacgagctgttctagtttggagatgttgcccaggctggatgggatggctccagtgaagttgttagaatcaaggtagagaattttaaggtgaaagagggaaccgatattaggcggtattggcccagctagcatgtttgaggacaggtccagtactcgaaggaaggttaggttaccgagagatggagagattcggccctgcaagctttggctgctgagtttgagttcaatgacccgccctgggtgcgtcctgctgtatgtgacgccattccaggcgcagtagtcggcggcgctactattanttagtgttccaggatgtgaggaaacctcctggatcactgctgatttcctttctgaagtcgagcagggagagcatgtcgtccgtgctgttctgggggagggagtcgggcgtgtccagccccgtagaacagcaatagcgccagtactactgcaagaatcatggcggccttcgtattattacctgcaattaatacaaaagcagcaggaagggggacctgtttgtttcggcttctggcagcttatggccaccaaaagctgctgcagactgccaaacgctcagctttttcagccagcttctataaaaattcgttggggggcaaa

SEQ ID NO: 35488 - DNA, 1574 bp, Zea mays
  Clone ID: MRT4577_132364C.1
ggtacccctcgaccggcggggataaaatcacccacacacccagcagccagcaccgattgaagaagtaaaccctatcttattagttaccgtaataatatgaaggccgccatgattgttgttgaagtagtactggcgctactgctgtcctatggggcgggacacgccgactgcacaacgacgacgaccatccccaagaacagcacggacgacatgctctccctgctcgacttcagaaaggaaatcagcagtgatccaagaggtttcctcacatcctggaacactaataatagtagcgccgccgactactgcgcctggaatggcgtcacatgcagcaggacgcacccagggcgggtcattgaactcaacctcagcagccaaagcctgcaaggccgaatctctccatctcttggtaacctaaccttccttcgaatactggacctgtcctcaaacagcttctttggccagctgccccttcttagtcgcctcgttaggcttcaggacctagttctgaacaacaaccagctgcacttacgaactgctccagcttgcacgctatagacctttcgtccaacatgtttactgggccaataccagccagcatcggttctctccctaaccttacgtacttgtacctttatgctaatagcttcactggagccatcccatcgagcttgctaaacatctctaaactacaggagctcgtgctttctaaaaacatgctagctgggccaataccacctaatatcggttctctcgtgaaccttacacttctctaccttgattataacaacttcactggagccatcccatccagcctgctcaacatctcaaaactacagcagctcgtgctttcctcaaacatgctagctgggccaataccacctaatatcggttccctcatgaaccttacagttctctacctttatgataataacttcaatggggccatcccatcgagcctgctcaacatctcaaaactacaggagctcgtgcttttctcaaacatgctagctgggccaataccacctaatatcggttccctcgttaaccttacacttctctaccttgattataacaacttcactggagccatcccatccagcctgctcaacatctcaaaactacagcagctcgtgctttcctcaaacatgctagccgggccaataccacctaatatcgattccctcatgaaccttacacttctctaccttgattctaacaacttcactggagccatcccatccagcctgggaaatatctccaaactacagcacctcgtgctccagaataatcagctcaatggcaccatacctcaggatcttggcaatttatcaaatctgaatagattgttgctagggcataataggctatcaggtcacatcccgacaacaattctgaaccagcgatcccttgaatttctgggcttggaagcgaattttctacgtatggcgttgccatctaatattggcaatacccttccaaacatctacgcacttttcttgtacaataacatgttccatggtccaatcccagcatcgctaggaaatgcttcccatctcacgttattagatttc

SEQ ID NO: 35489 - DNA, 1975 bp, Zea mays
  Clone ID: MRT4577_132365C.1
cattgggtacctcgagggccggccgggaaaattacccacacacccagcagccagcactgatcgagtcatccttaattaccgtaataatacgaaggccgccatgattgttgcagtagtagtactggcgctattgctgttccacgccgactccctcccccagaacagcacggacgacatgctctccctgctcgacttcagaaaggaaatcagcagtgatccaagaggtttcctcacatcctggaacactaataacagtagcgccgccgactactgcggctggaatggcgttacatgcagcaggacgcatccagggcgggtcattgaactcaaactcagcagccaaagcttgcaaggccgaatctctccatctcttggtaacctaaccttccttcgaatactggacctgtcctccaacatgctagctgggccaataccgcctaatatcggttccctcttccaccttaaaattctctaccttgattctaacaacttcactggagccatcccatccagcctgggcaacatctccaaactagaacagctcgtgctccaggataatcagctcataggcaccatacctcaggatcttggcaatttatcaaatatgtacaaattgttgctaacacataatatgctatcaggtagcatccctgcaaccattctgaaccaacgtaaccttacgattttggacctggaagagaattttctacgtatgatgttgccatctaatattggcaatacccttccctcactcgtcgcgctttccctgtacagtaacatgttctacggtccaaatccagcatcgctaggaaacgcttccattctcacgatattagacttcacagctaacagtttcactggacatgtacctagctctttgggaaatctaacccacctgtaccgcctaaaactagaacagaacagcctcgaagcaaatgacaatgagggatgggaattcatagatgcattggccaaatgtacgcatctacaatacctcttattatctgacaatcaattacaaggatccataccaaattcaattgggaagttgtccaatcacactcttcagtacctacgattcggcaaaaacaactcgtcgggagctgttccggagagcatatagggaaccttattggcttaaatcatttagttctagaacaaaacaatttgacaggtctgattggatcatgggttggaaagctgaacaacctggtaaaattatctctctcagacaatagtttcagtgggccgattccatcatccatatggttttgtatgacaaaagtaaagtgtcatgtttagtacaaaattggtcataaaaacatcttatgacgaaaatgctgcgtcataagggtcgtcatataacgaccgtcacattatgtatcttgtgacgactgttcagagtaccgtcacataatgtcatcaccttttgtgacggctgcgttcgtccgtcacatattgttgctatatatgacagtgttatctgtcaaaaaaaaaaattttttttaaaaaaaaaaaaaaaaaaaaaaaaaaaaaaaaaaaaaaaaaaaaaaaaaaggaaaaaaaaaaaaaaaaaaaaaaaaaaaacccttttacccaaaaccttagaagccgcccggggctccttttttgaaaatctcctttcgaagccgccgaggaaccctttaacagcgcgaaaaatggttaaacaggaggccccattcggggttgaggccccacccccattttttggggagcctatggacttgataactgctttgcacctcgggataaaaaattaaagggctcataacggacttggaaagggtctccggggggctgccaaggccttcaaaaagcaccccgttaagttttgcgggcttgttgaggactggaaccacccaaattacgtaaagctggggaaggccctttgcgctgagcacattgttcacctggccactgttcctgccgcaaaaactcttggcaaggggcccgg

SEQ ID NO: 35490 - DNA, 498 bp, Zea mays
  unsure (1)..(498): unsure at all n locations
  Clone ID: MRT4577_132366C.1
cacacatggcatcccanctctccccccccctcccccnnttccacngcctccnnngctaccccgcgcccaggtccgcggtggcagcgctgccgtccgtgagggtgggcattaataggtcgggttgttgggcatccnctncnactacatcggctacaacaccaacctnatcatnntnaccacnacnacnctnatnctnttcncnnnncnnttcnnnctnncnccntccncnaaccncaanncnacnncnnnnctnaacctnnannctctctactcccccctncanacgggtgaccccnncgagttcaccctttttttcacgctggcctgcggcgccgtnggccacatccttggcgtngggatggtgcttgggctcaagaacaccggaaccctcgaccagatcattgggtagatccctacgtnnccgttgttaagatcagactcaggagcctngatcgggcccacgggccgggggtgccggtggngacctttnntcgtgtg

SEQ ID NO: 35491 - DNA, 1117 bp, Zea mays
  Clone ID: MRT4577_132367C.1
gacaacgccacacgcgtgtgtggacgtaattccattatattgtaatgccctttttacattgcatataaacaaccactgggcctcaagagcatacaatttaactggataccacaaaagctcgccgcaggtgtatacatccttaggtgctcttcttcctcctctcttgttaattatttgcttgttattaattcctataccaggctaggaacattatttcatgtggacagaccttgctagctaggtagttcctagttcctacgtacgaacatgcatgccaatgaagtaaacctgcctgttgctttgtatatatatgttaatcgcaggtactatgaagtctgcaatggttgctgctgtagtactagccctactgctgttctatgggactggaaacgccaactgcgcaacgctgcgtcccaccagcaggaacagcacggacgacatgctctccctgctcgacttcagaaaggaaatcagcagtgatccaggaggtttcctcagatcctggaacactagtggtagtagcgccgccgactactgcagctggaatggcgtcacatgcagcagaacgcacccaaggcgggtcattgaactcaaactcagcagccaaagcttgcaaggccgaatctctccatctcttggtaacctaaccttccttagaacgctgaacctgtcctacaacagcttctttggccagctgccccttcttagtcgccttgtcaggcttcaggaccttgttctaaacaacaaccagctgcagggttggctcctgacgcacttatcaactgctccagcttgcactctataaaactttcgtccaacatgtttactgggccaataccagccagcatcggctccctctctaaccttatgtacttgtaccttgatgataatagcttcactggagccatcccatcgagcctgctaaacatctctaaactacaggagctcgtgctttcctcaaacatgctagctgggccaataccacctaatatcggttccctcatgaaccttacagttctctacctttattataataacttcaatggggccatcccatcgagcctgctcaacatctcaaaactacaggagctcgtgcttttctcagaatgctagctgg

SEQ ID NO: 35492 - DNA, 711 bp, Zea mays
  Clone ID: MRT4577_132368C.1
gacgctaccaatcggtgatccagggaagatgacgttcagcatcaccaggaaagagatcgaggggttctggaggaggaaggaggaggagcgccgcctcgccgccgagaaggaggccgcgagagccaaagccaagacgcttaagatggaagattatatgctcttcgagcaaatgataagggagattctcgaggaggggaacgaaggtgacaagggcatcaacggcaacagaatgatggtggcagcttccagcagggtcgccgaattacggattgggatcaagcactggtggaaaaaaagcacttatgcttatctgaatgagccggcagtgacggcatcaatggatgacaacggcagaagcagacgcgccgtcacttatattccacaagacagatgcctcaaagtccgctcggcgattcctgcttcatttgtcatcttttagctactctgtatgtatgcatgacaaaacaagctgaggcatatctatatgtgtgtatgcatcagctgttgtgacaaggacggaataatttatgttgtgtataagtttgtctgaatgctgtacttatatcaaattatcaagtggaagaccgtgttgcttaaaaaaaaaaaaaaaaaaaaatcttcttcttcctcctcctcacaacatcaagcaagcaagcagcatccagccatggcggccaagaaccccaaggtcttcttcgacatcctcatcgg

SEQ ID NO: 35493 - DNA, 759 bp, Zea mays
  Clone ID: MRT4577_132369C.1
tttcgggatcgatccttgcattcctcggcagcacacaatggcagcaccggcatcccgcgcgctcaggcgctgtatctgcaccgctaagcagaccgcatatgtacgaccgacgattggagccacacaacagaggatacagcggagatggcaatcggatgcggctgcgcccacaaaccccaagattgcgaccattgtcgaccagattagccaattgactctgttggagactgcggacctcgtgtcaacactaaagactcgcctaaatatccctgacatgcccatgggaggcttcgttgctggcccaggaagtgctggacctgccgctgctgctgcccccgccgaggaggaggaagccgcccccgctgcccaagaaaagacccttttcaacctcaagcttgagaagttcgacccagccgcgaaacccaaggtgatcaaggaagtcaaggccatgcttggtctcagtctggtcgacagcaagaagtttgtcgagagcgcgccaaaggtgatgaaggagggtgtccccaaggaggaggcagagaagattgtcgagacgctcaaggcactcggcgccactgttgtcctagagtagaagaatacatctggaaggacaagatgatggttggggacaagagacggccactgtatcatagcattgcacaacgggcgtgtatagatatgtctggaatgatcgtagatgtatttggaatactcaaaactccaataacaattgggtgtcatgagacagcccgtggtatcttt

SEQ ID NO: 35494 - DNA, 299 bp, Zea mays
  Clone ID: MRT4577_13236C.1
ttttcttgttttccttttttttttattttttgatttgggttttttttttaaaattattgggtgtacaaaggaagaaaacatcatgtttggtcatagcacagggacagcctgggcccttaaccaaaagggcgggggggctcaaacgcaggggacaagccggggaagccagccgccgggggtgccccccccccgaaggaagggacaatggaaaatcccacggccgaaaggggggaaatgaacccgacgggggggtctttaatgcccctggtggagggaagcgcgccccataatgggggggg

SEQ ID NO: 35495 - DNA, 455 bp, Zea mays
  Clone ID: MRT4577_132370C.1
ggaaaaggggggggtttttttttcaccataccacaaaaacccccagggagcccggttttcgcaccaagggccccggggttttaacaaaaaacagcaagcccgggcccggggcaaaaaaagggggggaggggtaaacaagttccctgccctttcaggggggaacccaaaaggggggggattttaaacccccttccaaaggggggttttttggaaaaaaaaattgggccggggggttttaacaggggggggcaaattgaaagggctgggcccaaaataaaaaaaaacctcggcccttgggaaccccaagttcctttttccgagggtttattttcggtgaaaacccttccctttgccttttaaaactttttcccccatttggggaaaaacgtttttgccccaaaaaacaaaatttgctttctggccccgaaggaaaggccccaccaaagcctttttcc

SEQ ID NO: 35496 - DNA, 271 bp, Zea mays
  Clone ID: MRT4577_132371C.1
cttcccggtgtggatgttgccaacgtcgagcgcctcaacctactagaccttgcccccggtggccaccttgggcgctttgtgatctggacccagagcgcgttcaataagctcgaggaggtgtatgggagctatgacgccccgtcgcagaagaagaagggcttcgtgctgcccaggtacacattggacatcttaggcctcggcagcacgaagcctaagatgtccaacgctgactgggaggatcatcaactctgacgaggtgcagtctgtggtg

SEQ ID NO: 35497 - DNA, 586 bp, Zea mays
  Clone ID: MRT4577_132372C.1
gtggttgagagcgcgccacagcggcgtctccgcgccgagctccgacacgagcaggctgcacggcgcgcggcgcctgagcacggcggcgatggcgcgcacgtcggcgcccggcatgctcgccgtcgagttcccgcccgccgacgcgtactgcaccagcgcgtcgaacacgtgccccggcaggccctggccctccctcgctgccgcggcgaccggcaccgcgaacgccgccgacctcgcccccgcgccagcggggtcccgcgcggccgacagcagcgtggtggccagggagacgcacgcgaagcaggccaggaacacggcggcgcacacccggcgccgcgcgcccagaaccgccccgggcgaccccgcgccgccgggcgacttgttggacgacgggtgcacgaccagcagcttcgccccgctcagccccttcatctactcctgcttggttggagcaaggcaatggcgaggcggagcaggcgagctgggcgtgacggatttattgctacgactgatctactgctcctcttcctccttgcccgaagagagagagatatggagagggggaggaggagaaagtggtggtggc

SEQ ID NO: 35498 - DNA, 529 bp, Zea mays
  Clone ID: MRT4577_132373C.1
ccccaaacaggggtacaatttaaggttttttcccaccattttgaaaaaagggccccccggtgggggggcccaacctttaaaaaaaccaaaccggaatttaaaaccccccccaaacccggggggaacggttaaaaaaaaaccccccccaaaacggtcccaaaaattcgggaaataaaccaacgggaggggccccccgggtttggccccaatttgggggaaaaaaaaaaccttttggggctcccggggggggggccccccccctttaagaaaaacttttttgggcgggtgggggggggccccggggacccccttgggggggcccaaaaatttttcccttcccctggtttcccgaacccaggcccttggggttttgggggaaatattaccccccctcctaagaaccccgcgggtttttggaaccttcccccccctggggggggcccaccccctggcccttttttggaaggaaaccaggcccgtccccttttaaggggtccgggcatttgggaaccctttcaaggggccttcc

SEQ ID NO: 35499 - DNA, 377 bp, Zea mays
  unsure (1)..(377): unsure at all n locations
  Clone ID: MRT4577_132374C.1
gccggcctggtactcngttctgcctcgctctctccgcagcgccggctccctcagccgcgtcccgctccctccgcagcgccggctccctccatggctgcgcgacgcgagattggctccccttccttgcacaccctaccctgagatcgcgcagacccgccaaatcgaggaatccgcgccccaaatcgaggaatccgcctccgctgtggaaggagatcgcctccggccctccgctgcgccccaactctcggtcggcatcatcgtacgcgttcgctgcgccctggctctcggtccttcgcggcggccggcccttgacccccgnccaccgcgcccccgtccgcccacgcaccccnccccncncnnnccccnccccnnncccc

SEQ ID NO: 35500 - DNA, 347 bp, Zea mays
  Clone ID: MRT4577_132375C.1
aggggtgggttttttttttttttttttttttttttttttaaacagatcggaccccaccattcgaaacagcaattgaatccagtttcaccagaaatcccgaaaaaaaggttggcattttacacgcccccaaccaatttttgacatcggggggggaattacaggggagattggtatatttttgcaagcaattgctttaagatcggtgaactgcatgaagggtgtgtgcaaaccatgttgaaccccccccgcccaggtgggcgaataaaccaatggggacataggggggcaacatgggcccgggggggcttatgccatttggcaacagggcgtccccggggggctctttt

SEQ ID NO: 35501 - DNA, 261 bp, Zea mays
  Clone ID: MRT4577_132376C.1
tacgtaagctcggaattcggctcgaggcggttgacaccaccatgtcctgcagggcggggcgccccaaggctgcaatgtgcccttcactcgacatgcggcaccgggtcgcgcttcggtacccaaatggggcgggaggaccaacatgcaggacgcgcagtccagtgcgacacgaaccgctagccgacagccaggagaccgccaaagagcacctcccgtaggtcgatgcagaaggatgtatagccgctttccactcagcagcaa

SEQ ID NO: 35502 - DNA, 201 bp, Zea mays
  unsure (1)..(201): unsure at all n locations
  Clone ID: MRT4577_132377C.1
gggctcgtgggggcaagctttatntttctattcgataagccttggtcaacaagattcactcttgctattgcatttgcgactgcaagcgcaactccgtttttttcttcccgaccagacctgctccgttgcttccgcgctgcaactggtgtggatcccgtgtgccctcgctgggtccacccttataccggggccccacaattc

SEQ ID NO: 35503 - DNA, 553 bp, Zea mays
  unsure (1)..(553): unsure at all n locations
  Clone ID: MRT4577_132378C.1
ttgggtacctcgaggccggccgggcgcatacggccactttggccgtgacgacgccgacttcacctgggaggtggtcaagcccctaaaggaggcatccgcttaagaatgtattgggaagttcactggacatgaggttcatcttcgtctggctctgctgatacctgcaaggattgctgctgctgctgcccctggatgtgtgtttgatcagtgactgtctgctctgctccatagaagacgaatgaagagagacagatggtgaagaaggctgcggcaattggcaattgccgcagcaagccatgtcggcgccaccgaccgccttagtgattggtataatttggtgtggcagcagccaggattaatgcgctggtcttttatctttactactagtttggtctcgtccggtatcttatttttctttccccttttcgagtctgtactgaaactgctgagagatttgcagttttgatctatcataccctttggnaatactgttcatctcgagtgcgcaaaaaaaaaaaaaaaaaaaaaaaaaaaaaaaaaaaaaaaaaaaaag

SEQ ID NO: 35504 - DNA, 271 bp, Zea mays
  Clone ID: MRT4577_132379C.1
gccacgcgtcctatcacgcgtccgtaaggtgcatacggaactggctatagaagctgtcaggaaatcacttgttgtgtcaaagaattgtaactctcccgatcatcaattcctacctctccctaaaagagctagaactatccttgtcactagaattcatgctagcaatttgtggtaccagtgtagatgatggtcaaaccaatggatagagtacacgtgtaatatcacaactgcaattcaatatccctgacgaggaccacaatttttgatgcga

SEQ ID NO: 35505 - DNA, 681 bp, Zea mays
  Clone ID: MRT4577_13237C.1
ggccgcttttttttttttttttttgctttttttttttttttttttttttttatttttttttttatttttttttttttttttttttttttttttttttttttttttttttttatttctttttttggtcggaaaagaaagcgttttcccccccaaaatcttagggtaacaattgccccaaggcccgggggccatagcaggcaccccttctttttaatcatctaacgcccccccggttcaaccccccccttggtgattttgggggcaagggcaatctaagacccgggcttccctttcttcccccggaaaagggctagcagagaccccccggaaaccttggcgaccctgaaccggcccccaggaatatctcccacagggggccccttacgccccaatcccgcattcaggcccccatcattttccccaagggagctcaaacccccggcctttggcccgaagggaggaatctttttgcccttcttaacaagcgggacccgggcccccttaccgataggggggtcgggctgctgggccccaataccaatcttctccaggacaaggccctggggaggggggggcccagcgaggggtttcttccacccattgcccaaagggcccttcttggatgcctgggcagcccaccggtggtcccggcggggggtcttgggcttgcccccgggtccc

SEQ ID NO: 35506 - DNA, 177 bp, Zea mays
  Clone ID: MRT4577_132380C.1
cccgcgaccatcctaaattctcgacgcagtaaattttcaacctgtgaagtagagcagtttcctaatcgaagccaaataactttgggagggctaccaaacaccagactaagatcgtgcatgtctgcatctttagagacaatcattaagtcattattttttgcataatcccaaacgata

SEQ ID NO: 35507 - DNA, 205 bp, Zea mays
  unsure (1)..(205): unsure at all n locations
  Clone ID: MRT4577_132381C.1
cacgaaaccccccgccgcccncaannccccggggcgccgccgccaccaccccncgcnncggnccccgaaganaaggcgnccccaaggcgacgcnnaagcggcgcnnaggcggnaaggcgccccggcgacgaaaggcgnccngnncgacagacaccngcnggcgagagggagaggccacgggnggcgccagcagcagcacggcggc

SEQ ID NO: 35508 - DNA, 820 bp, Zea mays
  Clone ID: MRT4577_132382C.1
tggtaccctcgaggccggccgggggcgcacctatcgcctctcccgcggcccgcccacccccatggagtcgtggcggaggcggacgcttctcaaggtcatcgtcctcggcgacagcggggtcggcaagacgtcgctgatgaatcaatacgtgagcaagaagttcagccagcagtacaaggcgacgatcggtgccgatttcctcaccaaggaggtgctcattggcgacaggctcgtcaccttgcagatatgggacacggcgggacaggagaggttccagagtcttggcgtggcgttctacaggggtgccgattgctgtgtgctggtttatgatgtcaatgtcaagagaagctttaatacgcttgatacctggcatgatgagttcctcaatcaagctggcccatcagatcctcagcgctttccgttcattttggtcgggaacaagattgatttagatggcgggaacaaacggatggttccagagaagaaagcgagggaatggtgcgcctccaagggcgatattccatacttcgagacctctgcgaaggaggaccacaacgtcgacactgctttcctatgcatcgccaggctcgccttggagcatgagcatgaccaagacatttacttcaagacagttgcggaacaagtcccggacactgaacagacaagcggatgtgcttgctaggagtcagccatttcctggaaggctggatgttactgtatacaataagctcacagacctgatgacagctgtttaacaagcttttgtgatagccattcttaattgtaattatggcatcaggggttgtgattcgctgaacta

SEQ ID NO: 35509 - DNA, 154 bp, Zea mays
  Clone ID: MRT4577_132383C.1
gattctggaacataagatccctccattcactgcggacgtaactatctaccacacggttcttacaccttttgtaactcgttgccttcaattctgcctcggcttttagagctttcctcgataatttagtaacctgtgtctctgtgcatatggtaca

SEQ ID NO: 35510 - DNA, 142 bp, Zea mays
  Clone ID: MRT4577_132384C.1
aacattggttcgctttttcatatgaagagaaacgcatattttaatttggaacggagggaggacatttcagctttgggaatggctcatttcaatcacctacgagttactttccctttgcaaggatcacaatgccaaaccctct

SEQ ID NO: 35511 - DNA, 432 bp, Zea mays
  Clone ID: MRT4577_132385C.1
attcggctcgagctggggccagggcgctgatttgtgcgaagagaggcagctttcattctggatgtgagatatatgaagagtggagctacctatcttgggagacggatcctaacactgggaactgacgcagtcactggtgacagaaaagaggaactaagatccttgggtgctcaaatcgcttatagagctccagatcccacaaatggctgtaagcttgtccgttacgttgttaacaaggacccatattgtcttaccgcatggaattcctactatatggcggttttaagaatagaggacaggtttccacataatttcaaatctctccttcgaacaagacatgcgagtcctgactgtgtgccttcaataatcatatccggacatcaatttactgctttaacgtagcatcagtcatctgcccgggattaccttgaa

SEQ ID NO: 35512 - DNA, 549 bp, Zea mays
  Clone ID: MRT4577_132386C.1
cattgggtacctcgaggccggccgggctcgatccctacggtcggcgcctccacttcgttttcctcactctctcctccagttctggcctggccgccgaatgtaacgcacacgatgtacaccgcgaggaagacgatgacgaaggataatgtcctgtgagccctccgatgtcgatgactccgatgcccacgctctctcctttgatctcggacaactgaacctctgagctcaagagcgacctcaaggacctgtacatcgacaatgctatccaccatcggatgataccggaagcaggaaggttgttgtcatccacgtctctactaccgactgagcaaggacttcgggaagatccatgtcacactcgaccgggagctggagaagaaattcggcgtaaaggatgcgagaattgttgctacaacgaggattgtgaggacaccacaagaaggcttcagctgttcggcgccactcggacagtactctgactgctgttcgcgatgccatcatggaggatgttgtctacccagctgagattgctcggaactgcgtcagata

SEQ ID NO: 35513 - DNA, 414 bp, Zea mays
  unsure (1)..(414): unsure at all n locations
  Clone ID: MRT4577_132387C.1
attcncgggccgacccacgcgtccacaaaattaatggtgtctttaagaaatgcatacgtatacaaggacaacgcatgaatagcagctgcacaaaaatatagtaaggctgcactgacatttaacacttaccatgaaagaaagcaaaatcatgtaatccttcttcagctcaaagagaagcaatattgaagtcaatgggaatgaatagactgaagctagtgtagcagccattctgacctacagaaaaatagagatagtgcacatcattacttatcgcatcaggaaaagtgagttgcaaagcaacttaccagagcctaggcttgtggcagtgcaacgacaacattaccctcagtaaagttgaaattattaaataagctaccgacgccctccaaaacagttccagcagcagctccaatc

SEQ ID NO: 35514 - DNA, 1105 bp, Zea mays
  Clone ID: MRT4577_132388C.1
attcggctcgagggaaacgctaccttgattatttaatcatgtcactatgcagtgaggagaaggggttcagggagatggagccactgcttctacagatattgagaattggctttttcgaaattctcaagcttgatgtacctgcttatgctgccgttgatgagaatgtaaggcttgctaaagtagctttaaggcctggtgctgggaatatggtgaatgcaattctgcgtaaacttgtattgctaaaggagacagactctcttcctcttccaaagatagaagtgggtgatcgtgcccaagctcgtgctctttctataatttattctcatcctgtttggatggtgagacgatggatacggtttcatggaaaagatgaagctctaagattgatgaattggaacaacagtgatcctcatttcagtctaagggtgaacacatcaaaaggctatactagggctgaccttgtaaaacgattggaaagtttacaggttcattatgaagaatcaattatggatgaatttgttcgcattcgggaagggatgcagcaagtcttaaaagctggattactgaaagatggcatttgtgctgtgcaagatgagagtgcaggtcttgtagtgtctgtggttgatccacaacccggggaaacgattgttgattgctgtgctgcacctggtggaaagactcttttcatggcatcacggttgtcaggagaagggaagatatgggctctggacataaacaaaggtcggttgagaatactcatggacgcaaataagtaacacggtcttgatgatatcattacttacatccatggcaatcgtgcaatcaaagctaagaaagcatccaatctagatccaacggttttatatggaaaaggttaaaagtaaaataggtactatattttaggtggaaggggttaaatataaaataacagtcatcattagatttagattagatttaacaaaccgcttgattgtacgcttgcaccaatataagtgattgcataaaatattttcccatgtttagctcatttgtattgtatctactggttactgaatggctggccagagcaagaaaaaaaaaaaaagggtaaatataaaaagaaaaa

SEQ ID NO: 35515 - DNA, 149 bp, Zea mays
  Clone ID: MRT4577_132389C.1
gttgtgatgcaataaacaccctgtcctgatggtataggaccctctcgcgcaacacaaggacgtacaccgagatgatcaaacaacacgcaaaatggtgcacgtcatacaaaagcgacccgatggttgacgcacgacagttggccggacac

SEQ ID NO: 35516 - DNA, 1559 bp, Zea mays
  unsure (1)..(1559): unsure at all n locations
  Clone ID: MRT4577_13238C.1
cacacaccctccctacctcgccgtcgccgtcgcatctgccatgggtgcgtacaagtacgtctcggagttatggagaaggaagcaatccgacgtgatgcggttcgtgcaacgcgtgcgctgctgggagtacaggcagcagccggccatcgtccgcctcacaaccactcgccctgtactttggtcgcgtcgtctcggcttcaaggccaagcaggggtatgttgtttaccgtgtccgtgtgaggcgtggtggcaggaagaggcctgtgccgaagggtattgtctatggcaagcccaagcaccagggtatcacccagctcaagttccagaggaacaagaggtctgttgctgaggagagggctggacgaaagcttggtggactcagggttctcaactcctactgggtgaatgaggatagcacctacaagtactttgagatcatccttgttgatgtggcccacactgccatccgcaacgacccaaggatcaactggctatgcaatcctgtgcacaagcaccgtgagctccgtggtctcacctctgcaggcaagaagttccgtggcctgcgtggcaagggccacactcaccacaagaacaggccgtcgaggagggccacctggaagcgcaaccagaccctgtccctccgccgctaccgttgagcacacacatcttgatgctctgctactgtggaacccgccccatgcaggctctgcaagcgtgcctgtctctggcgacattgttaaattttgctacccgtgttccttccgagccccttgaactgtgttatcagtgtaccatggagcaagtgacgcgaactatatttgtggttctctcagtcaatgaaaatgatggtttagttgannnnnnnnnnncgannnnnnnnnnnncgagccgccnggagaagaggagggagccagcaccagccaccatgggtcgcgtccgcaccaagaccgtgaagaagacctccaggcaggtgatcgagaagtactactcccgcatgaccctcgacttccacaccaacaagaaggtgctcgaggaggtctcgattctgccctcgaagcgcctccgcaacaaggtggctggcttcagtacccacctgatgcgccgcatccagcgcggcccagtccgcggcatctcgctcaagctgcaggaggaggagcgcgagcgccgcatggacttcgtgccggagaagtccgcgctcgaggtcgaagagatccgcgtcgacaaggagaccatggagatgctcgctgccctcggcatggccgacctgcccggcgttgagcgccaggctgaggtctccaacgcccccgcctacggccgcccgcagtacggtggtccccgccgtgaccgcgtttagacttcgcggtggttgcctcttgatcgcactgctattcgtagttgttgtcctactatgctaaacttcttttagatctttggttgcatctgtggcggttaagttttgaacttgcctgttatggtataaattctgaagtgtttggttctgcgtgtgatgaacatgataatttatattcttgcgcgaaaaaaaaaaaaaaaaaagcggcc

SEQ ID NO: 35517 - DNA, 749 bp, Zea mays
  unsure (1)..(749): unsure at all n locations
  Clone ID: MRT4577_132390C.1
cttctccccccggccgacctcgcccctccggcgctccgtccgcttcctgaactcgtctccctacggacgttctcctccctccgctcgccgcgccgcaacccggagaggagaccgccgctcggtcgagcaccatctggggcccagcgtcctcgcgaccagctctagcgcggcgtccgccctctgcagccctggtgtccccgcgactggcttcggccggcacacaactccacactgtatgctgcaaccctactctgcctcgtcttcttccatcaccctaagcatgcgcgcaacccccgctcaccaacgacgggcccggccgccgccgccgtcctgcctcgccacccgccaccttcgccggcgacgagcaccagcaggaattaatagagttccaaacctcggttctgcagtttctactaaaaaagcagggatgagtaaggatacatttattaatttggacgtctctcatcacagagcgggttaccgtcatagttgctggaacagtgcgctggaaacgctaccttgattatctaatcatgtcactatgcagtgaggagaaggttttcagggagatggagccactgcttctacagatattgagaattggctttttcgaaattctcaagcttgatgtacctgcttatgctgccgttgatgagaatgtaaggcttgctaaagtagctttaaggcctggtgctgngaatatggtgaatgcaattctgcgtaaacttgtattgctaaaggagacagac

SEQ ID NO: 35518 - DNA, 1619 bp, Zea mays
  Clone ID: MRT4577_132391C.1
ccacgcgtccgggctaatctttctcctgactctaatgagtccacttttgctgactggtgggcgaaagtaattaagcaagtgcacaaatccaaaagaagaggctttaacagtatcatcatcttggatgcttggtgtttatggcttcatcgtaataagcaagtcttaaaagctggattcctgaaagatggcatttgtgctgtgcaagatgagagtgcaggtcttgtagtgtctgtggttgatccacaacccggggaaacgattgttgattgctgtgctgcacctggtggaaagactcttttcatggcatcacggttgtcaggagaagggaagatatgggctctggacataaacaaaggtcgtttgagaatactcatggacgcagcaaagttacacggtctagatgatatgatcactgacatccatgctgatcttcgactatatgctaaggaaaccacagttaaatatgacaaagtattgttggacgctccatgctctggtctgggagtgctttccaagagggcggacttacgctggaatagacaatttgaaaatttggaagagttgatgtgtttacaagacgagcttcttgattcggcatcaatgttggtaaagccaggtggtatactaatttacagtacgtgttcgattgaccctgaagaaaatgaagagaggattactgcttttgttcagaggcatccggaatttgctcttcagagtgtatgtggatatgttcctagagaatttatcacagatgaaggtttctattcctcaaatccaactaagcactctatggatggggcatttgctgcacgtcttgtccggtcaacgcactaagattataggagttgccacaaggccacaactaggtgtgaagttgaacaaggaatcacatgtattgccctaagtgcacccagtcattgcttcaatatctttatcttatatattcttgaactttgctgcgttttcctcttacgcttcacaaaaaaaaagcatatccaaacccataccatattgcttcttgtacggcacgcagattttttgaagcgttttcgctttgtattaaagtcatctgtttagactgctcatacaatggaaaaaaaaaaaaaaaaagggcggcgacttgatggggagctcagacgagcgtcttggttcggaatcaatgttggtatacccaggtagtatactaatttaaagtacgtgttcgataaaccctgaagaaaatgtagagaggattactgcctttgttcagaggcttccggaatttgctgtggcgagtgtacgtggatatgtttctagagaatttgtcacagatgctaaaatctaactctcaaatccatggatgcaccatttggatggcgcatttgctgcacgtcttgtccggtcaacgcactaagcttataggcgttgccacaaggccacaactaagagtgaagtacaacaagtaatcacatgtattgccctaagtgcacccagtcattgcttcaatatctttatcttatatattcttgaactttgctgcgtgccgtacaagaagcaatatggtatgggtttggatatgctttttttttgagaactagaacagtgaacgaaaggaagggcggccgccgactagtaagctc

SEQ ID NO: 35519 - DNA, 445 bp, Zea mays
  Clone ID: MRT4577_132392C.1
caacaaagaccgggccgagacatgtattgggttcttcggcagctaaaattaacaggggaccgggaccaaccttaaagaggagggggaaaaaaaaaaaaagctaccgcccccccagttggggccgcctaaaaagcaagagggaaggaggctgaagaggaggccccccccttttatggcctccacacaggggagcggctctgctctcatcaaatcaccagagcaaccccggcttctccatgggggccccccatggccgacgccatgtagcccctccagctacaaacagggccgggcttttgcccctcccccaaacttcctggtggcaggccaggcttgccggggcgggtcccccaaatcccgtccccgccgttgcactggggcccggtgccgtcgcaaatccccgccgcgccgacaaacacggggctgccggggttgccccggggct

SEQ ID NO: 35520 - DNA, 2437 bp, Zea mays
  Clone ID: MRT4577_132393C.1
cattgggtacctcgaggggggcttcgttcttctctacccggttcttgctcctcccgagtcccgaactctcgatccactcatccgctgagggcgtcggccttctggcccttctccccccggccgacctcgcccctccggcgctccgtccgcttcctgaactcgtctccctcacggacgttctcctccctccgctcgccgcgccgcaacccggagaggagaccgccgctcggtcgagcaccacctggggcccagcgtcctcgcgaccagctctagcgcggcgtccgccctctgcagccctggtgtccccgcgactggcttcggccggcacacaactccacagttaggtctccgtctgcacagcgcggcgatcttctctctccttcccgccctctgcagtccctctcagtccctctccgtctgcttgattctgctccaacctcagactaccctcgctctgaaaatgtcattacgcacccaatgcgcttgtagctgtatgctgcaaccctactctgcctcgtcttcttccatcaccctaagcatgcgcgcaacccccactcaccaacgacgggcccggccgccgccgccgtcctgcctcgccacccgccaccttcgccggcgacgagcaccagcaggaattaatagagttccaaacctcggttctgcagtttctactaaaaaagcagggatgagtaaggatacatttattaatttggacgtctctcatcacagagcggttgcagtggtgaggttgctaagaatcgagaaggggaaagcatttgtagaccttttgaacgagaaagcaaatgattctggagataaagagataggatatgtgcagaggacactaggtttcagcacacgctatttggaggacagggatataagactggttaccgtcatagttgctggaacagtgcgctggaaacgctaccttgattatctaatcatgtcactatgcagtgaggagaaggttttcagggagatggagccactgcttctacagatattgagaattggctttttcgaaattctcaagcttgatgtacctgcttatgctgccgttgatgagaatgtaaggcttgctaaagtagctttaaggcctggtgctgggaatatggtgaatgcaattctgcgtaaacttgtattgctaaaggagacagactctcttcctcttccaaagatagaaggtgatgatcgtgcccaagctcgtgctctttctataatttattctcatcctgtttggatggtgagacgatggatacggtttcatggaaaagatgaagctctaagattgatgaattggaacaacagtgatcctcatttcagtctaagggtgaacacatcaaaaggctatactagggctgaccttgtaaaacgattggaaagtttacaggttcattatgaagaatcaattatggatgaatttgttcgcattcgggaagggatgcagcaagtcttaaaagctggattactgaaagatggcatttgtgctgtgcaagatgagagtgcaggtcttgtagtgtctgtggttgatccacaacccggggaaacgattgttgattgctgtgctgcacctggtggaaagactcttttcatggcatcacggttgtcaggagaagggaagatatgggctctggacataaacaaaggtcgtttgagaatactcatggacgcagcaaagttacacggtctagatgatatgatcactgacatccatgctgatcttcgactatatgctaaggaaaccacagttaaatatgacaaagtattgttggacgctccatgctctggtctgggagtgctttccaagagggcggacttacgctggaatagacaatttgaaaatttggaagagttgatgtgtttacaagacgagcttcttgattcggcatcaatgtgggatactaatttacagtacgtgttcgattgaccctgaagaaaatgaagagaggattactgcttttgttcagaggcatccggaattttcagagtgtatgtggatatgttcctagagaatttatcacagatgaaggtttctattcctcaaatccaactaagcactctatggatggggcatttgctgcacgtcttgtccggtcaacgcactaagattataggagttgccacaaggccacaactaggtgtctaggtgtgaagttgaagaggacatatcctgtgcaatcactcattttggtgcaagcgtgcaatcaaactatccagagcatccaatctagatccaacggtttcatatgaaaggggttaaaagtaaaataggtactatgttttaggtggaaagggttaaatataaaataacagtcatcattagatctagatcggatgcaccagatcgcttgattgcatgtttgcatcaggaatcacatgtattgccctaagtgcacccagtcattgcttcaattctttatcttatatattcttg

SEQ ID NO: 35521 - DNA, 403 bp, Zea mays
  unsure (1)..(403): unsure at all n locations
  Clone ID: MRT4577_132394C.1
ggnaaaaaccgtacattcaagcctgtttggccctgaaattcttaagaatctggttaagaattaactcactaatgtcaaaagtcaaaacctcctaggggttgtcctgggagtcaggttcacgggtacagaagatgaatctcagatgtcactcaacctgagccgtcattctctgtggcagggctgccctgggtttctcttactcaatccctggagtgtaagcatttggattgtgtcacagattacctttttaccttttctttctttttttttctttttttcaatatcagtgcccacaccttactgagtattgagttttagagctttcgcttgatgtgcttaaccaagagacttcttttgtatccttttcttgtcctatgatgtaaataaaagcctcgatttatgt

SEQ ID NO: 35522 - DNA, 245 bp, Zea mays
  unsure (1)..(245): unsure at all n locations
  Clone ID: MRT4577_132395C.1
aacccgtccctgacctttccccgccgcaggcgagcagcagacagccagaggagacgncgcgcctggggctatcatgagagagaaggagttatggtgtatgttcgacctcttccccgtcggaaggtcccgtgattattgtgctgatactggaacatctatctgaggaaccagactgcgatcaccagttcatgacgcaccgaaggcctacgaccacccctccccccccccccccccccccccccccc

SEQ ID NO: 35523 - DNA, 633 bp, Zea mays
  Clone ID: MRT4577_132396C.1
cctcgaagccggccgggtaatgccggcccgagtctagcctccatggactttgccagccgccacatcgtctgttgcattcgcctccgcctctgcccccgtggcggtcgctgaggagcctgagtacctcacccggtacatcgtcgtcaagcactcgtggaggggaaggtatcgctaggtcctttgcatcacctcttcctgcgtcgtcacgctcgaccccaccactctcaacctcaccaactcctacgatgtcggctccaagttcgaccatgctgaggctctcactgccaccgacgagttcacgctcgcagtccgcaccgatgcccgcggcaagttcaagcctatgcgcttctcatccccgctccgcccagggatcctcaccgaactccaccgcctccgcccggtccatgactccttcgacttccccgtcctccatctccgccgtcgcaccccacgagtgggcccccttcatgctcatgggaggagggtcctctgctggtggaccaagaaagggaatgaattctcgattgtatcctaacatgacctttcatcctatatctacagatttttgtgtcttgaccaacttccaatagattgaatcattctatgctttaaaaaaaaaaaaaaaaagcggcc

SEQ ID NO: 35524 - DNA, 420 bp, Zea mays
  Clone ID: MRT4577_132397C.1
gagctttcttgtcggcggccgccctgggaggggaggtgtggttacctcaaagggcccatcactggaacaactagtggcgtccatgcttcgccatgtgacagtaacaaatgtacactctttacaaatttgagtgaagttacttgagaaaaagcaagtctccagttctaccggcgcacaaaaatgctcgcaactcttaaagcctactaaaaactggacacgacgcgacatgtgcatgggaatgatcaactggctatgggatcggtcaccactcaccatcgacagagtcctggtttctcaagccggcagaggggcaggatttactagcctatggaagggtagactaagccccaaagcttaacattttttactgagaagcatgtagaatgcgatcaacaccccgtgttaaaagtctttgaatta

SEQ ID NO: 35525 - DNA, 1107 bp, Zea mays
  Clone ID: MRT4577_132398C.1
cattgggtacctcgaggccggccgggaccacgcctccgcccgacatcgcagcaatctccccgccccgactctcctctctctgcgtcgaggccgcaatccccgccgccccggctctcctcgcccccagatcttgcccgtggccgtaatccccgccgccacggccctcctcgcccccagatcgccacctccactatcccgcaaacgtcgggtctgctctccagcagaggagatcccgtagccgcaatccaaagagaactcgcgcaacacaaaatctctgcaaggatttttgggccgctgcgccggcgaggaccatcctctggcaaccggcgaggcagcaacagcatcaataaggggacccttgtctcgcttcgagatcgtccgccgcgctggggtcgactcactcgcgccactcttcccgtttcctaccgtggtggaggaaccctaatgccggcccgagtctagcctccatggactttgccagccgccacatcgtctgttgcattcgcctccgcctctgcccccgtggcggtcgctgaggagcctgagtacctcacccggtacatcgtcgtcaagcactcgtggaggggaaggtatcgctaggtcctttgcatcacctcttcctgcgtcgtcacgctcgaccccaccactctcaacctcaccaactcctacgatgtcggctccaagttcgaccatgctgaggctctcactgccaccgacgagttcacgctcgcagtccgcaccgatgcccgcggcaagttcaagcctatgcgcttctcatccccgctccgcccagggatcctcaccgaactccaccgcctccgcccggtccatgactccttcgacttccccgtcctccatctccgccgtcgcaccccacgagtgggcccccttcgtagctgttcaaggagataacgcagttgctacgtgctgaccttagagaattttaggtacagtacaataatgcttcaaagatatgttgatcagtttgttgttctgtagatgctcatgggaggagggtcctctgctggtggaccaagaaagggaatgaattctcgattgtatcctaacatgacctttcatcctatatctacagatttttgtgtctcc

SEQ ID NO: 35526 - DNA, 898 bp, Zea mays
  Clone ID: MRT4577_132399C.1
cttcctgtttccaatacttagacaagtatattagtacacaaaaccaatgtactaagacttagaaacatacctttgctcttgatttgcactttattcatccattgcataaattcacatttaagcacttgagttggcactcaatcaccaaaatacttagaaatggcccaagggcacatttccctttcaaccggtaccccttgtggtcaggggagtacctgaggaaaaggcaacgagtggattgggcgaaagtttgtggggagcgatgtcgtaggtgttcggtagcaggcacagccaaaaacgcggaggtgcatataggaacgggcgatgccgaagagggcgaagaaaggagtgggatgactgacctccttggagggcaggcggttgagatgggtgatagtatttagtgcctccacccaatagttggcaggaagagacgtttggaaaagaaggcaacgaatcatgttggtggtgatgtggatcatgtgtttggcccgaccgttctaaggggaggtgtaggggcacgagagccatagttgaaccccgtgagagaggaagaaagagcgggaggtggagttgttgaactcgcaaccattgtcgcactggagagcacaaaccaggcggccgaactgggtggagacccaagcaaaaaagtgcgaaagagtgtggaaagtatcctacttcaatcgcaatggaaaaggtcatccacaatcaccaagtaatattcataatctgaaaggttgaaaacatgagaagtccatagatcacaatgtacaagatcaaaggcctgatcaacccgagaggaggaactagagaaaggggggcgagcatagcagcctagctgacaagcatggcatagactatcaaaatggctcttgctacaagatgtctgaacggctag

SEQ ID NO: 35527 - DNA, 448 bp, Zea mays
  Clone ID: MRT4577_13239C.1
gtggtggccgcgccgctctgttcctccgtcccctcctccttccggctctcgctgtcacatgtcgtcgtggtgtgggggtgctctgatccggatgctgtacccccgttctaaacaccatgagggaatgcagcgcgatccacgtcatccaacgtgatatccagcgcgtaaacgcatgctggtagctgcactgccgcgagcatgacattcaagcgtgatgaacatatgcccgttgacaagaccaatcgtaaaggtaaggatgctttcaacaccttcttcattgacaatgggggtgggaagaacgtccaccgcgctgtttttgttgaccttgatttttctgtcatccacgacgtgaggactgggacctaccgccagctcttgcatcctgatcagctcatcaatgacaaaggagaatgcagtcaacaactaggctcgtggtcactagaccatt

SEQ ID NO: 35528 - DNA, 334 bp, Zea mays
  Clone ID: MRT4577_1323C.1
agaaccaagagtgcttaaagcgacagacttcaattacaaatgcaaatactagagcagttcagcaagtgatgatggaaggaaacacccaaacattacccaggggggccaggacacaaacaaaggtttttcaacaccacaacctggctcgacaggcaaacagattcatgcaagcagatcagtatttcctcctcctcgttaccggcatcactgccggcctctgcggcgaactcctcgtagtccttttccagggcggccaggttcttgcgtgccttgagaaaactcccccttcttcatgccctcggcgaagtaccaagtgcacgaaacgcgcgctttg

SEQ ID NO: 35529 - DNA, 265 bp, Zea mays
  Clone ID: MRT4577_132400C.1
ctaattcccggtcgggggcgacccacgcgtacgcaactcccccgcaccgtaaccctagcagcagatcggccatggagagctgggctaccggtgtggggacaagcgttagctgcgccttcttcgcctccctcgagcgctgctcctgcatcaacctattcaccgacgactacgactacgacgaggaccacgactaggccaaagaccggtctctcatgctcgccgactacccacgccacgactacgccatcaagcccgatccagactc

SEQ ID NO: 35530 - DNA, 1051 bp, Zea mays
  unsure (1)..(1051): unsure at all n locations
  Clone ID: MRT4577_132401C.1
catatgatcatctgcttgatacaatggcctatacacaaatagctaggtggataaacatgaccagggacaaccccattcctaccagcatatccatacggattttttctgccatggccatttgatgggtgcatgttctgatattgcaggggtggtggcatgggcattggatagtacaattgagtcataggattgtcctgatggaacccccgtgcatacagaagattatgcaaatttgtatcgaaatctccagtgagatttggcactgtgtcattgttgttacctccaggttgtgtatccgatgttaaaactgaattagatgtgcccagaccatcaactaaaccagtagaataggggtaagcattatgcttagtatcttcaatatagtggtgagatctgcctgtaaactgctttgctgaaaccccatagtatgatggggttgtgtcatttctaacatcaactttcttgcctgtttctgattgcaaggtactggtttcactaggtactggtgaagcttcagagaagttgccaccaccccttatacttactgaatcggtagttgcatgatttgtggcatcactatctagcaaacccaaagaaacagattttatctccttgtgatcagccatagagttacattctttttgctttattgagccatgattattggaatctgaaatgttgatgttactgagctgattagacagaacatcacaggaattgttaggcgcaacattgttgactctttccacatctaagtctgatgatacaggatcatttgtaacaaggtcagaagagacaaccaaaacatctggccttaaaccagtacggtttctctttagagtgttcctgaaaaactgattgacttcaccaacagtgagacaagaaggcacttgaagaatcttgccaagcttacgagcaccaaaatcaaatgcgctgcgtatccggtaaaagtttcctttactgacactgcgtccaagattattactctgctttagtggatcaaacatatttaaaaatctccgtcacacaggntaggcggacgcgtgggtcg

SEQ ID NO: 35531 - DNA, 371 bp, Zea mays
  Clone ID: MRT4577_132402C.1
cgttaacttccaattaactagttttgacaacattcaaaaaagagtaataaacttcgccttaattttaataatcaacaccctcctagccttactactaataattattacattttgactaccacaactcaacggctacatagaaaaatccaccccttacgagtgcggcttcgaccctatatcccccgcccgcgtccctttctccataaaattcttcttagtagctattaccttcttattatttgatctagaaattgccctccttttacccctaccatgagccctacaaacaactaacctgccactaatagttatgtcatccctcttattaatcatcatcctagccctaagtctggcctagggcggccgccaaa

SEQ ID NO: 35532 - DNA, 881 bp, Zea mays
  Clone ID: MRT4577_132403C.1
acattttcattcattctctccccccgcacgccacgcctcccatcccctccgacacaaatagccagagagagagagaaacggccgccgggggcagccagcgagcgagcagtgcggaaaaaaggggcaaaagaaaagggaatcccaagaatcagccggcgccagtgtctgtggactggaccggactccacctccatcggggagagcgagaggcgcaaggaggcaaggaaatggcctgcccggcggcggcgctgctcctgccgctcctgctcggcttcctggcgccggcgcgggccaccgacccctacgccttcttcgactgggacgtctcctacgtcaccagatccccgctcggcgtcccgcagaaggtgatcgcgatcaacaaggagttcccgggccccgtcgtcaacgtcaccacaaactacaacgtcgccgtcaacgtcctcaacagcctcgacgagccgctcttaatcacctgggacggcatccagcagcggaagaactgctggcaggacggcgtgctgggcaccaactgccccatcccgccgggctggaactggacctacaacttccaggtcaaggaccagatcggcagcttcttctacttcccgccgctctccatgcagcgcgccgccggcggcttcgggggcatcaccgtcaacaaccgcgccgtcatctccgtccccttcgacacccctgatggcgacatcaggctcttcatcggtgactggtacaagaagaaccacacggacctcaggaagatgctcgatgacgggaaggagcttgggatgcctgacggtgttctgatgaacggcaaggggccgtatcggtacaatgactcccttgtccccgctgggatcgagtacgagaccatcgatgttgag

SEQ ID NO: 35533 - DNA, 508 bp, Zea mays
  Clone ID: MRT4577_132404C.1
ctatttagtcatttacacaatcatgaaaacagaacgtacatggcactgagctaaagattgaaacaataccaacgactcatgcatgggggctcaggctatattgtccggtcacaagatgctgggcctgacattgcaggatgaccacacatagatcatgagcataaacgggctgttgcaactactggacacctacaatcctaccaagaagcagggagcacaaaaccaactgtggattggatggaaggacgacactatagtatctgatttgaacgctgtacacatgactctgggttgcacacgctggtagctgtcggagacgaaggtaccgggggctgccataggagcccaatggggatgggctatggcgacgtgatcaaagaggctctacgacatgctccttgccggggacaccatctgcacgaagaactcgaacatgatgaacatgatacggccggcgaccttgatctcctggatcaagaccgtcgtaatcccgtccggggtcacctac

SEQ ID NO: 35534 - DNA, 802 bp, Zea mays
  unsure (1)..(802): unsure at all n locations
  Clone ID: MRT4577_132405C.1
acatttgcttcattctctcatcccgtccgacacaaatagcgagcgagagagagaaacggccgccggggcaggcagcgagcgagcagtgcggaaaaagggccaaaagaaaagcgaatccccccaagaatcagcagacacgtgtgtggactcgtctcgtctcgaccggggaaggagagagacaatggcgtgcccggcggcggcgctgctcctgccgctcctgctcggcttcctggcggcgccttcgccggcgcgggccaccgacccctacgccgccttcgactgggacgtctcctacgtcaccagatccccgctcggcgtcccgcagaaggtgatcgcaatcaacaaggagttcccgggccccgtggtgaacgtcacaaccaactacaacgtcgccgtcaacgtcctcaacagcctcgacgagccgctcctcatcacctgggacggcatccagcagcggaagaactgctggcaggacggagtcctcggcaccaactgccccgtcccgccggggtggaactggacctacaacttccaggtcaaggaccagataggcagcttcttctacttcccgccgctctccatgcagcgcgccgccggcggattcggcggcatcacggtgaacaaccgtgctgtcatctctgtcccgtttgacatccccgacggcgacgtcaggctcttcattggggactggtacaagaagaaccacacggacctcaggaagatgctcgatgatgngaaggagctcgggatgcccgacggcgttctcatgaatggcaaggggncgtatcggtacaatgactcc

SEQ ID NO: 35535 - DNA, 1162 bp, Zea mays
  unsure (1)..(1162): unsure at all n locations
  Clone ID: MRT4577_132406C.1
ggttgatcctgttgttgcacttcatcgagtacttggcattctaaaggtatctatggcccaaaaggcgttactgttcctgatccggttcaatcagtttgcacgagatggggcagtgatcctttttgctcaggttcatactcgcacatcagagttgggtcttccggtgctgactatgacattctttccgagagtgtgaatgaccgactcttcttcgctggagaagctacgaaccgagcgtaccctgcaaccatgcacggggccctattgagcgggttaagagaagcttccaaaatctatcgtgcctcagatagcttagtgaattatgaccagaagaagaattcactgccaaaaagcctcaaaccaccagatggtgcccttctagatctcttcttggagccggacctagcattcgggagattctcgttcgtgttctcctcactgacacccgacgatccagcggctccagggttacttcgggtttcgctcgacaagcgtttccttctgcagcccaattataatacagagctaaagggcgaccaaaaggatcacagccacagccacgcatctggggccttccatctgtacgccgctgtctctcgggagcaggcagatcggctacaaaggtcaagcgaagatgacagaactaggttaggagtgttatgcaaggatcgtactgtaaagctaatgggttacgatagtacttgcgacgtaggtagcgatctgatctcgagcatcttgggtgcgcggaaagccaggaaactcctgcagcacccaaagaactccaagatcccgcgttgatgtgtacccagttcctcttttttttcccctttgtagaacagaatgcatttttttgttatgtacacaaggtacgaagggccggccgccggctggtggagctcagattttgctgtggcgtgtacaggctacgaactgtgacgcttcggcaggaacgtaactgagatcctccatgttctggtcctcacttgtaaaaattgccgttcatgtgacttcagacttcagttgattagatattgttctgtggatttaactgcaggccccattgtgatcttgctctaaaaaaaaaaaaaaaaaaaaaaaaaaaaaaccccccccccccccccggcggccgtntagaggtccagcttagtagcgtgcaggacgt

SEQ ID NO: 35536 - DNA, 248 bp, Zea mays
  unsure (1)..(248): unsure at all n locations
  Clone ID: MRT4577_132407C.1
cttctctgccttttgctcggnaacgcacacacagtcccggttccccgatgggggtatgcccctgcgtcgatccaagatgcagatcgttcggcaagactctcactggaaagactatcaccctcgagggggagggctgtgacaccattgacaacgtgaaggccaagatccaggacaaggaaggcatttcgccgggccagcaacgattaatcttcgctgggtagcacttcgaggactgtcgcgcactgggc

SEQ ID NO: 35537 - DNA, 268 bp, Zea mays
  Clone ID: MRT4577_132408C.1
cgacgccacatgccaccgcgacttcattaagaacatgatcacaggcacattccatgcggactgcgccgtgctgattgtggccgcatgagtgggtgagttcgaggcaggcatcttcaagaatgggcagacccgggagcacgcgctgctggcctacacgctgggcgtgaagcagctcatcgtgggggtgaacaagatggacttcacggagcccggctacagcgagaagcgctatgatgaaattgtcaaggaggtcagcgcctacattaag

SEQ ID NO: 35538 - DNA, 164 bp, Zea mays
  Clone ID: MRT4577_132409C.1
aacacgtgggcaattctcaggtctctcggcgacttactcgtcgatcacatcgtgcgcagtgcaacaatgaggacagggtcaactcagcgataagggtatgtttcacaggcttagtcgcattgttttagcggactaatgtggtgtgtcgaagtgcgggcaatagg

SEQ ID NO: 35539 - DNA, 483 bp, Zea mays
  Clone ID: MRT4577_13240C.1
ttacgtcgttctagtagccactggttaaaggaacgtttaactaaattaaaagaaaatatgcaaaaattgggataaatatatctaaattaagcatggcatcataagcattggcattgcatatgtgtgacacacctagagtgcattcactaggcaaaaatctcaaacaagttgtattgttttactgtttttgcaaatggaaccctggttaatggacttaaccctaaatagtagttaaaggggtgcaacttaacccaagtcaagaaaaccaaaagactttagggtaaaagtcataaaatgaccctaagaatcaacttgaatcactcttgtacccctgggataccaaaaaccctaagtggaacccaggaaaaccctaaaaccaaaccctaagggcttatatgcaaaattagtccacttttggactaaagtgcaaaaaccaagccaataagtgtcttaaagtctttggttcacaaatatgtgaattta

SEQ ID NO: 35540 - DNA, 386 bp, Zea mays
  Clone ID: MRT4577_132410C.1
caaaatgctttttacggggggggggttttttattttggaagggtaccccgccaccaagcagaaaagtgaaaccttattaagggacaaagttcgaaaaaaaaacggggcgcaactagaagggggacaggccccggcttgttaaaagggatccgagccatatgaaagggaaaaaagtaaagcactttttccttaaagtgagagaccccaaatatgggctgaagaaaaaacgggagggggcttttgggcccaaattttgtgtaccggggtacaaattgaacaagatggggaaaaacaaggggcttttttttttccaaaaaaacccattgggaaaaaaaaacaagccaaagggggacaacgaaatgggccataaaaagctagggcctaga

SEQ ID NO: 35541 - DNA, 456 bp, Zea mays
  Clone ID: MRT4577_132411C.1
gggaggaaacggggaatttttacaaccgggggagggaaaccaaaggccaaaagcgggggtggcccggcccccggttggggcagggaatatggacaaaaaaccccaaaagagggggttttgcataaaaggggaagggtgcacaggggggcacgggagctggcaagcaaaacccaaggggccgccgggggaaggaaaaacaaagggggggggtgtcggcctcctcctaaaaagggccgggggggggccattttggggggggggggcaaccaaaaaagcgcgcgcgccccctttggggaggggttgggcgccaacctcttcgtttggggccggtggagaattttccacaaaaacgggccgttctttttcccccacctttgggacctgggggggggttttaaaaagaacccgggggcgccgtttttttttttattttgcttttcaaggcggggggggggg

SEQ ID NO: 35542 - DNA, 583 bp, Zea mays
  Clone ID: MRT4577_132412C.1
cctttccacgccatgtgctcaattctattgtctgaccgagtctttgtcaggccgttcttgtcttattgtttgtttcatagctgttggctagcgtatcgcttttgggtctctctcgaaagtcttatcgtttttagttattctccatcccatcagttcatcatctccgccagcttccctccatcgataaccaagctgtcttgaggccctcactcagcttctgcgtacccaatcaacatctagctactcatagcaccccatagcatccatagctaccttagctttcattcatccatagcctaagcatcctatctcgcggtaccttacattattagttgcgccacctacaagcgcttcagccatgtttggaaacttcacctccttcgccggcattccggccaagagcaaggttgatcctaaggacgtgccgccccctacgccggttactcttcctcgcttccaaccttttgctcaggacgacgatgccattgatgaatcgtctgcactatctactcttctctgtaacactggaagatcaactgcggctcttcggccgtcgggtttctctgccattggtcttaatctg

SEQ ID NO: 35543 - DNA, 501 bp, Zea mays
  Clone ID: MRT4577_132413C.1
tcccaagcccagggcgcgccgaccgacgagggcaggagccaggaagccgagggaagagaccagcggcgacgagcacccaccaggacacacaccagaaaggggagaccacacaaaccaaaatagcaccaagcgcaaggaccagcctgcccgcgaagacaagaaggcaaaacggaaagccaggaagcccaagccgaagaagaagcccaccggccagacacacgaagagccccgggaaagcccgagagaaccaaagacaacaagccaagcgacagcccctgggaggccaaacgcagccacccacgatgaaaccgacagagacacccaacccccccggcacccccggacacaaagccagaagaggaagccatgcgccccgtcccgaaagaaagagaggcgcccccaagaagccggagaacccggaaaccggagcacgccaagagcccaacaagagagcaaaggagccgcacacaaggagacaagccaccaaaccagaaaccaagc

SEQ ID NO: 35544 - DNA, 329 bp, Zea mays
  Clone ID: MRT4577_132414C.1
ggaaaaacggggctgccctactgtttaaaaatgctaacaccgcattgttgccaaaaattgggggggggttttacaagactggtttggggcaaaaagctccaaaaaaaggttaccccgacaaagttaacatacatacatgtggcacacaaaattgttttgaggcttccactggggtttccttgggcaaagttacaacaattatggggtcagctggaagaggggggattcctaccatgccacatgcattaaatggggggggaagggtgaacagtttttttgtccaaattgcctttaaaggaggaattctaatcaccccagcgcattttttt

SEQ ID NO: 35545 - DNA, 297 bp, Zea mays
  Clone ID: MRT4577_132415C.1
gagctctctagtcggcggccgccctttgggtttgtttctgaatcgacattaagtatccgactagacgcaaatgaactagatgggagacgccagatgcaccggctctacaaactagagagcgcagctggaacacgacatgacaaaaaaacgactagaagctttgagacaagaattctgggacctgaagataccatggaacgtacacattaacaacatgtgaggggagaggagggtcaacagttccgtgggcttgagctctgtcctaaacagtgacgaggcaccaagcccgcattgatg

SEQ ID NO: 35546 - DNA, 421 bp, Zea mays
  Clone ID: MRT4577_132416C.1
tctcacgcgtgcggcctccgctctatctgtgatcgcctcagggggtctttcatttccgcgggggcaccacgcactgctcggaccgcgtcgtgccgcccacctgtcgcccgtgcccagacagacaaccacttcctggccttattcgctctccttgggccggacttggcccgacgcctggtatacctccgtacccgacgcctcctgccactcgaggccatcagaatctgcgattccgccttggagccctccgtcggaggtaacaacgcagggcccgacgacttggaaaaggacacggaggtggatgctgttctgatcgggtgacaactagggggcgggtgagttggtggatgaccattccgtagaggtctcacccgctgtcaaggactaggtggaggaggaggtcggggagtcctgttgagct

SEQ ID NO: 35547 - DNA, 3720 bp, Zea mays
  Clone ID: MRT4577_132417C.1
acataaatcgcttttccattttttaacttaaaccaaagaagcattcaatggtgttccacaatttaatttttgatgggcaaagttcacgccccaatgtttgcaaagttcaccgagcacaagagccggtgtttacacattcaggcaaccacaggttgtgagagacccccagcagcagtcatgcgggaaaactgactgttttctaccacaaattttggaattagcattatttgggggtaaccaaaaataaaattacagcaggcacctttttttaccaccctggaaaaaaacttggacgtcgagggcttcaaaggtttttcgatgccggaccaacaaacaacataatcagcacagaacaaattactacatttatatatgtagtatccgcaccagagtgctaacaaaagaacatagagacttctccatacacagccaagccaaacctacccttgttgatgagacagcaattttacacattgaggattttttttttttttttttttttttttttatatgcaccaatgcaaagaaaaatatatatatgagatatctgagaatagtacagtacagatatatcaaggttcctatcagcctggatccatctatgagcttcaactgaagaagcatacaatgctgtaccacgatgatataccatgggcaaagcacacgcaccaatgttaagagccgctgttaacacatccaggcaagcacagctgctgaagacccaacagcggttccaggaacctcccctgcggcaaaactgactagtccattcccagtctacaaccacaaatcttggaatcagcatcatgtggaggtaaccaaaaataaaattacagcagccacctttcaccaccctggaagaaaactcgcacttgaaagacgagggctcccgaggaaatcccaatccagaccaacaaacaggaagctacattagagaaagcagaatcaaaacaaggaacactacgaatctaccatctcgtcttgcaattcgctaggggcaatcagccccggaatggcaagcattcgttggcgctccctttgctcatttgggcagcagcctcgtcctcggataaaaactgtctgtctactaccacaaatcttggaatcagcatcatgtggaggtaaccaaaaataaaattacagcaggcaccttctttcaccaccctggaagaaaacttggacgtcgagggctccagaggtattccgatgccggaccaacaaacaggaagctacattagagagctgaatcaacaaggaacactacgaatctaccatctcgtcttgcaactcgctaggggcaatgagccccggaatggcaagcatacgttggcgctccctctctctttgggcagcagcctcttccgcgtatagatccttgttatcctgaactgagaactccttggactgcaccaggaagtctctaatatggtttttgaagctggaatcctgaagcctggaacttagaaaagaattcaaaaaacaggctaaggccagtctctgcaatatttctctctgtatgtctgaacgcccaattaattgaatcgatcacaagcttcaattgctgacttgaaagctggattaatgcttggaagcaatgggtgccaattgcacgaagcaaagaaaaaaatttgaggcggtgctcaggataatcttcaaagttcttagtaatcatctcaagggtgcactggaaaacagcctcaaatatacgaggcacatcctcaagcatttcccctttgtacctgcaggaaagaattaacctttcgaattgatgcaaaagataaaattaatgagaaatggccacgaatgcagaaaaattttaaccgttataattgatgcaaagatgcaattaatgagaaatagccaagaatggaaatacatgaattcaattgtggctctagacatccgacgtgacttttttaagaggaattaatttaaaaaaattcaggtgcagcttcgtttggaaaaaaatcggcatgtgaccatggtacagaatgaacaaagaacaggcatactatacttgttaatgattgttgcaaacaaggacagaacttcagactcccttgcatcgggtacatttctagcataatcaccaagaacaggatccatcattggtggaacaaactgctttcctaagtgcggtaaatcttctgccttgtccacaaaagtctcgatcaactttagggtttccctcttgacagatctcaatagttttacaaatgatgtccttgaggcaaatggtcctccttcagcgatcgtgcttgatacaagctcgctgtacattctgtagactgttagcatgtccaagaaaattagagaaatctgtgggaagaagtgtggtccaagggagctcgcaacacttgtgtttgtctgtaggatgttgagaactgatctgataacatcttggttcttcaagatatcaatgctttggcttgcctgtccaattatttctgcccacttctgattaggaaggctcatcaatctcttgagatattcatctctcttagtgttgtcagattcagcttggatcatatggccaactgattcgtaaaacgtatgaatctgatgtggctcaagatccgcgattgttgtagcaaggttggacagaagctcagaaacaaatggttcattctcgcccacctgttgtgtcacaaacttgcgcttgcatttttgaacaattttcaggaaggtatcacatgccatatcctgaactccaggatgcatctcatgcatgaactcaaacaatttgttgaccacagttttcaaaaacttccaatgggccctgagaaatcttggatactgaccaacaacatacataatgttacttgcaatcacagctttattgtcctttccctttgtgatttcacagaggtttagcaaatcacgaataaccataaccagaaatctattctcctgctcctctaccatagaacctgatattgatccaatagcccaacagagagtattaaggttattccaactccagtcttctccatttaattgcttgcttagtttcttcaacatctgttgttctgtgtcctcgtgatcaagatgggataaatagatcagtgtttccctcatgatcttgtactgaacaagaacgtcgttgtctttcattgtctcgcgtacaatattgccgttttcgtcttcaacaataagtacttcctcaggctttgccatacggcaaatcatcagcatccgtagtttcgagagtgggccagagtaaagctgtctcctctgtttaacagctgtgcccccatctaccattccaggaaccatctgcgcctgaagccccatcatgcttacagttactgcaggttccatttgattgtgtgcttcaaatagctctaatacaaatacattccagtaatccaaggacaccttaaaaacctctgtatcgtcaacatatgaaattccaataaggtactcgagacccataagcaaagcagcaatattttcttgagttgtttccagtatacgcatgtgattcttaaaaaatgatgtgaagaagagtgcaagattttgtataaacgcctgctcttcagtggaaccattagcatatgcgtccgggattttttcaggaggaagaatagcctgcaactgaatcatgaaaaatgcctcgtgccgaattgtatatgtcttcacatactgcacattataaaaatcaccaaactgaagtgctgcaacctctgttaggcattgaagtgtaagattccgataagc

SEQ ID NO: 35548 - DNA, 323 bp, Zea mays
  Clone ID: MRT4577_132418C.1
attcggctcgaggctcgggttgccatttttgagagctctgaagccgcgaagcatatcatgaaggagcttgcagaaggctcctgtagcggtagtgtctaaagacacttcaccaatagcatggatgggcaggttatgctcgatgattctgagggtgacgatgctgataatgatgatgatggggacagagaagggattagagactactgccctgtccgacatgctgaaatcaaatgatgccggatgctgacgtgctgatatgacagctactttagatgattgctctggaaaatgtaccacacaccgagcatccgcatatggattca

SEQ ID NO: 35549 - DNA, 2246 bp, Zea mays
  Clone ID: MRT4577_132419C.1
cccttgtttttttttttttttttcagaacaaattactacatttatatatgtaatctccgcaccagagtgctaacaaaagaacatagttttttctccatacacagccaagccaaacctacccttgttgatgagacagcaaatctacacattgaggaatgcaccaaagaaaaaaaaaaaaaaggcgtatgagatatctcacagaatagtacactacagacatagtaacaaggttcctaccagcctgcctggatacataaatcgctattccatctattaacttaaaccaaagaagcatacaatgatgtaccacaatataatatatgatgggcaaagtacacgcaccaatgttagcaaagtacaccgagcacaagagccgctgctaacacatccaggcaaccacagctgctgagagacccccagcagcagtcatgcggcaaaactgactgtctactaccacaaatcttggaatcagcatcatgtggaggtaaccaaaaataaaattacagcaggcaccttctttcaccaccctggaagaaaacttggacgtcgagggctccagaggtattccgatgccggaccaacaaacaggaagctacattagagagctgaatcaacaaggaacactacgaatctaccatctcgtcttgcaactcgctaggggcaatgagccccggaatggcaagcatacgttggcgctccctctctctttgggcagcagcctcttccgcgtatagatccttgttatcctgaactgagaactccttggactgcaccaggaagtctctaatatggtttttgaagcttggaagatcaagttttgaactaagaagaccatctacaaactttgtcacctcggttactgtcatgttaggaaatgatgtccctaagagctttatggtgtaatctcgaacaaacatagcattatccgtatattggtaaggtacagaagacgcgtcccatagaggctccgttagaccatcaaccgcacaaaacaagtgttggagcaccgaaacatgaagcttgaaaccaggtttgtggaatgtgtctgtgaggactgcaaaaatctcttgctcaattgtcaaaaagtaggttttgtagaattgattttggaatcctgaagcctcaaattttttcaagatctccaacaatagactaaggccagtctctgcgatatttctctcggtatgtctgaacgcccaattaatcgaatcgatcacaagcttcaattgctggcttgaaagctggattaatgcttggaagcaatgggtgccaattgcacggagcaaagaaaaaaatttgaggcggtgctcaggataatcttcaaagttcttagtaatcatctcaagagtgcactggaaaacagcctcaaatatacgaggcacatcctcaagcatttcccctttgtacttgttaatgattgttgcaaacaaagacagaacttcagactcccttgcatcgggtacatttctagcataatcaccaaggacaggatccatcattggtggaacaaactgctttcctaagtgcggtaaatcttctgccttgtccacaaaagtctcgatcaactttagggtttccctcttgacagatctcaatagttttacaaatgatgtccttgaggcaaatggtcctccttcagcgatcgtgcttgatacaagctcgctgtacattctgtagactgttagcatgtccaagaaaattagagaaatctgtgggaagaagtgtggtccaagggagctcgcaacacttgtgtttgtctgtaggatgttgagaactgatctgataacatcttggttcttcaagatatcaatgctttggcttgcctgtccaattatttctgcccacttctggttaggaaggctcatcaatctcttgaggtattcatctctcttagtgttgtcagattcagcttggatcatatggccaactgattcgtaaaacgtatgaatctgatgtggctcaagatcggcgatggttgtagcaaggttggacagaagttcagaaacaaatggttcattctcgcccacctggagaaaatatgcaaatgtgaaaatcaaaacctggcaaagatctaaggaggattatttatatgtaagaatttgagactagcgaaacaaattttgtaggtcatgatgggtaagttgaaccaaccccgcaagagttcacttttaaaacaacaaaaaaagaaatatcaactacaagcatatagacctctgggaaaacccacgcgtccgcggacgcgtggg

SEQ ID NO: 35550 - DNA, 267 bp, Zea mays
  Clone ID: MRT4577_13241C.1
gtcacccgtctccagcgcctgggcagaggcgccaagcgccggcctctgatacggccacaggacagcgatcttgcaaccctggctaaagactttacgatcagatcagggtgcacacgcgttagtcgtgaccacgtccaaatggacactgttcgagactgatcttcggcacctgtccatgtaggtgttcatgaattaatggttggctacaatgcgctgatagagattcatgagccttctgcattggctggatagggtgaagactttgga

SEQ ID NO: 35551 - DNA, 607 bp, Zea mays
  Clone ID: MRT4577_132420C.1
tggtcttcttagttaaaacttgatctcccagcttaaaaacctattagagacttcctggtgcagtccaaggagttctcagttcaggataacaaggatctatacgcggaagaggcagccgcccaaagagaaagggagcgccaacgtatgcttgccattccggggctcattgcccctagcgagttgcaagacgagatggtagattcgtagtgttgctttgttgattcagctttctctaatgtagcttcctatttgttggtccggcatcggaatacctctggagccctcgacgtccaagttttcttccagggtggtgaaagaaggtgcctgctgtaattttatttttggttacctccacatgatgctgattccaagatttgtggtagtagacagtcagttttgccgcatgactgctgctgggggtctctcagcagctgtggttgcctggatgtgttagcagcggctcttgtgctcggtgtactttgctaacattgatttgctgtctcatcaacaagggtaggtttggcttggctgtgtatggagaaaaaactatgttcctttgttagcactctggtgcggagattacatatataaatgtagtaatttggtt

SEQ ID NO: 35552 - DNA, 338 bp, Zea mays
  Clone ID: MRT4577_132421C.1
gggagttgcagacatcctgttcatgagctcgcgttgaatggcataaattgtgttcgaacgttcttctttgagcatgtgttcatgagctgtgtacagtctctttgaaagttgtttgggattccacactgactttggtctccgttcccatgggttttctgcaggagcccagcaaaccccggcgagcaagctaaagacggagctttgagcgacgatggatggtagatagcattgtcaggagagcaggctgaacatatgcggtgggggcgcagcagcgacatgatttcagcaagttgatcaggtcaggctacaaacggcctgacaatgctcatgtgcatcgc

SEQ ID NO: 35553 - DNA, 1278 bp, Zea mays
  Clone ID: MRT4577_132422C.1
cgccacgggacaggcatggcgagccgcgagcggcagcacacccgcagctacgactacgactacgagcacctcgtgctcgacccggcgtctctgggcgtgccgtgggccgacccggccgccgtggagatcccgccgcagctcctcgccgcgctcggggagtacctctccggctccgcggcccgcggggacgtcgaggcggaggcggacgacgagttcatgatgcacgagttcaaggtgcggcggtgcgcgcgcgcgcggagccacgactggacggcgtgcccctacgcgcacccgggcgaggccgcgcggcgccgggacccgcgccgcgtcgcctacgcgggggagccgtgcccggacttccggcgccgcccgggcgccgccgccgccgcgccgcgtgcccgcgcggggccgcctgcccgctcgcgcacggcaccttcgagctgtggctccacccgtcccgctaccgcacccgcccctgccgcgcgggcgccgcctgccgccgtcgcgtctgcttcttcgcgcacgccgcggccgagctccgcgccgccgccgccgccaagcccaagcccaaggacgggtgctctccgctcgcgctctcgctctccctctcgcccaagtccaccctgcaggcggcgctctgggagtcgccgccggtgtcccccgtggagggccgcaggtgggtcgacgagccgtcggaggacggcgacgccgacgccgagatggaggagctgatgctcgcgatgcgggagctcagcttcaggaaggcccaggcgtcgccagcgccggttctgcctgcagtcacagaggacgacgggccggacttggggtgggtgtcggagctggtgatgtaggcgaggcatgccagcgcctgcccggtgccgacgcccgaaattaatcaaagccaagacgtggacgccgccatctccagaggcgcctctcgccgtttggaacagcttcattaagcaatgtttatttttagcatttccatgaattgcatcattcttctgtggatagaccaaacatggtgcaagtattaatactgcaatctgtaagcgtggcgtgtgtgccccccttctcttcttttttttccggagaccatggcctcactcaacatgctactgtcgtccatggttttcgttcgatcgtgttactactaccagtaccagtgtgcatctatataccaagtgcagttggcagtgtgtgttccattccatccctgcagctgcagggatcgatgttgcatttgcaaaataggaacccaagcaaatttgcctctca

SEQ ID NO: 35554 - DNA, 386 bp, Zea mays
  Clone ID: MRT4577_132423C.1
gattgaagtgtatgttagggattaaaaagaaaattagttcatattacacttcaatacaccttataccacctcaatccactccaatccaagattacccaaacaaaccctaaaacagaagagcaatttcacttgggaatatggcgagttgatcaatcttcagatcaatttcacacacctataaataggaaatttcacacacccaaaaacaaaacaaaaaactattccgttttcgaatgtgcctccacacagctggcagaaatacccaacagtttctcgatacacagcttgtcgatgagacagcaaatctggatccatctatgagcttcaactgaagaagcatacactgctgtaccacgatgatataccatgggcaaagcacacgcacc

SEQ ID NO: 35555 - DNA, 498 bp, Zea mays
  Clone ID: MRT4577_132424C.1
ctgaaaacttgaagtcatagtgcagatttgacaaatctgtaggattcacttactgctggtttggccagaacatagatgatacccaatgaagagctaaaatatggaacctgcatgatatagtagcagataaatggacaaagcttctgtaactgtaccaccaagtggtaaatccatcaagatgcgatattttttttcttagagcatcaattagttgaggttcgttaacgaaaatataaatcagttgatgacttcagtaaatttgattggatacatacccacgaagcccatgcaacaccataaagcaaagcctggaaaaaaaaattccccaaaaccagtgccgacgctgtagaggaggaccagaggaggaggaagacgccctcgtggcgtggctgaaggcgcagctgtccttgccgcagccgcccttgggagagggggtcgacgggacgggcggaaagggaaggagacagaacggcatactcctcctcgagaccgggagcg

SEQ ID NO: 35556 - DNA, 986 bp, Zea mays
  Clone ID: MRT4577_132425C.1
gatcaatcttcagatcaatttcacacacctataaataggaaatttcacacacccaaaaaacaaaacaaaaaaactattccgttttcgaatgtgcctccacacagctggcagaaatacccaacagtttctcgatacacagcttgtcgatgagacagcaaatctacacattgagaaatgcaccaatgcaaagaaaaatatatatatgagatatctgagaatagtacagtacagatatatcaaggttcctatcagcctgccttgcctggatccatctatgagcttcaactgaagaagcatacaatgctgtaccacgatgatataccatgggcaaagcacacgcaccaatgttaagagccgctgttaacacatccaggcaagcacagctgctgaagacccaacagcggttccaggaacctcccctgcggcaaaactgactagtccattcccagtctacaaccacaaatcttggaatcagcatcatgtggaggtaaccaaaaataaaattacagcagccacctttcaccaccctggaagaaaactcgcacttgaaagacgagggctcccgaggccagaccaacaaacaggaagctacattagagaaagcagaatcaaaacaaggaacactacgaatctaccatctcgtcttgcaattcgctaggggcaatcagccccggaatggcaagcattcgttggcgctccctttctctttgggcagcagcctcttccgcgtatagatccttgttatcctgagctgagaactccttcgactgcaccaggaaatctctaatatggtttttgaagctcggaagatcaagttttgaactaagaaggccatccacaaacttggtcacctcagctacagtcatgttaggaaatgatgttcctaagagttttatggtgtaatctcgaacaaacgtggcattatccgtatattgatatggtactgatgaagaatcccatagaggctcagttagactatcaaccac

SEQ ID NO: 35557 - DNA, 718 bp, Zea mays
  Clone ID: MRT4577_132426C.1
tggttaccttgcctaatggctgtatatgatgacataaagaagttagagatatgtgaatatgtaatccattttgttgaatgcatcagtagtataagaaataacctctttgctgtcactactttgtttttttatgtagatgtccctcaaacgacaacatgattttgaatatctcattgtctttttactaaattactttgtatttgtgacagatctgtcaagagggaaaccctaaagttgatcgagacttttgtggacaaggcagaagatttaccgcacttaggaaagcagtttgttccaccaatgatggatcctgtccttggtgattatgctagaaatgtacccgatgcaagggagtctgaagttctgtctttgtttgcaacaatcattaacaagtatgcctgctctttattcattctgtgtcatggccacatgtcaattttttttaactaaacagcacctgaaaattttaaaaactgacccttaaaaaagttacgttggatctctagagccacaatctaatcatgtattccattcttggctatttctcattagttgtatctttgcatcaattctaacggttaaatttctcctgcaggtacaaaggggaaatgcttgaggatgtgcctcgtatatttgaggctgttttccagtgcactcttgaggtaggaatactattactaagttgcttgtgttactgattttcttttcagtacatatt

SEQ ID NO: 35558 - DNA, 269 bp, Zea mays
  unsure (1)..(269): unsure at all n locations
  Clone ID: MRT4577_132427C.1
ctgggtttctttttttttttttttttttttttttnggagaggaagcaaacaacaaaggccgtgcttattaaagccaacaaaccagtgttttttgtgaggcaaaacaaaacacaagaggggccgccggttaaaaacaaagggtggacattttttggggtaaatttgcgggggaaaaagaaactttagttcttgttgaaaagggaagggttaatccatcccagaaaaaacagaccaacttcttgcgtgagctcaaggggaaaattttttgg

SEQ ID NO: 35559 - DNA, 475 bp, Zea mays
  unsure (1)..(475): unsure at all n locations
  Clone ID: MRT4577_132428C.1
accggtnccggccttcccgggctgttggcgccgttccggctctggccgcggcctcgtggttgggctggttgtctcctgtctcctgtccagctctcccgtccttcgttgccgccgggctgcctgccgtcgcctacgctgtggttagggcgcgtgccatttccggtccttccggtgcccgtgggtgctgcaacgatgtccttgtggcgctcgcgttcggggagcgcggtcctcactctctcggcgccgcccgtcggcgactctggccgcggtacgctcacggtcagggcgggggctggcaacttgctgcgtaacgcccgcttgcggggctattcgccccgtggcgcctttctgtgtgtcgcgggtcgcgcaccttggcttctcctgggtgtgctcgcggggcctgtgctccttcgtgggcatcgntgctggtctgggcgccgccgtggtgtacggtgtccacgtgctctcctttttc

SEQ ID NO: 35560 - DNA, 462 bp, Zea mays
  unsure (1)..(462): unsure at all n locations
  Clone ID: MRT4577_132429C.1
gttttctttcaggcgtggccgtaggagctgggtggcaagtgcgtgtggcgatcataaacgtcggttgctactacctagtgggcattccgatgggtatcctgcttgggttcaagctaaaacacggcacaatgggcatatggatgggcatgttgacaggcacgtttctccaaatgtcaatacttctcgccactatcttcacaacaaagtgggataaacaggccgcactggcagaagtgagaatggcggagtggggaggaaagaacgagaacctaacactgacggaaacaacacatacagatgatctgatggctcctgtgttggaacctgaccgccgacacacggcgtgtccgtcggggccgtccgcacacacggngcgcccacaccagctgtcgggctgcgacacacgctgcccgacgtatagcagcgggctttaggtctcttgggccaacactcccccaaaaa

SEQ ID NO: 35561 - DNA, 167 bp, Zea mays
  Clone ID: MRT4577_13242C.1
tcgatgcgagcgtataatacgttttgttttttatgaacgagctacaccaatgggacggcttgtttttgtgaaggcggattcgaggatgaggaaagcgcaaagctacttaatgtgactgagagagacttataatcagaaggattacaacatgtgctcataaagccata

SEQ ID NO: 35562 - DNA, 783 bp, Zea mays
  unsure (1)..(783): unsure at all n locations
  Clone ID: MRT4577_132430C.1
cattgggtacctcgaggccggccgggaatataccgccacctactctgagttcgcgcctgcgaacatttactataacaaagaatcccctgtctgatacacggtgcgcctgcgaatgctccagtcctatctggcacgaccaactgcccgcagcgtgcttcataagagcgttggatttggtggcgcaagttatatcagcctgagcctcagcactcccattcgtatcgaaagcaaagcgaattccaccatggcggccccggatcatccagaaggcgctcagggaggccagcaaagtatgctggcaagccagcgcgcaaaggagcaaggagaggcacaaggtcgcttctccaaatggttcccgctgtcagcaaaggcaggcttcgagcagtggtgggctggcctctcccctatggcaaccgaacaccgcgtcctctcttttgtcccccacctccagagcccaccgacacacacgcaaacgggcgccgcctcaggctctgcagtgccttcgtccgtcgacctgaatgcgccaccgaaacaccccgaagaccacaccacgactactgcggccaatgacccttatggcccacgacgatggaactcgcagatggtcgagttgagtggcaaggatcgcgcgctcaatgagttttctgtcgagcgcttaagcgaggaggtggagaacaatctggtcatgttgcatggctatggtgctggattgggcttcttttatcgcaactttgagggcatatcgccgtgcgnnagggtggaagtctatgcactggatctgct

SEQ ID NO: 35563 - DNA, 201 bp, Zea mays
  Clone ID: MRT4577_132431C.1
gactcaccgttccagtcgagtccgcagcaacgttattctcttccaatagcagtctccgcgggggctgaagttatcaagcttcacgatgccaccctctcgttcctcggacagactccggaagtcgctcccatcccagttcctgtttcctggcgtgataaggacctcctcgcgctggatctgcccgccttcgtagcgcacccc

SEQ ID NO: 35564 - DNA, 277 bp, Zea mays
  Clone ID: MRT4577_132432C.1
gcagcagagttcgacatagtcagttggttgaatggaagcagctgttgcaagtaggcagcagggtttgccacagctagttgagtcagagctggtacagctttttttttttttttttttttttttttttttttaatcaaaatagggggggggggaccaaaccgacccttacatacactgatactgacacatacaaacagacacacgcacatactgagagacacaagcatgtcgacacacacatacgaccataatatatagtaggcatacacactaaaac

SEQ ID NO: 35565 - DNA, 351 bp, Zea mays
  Clone ID: MRT4577_132433C.1
tttggggttgttttgactagctgaaggcttaacaaacacaagcaacttgggaatacacaatagctaccaacaagactcatccggtccataacggtgtaccggaaaaaacaacgtttggaatatcggaccaaccatcaggaaaagcaaatacaaagggcacactaattactaaaactgaggaagtcgcactcaacgcaaaaacagctcattggaaagcaatatttatatgaataatccttcaaacaaccttcaaattaagaagactacctaaagctatttgaaccctcacttaatcaaaatacactgaaaatacaacaagacggaggggcttaaatatgaatccaatgattc

SEQ ID NO: 35566 - DNA, 104 bp, Zea mays
  Clone ID: MRT4577_132434C.1
aaacgtaagatccagtctttggcgtgtttctcaatttctgataagtaactagcagaacttacaatcatgccattgtacgaaatcagcacagcgatgaacaaact

SEQ ID NO: 35567 - DNA, 400 bp, Zea mays
  Clone ID: MRT4577_132435C.1
caaactcctcccctcgccgtacccctatcccgatggcgatcggcggcggcggcggaggcgggagctggagcatccacggccgcccggacgtcacctcccgctacgatgtcctcggacgcgctggctctggcgcctacgccgacgtctaccgcggccgtcgccgctccgacggcgcaccggttgccctcaaggaggtccacgacgctgtcagcgcacagcgcgaggccgacgccctcctcgccgccgcctctgagtcctcccctcatgtcatcacgctcctcgaccacttccccggcggcgaccacgacgacgacgtcctcgtcctcgagtggctcccgctcgacctcgccgccgtcgtgcgcgaagggaggcgcgcgggcggtctccctgccggccagct

SEQ ID NO: 35568 - DNA, 330 bp, Zea mays
  Clone ID: MRT4577_132436C.1
aagaagaatttgccaacccattgttcagaggggtcatccatatgatccccggagggtccaatgtagaatttgagaacaaacgataaaagaaagattactaccgaagggtcaatcacgtttcacgtcgctctcactggaacagtggtccaaacgaagtggtttcatatcccgcttactttcgatgtaagggacgttgaccttcacagcgcgccccacgatttttttctcgaacgcgcaggagctgcgcatcatttatttaagaggagaaaaaacggcccaaaatggacctagctacaaagcctacaaaaggcaccagaaaacacactcaca

SEQ ID NO: 35569 - DNA, 444 bp, Zea mays
  unsure (1)..(444): unsure at all n locations
  Clone ID: MRT4577_132437C.1
ctggccgggttaaaaaaaaaaaaaaaaaaaaaaaaaaaaaaaaaaaaaaaaaaaaaccccaggcctcatcctcgcttttggatccgattgggttttcgtaacttggtgaggggacttgaggggtcttcggaggtggatttgattttgggatttcggttcagaagattttgcgggagggggggcaattggcgacccgcggggnagggtgatacaagtgcaaacgctgcgggtggcattgggagcgccggcaaggccacttggtcgatccgagagagggtggagggtaggcgccttccgcaggcccatggggaggtgccgcgtcaagaatcctctttcaccttcgcttctgccacaccggacgttctactttctgggagggccaagggggacagacttcccggtgttcccttcggatcttttggcacacgaggcttgggaggtatc

SEQ ID NO: 35570 - DNA, 645 bp, Zea mays
  Clone ID: MRT4577_132438C.1
gtttgtcggatgaataaagtaaaattcacaaggactgcgggtattagcttgtttatcaagacatgcgtctgcagtttggttgctatttactgtttgttatgctcagtatggtggtgtgtctcatatagacatcgaagcccagtttgccaattcatgtactgtattatgctatgccatggaacctactaacttaggtgttcagtcccagccatgtgttacataagtgttatgctaatgagtaaaaattgacatattggttaattaatatttccaaaagtagaataagaaaaaatgctgtaaaagatcacttcaaagacaaattcatctttagaaggtttttcaccatctgcgcgatagatcgtctaacaactgtatgcaccaagaaggatttgtatttctatggagtatagttagcaattaaatcattctagaatgaatcgaaacacccccttcataatcggaactaaatgactaataaacttaaaagtacggaggatatgtgatgaatgatggcagttagcattttgatacttttaataggagcataaagtgctcgtttttgtatttgcaaaagggatttaaatgaaaataatgaatcgatgcacctcttgtaagttggtacattagcatgatgatctactgcat

SEQ ID NO: 35571 - DNA, 211 bp, Zea mays
  Clone ID: MRT4577_132439C.1
ccaataattaagtgcactcctatggctcggactctatgaaaaaggacctgactactcattgggtcatatataatttatataaagaaaacctaaaacattaactaaaacatatataaattaactaaaaacctcaaatacatataataaaaaatattacgaccacaacatatatagtttcagattgttactaagtttcaatcatagttataac

SEQ ID NO: 35572 - DNA, 338 bp, Zea mays
  Clone ID: MRT4577_13243C.1
cccacgcgtccgcccacgcgtccggaaaaggggcatgggacacatcatgatcatggtatggtcttgttcctgcaaggacaaaaaacatagattagttatcttcagcatgtatgttcttttcttattttacacaactagcaaacatacgtttgtgtagcaagttagcaacagaatgcacagcttgttatgtagtcacatgggcgatttgtggcttggagatttattcaatgatcgtgccatctgttgcaattaaaaaaaaaaaaaaaaaaaaaaaaaaaaaaaaaaaaaaaaaaaaaaaaaaaaaaaaaaaaaaaataaaaaaaataaaaaaaaaataa

SEQ ID NO: 35573 - DNA, 457 bp, Zea mays
  Clone ID: MRT4577_132440C.1
gggaaacgggccaaaaaataaaaaccccccatgggggcacaaacaacggccctttggcctaagttggacgttacggaaagacccaatatttaacccccacggcacattggccaggaagacaacacgaacaaccgggcaacgggaaagcaataaaaggcccccccacaaacaacagggggcatgggcatccccaattgggttttaactttctcccaacaaaggccaggacggagccgataaagcccaggggggccaaacaaaaacggacgcgctggaccagggcggacaaggggaagccaacggggcaaaagcaagccccgccaaaaggctccggaaggggccgccgtggttcccccaggcttttcccctcaaatgggctccaccgggtaaaaagagaggcccttggtttccggcacggacggggccacaaaagaaaaggccagccccgggaaccccg

SEQ ID NO: 35574 - DNA, 303 bp, Zea mays
  Clone ID: MRT4577_132441C.1
atagtgagtcgtattaaatcttgcgactcacttgtgggatccagagaaaattctacgactcaacattgcaacgggtgaagtgctcaaggaacatgcaatgcgtcgacgtgcaggacaacgatctcagtcgtgctgcgagtgcacctggacatgctggcaatgtgtgcagcgttatgacgtacgacgagctattgatctgacatcgacagcatgtcggcaagtcaagtgcagaacaccccaggatcagtcgtggatggatcggggaccgcaccctgtccagcatacgacatgacgaccgcggtc

SEQ ID NO: 35575 - DNA, 151 bp, Zea mays
  Clone ID: MRT4577_132442C.1
acgttatacactatactacccttcccttttatatctttttaacatacgatcatctgggccctggaccaaatacacctatattttctttcttgcacaattacaatcacccataatctgacacatacacacatatttcaccaaaaaccgattc

SEQ ID NO: 35576 - DNA, 694 bp, Zea mays
  Clone ID: MRT4577_132443C.1
aggtcagcatactgtccataaatatctataccagtcaagttcactagttgtaatcatgtatttttgttgtctttttttcttctttctaaagcccaagtgtggtgaaggtgaagccatgtattgaagaattgcgatcgtccgatggtcgaggttgtacctatatacaccgctggtagcaagtatccatcgagtacctgctcacccgaggataactctgatctcttctatgctgctctcggcggtcttggtcagttcgggatcataaccagagcaaggattgcacttgagctcggattttgaaagcttcaccgaagaccaggagatgttgatcatggcagagaactcctttgactacattgaaggttttgtcatcataaacaggacaggcatcctcaacaactggagggcgtccttcaagccacaggacccagtccaagcaagccatttccagtcagatggaagagtgctatactgcctcgaactaaccaagaacttcaatagtggcgacactggagtttttggacagggtgcacacctctgagctgaagctgagggcacaaagcctctgggaagttccacacccttggttgaatcttctgataccgaggagctcaatccgcagatttgctacggaagtctttggcaggatcctagtgggattcctttcttcagcaccgtctctctcaggtcacgg

SEQ ID NO: 35577 - DNA, 188 bp, Zea mays
  Clone ID: MRT4577_132444C.1
ttttcctatttgcaccgaagaaagcatagaattgaaggattgtaataaagctggagcttggtagtccagtactgcggtgtattttattagctttaatcaaattttggagcgcctgaacagttttgctgtgatataacttattgtatagataattgcgactttcacatttggattattcttctggtttt

SEQ ID NO: 35578 - DNA, 1887 bp, Zea mays
  Clone ID: MRT4577_132445C.1
caggcatcctcaacaactggagggcgtccttcaagccacaggacccagtccaagcaagccatttccagtcagatggaagagtgctatactgcctcgaactaaccaagaacttcaatagtggcgacactgataccatggaacaggaagttgctgtaattcggcaccagctctagtcttacctcgttgcacctcaagaaacttggcgcgcaaccaggaaaccccctcttctctctctctctctctctctctctctctgccttctgattccaagctccccaactgcccagcaccaacctgccgaactcccctcctttttgttggtttgtcgaattataaattgagcccggccggctgactaccatgaagccgccatcactggtgcactgcttcaagctgctggtcctgctggcgctcgccaggctgaccatgcacgtccccgacgaggacatgctatcgcccctcggcgcgctgcgcctcgacggtcatttcagcttccatgacgtctccgccatggcgcgggacttcggcaaccagtgcagcttcctgccggccgccgtgctccacccaggctcggtctccgatatcgccgccaccgtgaggcacgtcttctccctgggcgagggctcgccgctcaccgtcgcggcgcgcgggcatggacactccctcattggtcacttccaggccggccgggcctagtggcgtcactgataccatggaacaggaagttgctgtactgctatctcggcttagattcatacagtctactctattccacaccgatgtcacgtacctggagtttttggacagggtgcacacctctgagctgaagctgagggcacaaagcctctgggaagttccacacccttggttgaatcttctgataccgaggagctcaatccgcagatttgctacggaagtctttggcaggatcctgaaagatagcaacaatggtcctatattgctttatccagtgaacaaatcaaagtgggacaacaaaacgtcagtggtcataccagatgaggaaattttctacctagtgggattcctttcttcagcaccgtctctctcaggtcacggcagcattgcacatgcgatgagcctgaacagccaaatagtagagttctgtgaagaggctgatattgggatgaaacagtatctagcacactacaccacacaggagcagtggaaaacccactttggagcaaggtgggagacatttgaacggaggaaacacagatatgatcccctagccatcctagcaccaggacagagaatattcccaaaggcgtcactcccattgtctttgtgacggttcctgctatttaaaggcttctgtagagcatacattgtacaaaagtgtaggtaaaagtatcccctgtaaagacaatatctacggaaggtagctagcctgaagaacacagcatagcgactttttcagtggccaaagatacctcaaagcagtacttcaatgtggagcaacgtcacctgaaccctgaaggtggtgagtgcaactttggaggcaatcactggtagtggagcctggagggttgtagcggtccaaggaacctgtctgttgttacagcgttgagatgagctgtgctgatcaactgatcactaaccagtgtcccgaggaaatcatgttggtctgtatgtattttccgttaacaacagtgcagaagtttgcatgagggtagtgcattgattagcaaatagcactgcctgttatttcacttgtaactggcatctcatctcaaggagagcctgcgtaactgtagcaggttatattgttttccatgagtcagaaactcagaatattaatgctcgtgcaaaaacagtgtagtcgcttatcaatcatggtgttcagaaacagaaaaactcttggaattc

SEQ ID NO: 35579 - DNA, 840 bp, Zea mays
  unsure (1)..(840): unsure at all n locations
  Clone ID: MRT4577_132446C.1
ctcatcactggtgcactacttcaagctgctggtcctgctggcgctcgccaggctgaccatgcacgtccccgacgaggacgtgctcttgtccctcggcgcgctgcgcctcgacggccatttcagtttccacgacgtctccgccatggcgcgggacttcggcaaccagtgcagcttcctgccggccgccgtgctccaccctggctcggtctccgacatcgccgccatcgttaggcacgtcttctccctgggcgagggctcgccgctcacggtcgcggcgcgcgggcacgggcactccctcatgggccagtcccaggccgcccaggggatcgtggtcaggatggagtcgctccggggtcctaggcttcaggtcaacgacgccggcgtgtcgccaccgtctgtcgatgctcccggaggagagctctggatcaacgtgctgcgtgagacgctcaagcacggtctggcacccaagtcgtggacggactacctccatctcacggtcggtggcaccttgtctaatgcgggggtcagcgggcaggcgttccgccacggaccgcaggtcagcaatgtcaatcaactggagattgtgacaggaagaggagatgtcgttacctgctcacccgatgataacgctgatctcttctatgctgctctcggtggtcttggtcagttcgggatcatcaccagagcaaggattgcacttgagcctgctccanagatggtgagggtggataagagttctttactcggattttgaaagcttcaccgaggaccaggagatgctgataatggcagagactcctttgactaccnntgaaggttttgtcatcaaaaacaggacag

SEQ ID NO: 35580 - DNA, 508 bp, Zea mays
  Clone ID: MRT4577_132447C.1
attgggacctcgaggcggcgggagggcgtcccacctcagacaaaatggacagttcttgcctctcgcagaccgagcgcaccttctgtgcagctgcaggtctatcttgacggccgcacacaatgcatcccgctgccctggggcgctggtcaccacctgcgataacttttcgctcactacagagcttcgacccgatatatagaggcgtgcgctatcggacaccgagatggcgtatgaataagacataggatccacacatcgcgtcttggactgattctattgattgggcctcatcaatgagcagagagtgtacggtatgcatcaaccagacgaagttcatgtggaaagtaggtctcttctgagactatctcgattgacagcgattctcgtgagagaacatgatcaccatcactacacatccatgaagctgtactgcttgaacctacgaaacacctgctactggataagtgttaccgcgattatgcaagggaactcctgctactccatatcc

SEQ ID NO: 35581 - DNA, 955 bp, Zea mays
  unsure (1)..(955): unsure at all n locations
  Clone ID: MRT4577_132448C.1
ccctcttctctctccgtcttcctcttcttaccttgtcgcgtcatctcatcaagaaagtttgctcgacaacaggaaaccccatctctctctctctctctctctctctctctctctctctctgccttctgtttccaggacgtcccaactgcccagcgccgaccggccggccaccatgaagccgccatcatcactggtgcactacttcaagctgctggtcctgctggcgctcgccaggctgaccatgcacgtccccgacgaggacgtgctcttgtccctcggcgcgctgcgcctcgacggccatttcagtttccacgacgtctccgccatggcgcgggacttcggcaaccagtgcagcttcctgccggccgccgtgctccaccctggctcggtctccgacatcgccgccaccgttaggcacgtcttctccctgggcgagggctcgccgctcacggtcgcggcgcgcgggcacgggcactccctcatgggccagtcccaggccgcccaggggatcgtggtcaggatggagtcactccggggtcctaggcttcaggtcaacgacgccggcgtgtcgccaccgtctgtcgatgctcccggaggagagctctggatcaacgtgctgcgtgagacgctcaagcacggtctggcacccaagtcgtggacggactacctccatctcacggtcggtggcaccttgtctaatgcgggggtcagcgggcaggcgttccgccacggaccgcaggaagaggagatgccgttacctgctcacccgatgataacgctgatctcttctatgctgctctcggtggtcttggtcagttcgggatcatcaccagagcaaggattgcacttgagcctgctccaaagatggntgaggtggataagagttctttactcggattttgaaacttcaccgaggaccagagatgctgataatggcagagaactcctttgacta

SEQ ID NO: 35582 - DNA, 292 bp, Zea mays
  Clone ID: MRT4577_132449C.1
ggggtggggggactccactggggggttgcatttatgggaacaaattagggggtggtttggtgggttttacaccgggtaaaaccttatttttgggggcttacttatacttttaccgatttttaaacttttcttttcacaggccatttttcataaaaaacggtttttttgggaaccatattgatgaactaccctaggtttgactcatatgggcaaccaaaacactgtttccccgttttgtatgggacatttcactgtttttaaaggataatttgaatatattttgtgggaaccc

SEQ ID NO: 35583 - DNA, 287 bp, Zea mays
  Clone ID: MRT4577_13244C.1
cgtcgcataggcccgcaccaagcgtctcaaaattgggctcgaggtagcccccgaaatcttattgcgccgattgccgatgggttgcttaaccggattcttacagcacatcctctggccgtttgatcgtacagcggccgggcggtgacctaaaggacgtgctgcgactgaactcattaacctcagtagcgacgatcatgtttcgtgaccaccattgctatctagaggtcaatatacgccatggtaagcaaaaggtccataatgatgatgaaatgggcggtgccaccaaa

SEQ ID NO: 35584 - DNA, 2253 bp, Zea mays
  Clone ID: MRT4577_132450C.1
cattgggtacctcgaggccggccggagcgcccatagctgactagctgaccaccgcaccacccacactcctcctcgcgagtcgcgaggcaagctcctatatagagaggccccctccctcccctgcatggacagccaccgccttcttcaaccctccttccgtcttcctcctctagtcttacctcgttgcacctcaagaaacttggcgcgcaaccaggaaaccccctcttctctctcctctctctctctctctgccttctgattccaagctccccaactgcccagcaccaacctgccgaactcccctcctttttgttggtttgtcgaattataaattgagcccggccggctgactaccatgaagccgccatcactggtgcactgcttcaagctgctggtcctgctggcgctcgccaggctgaccatgcacgtccccgacgaggacatgctatcgcccctcggcgcgctgcgcctcgacggtcatttcagcttccatgacgtctccgccatggcgcgggacttcggcaaccagtgcagcttcctgccggccgccgtgctccacccaggctcggtctccgatatcgccgccaccgtgaggcacgtcttctccctgggcgagggctcgccgctcaccgtcgcggcgcgcgggcatggacactccctcatgggtcagtcccaggccgcccaggggatcgtggtcaggatggagtcgctccggggcgctaggctccaggtccacgacggctttgtcgatgcccccggaggagagctctggatcaatgtcctgcgtgagacgctgaagcacggcctggcacccaagtcgtggacggactatctccatctcacggtcggtggcaccttgtctaatgcgggggtcagcggccaggcgttccgccacggaccgcaggtcagcaatgtcaatcaactggagattgtgacaggtctcaaacgaactctcaaagcattcaaccagaagttactgaactgctatcacgacttagaatcataaacaggacaggcgtcctcaacaactggagggcgtccttcaagccacaagacccagtcgaagcaagccattttcagtcggatggaagagtactatactgcctcgagctaaccaagaacttcaatagtgacgacactgataccatggaacaggtgaacctggagttcttggacagggtgcacacctctgagttgaaactgagggcacaaggcctctgggaagttccacatccttggctgaatcttctaataccgaggagctccatccgcagatttgctaaggaagtctttggcaagatcctagtggggttcctttcttcagcaccgtctctctcaggttacggcagcattgcacattcaatgaacctgaacaaacagatagtggagttctgtgaagaggctggtattgggatgaaacagtatctggcaccctacaccacacagcagcagtggaaagcccactttggagcaaggtgggagacatttgaacggaggaaacacagatatgatcccctagccatcctagcgccaggacagagaatattcccaaaggcgtcactgccattgcctttgtgacagttcctgctacttgaaggattctgtagagcatacgtttacgttgtacaaaagtgtaggtaaaaagtatcccctgtaaagacaatatctacggaaggtagctagcctgaagaacacagcatagcgactttttttatagtggccgaagacacctcagagcaatacttcaaagtggagcaatgtcacctgaactctgacacctttggaggcaatcactggaggatcgtagcggtccaagaaacctgtatgttgttacagcgttgataattgagacgagctgtgatgatcaactgatcactaaccagtatcccggttatcaacagtgcagaaagttgcttgagggtagtagtgccttgattaacaaataacactgcctgttatttcacttgtaactagcatctcatcccactcaggagtgccttgtttgtaccgtactatcctcctcccgtgcatcattcgtcgcacaatccgtgtaatccttgtcgtaactgtacaagcgaaacttgatccgacagccacagagccgattaatcgaattggagagccatcgtgtacggtgccggcggaacggcgggagacgcgcgcggagtcggaggaaccgacgtgtgaatgtagcaggtttacattactttccatgagtcagaatattatatgctcatgcaaaaaaaaaaaaca

SEQ ID NO: 35585 - DNA, 391 bp, Zea mays
  Clone ID: MRT4577_132451C.1
agccatcgctactgagagactccatcaccgccgactgctcagctgattccccgagggccacaaacatgactaccatggctacagagacccagccccggcacggtgacagggtttcctgctccacaatacgggtgtggcccacgccgacaccaaaacggcgcgagatctgagtgaggagaacggcctgccgattgacctcgtcagtgcgtatatactcgggctcagggacttcgagcccatccaactaccaaaacgatccacttgcaaagacatccagatgacgatccgcgtacgagccgtccagcaagacgacgaaaagctacaccattctacacgtcgtcgccgaggggctacgtcgagtactaccagaagcacggcggagaggccgcca

SEQ ID NO: 35586 - DNA, 671 bp, Zea mays
  Clone ID: MRT4577_132452C.1
aaaataggcgaacttttggatctggatgtgtgcatggaaattttggacattctgtatgaaacggaagatacctcaatgtgccgtgattttgccagtgccgaattggtgttcttggaggttgctgcatatgctatatcagttcctaagcaaacatgggagtttccgatccttccttgggtcaggtttgctacatcatacgatgaagaggaaatcatgaagattgttctgacaattcttctgcatgtgcttaaactggatggtatcgaagagaagggcaagggacgttttgatgccagatgtttgtcgtgagtatgtgatatgtagagcacgagattgtgccccaattttgccttttgagttctgaagtattaaccatctaactgaccgagtgcagcagatacatgcttttagaagacactgtagctagtttttgacaggcggttttgagattgagatgcccaaaatagttatgtgaactaaaactatatgatcaagggagtgcgcgtaagcgccttgcaatggaattctgtattggatgtattttgaagaaagatgcctgctaagtaatcccttcacgttgggattcaagttaggcataattatggtacgtcaatgtaatgacatttaagctccttgagatctcaaatggaaggatgttgcattgccgccgc

SEQ ID NO: 35587 - DNA, 142 bp, Zea mays
  Clone ID: MRT4577_132453C.1
ctatatcaactatcaattttttatctactaacaattactcgtggacccacggtacagtgtttagggtgatgaacagtgacacgctagatctggggggggagagaagggggccagcacgtagggggcgctgtatggggcgcct

SEQ ID NO: 35588 - DNA, 186 bp, Zea mays
  Clone ID: MRT4577_132454C.1
tcgcgccgttgtctgtgtacctgcactactctccgtttggagacatggtgaaatgttcgacggtgccaaccaaccccaccaaggctaccaaggccatgggccgggacctacgtgttcacttctagaacacccgtgagacagggggtcgccttaggaagcctgcactcaccaaggccacatgggtcc

SEQ ID NO: 35589 - DNA, 296 bp, Zea mays
  Clone ID: MRT4577_132455C.1
gagtctgaccgacagggattccgtttaagcaacaacggcagcatggggagaaatcaaacggagcgacggggtggttattggataaaaatacagcagcagcagagtaaacggaccggtgcttttactagaatattttacattactactattgtttgagtaataacgcaaggaccgggggggccttccttgtttattagccccgaaccctaaccaagcggttaacagtttttaactgcaacaaagatgtgcccggttgttgaacacagatgatagaggaggcgattggaccgaggatt

SEQ ID NO: 35590 - DNA, 139 bp, Zea mays
  unsure (1)..(139): unsure at all n locations
  Clone ID: MRT4577_132456C.1
gcttccttaaaacacattgctagatatcatatgtttgaatgatttaaacactgcctaataattcaataaggagaactngcacgcacaacaatcctgcctatcttgacacccaacttaacacccgaaaaaaccaacggcc

SEQ ID NO: 35591 - DNA, 236 bp, Zea mays
  unsure (1)..(236): unsure at all n locations
  Clone ID: MRT4577_132457C.1
atctttaatactaaaaatttgcggctgaacctttaagctatgaacagactctggggcgttggcgcacttcagaacgaactcattgcaacacacccaaagaagttgattgtgtgtaagttcttcaactaaaaccctaggtggcaacccacctctttctccgttactgaaacagagagtggctcccgtcagcnaccttccacctaggctcatctgatctgttttccctccccgctcgc

SEQ ID NO: 35592 - DNA, 318 bp, Zea mays
  Clone ID: MRT4577_132458C.1
tttgttttatttaataaatttaatgttatttaattttaggagatttatttttataatatatctattcactaggatgcacatgaaaaacgagaggcgaggctataatgcttagggggggacgagcaccacctgggggggacagggacaaaagtccacaacatacccggatccagggcgccaatggggaactacaatacatggctgcaacagaaggggacccaaaaacatgagtgctcaggggaagcactttgcacccagcaaggcctttcgggggaacggggggtggccctcaattatgggactgacccggtgcctctg

SEQ ID NO: 35593 - DNA, 669 bp, Zea mays
  unsure (1)..(669): unsure at all n locations
  Clone ID: MRT4577_132459C.1
atcataaacttttttctgaagatgccattaaaactgcacaaaatacttttcacagtgcatataaatatgacgattgtcatatacaaatcccaaaggttcaccttttcttcaacaatgaacttgctctcagaaagattttatcaatctcatcgagctctgacactttcagttcttttgaaggtgaatcagtcttatctgaaagtgaagcgatcctccgcagatgctcctcaaaatcatctggttcattatcattttttcctgagggaaacttatccagcctatcgagatataaggggcgatccttgttgtcctcttcctgctcctctgattctgtctcaaaaatgtcagagagatcctcagactctgtaaatgacagagactctgaagctgagtcgtcttcaatcgcagaactttcatcctctaacctcttggatccctctacagtttctgataggagatcagatactgttttgttgcgaattgaaccacaaggttcttttctcgctggcatactgtttgtattatgtgaaattgaagcaacatgttttccctgcattttgtcttgatgctctccagctaacttcatctgcgcatgaagatcttcaagctcctgctcaatnctgggaatgtaccgcctaagagtnctgagttttccataatttggtttta

SEQ ID NO: 35594 - DNA, 286 bp, Zea mays
  Clone ID: MRT4577_13245C.1
ggctaatcaaatgtattcacattgggcataatcacgccactggagtctggcccgaatcaaggtgcaggttgctgcgctgtacgagccagactgagctacatacacttctgacagagcgtaaatgcgtgctttccctgctacatattatctaggtcatgtatggtgctaccatcgtggttaaataacgaaaataatgctgagcatattcgtttgaatgctaaccaaaatatagggcgggcagtcttcaggactcaatcttgcgtacacgtacatgcaacttcttacg

SEQ ID NO: 35595 - DNA, 315 bp, Zea mays
  Clone ID: MRT4577_132460C.1
attgggtcagtgtctacactgaactagtcagagcggaaggagtgtcttcacgggattttgagccaaaaaagacacggaccgaaagaaggcacaccgaaattggggtcaaaccgacaaaagggtggaaaatttacaatcatatgaaaaattcgaaaagggagaagcaatgtcaggagggagggacaaagattgtggccaaaaacacggggatttaaaaggcaccagacccaaccaagaatggttaagactacctgaggctttccgttcccctgggaaaaaatatccaccccgaagacacttgccggtgggaaactg

SEQ ID NO: 35596 - DNA, 325 bp, Zea mays
  Clone ID: MRT4577_132461C.1
aacggaaaggtaaactattttggggcttggggattgttgttattaggggggggaaaggcccccccaaccccaccaaaacgagggccccttaaaccgaaacaagggatgggaaacaaaaaaagggggcggcccagtgacacaaccgcggacccggggggcaccccgaaaattcggacacggcccctgagggggctccaggtttccctcaggggagacgtataaaagatgggcttaaaaagggcaaaagaacaccccggggcaaaaatgaaacccgggcaaaattcaacacaaaaaacaagcggaaagtgtaaagggaaaaccccgg

SEQ ID NO: 35597 - DNA, 219 bp, Zea mays
  Clone ID: MRT4577_132462C.1
acaacctccctgggacggggggggggggaaaaaacaaaattggtgtcggggggtggaaaatatgggccgttctagctttttgggggggaacttttatgaacgtcttttttaaagagatctaaacccccgttctgtccggagaagatgggggcaatcaaaaaaacaagggtaacccacgtcccggggtggtgctaaaactgggcaacaacaagatgggag

SEQ ID NO: 35598 - DNA, 135 bp, Zea mays
  Clone ID: MRT4577_132463C.1
gtctcgttgtcatcgtcgatgcggttcagcagcacaggaccttgtagttggcctgatatagtcacgtgtcaagtgtgcttccagcggcattcacttacagacatcaatattggtatctgacgagtctgcaagaag

SEQ ID NO: 35599 - DNA, 1748 bp, Zea mays
  Clone ID: MRT4577_132464C.1
ctcgaggccggccgggaaccgtccatttcccaggttctcaccggttcctcaaaccctaaaacctccaaaccccagcaatggcggattccccttcgttccgtcgctacccgctcgcctcctccgtcgacctcgtccgctggctcccttcctcctccatctccccttccggtcgcctcctcgccgccgccgtccacgatcccacctccggctccttcgcctccagcatccgccttctccccctctccgaccctgtctcccggctcgcctccgtcccgctcccgtcccgcgccacggcactccgctgctcccatgctgcgctcgccgctgccacctcctcgggctcgctccacttcgttccctcctcattcgactcggacgccgcagtgtccgtccccggcggcgcgggcttccatgtcggtcctgtccggggcctcgactgcggcggggaggagtgggtcacagcgggagaagacggaagagtgcatgtggtcggcggtgtagctgacgggagagtggtaacgaggagggtgtgggacgggaaaggaatgtcagggtatgaagctgccagatgggcttcgccggtggagtttgccacgggtggagccggatgtggtgttcagtggtgggatcggaggaaaggggacgccatcgtggcgcagtgtaacggcatctggggccgtggcatagttactggcatggtgcattccattgacattcatccatcaagaaagcatatctgcgtggtgggaggttcatcggggaccgtatttgcctgggatctgcggcagccacaggagccgataccaatctctgttctaggtcttaatgaaacagctgagcctgtgtgtgaaagtgaggtttgggaggttcttttcgacacttacactaagtcttccgatatcatctcatctgcatctgcaagaatattgccagtgatgatgtgttcagaggatgggatccttgcagtcgtcgaacaagataagagaccccttgaattgcttgctgaatcttgtgccatcaactccttcgacatagatcctcagaacccctctgatgttgtttgcgcattagaatgggaatcggtcggtgtcctaactcgtggtagagatgcaatgtcagaagaatgaaaattttcatcacccagggatctcaatcagatttttttccaaggtggatgaaactgctatcagaaagaatcttctgaattctgagggcttccatattcagtcaccattctaatgcccgtgaccatgggcaacggtagaaggaataaagcgtgcatgacgaatgccttttcctgtctttgcatactaaccaacactgtcttgtaccgttggaagttttactctgttgtcatgggtagttgcagattgcagaaaccttttctgggctagcttcaagatgtgtaattgctcttggatgccaactgctgacagtttgaaggagtggtcacaaacaattcaatccttttagctgggggctgatgaactgaagctataattagtttcataatgtttgcttgtggtattaaattggctcctgaacaatatggactccgatacatattttatttatctggcttaccatttagattccaaaaaatgcggccgccaccagtctagactaccttaacttgtttgagacaagttgggataaaaggttttgttattaatatgtttttttataacctcagataaagatggtttttatatgaaaattgtaacctttgatgacatttccaactttat

SEQ ID NO: 35600 - DNA, 311 bp, Zea mays
  Clone ID: MRT4577_132465C.1
gaaaaattgggggtgtatttgttttggcggggttatttctgttttgttacatttttattattttgtgggagcctttaacatatgtcaaaggtttctgagggggccagcacccaagcaaatgaatgtggcccaaaaaaaaagaacagggaataaaaagaactttcgacattcttggggggctcgccccctctccatcttgtgcaaacgcttggcccaagagtttaagaccggaaacttaattggttcccctctaagcccgccatatcggaggcccccccacttgcagcctcaagaccgctttcgggaggggg

SEQ ID NO: 35601 - DNA, 609 bp, Zea mays
  Clone ID: MRT4577_132466C.1
gataggggcaatgccaaatttttacttcccaatttagctttagacagtgggcataacttgcagaaaaagattgaaggcaaaacataacttacaaatccaaggtttgtttcgcatcaactttggggcataggacctgcatttggagctacgtactccccccacccaaatccatactttaaggcacttgggagcagaactagacaaggcttattgggtgtttcttgtcctccctcatgggtctgccgcttctccattaacgtcatttttttaccagttctgactcgagaaatctgtgcaaacctagtgtgggatgattaggaagcgtactggctgactcctggatagcagcctctactgcctccacctctttaacccttgaaccttcacagtgaacattgacgacaagattcctgagggtggagaggtggctgttgccgaaatcaggaggaccaaatctgcgtgcagtatgcatctcgtgcgctatgatttgaaactcaagagtttcaagcgctggaacagctccttctttgaacatcatgtttacccagccaacgaaactgaacttcttcagacatcggaatccatcgttgctgacgacaaggcacattg

SEQ ID NO: 35602 - DNA, 181 bp, Zea mays
  unsure (1)..(181): unsure at all n locations
  Clone ID: MRT4577_132467C.1
tcgagccgccgacccagatgatcgcactacccagcgctcgcgcagctttctttcctnactcgacgangctagctacaccacctagtgcgggctcgtctccatcgcccgccacccgctccgtcgtcgtcgtccccgccgcgccgatcccgaattgaatggggagcctggcgtacgagatgaa

SEQ ID NO: 35603 - DNA, 562 bp, Zea mays
  Clone ID: MRT4577_132468C.1
cggggcgctttcttagaggcgggaatggcttctcctcccattccgggtaggcttcgcgaccgtgaggtactgcgacggtagacctcgtggtggagcgcatcgagatggcgcgtgttgatgtctagtaccgctgctccaaaaggctggacttgcctgggccagggacgaccactcgctgaacaaagactttagcaactacggggaggacctctagtccaagagcatccttgagcgatagacacagaggtcccatggctagagttccagaaccttctctaccgaggaggcgacagcgaaccgccatccagggcatgaacggcatggatgtggacggccgcaacattaccgaaaacgaagcccaatgccaatgcggccgtgaaggcggcggttactggctactgtggtggctaccgagctgtgagatcaactgcagcttgtcgccaccaagggcaaggaccattacatgcggggccgtttatatggaagcgctatgctctaatgagtggggccttgtattcaactgtgtctcaaaacattggggcaactatgggctcactgacta

SEQ ID NO: 35604 - DNA, 256 bp, Zea mays
  Clone ID: MRT4577_132469C.1
ggtcgatacacgcctctaaactgagtcatattatgagaggccgcattattatttgttttttcactcttgtagttctattatctttatctagactagctctatgtctattcaaaatcaaacaactcggtcaagtttacaacatgcatcagatcgtcgcacatagatacagctgcagtccagtctccatgcgtagtcgttatcgcggacccgtttgtcgaggcaactgcgggtctggatgcagccgtgccctcggaag

SEQ ID NO: 35605 - DNA, 251 bp, Zea mays
  Clone ID: MRT4577_13246C.1
ttttcttttttgacagaaaatgagtgggtgacgttttatccagctagcccacccacaaaatccaaaacagagacctatgtatatatctttccgctgcgaatttgagacaagtctacgggcacggtctaaatccctgctaaaaggctctactgaggctcctaaaaccggctatccaccggatgctccaacatgtgccttggcgtccttatcgtcttagccttgctcctcctctgagagttcctcaattcagc

SEQ ID NO: 35606 - DNA, 323 bp, Zea mays
  Clone ID: MRT4577_132470C.1
aggacacctacgaatgtttacatcattagcagcaccctttattcatgagtgacttggtgcattacagagggagaatttattttcagataaacatgtccaaccttaatgtcagatttatattaatacccgaaactgtaactttgtgctctattcagagcacatcatcccagagaaccaataatttctactaccaattgtgcactgagtccattacgcctacctttgcgacccggacatccaatatgcaatttctacaatcgctactgcatgtgcaagatccgaccagattgcacattacatcacccaatgtgaaatgccatgta

SEQ ID NO: 35607 - DNA, 317 bp, Zea mays
  Clone ID: MRT4577_132471C.1
cccacgcgtccgcggacgcgtgggcgctcctaggggcggaaggccgccgtgccggatgttgggatatgcagcaagggggcagtgcgcacggatgcaatgcatttgaatggctgcacgctgggctctggtagctctgactatcgtgaaggcgagatatgcgcgagatatgtttcgaatgacgcctgcgatcttcaaaatcatgagcgttacacatagctattgtcgatgatgatatgatgcactaatggagcctaatggtggcataaagtatagcagtagttgttatatgatgtatgaaggtgacgttgactacagca

SEQ ID NO: 35608 - DNA, 669 bp, Zea mays
  Clone ID: MRT4577_132472C.1
agtccctaaccgcgagcgaaccaagtacatttcccagaagatgcgctgccgctgccggagtaggatgaacagcgagcagcaacatgtcctgggaggcgtacatcgatgaccacctgctgtgctacatcaaaggccagcacctcagaggcggcgccatcgatcgaacacaacggcagcgtctgggcacagaacgagaacttcccctagtttgagcctgacgaggatgcctgcgatgataaaggtgctttgatgaaccgtggaactcttgcacaatctgctctttttgtcgaacgtaccaactacatggtgatccaaggtgaacctggaggtgccttccgaagcaagaagggcactggatgcattactatcaagaaaactgtcctgaccttgattatcagaatctatgatgcgccactgactccagggcaatgcgatatggtgacggatatgctctgcgattacctgatctaacatgacttctaggttagtcataatgctattcgggccatcgggctcttgagtttgcacctcattaggttctggaatatgggggcatgtgcatgtgcttggcgtatatgcacgcagagactatgtatcttcgcgatgggttggtgacaatggtgtgtacggctttgaattggggtttatgcgtgccatctcctcatatct

SEQ ID NO: 35609 - DNA, 274 bp, Zea mays
  Clone ID: MRT4577_132473C.1
attacgcaaaactgcttttgcttccggaccattctaccctctcttccgggctattaccgggcgcggccatcttttgggcacaagaaaatgtttttttcaaaaaggattcttaaacggggctttccttggcactgaattttaaaaacaaccctatcaactttatcattattttttaggtattctatcctatcactttttctctttgtttgtaccttgtttgcaaccgagtgcttgtaacctcaacgcctcttactcagaaaatataacctttttt

SEQ ID NO: 35610 - DNA, 651 bp, Zea mays
  Clone ID: MRT4577_132474C.1
ggccgcttttttttttttttttttatttttttttttttttttttttttttttttttttttttttttttttttttttttttttttttttttttttttttttttaaaaaaaaaaaagggggccgaaaaaaaaaaaaaaggccaagggggggcaaaaaaaagggaagcttcggaaaggcgtgttcacgggaaaatttaaaaaaattttccggggggcaaaacaaaaaaaggggctaaaagtccaaaaacaaaaaaaaaatcaggtggaaggaaaaaacctggggacaaaacaaggggttaaaattgggagggcgactttttattccccggaaaggaaaaaaccgacgccttccaaaaaaaggttttttggggaataaaaaaaatacatcgggggcttttttttcttaaagcctggggggccaagggggaactccaaaagtttgggtgtccccaggaagttttttgaaaaaaaggccaaaaagggcataaggggccccaaaagaaatcctggagaaaaaaaaggccttggtagaaaaacgaaggcatgacctttactggccaaaaaaaaaagggataaggggggggggactgggttagaaaactgcacatgacccccactgctttaaaagggggggaataccctcccacggggag

SEQ ID NO: 35611 - DNA, 247 bp, Zea mays
  Clone ID: MRT4577_132475C.1
tttttgttttttttttttttttttgtccaattttccttataagcacaagaaaataatatatcggatatataggaggagggcatacaaaacaatggcaaatataggccatccgcacacaacaatccacatggccggtggtacaacagatggcaaagggtaattaatgaaccagtatcgacctgtctacaaataaaagacggggggaacacactatacacacgcattgccataaagattgaacgccaga

SEQ ID NO: 35612 - DNA, 414 bp, Zea mays
  Clone ID: MRT4577_132476C.1
gaaatacaaaaaaaaaaaagaaaaaaaaagaataaaaggcccctaaggccccctagctcccccttatttccccctttagttccctttatgggggtatttgggggactctggaaatatcgtggttataggggttccctgggataaacttcacaatcccccccaacttacacacactgaagcataccgtagatagacttgggaagccttaggggcgcaataagtcggattaatctcacttgacttgactgcgcccttttccacccgttttaacctgttgaaaccatgtggatgaaagagcttaaataaatccggcaagaggcggggagaggattgtgggttattgggctttctcgctcttccatcgcagtgatcggttgctctggggcatcaagcggcatcaagtcgatcaaaggt

SEQ ID NO: 35613 - DNA, 794 bp, Zea mays
  Clone ID: MRT4577_132477C.1
cctcgaggccggccggaaaaacccaccgcctagccatcttctctctctcccctctctctcccggcgctctcctctccagccgtggccatcttccgcgagcgcctctgctcctctctactctccccaccctgcgcggcagcttccctgctccttcctctagcttggatccggccatcgttttctggcagctgaccgcgcccctcaagcccggccttcgtccccatggcggctttcccatggcgcgctcctggcccctgctcgagtttcacctggccgcaccctggctcgccctcggccatggtgctcacgccccagcggttctcctgctccccgtatcatgatttccgagttcaccggcaaccacagtcacgtcgtgccgcgccgcgagctcgctccccgctatcgtcgtttccccgtgccgctggacgtgcgcccctgcagctccctgttcggcaaaatgagtggaccagtgctcgtcgcgtattgggaagatcggcaccgatgttcttgccggatattgattgtttgatttggggagaacgacacacacatggtgtttaataaatggttcaaaccggatagcctcatcgaaatcacgactacgagtcgattaggacatggtaagctgatccatttatttcccgtgagtataaggaatggttggattagataaatatagtagtcacgatgattatctcattgtgagcttacttgccgtagttatatttgttgtacgacgaaatatcttagtgtgcatagtgatatggcgagtgggtggcgacggtttgattgct

SEQ ID NO: 35614 - DNA, 801 bp, Zea mays
  Clone ID: MRT4577_132478C.1
ctcacgttcaataaccgcaacatggcactttggtatacacatcacaaaatacatgtacaggtacagccgagtacggcacagcagtagactatagccattctagtacccagctaccctcctgagcctcctcgctacacagccagcctacactccaccaaaaaaccttgcccagtatgacccgcccctcctcacttcctcctccgccgccgccatcgccggcgacggaggcaccggaacaggcgcctctccgacgccccagatcccttcgaggacctgctccaggctagccggaaccccgcaagtctgcgctgcaggtgccgcgacaacagcgtcgaacacctcctgcaggccgacgacgcggcggctcacggcgcgccgcgcgtcccgcacggccgggtagcgccccggcacggcgtccaggcggagcagcacggccatgagcgcctcggagaaccgggcccgctcgcgctcgtcgccgcggacggcgtccacggtctcctgccgccggagcagccgctcgagccgcgtcgcctcggcgtcggccccgcgcacggccgcggcgtgccgcctgaccaggtagccccgcaaggccgcctggatcttagcggccgccaccgcgtcaggcgatccttcccgaggggatttaatcgggatttggacggtggtcttgggtttgtggctgggcttggggttggaatcgacgaattgcgaggtgtagtggtacgatcccatggcgaccttggagcgagcgcagctttggatcagaaaagcgaggcgcacaggcacagcgtcgtccgaatc

SEQ ID NO: 35615 - DNA, 763 bp, Zea mays
  unsure (1)..(763): unsure at all n locations
  Clone ID: MRT4577_132479C.1
gnacaacacatcaccttacattcctgtggtttttcttcagttaccagtgctgatttcaaaagtcaacaatgtcatatatctaagaatggaggtagtacaatttatttgtaatttttattgagccgatcactgcatttcgtcaggtccttgctactagagttacaacatggctgttagacagagctggacgacgcatccttctcagttctcattgtaactgtcgcttccctgtgaaataactagcttgcatgctttctttgtaactattgacttaacactgtcttcaaatgacatatttctacctctggcatgactctatgccttcttgccgtttctgtggtatttttctcaaggtatgttcaagtttctttatctaggattcgagtgagaagatgataaaactttattggtaatgcgtgccttatgcagatcctgtacaatatctactgaggtttcttctaatccttttttatggttcgtttttttccaggataacatttcataggattctaactcgtactacatcttaacaatgatctccctttgttggtattgtgtctttcgtcattaccttctcgtttggtatgggtgccattccatggctcatgatgtctgatgtaagctacttctttctctactgctctgctagctcattgtctgcctgaactgcccactgcccccattttttctccgccattatacgtcggcataggaggatgttcctggccgcacaaccgctagagacaggtacacaggacgccta

SEQ ID NO: 35616 - DNA, 289 bp, Zea mays
  unsure (1)..(289): unsure at all n locations
  Clone ID: MRT4577_13247C.1
cacccgaacgtaagctcggaattcggctcgagcgaccaaccccaaccacggacccggactggttggtcgcctataaaccgccactattgctcttgcaaccagctttttttccacgttttcgcctcgtacgcacagggtgtgcacacgcgcaccccgtgngtggcacacagtgacctaaaccccctcccccacaatacccagggtactagcactagggggggtactcggcagcaacagcggctggggtccccccgatggtggcgttcctcgccgccgccgccttttgtct

SEQ ID NO: 35617 - DNA, 2261 bp, Zea mays
  Clone ID: MRT4577_132480C.1
gccttatagaaaccctccgcaccggctcctcgccgcagtataaatacacggggccgccatttccaggcctccaagacttgaagcgcgcaaccctctctggtctctggtcgtcctactttcttccacagcagaaggaaacttgagtcgtgagcgcagtggtgcatccaatccacaaagagctgaggttagtcagccatggcggcaccgccgaccgaggactgcggctggctgctgtacctctccctggccgccaaatgcggcgaccctagccgcctgctcggcttggcggcggtcttcgtcggcgcctgcgtcgtaacgtcgctcctgcactgggcgtgcccgggcggccccgcctgggggcggtactggtggaccaggcgaggcgggctgggcatcgtccgcgccgccatcccgggaccccggggcctgccagtggtcggcagcatggggctgatgaccggcctggcgcaccgcaagctcgcggcggcggcggcggcggccgggggtcagggcagcagcaggcgccgccgtctcatggcgctctccctcggcgagacccgggcggtggtgaccggcgacccggacgtcgcgagggagctgctcggcagcgccgccttcgccgaccgccccgtcaaggagtccgcgtacgggctcctcttccaccgcgccatcggcttcgccccgcacggcgcctactggcgcgcgctccgccgcgtggcgtcggcgcacctcttctcgccgcgccaggtcgcggcctcctccgcgcagcgcgcggtcatcgcgcgccagatggtggacgccgtgaccacggccgcccccgcccccgcccccgccgtcgtggtggcgcgccggttcctgaagcgcgcgtcgctgcacaacgtcatgtggtcggtgttcgggcgcaggtacgacctgctgctgctggcggcggacggcgaggagctgaaggcgctggtggacgaaggctacgacctcctcgggcagctgaactggtccgaccacctcccgtggctggcccgcttcgacctgcagaggacccgggccaggtgctccgcgctcgtcccgcgggtgaaccgcttcgttggcaacatcatcgacgagcaccgtgcgcgcctcggcctcggcgacaccggcggcgtcacggacttcaccgacgtcctgctctccctccagggcgtcgacaagctctccgacgccgacatggtcgccgttctctgggagatgatcttccgaggcacggacacggtggccgtcctaatggagtgggtgctggcgcgtctcgtgctgcaccaggacgtgcagagcaaggtccaggaggagctggaccgggtggtggggccaccgggccaggccgcatccgtgacggagtcggacaccgcctcgctcgtctacctccaggcggtcatcaaggaagtgctgcgcctgcacccgccaggcccgctgctctcctgggcgcgcctggccacgtcggacgcgcgcgtaggcgggtaccacgtgcccgcgggcaccaccgccatggtgaacatgtgggccataacgcatgaccccagcgtgtgggccgagccgacggagttcaggcccgagaggttcgtgggcgcctctgctggtgctggtgctggtgctggtgccgaggacgttccgatgataatgggctcggatctccggctcgcgcccttcgggtccggcaggcggagctgccccggcaagtcgctcgcgctggctaccgtcgggttctgggtggccaccctgctccacgagttcaaatggttgccgccgtgccgcggcgtcgacctgtccgaggtgctgaggctgtcgtgtgagatggctgcaccgctggaggcgagggtggttccacgtcacgcggtgtgagatgacgaggatgagacacgtggcctggggataggagaagttgcccgatcgtctgtctagattgtactgtactatatatcttatcttagctttccttaccttgtagcagagaacgtaacgtggcccggcggcgatggatgatgagaatgagatgtgtaaaagaagaaaaagagcatgcccgagtgccatatgctttagagtggactgtgtatatatgatgatgctattgctagcagctagtggaaggcagtagtacatagcagtacctcctgcagcgccggtttgatgcctacgtgtgtaatgtaatgtaactttaccagcttgcatgcatgcatgtgatatgtgccttgttagtgtagtactgtagtgcaccagatgagatgagcgtgaca

SEQ ID NO: 35618 - DNA, 1459 bp, Zea mays
  Clone ID: MRT4577_132481C.1
atcccaaattcatcggttggcttgcgatctcctttgcaaaagagcctcatttctatatatgggacgattgcttgaagggtttggtgtcgggatcatatcctacacggtaccggtatacatagcagagatatctcctcagaacatgaggggagctcttggttctgtgaaccagttgtctgtgacctttggcatattcttggcctatttgctcggcatgtttattccttggagacttcttgctgtgattggagccttgccctgcacaatgttgattcctgggctattcttcattccagaatctcccagatggctggcaaagatgaatttgatggaagattgtgagacgtccctacaagtgctgagggggtttgggactgacatcacaacagaagtgaatgatataaagagggcagtggcatcatcaagtaaggaccacaatcagttttcaagaattaaaccaaaagaaataccgcacgccactacttctagggattggcctacttgtactgcaaaatcttagtggaatcaacggtgtactgttttatgcaagtagcatcttcaaagctgcaggggttacaaacagcgacttggccacctgttcacttggtgctattcaggtccttgctactggagttacaacatggctgttagaccgagctggacgacgcatccttctcattatttctacctctggcatgactctatgccttcttgccgtttctgttgtattttttctcaaggataacatttcacaggattctaactcatactacatcttaacaatgatctcccttgttggtattgtgtcttttgtcattaccttctcgtttggtatgggtgccattccatggctcatgatgtctgagatcctcccggttagcatcaagagccttggcggaagcatcgcaacactggccaactggctgacatccttcgccataacaatgacgacgaacttgatgctcacgtggagtgttggaggcacttttctctcgtacatggttgtgagcgccttcaccatcgtttttgttgtcctttgggtgccggagacgaaggggagaactctagaggagatacaattttcgtttcgctgagcattcagcgtcagctgcaatggttgcccgagtgtttatcttagggcctgtttcgatcccatgagctaaagcaaaaagaagctaaaatttagtcactttataaactaaagttccaatcaggaggagctaaaagtgaataaaatagcaaaagaatatcttttagtcacttttagcttctaaagaggagctagaatttagtcccttgttttagcttatactccttccatcctaaaaaaatataggtctttctaacttttcttttttctgttcatattcattcgaataatgataaatatagacatacgtataaactattcattaataaatgtatcaaataaattataggcctgtttggtttgctgtct

SEQ ID NO: 35619 - DNA, 473 bp, Zea mays
  Clone ID: MRT4577_132482C.1
tttttttttattcacaaaagcatcacaattataatatcattcacaactagtttttttttattcacaaaagcatcacaattataatatcattcacaactagagcaaagtgccttgtagattttggtgagtttgcaccttgcatctaatgaaatatttgatcatcctcatcatctaattcctcatcttcagaagcacaatattcttcattgtcttactcatcctcggtagcaaacttgttcctcatcaccttaagaaacacaatttcatagcatagtaaattttagagctctaaaaatttaaagaacttcaaaaataaactctaaaattttagtgtgagatataagctataatttaaagctaactttagagggaaatccaaataagcatggagacattcagctggcatcttccgatatacattccatggcttcatctgaactcgccaagaggacggctaaacgatagaataaccc

SEQ ID NO: 35620 - DNA, 310 bp, Zea mays
  Clone ID: MRT4577_132483C.1
catcatccctctccttgttttatcgctttatcacatcattcacaatcactagaaccagggggtcctttatctgaccttcaatgtcaacaaaatgttatctgatatgcactaccatctcttctcctcatgcctctccaattacaacgactaataataaaaactctcatctctagaaacgaatcatacacttacttactagaatctctagtcatcttcatctttccagccatttactagccatacatctcttctaatatgccacccttcttcaacaaatctgatcgccaacattatcctactcattcattta

SEQ ID NO: 35621 - DNA, 858 bp, Zea mays
  Clone ID: MRT4577_132484C.1
ggccggccggggttggtttactaatccacgtacgtgtacgtctggccgttcgggccttgggcagtttccttgtggggttttgtggcaggagcgattggatctggccgttcgggccattggaggtgcttcaccaagcgtccaagcgtgagtgtattgggcttaggccgtcggctgggtctgcctggcccattgcaatctcgagaacacgaggttgcaatctcgagaagcaactccgtcgcgccgcactctaatcgcctccgattctgcggagacttcggaatggcggcggcggctcgtgccgggttccggcggctcttctccgtctcggccttcgctgcaccgcctcctcctgccgcgcgccccgcggcggacccttgcaacaacctcttcgtctcagggttaaataaacgcacaacgtccgagggacttaaggaagcattttctaaatttggtcaggttattgaagcaagagtaatcactgataggatatctggatactccagaggatttggctttgtcaaatatgcgactgtacaagaagctggtgaggccatagaaggcatggatggaaagttccttgacggttgggttattttcgctgagtatgccaagcaaagagaagccacacaaccatcacaacaaggagcaccagcttatgattgaagttgccatacacggtcgatgacatacactgtatttctttctttcttttttctgccgagtgtaatagtggatgtttcttgccggccaaacatttgcagagagaatgtagcttgatgtgctccttgaacttcctttgttgtggttaacattggacttactgcaactccaaaaaaaaaaaaaaaggcccctagggcc

SEQ ID NO: 35622 - DNA, 612 bp, Zea mays
  unsure (1)..(612): unsure at all n locations
  Clone ID: MRT4577_132485C.1
aaaaaaaaaaaaaaaaaaaaaaaaaaaaaaaaaaaaaaaaaaaaaaaaaaaaaaaaaaaaaaaaaaaaaaaaaaaaaaaaaaaaaaaaaaaaaaaaaaaaaaaaaaaaaaaaaaaaaaaaaaaaagttttgtacccttgggccggaacccctttagggggaatttttgaaaatttccataaccttgggggcggtttaacattccttttaaggggcccattttcccttttagggggttttttaaaatttaatgggccccctttttaaaacctggggatgggaaaaaccttgggtttcccaaatttattccctttggnnnnnnnnnnnnnnnnnnnnnnnnnnnnnnnnnnnnnnnnnnnnnnnnnaaaacaatccccttttccccagttggggtataacaaaaaaggcccccaccgttcgccttttcaaaagtttgcccaccctgaatgggaaagggcccccccttttatggggcctttaaccgggggggggttggggttttcccccaggggaacctttaattttgccaggcccttaggccccgttcttttgctttttttcctttcttttttggccactttggcggtttttccccttaaggttttaaaggggg

SEQ ID NO: 35623 - DNA, 675 bp, Zea mays
  unsure (1)..(675): unsure at all n locations
  Clone ID: MRT4577_132486C.1
cctcgaggccgccggccggctggcccattgcaatctcgagaagcaactccgtcgcgccgcactcaatcgcctccgattctgcggagactcagcatcggaatggcggcggcggctcgtgccgggttccggcggctcttctccgtctcggccttcgctgcaccgcctcctcctgccgcgcgccccgcggcgaacccttgcaacaacctcttcgtctcagggttaaataaacgcacaacgtccgagggacttaaggaagcattttctaaatttggtcaggttattgaagcaagagtaatcactgataggatatctggatactccagaggatttggctttgtcaaatatgcgactgtacaagaagctggtgaggccataaaaggcatggatggaaagttccttgacagttgggttattttcgctgagacgccacacaaccatcacaacaaggagcaccagcttatgattgaagttgccatacacggtcgatgacatacactgtatttttctgccgagtgtaatagtggatgttgattgccggccaaacatttgcagagagaatgtagcttgatgtgctccttgaacttcctttgttgtggttaacattggacttactgcaaaaacaaaaaaaaagcccataactttcgtctttcatttacaggtcantacatttttttt

SEQ ID NO: 35624 - DNA, 471 bp, Zea mays
  Clone ID: MRT4577_132487C.1
agcctgagttcagccgttttttataaacgacagggggctaacaaaaccaaacttcagatgtttcgcaacaacaaaacggggtcttggagcctgggcaacacaagggaaatccagaaaccactacggtaaatagtagacaaaaaataccaaattccagtttcggtgccacaacaagaccaaaaaaacacatttttgttggatccttttgccgaatcctccgggttcatcatcaatcatcaccaaaagtggtcttctttcctgcactgggagagccagcgctgtgcttgttaccaaagtcacggacaccacgttctcggacgacatacctaccaccacgtaggcacaccgaatcttccgtcacacatgcctgcccccagatgttttaacaaatgtaccagcaccaagaatgccaccagaacagacaccaaatgtactaacacaacagtcaccgagatgtaccaccaccacgct

SEQ ID NO: 35625 - DNA, 620 bp, Zea mays
  Clone ID: MRT4577_132488C.1
atcacggacacagcgtacgtcggcttctcgtccgcgtccagcatcgtgctggtgaagcactacgtgctcggatggagcttcgcgctcgacggcgccgctccggctctcgactacgacaagctgccgaagctgcctcgcatcggcccaaagccccggtccaaggcgctgaccgtcgcgctgccgatagccaccacggtatccgtcctcgcggcggtcgccctcgggttcgtgctcctccgacggcggcgcaggtacgccgagctgcgcgaagattgggaggtggagttcgggccacaccggttcgcgtacaaggacctgtacgacggcaccggcggcttcagggacaagcggctgctcggagcaggcgggtttggcagggtgtacaaaggcgtgctcccgggttccgggacctatgtcgccgtgaagaaggtgtcgcacgaatcaaggcaagggatgaaggagttcgtcgccgaggtcgccagcattggccgtctccggcatcgcaacctcgtgccgctgctcggctactgccggcgcgaaggggagctcttgctggtgtacgactacatgctaaacggcagcctggacaagcacctccactgccatggcgacaagcccgt

SEQ ID NO: 35626 - DNA, 415 bp, Zea mays
  unsure (1)..(415): unsure at all n locations
  Clone ID: MRT4577_132489C.1
gcccaggccatggccacgcaagcctccgccgccacgcgccacctgctggccgccgcctgggcgccggcggcgaagccgcggcagctgagctcgcagctcgcgctgccgtcgtcntcctcccgcgggccgggcgggggggggggcgtttccttaggtaggcggnggaggcgcccaaggggtgcgggggcccgcagtttgaccccacccccccgtccccgatctttgggggcagcacgggcgggctgctccgcanggcgcagggggaggagttctacgacatcacggggacgtcccccaaggggcaggtgtgcgagatgcccaccggcggcgccgccgtcatgcggggagggccgctccctcttgcagctgggcgcgcacggagcagggcctgcctcccggggtgaggttgcgctcc

SEQ ID NO: 35627 - DNA, 734 bp, Zea mays
  Clone ID: MRT4577_13248C.1
ttcttttgggaccctcgggtctgccggacgttgttagcaaatttctgaaggaatatggtaggggattaaattttctgataataatgtcatctactgcactcagcgaatgcccatatatatgtgtcgtcgcgacgtcgccagattgagggaatttatcacactaattaagaagatgaactgcctaataatgcacattgtgcgacgacgatgcagacatgaatgtctctgagcagtttgaaaccgagagccgagagcaacatttccacacgtactaacaagcgacacttaccagtgttctataaaaaggataacagtgctggcaagtttgcagggcctggagcctcatctggtgctatttgcagcagttcctggctggctggccggactttgtaaagaaccgcctgagaactatggcggccagttccctgcacagttgccatgcattcttctcactcatgctttctgcgtgcttcaaattagggtcacgcactcacggtcctggctcctgcggcggtcactccttttcatcacacacgctcatctctgaacgacgcacgcccttcttcccatggatggttggttggtttcagtgcgtggctacctgcgacttgccaacaatgaggagaagtcagaagactgcacacacaagagtctctccgggaaagagagaaagggatggcgtttgtcatcaaggggtgaaaccctaaccctaaaagtggtccaaaggctcacac

SEQ ID NO: 35628 - DNA, 229 bp, Zea mays
  Clone ID: MRT4577_132490C.1
ctgcggttgtgtttggtccgtggaccacgggcacgtagaggttgatgcttgcccttatgcgtggagatcaccgcgcgcgcacaaagaaaacgcgcgtacacgtgtttacgcaccgagcaccaggccgagacgcacttgtggtagatccgcctgatcagggtcacctacaagagcttttggctgtacttgcgccaccggaatctgtcgcccacaatgtatatgttgctca

SEQ ID NO: 35629 - DNA, 272 bp, Zea mays
  Clone ID: MRT4577_132491C.1
ggggaattattatattttttttggggtttcctatttgtgattaccccccgaccctatggctgctcgggcgtaaagaataaatttaaaccaaaatttaatccatccaaaaggtaaaaacatttccggtaacttaaaaaaaggggaggcagggaaatccccccttattatcattgtcaaaataaccgggggggaaaggggaactacattttttgggccgaacaagggcggggcttttgcttgaaaacatactcgggccttcaggtatggcgggt

SEQ ID NO: 35630 - DNA, 334 bp, Zea mays
  Clone ID: MRT4577_132492C.1
ggcccacgaagaaagaagggccattcacaaagaaagtaacacagggccggacatgccccgcaacagagagccaaactgtccttcaggggggggtttgggcaaacagggctaacgacgaaatggttcatcgcccccggggggccaccccctttacaaaccacccccccggcgtcgagtaaaggcccacaggacaaaccccttcccggaggggcgggaaagggagcccaaaagggcgcggagcccccgcaacaacccggggagggtacctcccccccgggacaggggggggaaggggcaaaacaagaaacccaaccccaacattgttgcccccggc

SEQ ID NO: 35631 - DNA, 525 bp, Zea mays
  Clone ID: MRT4577_132493C.1
caaactgaaatacacggggaaaacgtcacattaagcatctacttttatatactacaggaacatgtacagtacttacaagctcatgggtgttacaataattttacgcatatcgggcggccaaccctacatgatgcgtacacaggacctccgggagatgcaaacattaaaccacgcgccaaaagcggttatacaacctgaccttgctgtgatcgatggtcggaagactaggctcatgccttacactggcgggtaggaccatattcaataacagccttaaaagaaagctgaggctagaccccttttgataaacacgctgtggtgaatttgaaggggacgcaccataaccggtctataacgccgttggtgctctacactgatgcataacttgtacgatttcacggtgtgctggacatattcaacctggacatacacaggctgaaatgatcgctggcacatatgatgcataacctgcctgactattcttctgtgcaggatgaccattcactgtctgctgcggatactcac

SEQ ID NO: 35632 - DNA, 137 bp, Zea mays
  Clone ID: MRT4577_132494C.1
atttaattgctaagcttggcctgacaaataaaaatgttcaccgcttttatttgtcaggccaagcttttcaattaaaatgcggtgaacatttttactttatatagttcaaacaagcaactctaaaaaatcaaaccata

SEQ ID NO: 35633 - DNA, 1404 bp, Zea mays
  Clone ID: MRT4577_132495C.1
cattgggctcgaggacggccgggtgtactacgcgagagcttgccggaggctctggatccctgtgataataataaactgatataagcagaggaagcggggaggaagctgcgagttggagggggccgggagaggcgtctctggttattgcttgtccctgcttcccggtgagctgctgggagtggacgggccgggaaggagacgagaagataagggcgccgcgcgcggccatggctggaagtgcgccggcgacggcgatggacaagaccagctttgccaccacgtgcagcctgctgagccagtacgtcaaggagaagaagggcggcctgctgcagggccttggtgccctcgccatggcgccggcagctggaggagaaggagctttccgaccgccgaccaccatgaacttgctgtcagcgctcgacgacgcgccggccgaggagcgcagcgagaaggccaccgccggggagccaaaacaccaggacaaatgcaccggcggaaatccaagggaggaggcagccggagaggaggaggaggaggcgcagcagctgaccatcttctacggcggcagagtggtcgtcttcgacatgttcccctccgccaaggtcgaggacctgctgcagatcatgagccctggcggcgacggcgtggacagggcaggcggtgccactgtccctacgcggagcctgcataggccttcacacgacagcctctctgatctgccgattgcgaggaggaattcgctccacaggtttcttgagaagagaaaggacaggataactgcaaaggcgccataccaacaagtcaacagctctgttgttggcgtcgaggcgtccaagcaggcggctggagctggggtggaaaaaccttggctggggctgggccaagaagcgacaacagcgaagctggagatgtgatgaatgttgcccgacaagaaggtgcagtgcacgagattcacggatggtgcaggtcgtagcttcaggttaaggtgaaggataacttaccgtcgggtactctactcactttactgctctactactactactgctggtgacgaagttagcaagaaacgttcttctgctaccggtgggtcggtcggtcagccgttcgttggcgagattgtttgctgctggagacggacgtgctcgcagcagtttcgctggtccgtgaccgcgccatatgttgccacgaatggttggttgttcggtacgttgaggaacgatgtgtatgtagtgtgcacgtttccggtgcatcttgttctcctcaagcctgtcctgtatgtttacccccctgcaccccctcctccctctttgtagagagagggtctgtatgttcagtggaagatggttgttctatttgatttttattttatggacatgtatgctcggtgaaaaaaataaaagataa

SEQ ID NO: 35634 - DNA, 452 bp, Zea mays
  Clone ID: MRT4577_132496C.1
tttttgttttataacatttgtcgactttgatgactagccctagatcccaagttatcacattacctttttatttgtactgtatttccttatagtcttaaatcacaccactgaatcatgtagtttcctaggtttagggctgcagtggggcatagttagtaggtggtacacaagaatttctggtgttcttttgtgtgccagttcactgaattttgattgattgttttggggtgtcagttatcgggaaggtgaaggatttcttgggggagattgcaagggccaaccagaagttgcagcttgatgcacagaacaagcctcctgtggagtacgatattgaagcccttactgggaacgaggaggaatacattgagatggatctgcttctaggtgtcgctgatcttcattcagagcaggctgtggaggcagctgaagcaacaataaacggccgccagact

SEQ ID NO: 35635 - DNA, 586 bp, Zea mays
  Clone ID: MRT4577_132497C.1
gaagataagggcgccgtgcgcggccatggctggaagtgcgccggcgtcggttatggacaagaccagctttgccaccaggtgcagcctgctgagccagtacgtcaaggagaagaagggcggcctgctgcagggccttggtgccctcgccatggcgccggcagctggtaagggcaacagttctttcgtcgtgcgatccgctcctgtccgttaagtgccacactgccatgcacgaataagctagcttccccgtagacactaacactaccgtcaatgaacaataccgttctgcttatcgcacatcgatcgcgctcttcccatcgtcgcaggagaaggagctttccggccgccgaccaccatgaacttgctgtcagctctcgacgacgcgccggccgaggagcgcatcgagaaggccaccgccggggagccaaaacaccaggacaaatgcaccggcggaaattcaagggaggaagcatccggagaggaggaggaggaggcgcatcaactgaccattctctacggcggcagagtggtcgtcttcacatgttcccctcgccaggtcgaagactgctgaaatcatgagccctgc

SEQ ID NO: 35636 - DNA, 512 bp, Zea mays
  Clone ID: MRT4577_132498C.1
aaaaataaacttgactcgggtatgaattatggacgaacactgtgtactgcattcaccaatggtcacggtgcgtcagccctgcacaccatcaggacgccaattatataagactaacattggggtctttatctttgagtaggtgccatgtctaactcagccgacgtaatacatggggtcggtcaccttagaagtgcggacgccctccgttgcgccgattaggtcgctccactggtcgccctatgttgcccacgatgcggcacctggcgtgcacaagcttagtgccgctctcctgacttgacggtaccaccgacgaacccagggaccacggattgagcacaagcttatcccatgtgtgttaaccaatgctccataagttcttgatggtgggctactttttgttgtacatcctgccggtgatgaacaccacctttatgctcaaggacagcagcgatttgtttagttgcattacctgcgtcagtggtggcgacgtcgcgtttggtacgtactcaact

SEQ ID NO: 35637 - DNA, 1612 bp, Zea mays
  unsure (1)..(1612): unsure at all n locations
  Clone ID: MRT4577_132499C.1
gggcgaggggtttttgaagtgtactacgcgagagcttgccggagggtgtggatccctgtgacaataataaactgatataagcagaggaagcggggaggaagctgcgagttggagggggccgggagaggcgtctctggttattgctgggagtggacgggccgggaaggagacgagaagataagggcgccgcgcgcggccatggctggaagtgcgccggcgacggcgatggacaagaccagctttgccaccacgtgcagcctgctgagccagtatgtcaaggagaagaagggcggcctgctgcagggtcttggtggcctcgccatggcgccggcagctggagaagaaggagctttccggccgccgaccaccatgaacttgctgtcagcgctcgacgacgcgccggccgaggagcgcagcgagaaggccaccgccggggagccaaaacaccaggacaaatgcaccggcggaaatccaagggaggaggcagccggagaggaggaggaggaggcgcagcagctgaccatcttctacggcggcagagtggtcgtcttcgacatgttcccctccgccaaggtcaaggacctgctgcagatcatgagccctggcggcgacggcgtggacacggcagccggtgccactgtccccacgcgtccgggcaacggcaacacgagtacttgtcggttacacaagtgccttttttttttgtgctgtgcgacagatctgccgattgcgaggaggaattcgctccacaggtttcttgagaagagaaaggacaggtaacggagtggtcgttcatatgcttttcttttctctcgggttttgagtgatggagaacagttgcattcagaatcaagtcctgacatactttgtgtgtgtgtgtgttttcattcgagttccaggataactgcaaaggcgccataccaacaagtcaacagctctgttgttggcgtcgaggcgtccaagcaggcggctggagctggggtggaaaaaccttggctggggctgggccaagaagcgacaacagcgaagctggagatgtgatgaatgttgcccgacaagaaggtgcagtgcacgagattcacggatggtgcaggtcgtagcttcaggttaaggtgaaggataacttaccgtcgggtactctactcactttactgctctactactactactgctggtgacgaagttagcaagaaacgttcttctgctaccggtgggtcggtcggtcagccgttcgttggcgagattgtttgctgctggagacggacgtgctcgcagcagtttcgctgggccgtgagcgcgccatatgttgccacgaatggttggttgttcggtacgttgaggaacgatgtgtatgtagtgtgcacgtttccggtgcatcttgttctcctcaagcctgtcctgtatgtttacccccctgcaccccctcctccctctttgtagagagagggtctgtatgttcagtggaagatggttgttctatttgatttttattttatggacatgtatgctcggtgatgtgttgtggtatgctgtatatcgggtatatcataattacgagggtgcagagtatatccctnagtaaaaacaagattatattttctcatatacttag

SEQ ID NO: 35638 - DNA, 421 bp, Zea mays
  Clone ID: MRT4577_13249C.1
ggaccctcgaggccggccgggggaaaccttagcccgctgtcatggcatatctagctccagagaccgccgcctcttccctccgcaaacccatctacgtatccgcctcttcccggcgccgttcctttctccctgacgacgtcaaagccatcgacagttctgaacatcccatcctctcctccctccgcatggccgcctccgacgccgcacgcatcgccgccacctccccgaaacgtcgctgcacccacaccgttccacacgctccgctcactcctctagaaatcaccatgccaacacgacaaagcgatcccacacatctcacgaatcatcaagaaacaaagaacctatactgcctgtctcttgcgtatgggtcgggcgaacgaaccggaatcgcgacatgtacagatgcagatgtgtaccagag

SEQ ID NO: 35639 - DNA, 197 bp, Zea mays
  unsure (1)..(197): unsure at all n locations
  Clone ID: MRT4577_1324C.1
ntnggacatcggctcgagatagaatctagctcggaatcgaatgcgcgtacgtgagatttagctcaagaatccacgcctgatatctcctcatcttcatcggccggagatgtcgtcttcgtcatccgcgctagccaaatgcaagtcggcaatcggatccgcagccggatctgccaaattcgaggccaaagggaaattct

SEQ ID NO: 35640 - DNA, 157 bp, Zea mays
  unsure (1)..(157): unsure at all n locations
  Clone ID: MRT4577_132500C.1
ggtccctgcgntgcgtcttgggggagagagagnagtgngagacccgcganangctgccgtgtagggactagggaccgtagagtaagcnacagcganaggagggagagggggatggccggatcgggccgatcangcaggactggnagccgtggttgtt

SEQ ID NO: 35641 - DNA, 789 bp, Zea mays
  Clone ID: MRT4577_132501C.1
atgacgaaggaaacgcaacaagaagctaggagtcagaagaggaaggctactatcccaacacctcaggaggaggagctcgatcaagagatcagggatttggaggctatccaccaacaggtgcaaaggaaaagggaaaagatgcttcggcttgccgatcttcagaagaggatcaacaaagccactgaaaaaatgtgtcacctcactcagaatgaccaagaccgaaggccccaacatagggagcttcgccaagaaagcccattcaatgatgatgaatggtatggtgactttcatcagggaaattttgcttttgacaatgcttctcccttggcagcagaattgcaggctaccctgtggccaccgtcatacaaggcacctcagctccccatgtatgacgggcactcagacccgaagcaattcctgatgagattcttgcggctgagagctcaagcacctacagtgcccaatgagatcgtcattgaggccatgatcaaggggctccggccagaacctacggcgcaatactttgcaagtaaggcactgcaaactttagaaaagcttctccagaaaatggatgagtacatcagagctgacaatgattttcggcaaagaagggaagaagcctacagatactctaaactggccaggggcttcggatggagattccaccccatgcatgtcagtcagcaactagaagggcatcaccacgctcagcaacagcgtgattttcaggaggagtccaaagctcgcacagtcaacggcattgtgcctgagtcgaagcacatttactaa

SEQ ID NO: 35642 - DNA, 945 bp, Zea mays
  Clone ID: MRT4577_132502C.1
ttttttttttttttttttgaaataaaaactgtttttttttttgctttctcgggcttaaggctttgcgttatctccttttcctcttctgccgccgcagtagcaccccaactggaacctaagtaaaactttacctgagcttcccacagctagaaatcacacagatagcaagctaaagtcatagtttcttgcttcaacacctcgctaccaccactcagctctcactaactaggcctatcatgtcgttacagggtgacaacaccatgtgatgtatgtaaccaagggtgcacgcaacatgcacctgtcccaatacatacagtccaagtgcaaggtgcactcttcttccttggccgaacgaacagactcgtcttctgccttccagattccaacaccagcaacagccctcctcatcagtggtggagtaccccagcagtccggttcggccattgatggatggaccaaacgacctactccactcggagaaaggaagatgaaatagaaactactttttagaaatgctaggaattgaagttctgcgccgcagctgtcgcagtagaaacctaaccggaaccaaagctaaaactaacctggcctaattgagactcctaaactctctaattaacccaaccgggactacaacgaccacactaggatgagtgaggggaggagagttcaggtacggtacagggccattatggcaagaaaaaaaaaatgtacagccaccgctgggtggccagcgtccttgctgacagcgagtgcagctcagaacgacgccacggccggcgcggcggtggcgaccatgtcgccctccttcttgcggcgcatctcgaggaccttgcgatgggagttggagtggatgctgctcacgaaggtggggctgcacgccgggcggtactcgggcaggagccggcccgacttgtagcggacgccgcacgcattgcacagcgt

SEQ ID NO: 35643 - DNA, 255 bp, Zea mays
  Clone ID: MRT4577_132503C.1
ggggggaaaaaacaaggcttggaaattttttttttttgggaaaaacgggacctttttggcgtccagcacacaaacaaaggcccggggttcaagcaagagggccccgggccccgccaaatttattttgggggggtcggttttttttcccaccccccaacccaacaaaagtgcatgggataaagggatttggttaagcgggggcactcccacggggttgttaaagacctttttattaagtgggggagggggtaattt

SEQ ID NO: 35644 - DNA, 396 bp, Zea mays
  Clone ID: MRT4577_132504C.1
gggggggggaaccaaacccttaattgggggggggcggggaagaaatccgggccggttcccaccttaaaaaaaaaaggggagggccccaaaaaggtttgggaaaattaaaaaaaaaaaggttttttgaaagggggaaacaggggggaaaaaaggggttagtttaaacccaaaaaaaggggggggggggatttttattaaaaaaacgggggccggggccaagccaaaattttcccttgaggaaaggtaccgggcacaaagggtttgaaaacacctattttggaacccttcccaaaaaaaacctttgggtgggggccagggcccaaatacccatgaagggggaaatgatcccgaaaaccttgaggggggtaaaaagattttccctgggggggccccaaa

SEQ ID NO: 35645 - DNA, 873 bp, Zea mays
  Clone ID: MRT4577_132505C.1
gggtacctcgctcgcggccgggccgggattcgcgccgcagacagtgctcgcgaaacgagcgttcggcggcaacggcagcggccagccgtgagagaagagatgatgctgataaggccgccgcggtttctctccccttcgccctcgccagggacacgcgagccccgcctccgccggcctctcgatgcctccagaatcttctcctcccctcgtcctcccggtcgccgttcccgcccccgcccccggctcgtctctccgtccaccgatctccgccgcctcactgcccgcatcgtcgacctcacccgccgcaggcagctcgcccaaatcatggaggaggtggaagcagcgcggcgtcgtgtgcgtgggggcgggttgctcaacaccatcgtcatgaacgcggttctcgaggcatgtgtgcgctgcggcgacgtcgaccgagcgctccggctcttcgaggaaatgcgcgggcccatggggtgcggagtcgacgatgtttcctacggcatcctgctgaagggcctgggtatagcaagaaggattgatgaagcattcgaaatactggaatcaattgagaaagattcttctattggggggcccaggctctctcctcatctcatttgtggttttctaaatgcccttatcgaagcaggagatatgaggcgtgccaatgctcttgtcgcccgtttccgcatggtcctttacgaggatcactctgtcttactatacaacttactgatgaaggggtatattaagagcaacttccctctcggagctttgactgttaaagacgagatattgcgtcaagggttgaagcctgatagatggacctacataccatcatttctgcctgtggtaaatcagcagagattataaagc

SEQ ID NO: 35646 - DNA, 362 bp, Zea mays
  Clone ID: MRT4577_132506C.1
ccggccgggagccaagcaacttcgacgacttgttgaagtgatgcttgaacagagcgagcttcttttggaccactatgtccagcatgtcttgcaactgtggataaaactgcgactgcgagtcaagctgtgagagagcgaacaagtaccctgacctgtacgacatcaccaccgtcgcggacgccaccgacgtcctcaccgacggcccgaagaagaaggacgaggcctgagttatccgagggcgccgcgacatgccaaggagaccaccctctactgcaggtggactgccaactgcaagcgctacccctgccactgctgatgcacatcgatcgacgaccatgcatatgattattatctatctagct

SEQ ID NO: 35647 - DNA, 466 bp, Zea mays
  Clone ID: MRT4577_132507C.1
gccggccgggtcgggctagagaagcatccagactggaaggaaggaaaggatggaagcgtatatccgtaaaagcatggggggatgcatgcaaaaggtagagacaaggacgctgtggaaaaccaaggcaaggctgctgggtctggaacggaatgccgtgtgacccagcatcctccgttcctcttcctccccttcacccagtcaattccgatcccaccaattcacgcagacgcgtctgtccatttaccaggacaacaaaggcccagccaaggccagcagcagcagcagcagcgcatccgaagatgtccttgtaaactgcgaagcttctgcagcctccctccctagtcccttcaattccctcttggcaaagcaattcttctgtgcagtcttgtaattcgattcagaaacagcggtccaaattggagcccctctttttacaaaaaaaaaaaaaaaaaaggcccctagggcc

SEQ ID NO: 35648 - DNA, 1301 bp, Zea mays
  Clone ID: MRT4577_132508C.1
ctcgaccggccgggccggcaatccagcacaacagcatcatggcgctcaccacgagcactaacaaccaagccttgcttgacgctcagctagagctctggcacacatcctttgctttcatcaagtccatggctctcaagtctgcagtggaccttggcatagccgacgccatccacagccacggtggcaacgccaccctgccccagatagtttccagggccgcgctccacccgtccaagatcccctgcctgcgtcgcctcatgcgggtgctcacagccgccggcatcttcagcgccgcccaccgctcgccggacgacggcggcggcgagctcgtctatggactcacaccggcgtctcagctcttggttggcggctcttcaagcctggctcccttcatgtccctggtgttacaccaggtctacgtgtcgcctttccttggcctcggcacatggttacagcacgagcgctcagacccgaccctgtttgagatgacgcatgggctcactgcctgggacctgaatgaccacaagccagccttcggcgagctcttcaaccaaggtatggtctgcgacagcagcttcgtcatggacatcgtcgtcaaggagtgcggcgacgtcttccggggtctgagctcccttgtcgacgtcgccggagggcttggcgcggcggccgtggctatctcgaccgcgttcccgcatgtccagtgcagtgtgctggatctcccgcatgtcgccgccaatgctcccgctaacaccagtgtcaagtatattgctggcgacatgtttgagagcattccaccggcagacgccgtcttccttaagtgggttttgcatgactggggcgatgctgattgtatcaagatactcaagaactgtaagaaagctataccttccagggatgcaggaggaaaggtgataatcgttgatatggttgttggaggccagtcgtcaaacattaagcacaaagagactcaggtcttgtttgatctcttcatcatgacgatcaatggcgccgagcgagacgaacatgagtggaaaaagataatttccgaagctggatttagcgactacaaaatcatacccgttctaggtgttcgatccatcatcgaggtctacccatgattatttggcgaatacgtgtttcgtttttttctgaataagttgtttggttaactagcatgggacgagtgtccatgagatcatgtgtgatgaaaactatgtttgtggtgaagtaagcactttgcaatgatattagtaccatagcatttgttcaaaaaaaaaaaaaaaaaaaaaggtcggccaaca

SEQ ID NO: 35649 - DNA, 401 bp, Zea mays
  Clone ID: MRT4577_132509C.1
tgcctgcggtcgactctgaggatcactagtatccggggcgtactgtcattgtgcgccgattccgatcgccgtgtgtgaaaccaccccgttgccacggatcgaggtattgtagcacacaacgctcacatgcccagttgacagattgctttttatgcccagccaactgagcccactcagcgggatcacggtcatcttggatagtgaatcctgaggcattgttgaagccttagtcttgatagggggacttaacacctgatctgcagctctatgctatccagcttatttgatgcgagatagttaccagaagctacccagcattcaagactcgatgccgctgaatgacaggattgaatagctcaaggatacgttcacactcttttacgacccgtatagctgagcta

SEQ ID NO: 35650 - DNA, 417 bp, Zea mays
  Clone ID: MRT4577_13250C.1
acttcgcgggcggcagaacgaagctgcttctctactggtgacccgagaactggaaatgtcccgcgtacttgcgagggttgcgagaccgaggcccggtggagttagtggtggaagagtgggggggtgtcaggaatcgccttctactaggtaaggaccgcctctacagctggcgccaacaaggagtgttgaattacagtgttctttgcggcacctagtgacccaacgaggaggattcttgtcgaagaccgaactgcctgctggaccaggacccggttggcttgtgcctacggtcctaccagttccaccaaggagtggtcgcccactcgcggctagaagtcttccacgcgctggggaaggacgacaagctccagtttgacacccacgcgcacctcgacttcggccagtcgataccgggag

SEQ ID NO: 35651 - DNA, 138 bp, Zea mays
  Clone ID: MRT4577_132510C.1
cctccgtcggcatcgtcggcacgctcttcgccgggcccggcccgttcgtgcagctccccacagcgctgtcgctggaagatccggcctacgcgtgcacggaggcgaccaacgtcactgctcgggtgctgtccacgtgct

SEQ ID NO: 35652 - DNA, 114 bp, Zea mays
  Clone ID: MRT4577_132511C.1
gtcgacgcctgcgtccgaatacagatacatcgatgttctcctgtttcctgagcatgactggttgcagtggagacctcgaaattaaattatacgatgtgttacaacttaagcaag

SEQ ID NO: 35653 - DNA, 149 bp, Zea mays
  Clone ID: MRT4577_132512C.1
ggcacacagttctacttgatcacggaattctcctaccagatttaccaaggagaattctgcaaataaaatgcatggagatgtgatgggatcggctttatcttacaaagaaagtagacatttggacgaatggcatgattcttcccagatat

SEQ ID NO: 35654 - DNA, 281 bp, Zea mays
  Clone ID: MRT4577_132513C.1
cggaattcccggatcgactccacgcgtctcgtaaaaaaaaaacaaaaaaatcacgaagaataaataaaagctaatctttagaaaaatgccaaaaaaaaaaacagatcaaagggggggccgttttaaaggatccaagtatacttccccgggctcccaagcgtggaggttgttttttggggaacttataatcaatatgggtgggcgcggtttttcaacgttgggacagggaaaaccctttcgttccccaatttaatatcttcgaaggacatcgcccttttggc

SEQ ID NO: 35655 - DNA, 367 bp, Zea mays
  Clone ID: MRT4577_132514C.1
ctgcatttacacggattctctgctgcaacccccttcgcggcgggaccatgtttcagaggcctcgccgccaatcgacaagcacccttgctagttgatcgacaacacccttctggcctgcctcaacaatgtgaccgatggttgcgtctgccgctctctcggcaagctcgagtacatcgagccctgctacaccgtcaaggataagattggctacagcatgatcacggactcagaggaaaaaggtctgattactccactttggagtgttataattgaactatctataagcaacacaggcattggactcgcctatatggctgctgactacggctacaaacttacactcacaatgcctctctccatgagcatg

SEQ ID NO: 35656 - DNA, 274 bp, Zea mays
  Clone ID: MRT4577_132515C.1
aaagtgaatagaataatcaagattgaccaatttttgtagactaacggttgaagaatgcgagtaagagtatatctgctgagacccgaaagatggtgaactatgactgagtagggtgaagtcacgagaaatcgtgatggaggctcgaagggattctgacgtgcaaatcgatcttcaaacttggtcataggggcgaaagactcatcgaaccatcgagtagctggttccctccgaagtttctctcaggatagctggagcaagaagaaattagttagat

SEQ ID NO: 35657 - DNA, 325 bp, Zea mays
  Clone ID: MRT4577_132516C.1
ggcagatctacgctagagcgattgagccatatctcaaccgatagggacagtgcggcttggtggtggcgctcgggcccggaccgctctacggcagcggcctgccgaggccgcgcttattcccaggcgaccgcgtggacaccgcgtggtacgtcaccgacccgctgttcgaatgggcgcgcgaagcgcactgggccatgggcgggatcagcttgaagcgcgttcggcgcagggtcgcatcgagggttcgcgggacaagctgcggacgcgagcgcactgagacaccaggatcaaggtcaaagccaagggccgctcatgtggccacatg

SEQ ID NO: 35658 - DNA, 188 bp, Zea mays
  Clone ID: MRT4577_132517C.1
ccgactagcaacatagagagcacagtagtgtaccaacactggcagccaaaatatttagcttgcatgtgctcacttgggcttctgcatgtgctgctaccgcagccatcttgcgacaatgctcagcagcacctatggcttcattttttcgcccatacctgtcaccagcggtgtcgtcagtacgagaaaac

SEQ ID NO: 35659 - DNA, 1430 bp, Zea mays
  Clone ID: MRT4577_132518C.1
cattgggtacctcgaggccggccgggcagcatacgtgtatcctttcctttcttgctagctccatccactccactccactctgctactccacctacctcccggctcccggatccggcgatggagaagatgctccactcagccccggcccacggcaggctcccggagtgcttcatcttcccggccgacaagctcccgcaggccaaggccacctcagcgacggtctccctgcccatcgtggacctctccctcggccgcgacgaggtgcggcgcgccatcctcgaggccggcaaggagatcggcttcttccaggtggtgaaccacggcgtctccctggaggcgatgcaggacatggagacggtgtgccaggagttcttccggctgccggcggaggacaaggccgggctgtactcggaggacacggggagggcgacccggatctactccagcaccatgttcgacacgggcggcgagaagtactggcgcgactgcctccgcctggcctgctccttccccgccgtcggcgacagcgccgcggcctggcccgacaagccccggaggctccgggaggtggtggagaggttcacggtgcagacgcggggcctggggatggagatcctgcgcctgctgtgcgagggcctcggcctccgccccgactacctggaaggggacatcagcggcggcgacgtcgtcctccacgtcaaccactacccgccctgccccgaccccaacgccacgctcggcctgccgccgcactgtgaccgcaacctcctcaccttgctcctccccagcatggtacctggcctcgaggtcgcctacaggggcgactggatccgggtggagcctgtgcccggcgccttcgtcgtcaacttcggatgccagcttgaggttgtgacgaacgggatcttgaagagcatcgagcaccgggtgatgaccaacctgggagtggcgcggacaacggtggccacgttcatcatgcccaccacggactgcctcatcggccccgccgccgagttcctcagcgacgacaacccgccgtgctaccgcaccctcaccttcggcgacttcaagcgcatctacagcgttgtcaagctgggctcgtcgctcaacctcaccacaaatctcaagaccgttcagaaggagctctgattatccatcaaactttgtagcctccctcgaattggcggcgaggaactagctagctagctggcaagatgtagtctgtgtcatcactgtcatgttactgcccggacgtcatgctgatgatagaaatgacggaataaaaatgaaatgccaaatatgcgtgtatggcgcacgcatattcttgctaagccgccactaaagaacaggctattttcaagccaccaaaataagcattttcaacaaaaataacttatttttcgatagcgaaaaaaaaaaaaaaaaaagcggcc

SEQ ID NO: 35660 - DNA, 1559 bp, Zea mays
  unsure (1)..(1559): unsure at all n locations
  Clone ID: MRT4577_132519C.1
ttttttttttttttttcccccgccgccgccctgtctggcactgcgcatcccacgcggacacgcaatctgtaagtgcaaatgagatcaagaaatatacacgtaggtagagcatacgtgtatcctttcctttcttgctagctccatccactccactccactctgctactccacctacctcccggctcccggatccggcgatggagaagatgctccactcagccccggcccacggcaggctcccggagtgcttcatcttcccggccgacaagctcccgcaggccaaggccacctcagcgacggtctccctgcccatcgtggacctctccctcggccgcgacgaggtgcggcgcgccatcctcgaggccggcaaggagatcggcttcttccaggtggtgaaccacggcgtctccctggaggcgatgcaggacatggagacggtgtgccaggagttcttccggctgccggcggaggacaaggccgggctgtactcggaggacacggggagggcgacccggatctactccagcaccatgttcgacacgggcgccgagaagtactggcgcgactgcctccgcctggcctgctccttccccgccgtcggcgacagcgccgcggcctggcccgacaagccccggaggctccgggaggtggtggagaggttcacggtgcagacgcggggcctggggatggagatcctgcgcctgctgtgcgagggcctcggcctccgccccgactacctggaaggggacatcagcggcggcgacgtcgtcctccacgtcaaccactacccgccctgccccgaccccaacgccacgctcggcctgccgccgcactgtgaccgcaacctcctcaccttgctcctccccagcatggtccctggcctcgaggtcgcctacaggggcgactggatcagggtggagcctgtgcccggcgccttcgtcgtcaacttcggatgccagcttgaggttgtgacgaacgggatcttgaagagcatcgagcaccgggtgatgaccaacctgggagtggcgcggacaacggtggccacgttcatcatgcccaccacggactgcctcatcggccccgccgccgagttcctcagcgacgacaacccgccgtgctaccgcaccctcaccttcgccgacttcaagcgcatctacagcgttgtcaagctgggctcgtcgctaaacctcaccacaaatctcaagaacgttcagaaggagctctgatcatccatcaaactttgtagcctccctcgaattggcggcgaggacctagctagctagctggcaagatgtagtctgtgtcatcactgtcatgttactgcccggacgtcatggtgatgataggaatgacggaataaaaatgaaatggcaaatatgcgtgtttggcgcacgcatattcttgctaagtacttactcaataaagtcatatttgttttgaattaaaaaaaaaaaaaaaaaaaaaaaaaactcgttaccctcgtgcttaaaaaaaaaaaaaaaaaaaaaaaaaaaannaagggccgcccccgacatggtggcctcgtcgacccggaaatt

SEQ ID NO: 35661 - DNA, 208 bp, Zea mays
  Clone ID: MRT4577_13251C.1
aatcaataatacaacaatcattcgactatcataacagggctgggttcacctaccatgttcaagccatataattcatactgttccattggctcaggatcaggctctcatattcaagtttttttatcacgaataattcacctacatgtaccaaaacctttatttttcttcgttggttttttttattttcttcaactttcaactttcacac

SEQ ID NO: 35662 - DNA, 1429 bp, Zea mays
  Clone ID: MRT4577_132520C.1
cattgggtacctcgagtccggaccgggatccttctcaactcaatctcacgtggcacgcagtcatcatccagccatccgctccaggctccagctctaggggagtgcctcctcctcctcctcctcctcctcctcctcgtccttcccctaccctccccgcgcgcagatcccgacgcgggacgcctgcattcccttgcgcgggacgcgacaactccacgctacacagttcacacgccaagcgagggccgcatctagatccgcgccgccgagctgacttgactattgcaaggacttgaggagcgggtgggttgcgatggccgctgcggggaggaatgcgggcgtcctcgcgctcttcgacgtcgacggcaccctcacagcgccgcgcaagggggtgacgccagagatgctagagttcatgaagcagctgcgccagcatgtgacagtgggcgtggttggcggatccgatctggtgaagattaccgagcagctcggcagtacagttattactgattatgattacgtcttctccgaaaacggcctggttgcacacaaaaatggccaactaattggaacccaaagtttgaaatcatttatcggagaagacaagctgaaggaatttattaacttcactcttcattacattgctgacttggatatcccaattaaaaggggtacattcatagagttccgaagtggaatgattaatgtatctcctataggaagaaactgtagccaagaagaacgggatgaatttgagaagtacgataaggtgcataacatccgacctaaaatggtgtcagtgcttcgtgaaaagtttgcacacatgaacttgacattttctatcggagggcagattagttttgatgtatttccccaaggttgggacaaaacttattgcttgagatatcttgaggaatttcaagaaatccatttctttggggataagacctacaagggtggcaatgactatgagatatttgaatctgaaagaacagttggtcatacagttaccagccccagtgacacagctcagcaatgcagatctctctttttgtcgaagtgatctccagcttatttccaacacatatttattaagtcatctttgactgaatgccttttggtatttttttcaatacaatacatgccaccattttttctttgaataattggatctataccattaaaagattgcaactttagatatatactattggctccacatatcattgactcatgtgaaccatacatgtaagtgagataacaatgatatatatttaaagttgtaatcctttaatgatactactgctccgtattcacaaattttcagattacatgtatacaactggcgaaaataaatcagatttacctgtttttaaataaaaaaataaaaactgttttagatttccgggattataaaaaaaaaaaaaaaaaa

SEQ ID NO: 35663 - DNA, 1426 bp, Zea mays
  Clone ID: MRT4577_132521C.1
cgggctcctcctcctcgtccttcccctaccctccccgcgcgcagatcccgacgcgggacgcctgcattcccttgcgcgggacgcgacaactccacgctacacagttcacacgccaagcgagggccgcatctagatccgcgccgccgagctgacttgactattgcaagtttgcaacccaccgccacgccttcttctccccccgcgatctacccggcccgggcgccgttgctgctactgctattactaatactactaccgcgtcgtagcggaggcagggacttgaggagcgggtgggttgcgatggccgctgcggggaggaatgcgggcgtcctcgcgctcttcgacgtcgacggcaccctcacagcgccgcgcaagggggtgacgccagagatgctagagttcatgaagcagctgcgccagcatgtgacagtgggcgtggttggcggatccgatctggtgaagattaccgagcagctcggcagtacagttattactgattatgattacgtcttctccgaaaacggcctggttgcacacaaaaatggccaactaattggaacccaaagtttgaaatcatttatcggagaagacaagctgaaggaatttattaacttcactcttcattacattgctgacttggatatcccaattaaaaggggtacattcatagagttccgaagtggaatgattaatgtatctcctataggaagaaactgtagccaagaagaacgtgatgaatttgagaagtacgataaggtgcataacatccgacctaaaatggtgtcagtgcttcgtgaaaagtttgcacacatgaacttgacattttctatcggagggcagattagttttgatgtatttccccaaggttgggacaaaacttattgcttgagatatcttgaggaatttcaagaaatccatttctttggggataagacctacaagggtggcaatgactatgagatatttgaatctgaaagaacagttggtcatacagttaccagccccagtgacacagctcagcaatgcagatctctctttttgtcgaagtgatctccagcttatttccaacacatatttattaagtcatctttgactgaatgccttttggtatttttttcaagacaatacatgccaccattttttctttgaataattggatctataccattaaaagattgcaactttagatatatactattggctccacatatcattgactcatgtgaaccatacatgtaagtgagataacaatgatatatatttaaagttgtaatcctttaatgatactactgctccgtattcacaaattttcagattacatgtatacaactgacgaaaataaatcagatttacctgtttttactttacgtcgtgttaattgagatgcttcttgggacatgagtatgtaataaaaatggtaattgtc

SEQ ID NO: 35664 - DNA, 830 bp, Zea mays
  Clone ID: MRT4577_132522C.1
gaccccgggctgtttgaattcggcacgaggcggagggacgctccaggtggctgcccccggcagcggaaagtttcctgcggcccctgcccgcgtccaacagtcgcttcaccgtcggcgccgtcggagggacgctccaggtggctgcccccggcagcggaaagtttcctgcggcccctgccctctttcaccaccgcgggttctcaggcagagaaaccttacctgtgcatcatggagattgcagagctcctccaggagcttgtttcatggtcacgtcacctatgttggggccaattagggtatccttagtatgtagcgcgagccccaaccaccataggccaaggatttcggatatatcgcaactacaaaaggaggggtcctccagagggaaaggaaggtcgtaccaggataaagatgactctgagaacatcgatgatatatgatagcgatatcatgttctccagtaatggaccacctatctctttggcaagcacttcccgtcctcaagacacttcagctcctggggaaagagagatggagattgtggagctctttaaaagggttcaagcactgctgcgagctagggtgaaaggcagggaaaagaagcctgaacctgcaaaagtgcatggcgaaaggggcagtgttgattcacttattaagttgcttaggaagcactctgttgaccagagaaggaagagcggtgacgagaaagagcagaattttgatgtaatgaggagaagcaatgattctggaaatagacgaggttcaaccatctttggcacaaaagtgacatccaggaagagcagaagaaagcacctccggcaccctttcaa

SEQ ID NO: 35665 - DNA, 447 bp, Zea mays
  Clone ID: MRT4577_132523C.1
accatacgtagagttgagaacctgaacatagttccgcaatgaagagggggattgtccaacattagtatgcactgatctggcagctagaggcctggacctggatgttgaccatgtcatcatgtttgacttcccatcgaattctgtatgtgtttgagtttgcatttactcccatcatagcgatttttatgcagtctttgtggtaattcttgtgtttttagattgattaccttcacagaaccgggagaactgcacgcatgggagccaaaggtataagcaattcttagctgtaactgaacatatgtgcttgctctttatcgttaccttgctaatcttgttacattctgtgcatatcatctcttatattttatcatgatctcattgcaaaccagaaactagcctccatcattggaatctaggctatcatctgtccatctcagagtcttcatt

SEQ ID NO: 35666 - DNA, 173 bp, Zea mays
  Clone ID: MRT4577_132524C.1
taccgactagaccccctttctgattccgctgagccacgtgctgtccacgaatctgttcactctcctcaccgaggtccgcaagaactgcacctgctccttgcttatgccctactgcaagacccatgttactttttattacttatactaattcatttttttatttcctttttttt

SEQ ID NO: 35667 - DNA, 350 bp, Zea mays
  Clone ID: MRT4577_132525C.1
agaagggcacaacaacgacgggcctttctttttcaatgttttttgtgaaaatccgagaccaatttatcagggggcgtgtgcctcaccagttcggctggacggccggagagtagaccttgaatttgatcactttacggtcatattcacaaatcacaatactgggggcttcgaccttcgttggttaggttcccagtaccttgaaataaactaaccagtggcttggcttttggcctttgaaggctgcctagtttttgacgcaaattgagtatcgttcgtttcggcctttggctgtactatgaaagaggctggattacacctttgccttcgcaccgtaatccggcccttgggac

SEQ ID NO: 35668 - DNA, 519 bp, Zea mays
  unsure (1)..(519): unsure at all n locations
  Clone ID: MRT4577_132526C.1
ctagttctagatcgcgagcggccccctttttttttttttttggattcaaattcgtccattttttcttaatttcaatttacacctaacaactttcccgggagaagccagggatgtgtgctctcccagactgccacaaacgacttgaaactgcactggctgacttgaaagcaacactggctgaactgaaggagtcaaatgagcaaggtgccgagattggagaagctgagagtacaatcgcagaagttgaagccgttgtcaagcccgcggaagattaaactaaaaaaactcttggtttgctgaactgttagcgcacatccttttttcgcgtattgggcccttgggggcctcttgccagatgtttgaggcgggaagtcctgggcccttgtcctggcttgtgtcctgagctcgcgagcctgtggcgcntggcctcgcgtcgcgtgtccgttgtccggggggcccccctccctttcttggccgtgggtgggtggtcccgcttggcgggccggggggggggccccc

SEQ ID NO: 35669 - DNA, 428 bp, Zea mays
  Clone ID: MRT4577_132527C.1
attcggctcgaggcccttcgcatcatccctggttttcataacccttcacgtggctgctcttgggtattatatcaaagggcttatgactcctaggctgtacaaagttgctatgactcttgtcatatccgttggctcacctgtttgttctgcagtactaaccatactggttgcatcggtggcatctaatccaacgaaaggctcgagtggccacagtctgagtctactggacccatcttatgcatgcaagtacatccccatcattgctagtgtcagagaacaccaacctgctacctggccctcgtatttaatggacactaaatgagctagccttcctgagtcctgctgggatgatttcatgcttactgcctatggctgacgcaagcatcataatgggcttgtacttagacactggactttatttttttgga

SEQ ID NO: 35670 - DNA, 269 bp, Zea mays
  Clone ID: MRT4577_132528C.1
tggggccctttccaaattaaaacctgtttattttttttttaaaaaaaaacattgcttttttccctgtaaaaaatgggccgggcccattttacaccggttaaaatgggttattgctttccctaggtcttttacggcatgggccccaattttacatggcttttgctcacaaaaaaaaaagccgggctccctattcctaagcatttaaaggggagggggccccaaaaaaacttgggggggcttttgttggggccctttgcgaacattttttt

SEQ ID NO: 35671 - DNA, 1780 bp, Zea mays
  unsure (1)..(1780): unsure at all n locations
  Clone ID: MRT4577_132529C.1
ggccggccgggatagtgtgcgcggccgatctatgcacctcacctttcccttgctgcagttggaggaagtgtgctgcaggtggaagaagagaggggagaagctggttcccctctccatatctctcctccccagctccctccccctctcatagatcgatcacacagcctgcaggcacagacaagagttaggctgttctacctgatcacatgaccctccagcaattctctcatccacacacaaactgaagcaagaattattgcttatctatatcctgtctgtcctttcctctatttcccccctcccctttctatttccattgtgcagcttgttattagtagatagcagtggatcgatgtgtgatggaggaaacaagctagctagctagctaccagctgaagcagcagggagaagaaggatagagagagagagagagagaaaacatcttcttcatccatagtctcggcctttcttcaccaggtcgtctgcagatctgtctcctgtgaccttccagaggccaagctaggccaggaaggaaaaatggcgtccccgtcgagcaccagcaacaactcggccttctcccctgtggcggcgtcggccgggacgacgatgcctggtgccggggcgccgtgcgcggcgtgcaagttcctgcggcgcaagtgcctgccggggtgcgtgttcgcgccctacttcccgccggaggagccgcagaagttcgccaacgtgcacaaggtgttcggcgccagcaacgtgaccaagctgctgaacgagctgctgccgcaccagcgggaggacgccgtgagctcgctcgcctacgaggccgaggcgcgcgtcaaggaccccgtctacggctgcgtcggcgccatctccgtgctgcagcgccaggtccaccgcctccagaaggagctggacgccgcgcacgccgagctcctccgctacgcctgcggcgacgtcgccgccggcatccccaccgcgctccccgtcgtcagcgccgcccccaggctctccacggcgccaatgacgacgacgagccccggccagttcgccgccggcatgtacggcagcggcaggaggcttggggtcgtcgacggactagcagcgccaccgctgcctccgtcgggcggcggcggcggctgctacttcatgcggaaccaccacaacaacgtcgtcattagtagctccccaggcgctgacgtggcgcccgtcctgccttacgcttccgtggctaattgggcggtgaatgccatcagcgcgtcgacgaccaccacctccggatcagagagcattgggttggatcacaaggaagggggagacagcagcatgtgaagtgaaggggaagcgctgcgctgccgtgaatggtaaggcgctgtttctttctctctgagtaattaagtttaatcctgcacggcggccatgcccatgcatgatgtatagctactgtatgtgctagctagtttgtgtgttttaattatatacatatatagctgttcttcagcaggttgattaagagctaaggagcaatctatctatctatctatctacctaccttttcgctatatatatctatattagccgacntgantatatatanccganggcntctatcccctttctggcaagttgtggccaaaccattattttggagtaccaangtnatccgagccgagntcttggacccccctcttttccaggntaaatccttcgttccccgcaaaaaaaaaaaaaaaaccccggggggggcccggtncccatcccccnaaagggggttnaaaaaaatggncgg

SEQ ID NO: 35672 - DNA, 655 bp, Zea mays
  unsure (1)..(655): unsure at all n locations
  Clone ID: MRT4577_13252C.1
cccacgcgtccgaaaaagaagaaaaagaagtcaggttctgaagaaaatgttcaggtagaagataaacaagttgcagggaaagatcccaaaccagatgatgaaaacaagactgcgatggacattgagaatggagaagatggaaaggcttcagctgatgatgcagttgttagcaagaaaaggaaactgcaagaagttgaaggaagcgaaccccctgccaaagaagatatcactgccaccgaagatgatgtgaaaggagcccagcactgcatcgaaatcaaataaacggcagaaactttctgagcctaaaattgcattccaacgggtaaagactgaaggtattaaatttgctgatgaaagactacaagataattcatattgggccaagggtggtgccgactctgggtacggtgcaaaggcacaggagattcttggacaagttagaggaagggattttaggcacgagaagaccaagaagaagcgcggaacctacaagggcgggttcattgatctacaaacccactcgattaagtttaacaattcagatgacgagtaatcgcatcatttgtgcaagtcgtgcgacgttttccattcttaccctcgttactcggtcagtcttgctgaaaggaagagtgaaggcatgcctgcttntgcacga

SEQ ID NO: 35673 - DNA, 272 bp, Zea mays
  Clone ID: MRT4577_132530C.1
tcgcctgcgcataggcagacagatacttaacgtagcgtactagctacgaggtgacaccacagagtctcaacagatattccttccttgtgcttgttgctcccatggcgagctcaacgaatgcttacattgtgtcgaaatgatcacttgctcctagtgccattgatagacagtttctcatttcagttacttaaatcgagttccatcgtccagctatgccagcttatactgtaccagacatggacgctgtcaagccgttcgaacaatatattgcc

SEQ ID NO: 35674 - DNA, 119 bp, Zea mays
  Clone ID: MRT4577_132531C.1
ggaatgtagctcgtgcgcttgcatccctcctgcacatcctcgctttccgagtgaaaggtgatcacatacaatgtccgctgaactcacgacccgatagcgtaccggggaaacacctgatc

SEQ ID NO: 35675 - DNA, 365 bp, Zea mays
  Clone ID: MRT4577_132532C.1
gtggtgtgggtttgttttttttttggggggttttttttttttttttttgtttttggggtttctatataagaatgagcaacataatttttggggacactagagacaatttacaatggggggatatccacaattccaaacactggacatattggtttaaagaggactggtaaattctttacacaaaaaaactggcttaaggaattttaccttgggcctgacacttttgaagctagagggggagctgacatgaccacaattttaggagcgctaaagcttgggggatttgtcacgacaaagttatgatctatgggcaggttcgacactgatagagcctttcaagacttttaccaccttgggcattttgg

SEQ ID NO: 35676 - DNA, 762 bp, Zea mays
  Clone ID: MRT4577_132533C.1
cattgggtacctcgaggccggccgggatacgccgccatcttcgcaagccaccgcaaccgaagcccgccttcgccgccgccgcctctgcgatccccgcaaggtcgcaaacatgtctaccgtgctccagcgcccgacccccggcacggtccagtgcttcggccgcaagaagacggcgtcccgattgagctcatcaggccggagatgctccgcctcaaggccttcgagcccatcctgctggcggggcgctccaggttcaaggacatcgacatgaggatccgcgtccgaggcggcgggaagacgtcgcagatctacgccattcgccaggccgtcgccaaggggctcgtcgcctactaccagaagtacgtcgacgaggccgccaagaaggaggtcaaggacatcttcacccggtacgaccgcacccttctcgtcgccgaccccaggcgctgcgagccgaagaagttcggtggtcgcggcgcccgcgccaggttccagaagtcctaccgttgagcgctcggctgcccgcgcttgccgtaccgatgcctgtgttgtcccaacttgccagttcgatgcctgtacccgtggcttaattttctatcatcggagctacttatgtggttctataactagatgctgttttaccttcaacttgtgctgttgtaccttcatatttggactttttaagccttgtgtcggacgcctttggcattgaaatatgagagattttgaagactatctcccaaaaaaaaaaaaaaaaaagcggcc

SEQ ID NO: 35677 - DNA, 806 bp, Zea mays
  unsure (1)..(806): unsure at all n locations
  Clone ID: MRT4577_132534C.1
accccgagccgccaaaaccctagcgccgccgccgcgaatcccgcacgaccccaaccatgaccgtgctgagccgccctaccccgggcacggcccggtgcttcgggcggaagaagaccgccgtcgcggttgcgtacacgaagccggggcgcggcctgatcaaggtgaacggcgtcccgattgagctgatccgaccggagatgctccgcctcaaggccttcgagcccatcctgctggcggggcggtcccggttcaaggacatcgacatgcggatccgcgtccgcggcggcgggaagacgtcgcagatctacgccatccgccaggccgtcgccaaggggctcgtcgtctactaccagaagtacgtcgacgaggccgccaagaaggagatcaaggacatctttacccgctacgatcgcaccctcctcgtcgctgacccccggcgcntgcgagccgaagaagttcggcggacgtggtgcccgcgccagggttccagaagtcgtaccgttgagcgctcggctgcccgctcttgccggacagttgcctgtgttgtcccaacttgccagatcgatgcctgtacccgtggcttaattttctatcatcggangctacttatgtggttctataactagatgctgttttaccttcaacttgtgctgttgtaccttcatatttggactttttaagccttgtgtcggacgcctttggcattgaaatatgagagattttgaagactatctctgaagttatgtggntctatatctagatggtgtttcagcttggtacttgtgttaaatgaatttatgatatgt

SEQ ID NO: 35678 - DNA, 270 bp, Zea mays
  unsure (1)..(270): unsure at all n locations
  Clone ID: MRT4577_132535C.1
ctcccaagccagtacccacagtcctacgagcagtcgcacgcaagtgtcaagagacaaaacggtcganatggctcgcacgcaatctgccgtagcggtcgccgtggtggccgcggtgctgctgctggcagcngcggcgacganctcggaggccgcnatcacctgcnggcaggtgagctcngccatcgcgcnctgntctnntangcnngcggcacggggtccggcncctccncgtnntgctgtannggcgnnagnaantnaagagcnnganag

SEQ ID NO: 35679 - DNA, 1938 bp, Zea mays
  Clone ID: MRT4577_132536C.1
ttgggtacctcgaggccggccgggttccctgctcagatttttttccagcgcgcgtgagcttccttatctccttccagcgcacgcagctgctcctcctcagcctcctctgtgccgcacgccctccccagccaaagttcctctcatggcgctcggctccttcctctccctctcgctctcttttggccggtgcttctctctctcccttacttccctcccgtctcctctctcttatgcgcaatttcggggcgaattccctggagcccggggagaacgtgtgggtggacatcgacgtgctcatgacgcacgacgtctgcgggcccggcaccatcggcatcttcaagaaggagttcggggaggatgccaaggtctgggaccgcgagaaggtcgtcatcatccccgaccactacatcttcaccagcgacgagcgagccaaccgcaacgtcgatatcctcagggacttctgtctggagcagaacatcaagtacttctatgatatcaaggacctcagcgatttcagggctaatccagactacaagggtgtctgccacattgcgcttgctcaggaaggccactgccgaccaggcgaggttctcctgggtactgattctcatacgtgcaatgctggagcctttggtcaatttgcaaccggaatcggaacactggatgcaggttttgtgatgggcactggaaaggctcttctcaaggtgccacctactatcaggtttgtattagatggagaaatgccgccttatttacttgcgaaggatctgattttgcaaattattggtgagatttcagtatctggtgcaacctacaaatcgatggagtttgttggatcaactgtagaaagtctaaccatggaagaacgtatgacactatgcaacatggttgttgaagctggtggaaagaacggtgtcgtgcctgctgatgaaactacatttaaataccttgagggtaggacatcagttgattatcaacatgtctaccgtgatgctgaggccagattttttagtgactaccggtttgatgtatcgaaactggagccagtagttgccaagccacattcgcctgacaaccgtgccctagcaagagaatgcaaagatacgccgccatattcgcaagccaccgcaaccgaagcgcgccttcgccgccgcccccgcccccgccgcctctgcgatccccgcaaggtcgcaaacatgtctaccgtgctccagcgcccgacccccggcacggtccagtgcttcggccgcaagaagacggctgtggccgtcgcctacaccaagcgggggcgcgggctgatcaaggtgaacggcgtcccgattgagctcatcaggccggagatgctccgcctcaaggccttcgagcccatcctgctggcggggcgctccaggttcaaggacatcgacatgaggatccgcgtccgaggcggcgggaagacgtcgcagatctacgccatccgccaggccgtcgccaaggggctcgtcgcctactaccagaagtacgtcgacgaggccgccaagaaggaggtcaaggacatcttcacccggtacgaccgcacccttctcgtcgccgcgccaggttccagaagtcctaccgttgagcgctcggctgcccgctcttgccggacagttgcctgtgttgtcccaacttgccagatcgatgcctgtacccgtggcttaattttctatcatcggagctacttatgtggttctataactagatgctgttttaccttcaacttgtgctgttgtaccttcatatttggactttttaagccttgtgtcggacgcctttggcattgaaatatgagagattttgaagactatctctgaagttatgtggttctatatctagatgttgtttcagcttgttacttgtgttaatgaatttatgatatgtttgtcataaatttatgatatgtactggttgttgctatgc

SEQ ID NO: 35680 - DNA, 249 bp, Zea mays
  Clone ID: MRT4577_132537C.1
agcttgctacattccctcctgcgccgccgtcccccgcaacgttctgtgggtggatggggcgctcgtttcttctggatgacaagccgatgcacgcgcgtatcttgctgcgcgaaggttggggttctggattgattggttagcagtaggctatgtggtgcacatgattgaattattggtggtgtgcctggtgtgtttatgtaagaaggtaaggaagagggcgaaatggtgaagcacaacaacgttatcccc

SEQ ID NO: 35681 - DNA, 143 bp, Zea mays
  Clone ID: MRT4577_132538C.1
gcacgagtgacaatcaaggtggagataatggctatgataatcaagacagatatagtggctatgataatcatagtgggtatggtggtgggtatggctataaccaaggcagatatgggaactatcaagaaaatggtggatataac

SEQ ID NO: 35682 - DNA, 187 bp, Zea mays
  Clone ID: MRT4577_132539C.1
gaagcatcaaaaaaggaggcggatgtggcattttcgcctggaccatcggcgtccacctcgtcatcgtcctcggcgtccaccttcagggtaagggttccgttaaccgctgtgtcgaggggcgctttctcgcctgcctcggtccagctgattggttctcgattcggtgcgcaggtgggggttgcgcaca

SEQ ID NO: 35683 - DNA, 293 bp, Zea mays
  Clone ID: MRT4577_13253C.1
tcgtctgatccagatccggcgccttcgttgttgatgacctccagcttggttaggttgatgttgcgggaggagaaggcggagagcaccttgagcacgaccaccatggagccgccccggtgcgcgaccaccatgctggtcttggcgtcggcgtccacgcccagcgccacgggcgacggcggcaggtcggcggcgcgcgggctggcgatggtggctggtgtacagcatccgatttgaccgcagcatctgcacggcgcccgtcgtgttctacacggcatcgcggtccaccccgaggc

SEQ ID NO: 35684 - DNA, 565 bp, Zea mays
  Clone ID: MRT4577_132540C.1
cccattcgtccgctacaatcaccaactgaagacttcatactgttcaatgtgcaagaatggggaaaacatggccaagatgaggctgccatacgcttgcaagcttctgttccaggtgagtgcccttttgatcctggcggctactttgttgtcaatggaacagagacggtcattctaattcaagaacagctagcaaagaatcgtattattgttgacactgatagcaaaggaagattcctattatagtggtgatgaaagcgatgggaatgggaggtcatcaggaaactgtacaaatggttggcagggacccaagatacggatatatcttatttccatctattcaggaatgtgcttcagagagaatagaaggtgacgtatcctggtgccacaaatcagaagggttgcgtcttggtgagatggaacgtgattgtctaattgcatatggcgcgagcatgctaatatttgaacgtctactgttatcaagtgatccttatcaagtccaggtttgcagaaaatgtggcttgttaggctactacaatcaccaactgaagacttcatacttttcaat

SEQ ID NO: 35685 - DNA, 942 bp, Zea mays
  Clone ID: MRT4577_132541C.1
gaaaaaaaattctcaaactggtccataaggatcgtagcaaaaggaatcctacacaggtaaactgaacataagaagaaaaataaggcctcatgcttacgattttccttggtcggttcgatccggatgtttgtgcattgcgacgaacgcaaataaagtctttaccaaaatccaatatacacaggtaaaaaaaagcctgaaaagaaaaataagttctactgcttgcacacttcctcggccccacatggaagaaaagatttttcagcctttctctagtgccatcaatgctcgctcacggttcacacactcgtccaccagaccaccacgttgcgacttgcgagcctgtgcagctgcgtttgcgcatctggtttcttctgggtcatctatatacttctctcctagcaggaacaggaacagcaagccactcgctcctgccggcgagacgatggagcgggagccgtcgcgttccactgacatgtgggctaggtatgcgcttcgccggcgacgtgatgcggcacggggctggtggacccctgtgggtgcgccgactggtaccgaaccatcggtttgtggacgttctacccgaaggcggggtccggcggcgcctcatgcgtataggacctgcgcgttgcagggcgccatcccggcgaactcggcggagcccttgaccacctcccactccaccacttcgtcctcgacgccgggtaccgcggcggcggcggatgcggcggcagaaaccgtgcccacggcgacgtcgagcccggcgccgacgacgtatatcctccgcctcccgccagcgacctccccgacctcgccagcgacaacgtgcggccggcgcacctcggggggcaccccgctgccggccaccatccgccactcgtcccgggcctcgtcgtaccgcttcagccgccactccccgtactccgccacgactcgtgccgaatt

SEQ ID NO: 35686 - DNA, 729 bp, Zea mays
  unsure (1)..(729): unsure at all n locations
  Clone ID: MRT4577_132542C.1
aaagggggggaaaataaaaaaatataaggggggggggggggggggggagcaagaaaaaagggggggaatnnnncctcaaaatatactaactacatatgacctgaagaaggggtatgtaaaaacagaggggggagttaaactaaagaataatggggtaaccgggagagcaaaaggagattggtcttcggggacccacgggaaaagtggaaatgcagcaccagagaatacgggattaagagccccggagattgaacctgatgctaataacactgccaaaaaatagtggggtcgaggtctatgggattaagcattgcgggcagggtgccctggattgaccccccccaccagttagaaccgtaataccgtgatcggtgtaattcctagggatgagaccactatatggccgcggcaagcgtgggcccaaccaagcaaatggcagccagagcaccagaagagaatcattaggcccccaagcatgtttccattattattccagcaatccagcttggtggcacagaagagtgatatgattcttcgtttggggagttcctgaaatcttctcccccgatatttccgtagattctttcgcaaaaagccgatatttcggtagatcgatttgttcttcaattgtaactgtaggtttcaaggtggctaatgagtaatgagcctaataatgaacggtaggtttcaagatggccagtaatgatatacacggagttagtcgtcaat

SEQ ID NO: 35687 - DNA, 285 bp, Zea mays
  Clone ID: MRT4577_132543C.1
tcgttttcacgtagaaatatcgactgtagaactctgggctggtttaaggatccattacaattatccgttgacggtagtcaaaaggtttgaggaggctgtcccatgagaggatgtttacagatgaacatttttcccatggttctgtaaaaagtaaactactcctacatgagctatgactgtaccaaaagcgccatttaaagccattgtacgtgggcagaccctactatcgttttgagccaagaaccaagcgtgcaccatgcatatctgttgaactcatgaagatga

SEQ ID NO: 35688 - DNA, 281 bp, Zea mays
  unsure (1)..(281): unsure at all n locations
  Clone ID: MRT4577_132544C.1
ctcctccccgagtaccgcacggcgtgcagcgccacgttcgtgagaagcatcaactccagctcccaccgcaaggtcctcgagatgcgccgcaagaaggaggcggcatggtcgctaccgcagcgccggccgtggcgtcgttctaagcttgtgcctcacctgtcagcaaatgagccgcaatgagtgcggcggcatggggggtgngcacgcagcggtggctgtacatttttttcgcccgggacgtaatagcattgnntacgtactgaactaccctcacttctctt

SEQ ID NO: 35689 - DNA, 296 bp, Zea mays
  Clone ID: MRT4577_132545C.1
caaaaatatctctccctaccaaattttgaggcgatataaccaacacctttcatgaaaaaccaacaaccctctctagggtcaaggcctcatcaacagcaattgataacagtttctttttttttttaaaaaaaacaaatcttcttttttgaaaaaaaaacaagatcgagagaagacatcaaatggaaaataattaacttgctcgtgaaattaatcttagtagtatgaattgaagcaatactactatggtattatactgctgagtactgatctcgtcaagcatgttgagaagcttgctc

SEQ ID NO: 35690 - DNA, 588 bp, Zea mays
  unsure (1)..(588): unsure at all n locations
  Clone ID: MRT4577_132546C.1
ccttccgctccagcctctgcactttgtgcgggaaaaggaaacaagggagcccgtgctggctgccggctgatagaggcaatgcaggtggtactcgaacgcgccactcccggtggtgctcagaacaaagcggggggaaacaggaacaagctgacagaacacactgacgatcgcgtgaccgaacgccacatccacatgagcaggccgcacatgaaaattacagaaaggaacagcacacggtacagcggataataccaacatgagcaaatctttgagaataacagcgaaacatctcaaacaacaagaaagaacacgcgagcaaagcgaaggaagaaaacaaattgaccacttaaacgaggnggcaatgacaatatggaaaggagagctaatgagcatggaaacaatgntaacactttaccataggaaaagaagggagaacaagctagaaattagctcaatgaagaggaacntgnaaagatggaagcaggtatagcgggaagggaacaaaatagaaggccaggaaaaatggagaagggtgagctatntttacaggaagaggggcaaaaaacgggtgctaaggaanaggaacaa

SEQ ID NO: 35691 - DNA, 571 bp, Zea mays
  Clone ID: MRT4577_132547C.1
cattgggtacctcgaggccggccgggaagctaatagccgatggtatccacgctgacagctccagctaacgaccttgtgtccgctggctgtggtgattctctcttctccctccgtgcattgattacactgactgtgcgtagtacttcatcgtacccaggtcaagaaaaaaagctagataatatctagccaaggccagacatgcagaagatatatggatctccaaccagctacatagcaaagctgctcatgacgacgtcaccttccatggtgatgggcatggacaaagtgataatgatgaggaaaagacggcaggactcaaagatgctgtgcaacatcaagttcccgtgcatcctgtaccgtcggcatccagacctccatcggcttcatgaccgcgtggctaccagaaccacatcatatccggggatgtcacctgcgacaccggcagagataacgccatcgatgccttcagctacggtcaactgatacgcatggacaaagcactgcagacagctgtatctgtcacgctgtacttctgtcacagcatggggatgctgcatctgtacatccagcg

SEQ ID NO: 35692 - DNA, 232 bp, Zea mays
  Clone ID: MRT4577_132548C.1
cagaaaaatttttccttctaaacgggctgtcaagggggtggaaaacactgaaaaagttaggcaagactttcaaggaatgtcttctgttttacaatcaccaagtgaacgaaagttactagggaacataggacaaaactaagctctctatagtgcaggaatgacttggttttgtgcagagacatattgagtataaaatacctacctactgtcatatttgacctcaaacacccat

SEQ ID NO: 35693 - DNA, 394 bp, Zea mays
  Clone ID: MRT4577_132549C.1
aaaagtacaagactcgcagctatatttcacaccattttattctccatccatgaggcgcactggtaacacttgcagtactggttcagtaactaacagatgcctgccgttcttcaaactctggcgtgcgtagttgaacataatgctcagagcaaggatggcttaacggattcggctatgactgcccttacaccgtaatgggagggtggatttccggcgtgggagggagtgcctccggggccggatcgctatgctcaggcaccgggtggtgctcgggaaaccgtttgcggggcttaggtacgggtcggtactcaggcaccggcagaggtgcacagtgaaagtggcctaacaagcgctccttgagcgggaaacagagacaatcggacgctcactgccc

SEQ ID NO: 35694 - DNA, 1198 bp, Zea mays
  unsure (1)..(1198): unsure at all n locations
  Clone ID: MRT4577_13254C.1
ggaccccttttatttttttttttggaatgttaccattgatttaatggaatgaactgaacctgtccagcgatcttattacaaacaatcgagtcggctaccactgaccaatcgccaatgcaccttggtaaattattgcgcgctaccactaaccgaggggtcaggcttgtgagaagccagcaagaagtccagcatgaccttgttgaagcgagccggatcctccagctgaggagcgtggcctgtcttcggtatcacctccagcctagcggtcccgttcagagccctctgaaccgcaaacgccttctccaccgggaacagctggtcgtggtctccccatacaatcagcacttcctgagatattggcgtcacttggaacttctctgtcccgaccgtaatccccttcagcagatggacaagccgctccctgttctgcgtgaagagtttctggatgaagtcacggagcaggaagtccggcgtcaccagccgcggcggcgggcggcaggaggccagctccaggagcttccgcagcgcggcgggctcggcggggaggaggatctcgtccacgccgccccacccttcgccggcgcgcttcaggaacgccctgtcgtcggcggccgtcttgagcaggtcggagctggcgatcaccacggggcccgaccctggcgggccccgcctcgcgggccagccagtacgccacgaacccgccgtagctggtgcccgccacggccacgcgccggcgctccatcccgggcagcgcgcccagcagcgccgccagcaccgcggcctgcgtcgcctccgtcggcggcggcgccgtctcggacgggtacgcgctgccgccgaagcccaggaggtcggggatgatgacgtggaagtggcgcgagagcggccccacctggcagcgccactgccagtcggcccggggcccgaagccgtggaccagcaggagcggcgggagctcaggctccccctgcggagcccagtactggacggtgcaggtcgccccggcgccgccgtcggggtacgggagcgtgacggcgttctggtggaggccggcgcgcaggcactcgcggcgggcgaagtagtcgagcaccggcaccaggctcaggctggcccccatggctctggctctggttggtgacagtgacacggagctactagtccggcacttcatttgcagagtgtgtgcaagcccacgcgnccg

SEQ ID NO: 35695 - DNA, 423 bp, Zea mays
  unsure (1)..(423): unsure at all n locations
  Clone ID: MRT4577_132550C.1
cttttgtttttttttttagggaatgcagattttactagcttaccattaaaagcttactgatggacttgataaatacacatctagatcatgttttgagctgagtttactagagtttattacaacgtctgaccctgcactgtacaattcacagggatggcgctcaatcatatcgcctcaaagacagcagagacttccccccactgtccagttgaatagttgatggcggtacactgtagtatgaactgagaggggactgtcaacgccgcacttgatcaccaggcaaaattaccgatgaatggtctgtgctgaaccgcagcagaggcaccgagttgttgctccctgaaaccagacaacatgttgtatatgctgccattttcttcccgtactccaagcgtnagattcaccttgtccctgcgttcagcc

SEQ ID NO: 35696 - DNA, 343 bp, Zea mays
  Clone ID: MRT4577_132551C.1
ggcaaatgagggtataaggctgatcgcagggacaaggtgaatctgacgcctggagtacgggaaggaaatggcaggatatacaacatgttgtctggtttcagggagcaacaactcggtgccactgctgcggttcagcacagaccattcttcggtaattttgcctagtgatcaagtgcggcgttgacagtcacctctcagtcaacattcaactggacagtggggggaagtctctgctgtccttgaggcgatatgattgggcgccatccctcattagattggaatctgttgtagtgtttcggggagcagaaacagtgctcacaggtccagaaacttgattgctgga

SEQ ID NO: 35697 - DNA, 586 bp, Zea mays
  Clone ID: MRT4577_132552C.1
ttttttttttttttttaagttatgaatattttttttaaaatgacacattatgttaaaagacctaactaaatctcgagcacagtatatgggcgtatttgcgttaaaacgtaaaacggtacattaaacgactttttctaactgatttattattgatatagcacatgataacaattaaaataattacatgcataaataaagagagtaatcgcttaaaatattatatttacgttgtcatttaagtctctttacgttgaacaatatacatgaaattatagaaatatgccgacgtaaaagggcaatgcgtaaaatctcaaaatatataagaaatatataaaaattgataacagcagtagcaaaagcattacatgttaaggctaaatgtgaaatttcattaaattcgttttagtaggtcagaagatatgacccaaaaatatggttctggccactaaaatggctctcctgtaaaatttacttttttcacttacgccagtatacgtaggagccatcgctatggtgtccgctgtcggcctgaggtgacattagtcatcgtacgcctcccgcacgtctcctcccgcgcgttgttggc

SEQ ID NO: 35698 - DNA, 1518 bp, Zea mays
  unsure (1)..(1518): unsure at all n locations
  Clone ID: MRT4577_132553C.1
ttttnnatttttttnnngggtaatgcagattttactagcttcctattaaaagcttactgatgtacttgataaatacacatctagatcatgttttgtgctgagtttgctgcgtttattgcaacctctgactcagcatgtacacatgaaaattcacacggataaaaaaaatcttgaaagatctcactggagattttgagacatacttccataatcttcagtatgcgcaagggttccagcaagataatccagtaaacccgttttcctctggaaggcctgctccaccatccctgcaatgtcagaacacgtgcccttcaaatggtcgaggaagaaaaaatccatattcatatgctagcatgaatggtgcagtcccttgccctccttacccatctggctatcttgtgtggagtccatttattcaaccagatgatcctatggctatgaggacccgtggaacaggcacctacttttctgaccgaaaattgcgcaagaataggccacccactggacgtgtggagagaggaagaaatcagttcgcttcaaataattatcaaaggctacatcaccatgtcagaacagatatgcctgcagatatgggatctggtttggaattgaggcatgagctaccacagatacatattcctggtgcaactgatcatggaatgccatctccaatgagtaaaccaatgtcatcgtcatctcttaactctccaagagatcaattgaaggtaccagctcattctccatcttcccaggttcgaaggaataattttcatggcaatggtttcatgctcctgcaagacagtaagcttgagtccaggacctttaacagtaaacttgagtctgggatattggggccgttgcctttagaagttacctccaaagaccatgctagcagatcagaatccgcttccagcaatcaagtttctggacctgtgagtactgtttctgctcctcgaaacactactacgacagattccaatctaatgagggatggcgctcaatcatatcgcctcaaggacagcagagacttccccccactgtccagttgaatgttgatggcggtacactgtagtatgaactgagaggtgactgtcaacgccgcacttgatcaccaggcaaaattaccgatgaatggtctgtgctgaaccgcagcagtggcaccgagttgttgctccctgaaaccagacaacatgttgtatatcctgccattttcttcccgtactccaggcgtcagattcaccttgtccctgcgatcagccttacaccctcatttggcaaaaaagaaaaaaaagaaagaaaacaaaagggacagcaagagaagcagaaggaataaagatgcagggttatgacatgtagatagtactgttactaggaaaaggtcccccttcagacatgttggagggctagttggttgtgttgttgcggagaatagcgtttttagtagcctttgttggcgtttatataacgagtaaggggtctggcaggatctcgcaacaaataaattatctcgcaagtcaa

SEQ ID NO: 35699 - DNA, 404 bp, Zea mays
  Clone ID: MRT4577_132554C.1
gtcgaagcgaggcaggggaggttcggcggttaacaagttacgcatgacgctggggctgcgggtgacttttacggtgaactgcagcttacaacactctccctcactaaaacttacaacatttcttcatgatcataaactccaccaccaactccttctccacaatcttagtctgcaacttggtctacacagaacctaaaaacaacaaattttaatgatgaatcaatgcaaatgtgcactgaagctaatcaacataagtccatcaaaccatccactaacgttgaattcacaaattgtatagccacttccttgaccagaaagttttgtataagagctgattttgcatgggttgtcttttttgcatttggtgtaattttaaaaaaattaaaaatttgcttgatgtgttt

SEQ ID NO: 35700 - DNA, 652 bp, Zea mays
  Clone ID: MRT4577_132555C.1
ccgcactattatagctagctactttattatcaataaataaatatctttggaccactgctgtatatgtgttgtgggtgggtgactgacaccagaaattaaagagaatcagatccagggcgaggcgcggagcggcgtgacgacggacttgacggccaggtacttgtcgagcgcgtgcatgccctcgtccttgccgaagccgctcatcttgcggccgccgaaggggcagtcgctgcccatggcgaagtagcagttcacccacaccaccccggcgcgcaccgacctcaccacccggttcgccacgtccaggtcccgcgtcaccacccccgcccccagcccgtaccgcgtgtcgttcgccctcgcgatcgcctcctccaccggcttgaacttcatcaggcacatgacgggtccgaagatctcctccttcgctatgatcatgtcctccttgacgttggtgaaaactgtgggctcaatgtagtagcctttcccttccggaccgcatggccttcctccagtcaaaagagtggccccttctcgcttgccatggtcaatgtagctcagaaccctctcatactgagccttgccacctgcgggccctggtcggcgctagggtcgctgaacgggtcgcccacacccagcttctcatactttggcc

SEQ ID NO: 35701 - DNA, 394 bp, Zea mays
  Clone ID: MRT4577_132556C.1
aaccaagaatttttttctttttgataggaaacagcagtaaaaatctcgctctctgaataaagctgcagtgttgctgctagtgaagcttgtacatttgatcctaaagatgtgttgaggaaaaccaacttcagaagctccaaggcatttgcaacagccaatgatttccatatgcctctttcaataatcttatttcggtgatccttaatgattttttcttgaggtttgcagaagacttccatgttttcactttctgcatttgaatgtctgcatgatttttcaggatcacagaacccgctttctgaaactgcactcgttttggtttcacctagtatagcctgattattctaaaatgaaaaaaaacattattgacaaatatatgtctgtgtatcgggct

SEQ ID NO: 35702 - DNA, 398 bp, Zea mays
  Clone ID: MRT4577_132557C.1
tccgcaccactaagctgagagcgcatctcagcaacgagcactacacagacatgtgcgctagccaaggatattataacgtccttgcgctgctcgcgctttgcgcgagcgcaacaaatgcgtgcgttattgcacactgctcactggctcgtagctgcattctttcacacacactcctaccagctgctgacctggcctcacgaacacccagcatgtgcaagcctatatgctacaccacgcgattgcggcgagcgctttacaacaaccagtcgcccaatcgcaactacaatccttggctcatctaacaatacgaaccattgcaacgcagcagcaacagcagatcctaccagcactgagccacctagccatggggaaccgtgtcgtctactggcaacaggagc

SEQ ID NO: 35703 - DNA, 1493 bp, Zea mays
  unsure (1)..(1493): unsure at all n locations
  Clone ID: MRT4577_132558C.1
ctggtcacgcctgtttagtacccggtccggnnaattcccggngccggnaaccagggcttaatggatgctgtttgcttgttagttcagcttcaccaatttctcaacagtgtgtttgttcttctccaggacagtagaaaggaaaggagaaaagcttgttgtgtctgtgtgtgagctgcagaccccgagaggatggatcagtatgaggtgctggagcagattgggaaaggagcatttggttctgcactcttggtgaggcacaaggccgagaagaagaagtatgtgctcaagaagatacggctcgcgcggcagaccgaccgcacacgccggtctgcccaccaggagatgcagctcatcgcgacggtccggaatccgttcattgtggagtacaaagattcatgggtggaaaagggttgctacgtttgcattgtcatcggttactgcgagggaggagacatggctgaagctatcaaaaaagtcaatggaaaccatttctcggaggagaaactttgcaagtggcttgtgcaacttctcatggctctcgattatctgcacgcaaatcacattcttcatcgggatgtgaagtgctccaatatatttattgccagagatcaaagcatacgccttggtgactttggtcttgcgaaaatattgacttcggatgatcttgcatcctctgtggtaggaacaccaagctacatgtgcccagaacttcttgccgacataccgtatggtactaaatctgatatttggtctctaggatgttgtatttatgaaatggcagctctcagaccagcatttaaagcctttgacatgcaagccctcattagcaagatcacaaagtcgatagtatcgccgttgcccacgagatattctggttcctttaggggactcatcaagagcatgctacggaaaagcccagaacaccgaccaagcgctgcagaactgctgaagcacccacacctccagccatacgtgctgcaggtccagctgaagtccagcccctctcgcaccacgtccccaatctaccaagctctgacggacaaagtgaagaagatgacgttcgtgagcgacaccgccgattccgcgaggaggagggctgcgagacggagctctctggggagcgagaggaccgtgacgttctgcaagccatcccccgagcgcaactccgtcagctccacgcggagcatcaaggagtacacgacgacgacccagagtgccagggagctctctgtcggcagcagcctgcaggtcgacgacgaggtcacgagtaaggctgttgtgacgaagacggcaggcgttctacggactcccagcaagagccgtgctccggcatctaagacgttggtggcggctagaagccggctggatcctccgaagacgtcctatgccagaacgaaccgtgccgagttggactcaaggacgcctctgagcaagagcagcgcgcggacggcaaggagagcatccctcccgctggcggcgtacagagcacccag

SEQ ID NO: 35704 - DNA, 2775 bp, Zea mays
  Clone ID: MRT4577_132559C.1
cggacgcgtggggtaatttcaggccgcttgtcctttcttgcgttttccttccttgcctggtcgttccgaaaccccgcaccttccccatttcatttcccccgcagagtagtagttttttactggaatttgtaccggaaccagggcttaatggatgctgtttgcttgttagttcagcttcaccaatttctcaacagtgtgtttgttcttctcacccccacgcggctcgctccctcccctccctcccttcctcctttcccacccttctctctctctagccgccgtgctctccttttctatccccacggcaggcttctccctccctccccctcatccccattgcctttgggaggctatatagggcgggactggactggactcgaatggaaagggagctcccggcgagtttgaacccaccccaccccacttttctcgcctcgtcccctcgcgcttcccgccgccgacgccgcgtctatctggtctaggaccaaatgccgcgagatcttcgcgcgtgacgccgtcccccccgccggagccgccctccgagctccgggccacggagcgcttcgtcccggatctctctggtggctcaggacagtagaaaggaaaggagaaaagcttgttgtgtctgtgtgtgagctgcagaccccgagaggatggatcagtatgaggtgctggagcagattgggaaaggagcatttggttctgcactcttggtgaggcacaaggccgagaagaagaagtatgtgctcaagaagatacggctcgcgcggcagaccgaccgcacacgccggtctgcccaccaggagatgcagctcatcgcgacggtccggaattcgaacatagtttagtacacagattcatgggtggaaaagggttgctacgtttgcattgtcatcggttactgcgagggaggagacatggctgaagctatcaaaaaagtcaatggaaaccatttctcggaggagaaactttgcaagtggcttgtgcaacttctcatggctctcgattatctgcacgcaaatcacattcttcatcgggatgtgaagtgctccaatatatttattgccagagatcaaagcatacgccttggtgactttggtcttgcgaaaatattgacttcggatgatcttgcatcctctgtgggaggaacaccaagctacatgtgcccagaacttcttgccgacataccgtatggtactaaatctgatatttggtctctaggatgttgtatttatgaaatggcagctctcagaccagcatttaaagcctttgacatgcaagccctcattagcaagatcacaaagtcgatagtatcgccgttgcccacgagatattctggttcctttaggggactcatcaagagcatgctacggaaaagcccagaacaccgaccaagcgctgcagaactgctgaagcacccacacctccagccatacgtgctgcaggtccagctgaagtccagcccctctcgcaccacgtccccaatctaccaagctctgacggacaaagtgaagaagatgacgttcgtgagcgacaccgccgattccgcgaggaggagggctgcgagacggagctctctggggagcgagaggaccgtgacgttctgcaagccatcccccgagcgcaactccgtcagctccacgcggagcatcaaggagtacacgacgacgacccagagtgccagggagctctctgtcggcagcagcctgcaggtcgacgacgaggtcacgagtaaggctgttgtgacgaagacggcaggcgttctacggactcccagcaagagccgtgctccggcatctaagacgttggtggcggctagaagccggctggatcctccgaagacgtcctatgccagaacgaaccgtgccgagttggactcaaggacgcctctgagcaagagcagcgcgcggacggcaaggagagcatccctcccgctggcggcgtacagagcacccagcggccgtgccgccagtgtcctcaaccagctggactccccagacgtgtccgtcaacgcgcctcggatcgacaggatcgcagaattccctctagcttcatccgaggaccccctggcgcccatgaacaagaacctgtcctcggcgcccggccacgacgtctcatgctccacgcctcccttcatcaaccggtccatcacgaaggacaagtacacggtgcaggtgctgcacaggggtgacggggacaacgcgagcgactcgtcggggcgcaacgccaccgccgcgtcgagcggggggtccaacgactcgaggcagcagcggttcgacacctcgtcgtaccagcagcgcgccgaggccctggagggcctgctggagttcagcgcgcagctgctgcagcaggagcggtacgaggagctgggcatcctgctgaagccgttcggccccgagaaggcgtcgcccagggagactgccatctggctcaccaagagcttcaaggagacggcgtcatagcggagggagggagggagacgtagctgccagttttctaacgtgcaatgtagttcaggtagtctaagctatgttaggaccccccaggtgtaggtgctggaaggaaggcaacaccagctcagtgttgccctaacttaaaagaagtccccatgttgtttagccattctccggtttaccagtaggaaaactgagcaatcgatggtagcattaggactagaaagctgagccccaggatcttgaaaccttgctgtaacataatcctgtgtcacttgcaatgatgctgatgcatgtagtaaaaaaaaaaaaaaaaaaaaaa

SEQ ID NO: 35705 - DNA, 343 bp, Zea mays
  Clone ID: MRT4577_13255C.1
gggcaaaaaaaatgatggatgaaatttattactctgcagaaaaaagacattcgcaatcagagagaaagcacggatcacctatattttacatacaatactttttctttacgagtttagattttaaaaaaatagttttctaaggaacacgtgatgttttgatacataaatatcctgaaccaaattaacaaaaacaggaccaattcctgatttagctgacaactgatctcaatcttgttgaacacatgttcttaagtctccattctctcgctcttccctgccttaattttccttctccccttctagttcccagcagtgaacctaattttgagcatcgccttcggcc

SEQ ID NO: 35706 - DNA, 404 bp, Zea mays
  Clone ID: MRT4577_132560C.1
ctcactctcacgcacacactccacagtgccactcgtctcgctcgctcgcgccagctggtccggcagcagacagcatgggttcgtccggggcgcttatccgaagcagctgcacagctgggggaacaacttttcgtactgtgcgctgccctgcttgcttcatcagatctagatgctgtaaatttcaaggtctgcgctggtgtcaagaacctacaactatgtctgggtcaaaaggcggaaccacgcgcgaggaacgctagggcgctcctgcttaacagtgagggtatatctgggccacttcccacggccttgggcgccttctacaacttgagttacctcgccctcgccaacatcatgctgaccgggccaattccaccatgagtcgggcacctgcaccactgcctgcg

SEQ ID NO: 35707 - DNA, 294 bp, Zea mays
  Clone ID: MRT4577_132561C.1
gggttggggttattttttttgtttgtttttttttttttttaagggtcggcccaaataaactggatgtttttattgcaaaaaaaataatcggtgtagtttcataccgagcccacgggccacgttaaatatctgggtattcgccccctaaaaatgaacaggcccactaattctgagccggcccccatccaaagggttgcctggacaggcccagagttaagactgggcaaccaggcttggtttcgggctagcctttaaccttaagcgcaagaaccttctgtggactgattattttca

SEQ ID NO: 35708 - DNA, 465 bp, Zea mays
  Clone ID: MRT4577_132562C.1
ataggggcgaatatttttcaaatcggaaaaacccgttagttggggccgggggcggggggggggggggccccccatgggcccagcccctttttccccaaaaaacacccgggggggggccccccccccggtccccctttaaaaaaaccccccccccccgggcccagggggtcccccccggcgatttatatatcccaaggggggggcaaaaaaaaaaatggggggggagaacccccggccggatcaggctggaaaacccgggggggggaagaaccacaaaaaccaccccggggggggagccaaagaaaccgggacccgccttttttttcgcgggcgttacccaatatatcccggccccgggcccgggtttccccaggaagggggtttggagcccgcaaaccctcaagcgggccaaaataccccggtatatcccccaagggtttgccgcaaatgggacaaggggggggg

SEQ ID NO: 35709 - DNA, 684 bp, Zea mays
  unsure (1)..(684): unsure at all n locations
  Clone ID: MRT4577_132563C.1
aattcggcacgaggcacgagaggccctaggggctttaaactgataactaccccttcggggcacaaggtttccaagggctgatattatttcttctctaggattttctcagggcactacgtgcctcgggcccttcgatcggcccggaggccagtgcgccctaggtctctttgtgactttacaagtcttagcgcgtagttatccattcggggtgctctgatgtaaaatctcctgaagctcctcctctggccagggctaagggaggtctccgaggtgcggtggtcctatcttagtgggtcccgcgacaactttctgtactgggatcattgaatgcatcttagcagctgctgcaggtatgcacttcctcgggcgctgacaatgttcatgtggactcgtgcatatcttagttaagtaattatcaatttactagtgatatgtttcacaatcacactactattacaaggcttatattagactagtgctatgcgatcagttttaagttataatttttccgcctttttgcctctttggtcaatattttttctttttatttttaacctgattgcttattacttctgtatgttgnttggttattcataatatgtctttaccaagtagattggacatacatttctgccttgtgtgcttgctgggttaagcaatgctnncacatatgtcatgaggagc

SEQ ID NO: 35710 - DNA, 240 bp, Zea mays
  Clone ID: MRT4577_132564C.1
cttacgcgtgcggctacgcgtccgacgcagcagctggtgtcagcttcatgtcattaagcgtgtgatatcatttgccaggttagggactcaatatatgagtacccctgatcatggagttgggaccgatgctgccgcgataaagtgttgcagaaaggactgcttgttaagttggaactctgcagaactgttaataagggctgggctagtagagctgccgaacctattccacagggtaccttt

SEQ ID NO: 35711 - DNA, 392 bp, Zea mays
  Clone ID: MRT4577_132565C.1
aaacggaaaagggggaatttttttacctagaccaatcatacatgatacatcagtcttttaagttattgccccacttatttggatgtctaacaagggatgctaggcatggggctgcaaaaaaaccatataagggttaattggatactaacccatgcaaatacaattggggggggctggggcccatgaaagctcaaacctacaggggttccccaccagttttgaaaaaagggttttgaaaaaatgttttcaaaaatttcccaaaccttttggggggggcccggaaacatcccaccggattaaggtctcttattttttttcacgacgatttttaagaagcccaacataacatggaaaaagggccctaaaatttttcaaggtactgacagaaattg

SEQ ID NO: 35712 - DNA, 484 bp, Zea mays
  Clone ID: MRT4577_132566C.1
tattcctgggtcgacggtgcctagtcggcggccgccctcttttttggtggttttttttatatatttccgtttttctccccctggtgttagtttgtttggcttggccttattaaaggaaagaatggctttagggaataatttaattttagaaggcccaatttttttgcaaaccaattaatcattaatggttttcccagggcccccaaaaagggtgggatttgaatttaccccatttaggggataaaaaaatccctaaatcatagggggctttttacaaattgggtttaccctcatatgagaacaaaggccccctgaaactgggggcctgacttggggaaacaaatggaccccccggatttgaagacccctggttttttaaaaaaggggggaagggggggccttgaacccaaaggtgaaaaaaggcggacctttgtttggctgtgaaggccttccaacacaagctttggaaaatcgggggggctaa

SEQ ID NO: 35713 - DNA, 114 bp, Zea mays
  unsure (1)..(114): unsure at all n locations
  Clone ID: MRT4577_132567C.1
accgtttcagtgctctagggtggggttttnttttgacggncatgaaaccgggtgantgccggncgggggagcgctgctgggctcacgaggtcaagtaggccctttgtgagaaac

SEQ ID NO: 35714 - DNA, 219 bp, Zea mays
  Clone ID: MRT4577_132568C.1
aacctgtggtggtccaacgaagcaacgacagggggacgctgtttctttttggacgtcaaatgcacacagtccccaggaacaagatcaaagcgcacatggaggaactaccccacataggcaccagcgcaaatacacatgatccacaacaccgggagggcccacaggccccagattatacgatgtagctcacaaggaactcgggaaacaaaccccagaggg

SEQ ID NO: 35715 - DNA, 422 bp, Zea mays
  unsure (1)..(422): unsure at all n locations
  Clone ID: MRT4577_132569C.1
gtttttttttttttttttttttttttttttttttttttttttttttttttttttttttttttttaaataaaaaacgggcagggggtttttacaaattaaacataaaggatggggctggccaagaacccccatttaccctttcggggcggaagaaagggcaacgncggccccgcttcccgggaacaacaaccataaaaggcccaccctcattacttgcagnccgcgaaccccaaaagaaagattnaaccccaacaaccatgggggaaaattcaattccaccactaatgccacgttaaacgnaaatatccacaaaaaccatcccggtgattcatcatgggacaagaacaggggggagcttctaaaagcgggagctacntgctttattggaaaaagggatccccctatccttnaaagcagggcct

SEQ ID NO: 35716 - DNA, 466 bp, Zea mays
  unsure (1)..(466): unsure at all n locations
  Clone ID: MRT4577_13256C.1
tgccgccgcacatgcacgggtggggatgancccgctgaccgcttctgtccgctcgcctcancttctcgctgagggaaactcaagtgattctggtatttgtgtccgctgcccagcatgggcagtatcttttcttctgtacaccaactccatnngatctgtgtggggggggtgcgggtcttgaacgtggatactctctatggaccttggttgctctcaaccttgggtgccgtcaaaacgtcctcaagaaccacatgaaaactatggctccatacaaacttggttcaatagactagacacttctngcacctacactctttaaacttctactgtatgataacacccactgcacttagtgttctacacaaaaatataaataaaacagggggcgcgcccgccaccccgcgtgttggagcctcccagctttnnttgtttcccttttantggggagggtctaattgcccccgcc

SEQ ID NO: 35717 - DNA, 300 bp, Zea mays
  Clone ID: MRT4577_132570C.1
aaagggcccaaaaaaaaaaaggggttaaaaatttacgggcgccattttaaaccatataaggaaccccgggtcccccgggggtttttttttgtttcccaacatagtaattaagggccgcagcaaaacatgggggggcggtgaattgaacaggccccggcgtcgtcgttgtcagcactggcagaagtagcggcaggggcagttttttgatttttaacgggggcaacgaccccggggggttggtttttatcctggaagccaagcttctgtatgggggggatcacagggggggggggggcagcc

SEQ ID NO: 35718 - DNA, 965 bp, Zea mays
  unsure (1)..(965): unsure at all n locations
  Clone ID: MRT4577_132571C.1
cccggtcgacccagctttcgactgctngatccacanatcgagnagtcatctactcttccctttgcctcagacgtggtatacgacgngaaaacaaattcaccttagagcgtacttcgcatgttctggtcaaagccgggcaagaattcctgttgccgcaaagtgcatgataaacaaggacactcatgttattaaattgagcacaccaccatttgtatatgtataaaccagagatcgccggacatgttgccatggcgccgctcgatcggacattattattataattattattttgtcgctggatccaacagcttcccagcctgctaatctacataaatcgcttagacagttgggtgtgtactgttttcagcatctctcaccaaaaaaagtctcgtcagcttgtagtatccatctcttctccggttcgacctcctgcgtccatctcggcctctgctgctcgcatggccagcctcgtgcaccaggcgtccatgccggcggcggcgcgcggcggaggaagcagcagcagcagcagctgggggccttcagctacgactcccggagctacgcgctcaacttcgaccagggcgccgacgagtagcagcagcgtgctgagctcgcttgctgcgggcggcgggcctgctcctgcttgcggccggctgaccctacgcgcggtgcggatcggagcccgaaacagcgggggttgcacgtgcgtgcggtgcgacccgaaggagcagccacgagtgaccgcccagcgagggaacaatggcgatctaatctactacccaaggaagaagcatgggttttactgtgtaaagatctactgctccgtagtagaaatcaagtccggtcattattgctcttttcttttcttttctttttttcattcagatggcacgatcatgtttgggcgattcgtcctggaatgttcgagtggtgcaataagagcggcctcctcagagcaatttact

SEQ ID NO: 35719 - DNA, 261 bp, Zea mays
  Clone ID: MRT4577_132572C.1
ctctaaaaccaacgaggcctaaattgttttttactatcgtcgctgccctgttcctttaatcaggggcaagtgtatctgtgcttgcggctgttgcaagaccctacctgttgcgtttccttcattcaaagttaggcccctcttctttacaacaacgttggcttttgaatttgcctgccttcatgcttgtatgcccaactcctggccggactcgcggttatacccggtaattatggtccggaacctggaggcttaccatctttc

SEQ ID NO: 35720 - DNA, 429 bp, Zea mays
  Clone ID: MRT4577_132573C.1
gggcccgccctccggcgggggggcttattttgggggggcaaaaaaccaagggtgggggggggaaacgtacacccccaaccgggatttgggggggggggggggaccaaaaaaattggtagttgggaaaaaaaaaaccgggtttcaataacttaaaaaggtacattacgcccacataaaatttggacctttcagggaaaaaaccaaggttggtttgggttggcattaggcgcccaataaagtagaaaggagcagggcctggacaaaaggggtttttacgcggggttgttttccctttaactccctttttttacttgggggggacgaaatgatacttaattttcgggcctgggggggggctttttttaccggggggggttttttggggaaggaaacagccgacttgggtggttgctccccgtctgggggggg

SEQ ID NO: 35721 - DNA, 278 bp, Zea mays
  Clone ID: MRT4577_132574C.1
acgccagcagagcggccgcccagctttcttttttttttttttagttgttaacagtttgagaaaaataggtttcctgggcaacatagaacggcgatttgagacaccccaaaaggtttgaccaatcaccggaaaaggccatacatgcattttcacccaaagtccggtggccatacacagtgctaaaacataaaccagaagcttaagttttttaaaaaaaaaaggattgcacccatattttaaacggccagggcaaccaaataacattaagctccttaaca

SEQ ID NO: 35722 - DNA, 409 bp, Zea mays
  Clone ID: MRT4577_132575C.1
atataactagccagtgcatgccttaactcttctcttttatacaacagagatgtctcactctaactctatgtgcagaagaagacgatgtgacacgaggatgacaccatcattgtcaggcgccagcatcactgacgtaatacggtggtggtagcaaatagatatcacggcgcactgcatgcatgtgtaatgcattgcttgggatccaaccaattctagcatacctagcataggcctgcttatagtattgccagcactactgataattattcggaggtgtaagcggtgttggccttccagtcggcagggatgacatcatcggagacggactcggagcctacatcagccgtgaggctgacggggagggcccccttagccgaatgggcgatgtacttcctctaaatggcgcccc

SEQ ID NO: 35723 - DNA, 638 bp, Zea mays
  unsure (1)..(638): unsure at all n locations
  Clone ID: MRT4577_132576C.1
gggcgacggcgacatgctgacggtgaccggcatggtggatcccaccaccataatggagatgctgaggaaacgtcgcatagaggtgcaaccatggngaaaatgtaaggtctcgtactagcgtggacgaggaggaccctaaaccctaaacccaaacgcaaacgggagtccggttttcgaagtctggcgtcgaatctgttctctgcgtgcagctgcgtgtgcaaagactgttttcatccaagcacgtcgtgattaaatcatccaggataacagaacataatgtgttggtggaatgatatggtccatcgtcatctctctctggttttctgtttagtttccagaacatattgtgttgatttgagatcgctccattctttacaggccagtaaagtgatttcattaaatttgagtcatacacgaacaacttcattgattgtaatgatacattgttgttgaatggtatacttacgtgaagttgaatgtgaatgtgtaaatgtgtatgtgataaaatatgtatgttataaaatgtggattcgagtgatgttgaatgtgtgtgtgatatatatttatattggtgtgatctgttaaaaaaaaaaaaaaaaaaaaaaggcggacgaccttttttttttttatcttttttg

SEQ ID NO: 35724 - DNA, 496 bp, Zea mays
  unsure (1)..(496): unsure at all n locations
  Clone ID: MRT4577_132577C.1
aaaaaaccagcaaactcaatataggggaagcaaaacaggcgaccttcccctttaaaaaaagggcttaaaacctagggctcatccaatcataaaccatacccggggaaaaaacaaaggtttccccctaaaatattaaaattatctgtttccctaacgacaaaagggcccccatttttttgacttttgccataaaactaacggggggactaaaaaaaaaaatttgttttttgaccatcaataatcgactgcccaacacaagagtggggcatcctttccaatcggttccaaccttttggattttttcagtttcatcccgaggatcatttttggccaaaggttgccggaaaacaaggatgtctgcggctgcccctgcaaattcagggaggcctcccttttgaggggtgccatttgtcggaccactacttggggcctgtactacctgtgggggcagggcatgattctttgctactacctcgnggtcatcttggggggattc

SEQ ID NO: 35725 - DNA, 274 bp, Zea mays
  Clone ID: MRT4577_132578C.1
gccgctcgagccggccactctgaggccatactcaacaacctacaagggcgacgccacccttgccgagggcgcctcggagagcctccatgtcaaggactacaagtactgatctgccccccgctggatggtttgggcattcctgcttactacctccgtctgaaaataagtgtctgacacttatttttggacggagtagtatctgtttggtttcatagccttgatatttttaaatatcaatccttgtttttaataatataagcttctacttatagct

SEQ ID NO: 35726 - DNA, 449 bp, Zea mays
  Clone ID: MRT4577_132579C.1
gtggggggtgtgtgtgttttttttttttttttttttttttttttttttttttttttttttttttttttttttttttttttttttttttttttcatccaaacagaaaggcaacaaacattgcacccaaaggggcgttataccgaaccatcccagaggggggggggcccctttttttcttttccatcactctagcaaaccccacaaacaaaagtaaaaagggccccacctatcccggggaagaatttttaatggggcaaaaaaaaaggaaacatcccccgttggcaagggcaattaagtttccaatttccaagctgggggacagaaaaaccaaaaatcactcccatgcttaaagggcaccacccccccaaatggccttgaaaaaagcctgctaactggggcccccactgaactttttgggctccccccggaattttgtcgtccgaacccgg

SEQ ID NO: 35727 - DNA, 582 bp, Zea mays
  unsure (1)..(582): unsure at all n locations
  Clone ID: MRT4577_13257C.1
gccnnggccgggctacaanaaaaagaaaaaaaaaaaaaaaaaaattaaaaaaaaaaaaaaaaaaaaaaaaaaaaaaaaaaaaagacaccaaaggacaagagaaggccccctagtaaccgggcccccctgctaaaacaagaattaccccccatgggtgattgaatccgatatacaagctttgggaatgccgggtacccaaagggggggatccggaaccgaattccccctaaaaagtggcccttaatgtgcgatcattggacggggataaacaagggggtgactgaaaaaacccggttgtaacacatttcaatttccttaaatgagatcccctttaagaggcctggattaatagcgaattaggcccaaacggatagcccttacgaaaaggggaaaatgatgaaggggaaatggaaattgaaaccggaaaaattttgtgaaaaatccggtcaaatttttgcccaaaagagcccatttttttaaacaaccttttaaaaccaaaaaactcccctagaaatggcaggattggacctcaaatcggggcacagagttgccccatttgggaacaagaattcccaattaaaa

SEQ ID NO: 35728 - DNA, 626 bp, Zea mays
  Clone ID: MRT4577_132580C.1
cagcccggaatgcggcccgggcgcagagtttccacattgtagtaccatggaccgcggcatcaagaggagcgtcgcggcagcgggcggcggcccgccaccgcccaaggtgtaccgcgtggagcccagggacttccgggagctcgtgcagaggctcacgggcgccggtacgcccgccgccgccgccgctccggggccggcgcaccggagggcgacgctgaagccggccatggccgcggagagcaggcgcgcacaggccgctgcggccgtgcccgtggcggccggggcagagcagttcgactacgcggcgtcatggttctccgcgccgctgctgagccccgggtacggcgcgccgggcttcggaggcggccaccagcaccaggggaacactggctctctgttttagggccctaggtagaaacagagtccctgtatagctccgtcgtcacttgttcgtgcttctctggctctttttgtcttgcgtttcgggcatgactatacatacacaaccttcttgcgccgcgtataaaattcgaccaagaagttatacgggtagtgttcatttctgtattttctgatagaacgataaataaatctgtttttttttcctcaaaaaaaaaaaaaaaaac

SEQ ID NO: 35729 - DNA, 270 bp, Zea mays
  Clone ID: MRT4577_132581C.1
gaggaacacatgagcaggcgtgtgccaatggaggacgacgcgtagatgacctgtgctgaggactggagaggcctccatcatcacctccatctctcagaggaaggcctgacgagacatcgaagaggacacaaatgggggaaggcgcaggcgaccgagacacgagccggcaccacagcgtcaggggggggaggggagacttactgtttagcgaccccaatgagcaatgtgcaacgtcttcaccagaggtgaaaaacatacaagaggctaagg

SEQ ID NO: 35730 - DNA, 312 bp, Zea mays
  unsure (1)..(312): unsure at all n locations
  Clone ID: MRT4577_132582C.1
cttgtttcataggaataaatactggttgnagagagggggatttaacacttgacagcaggagcatcaaaggaatcaaatttaagaagctttcgttgaaaaaaaaaaaaaaaaaaaaaaaaaaaaaaaaaaaaaaaaaaaaaaaaaaaaaaaaaaaaaaaaaaaaaaaagtgcggccaatttttaatatagcgtgcgcccccccattattaatctcgtacccctccaaataaattcccaaccttttcctatagggagcccaatttgccctatagtagagctcatttaaaactttgttttaatatatggaaaata

SEQ ID NO: 35731 - DNA, 397 bp, Zea mays
  Clone ID: MRT4577_132583C.1
ccttatattttaagacatggaattattaaacacgagggatttttgggggaaaaagggcggtccatcatcaacaaacatatgaacataaataattacccattcttgagtgatcacccccaaatagaaaacaaagaaacccccacactacaaatgctcacgcggattatggaaacgacaacggaccaaaaaataacaaattattgcccacccacgccaagtgttagactgttcttactcaataaccttccactgggagccagcacccttcacaatgacggcaacgtaattgaatataccagccagaacaaagcaaggcacccaggagggagggctcttcatgctggacccgttaacaatatcacttgtcctgaccagaaatagcccattacgatggtgg

SEQ ID NO: 35732 - DNA, 2802 bp, Zea mays
  unsure (1)..(2802): unsure at all n locations
  Clone ID: MRT4577_132584C.1
aattcggcacgagggaaaactctgtcgggactagcctcagcgcagcggttgccgcggctgtttctgcttgctgtcgccggccgcagtctccgccgcggctcacggatgccctgcatcctccttcccgcggccgcgcttaatcgaagccttcttctgcaccaaccttatcctgtcagctggaaacgccaaattctccaaaccctagcgccaaaatccccattctgatcgctgcaaccggagccggattctcttggtttacgcctggcgctcgtatcgtgtctccgcatgatgcaacgagcacgcgcatgaactcgatggatgaaatcaacctgctgcggcaggcgcagcggcagcatcagcatcatctcatggtgcgcggcatcggcgaggagatcgacctcgagatcggccctgtcgacgatccctctttttccggagcttccttagtggccgttacgtccacgcacgacactgtcgttcacgccgacgaccacaagagcctcctcatcccgtgttcgcagcccggcgcggcggacgggctggcgccgcagcagcacctgtcgcagggggaagagcatgacgggatgctcaggtcgccgtcggggcacaccaagaagaagaagaaggtggtcaagaaatggcgggaggagtgggcggacacctacaagtgggcctacgtcgccgtgcacgacaccaccaccaggatcttctgctcggtgtgcaaggagtacggccggaagcaccgccggaatccatatggtaacgagggaagcaggaatatgcagatgagtgcgcttgaggagcacaacaatagcttgttgcataaggaggcgctccggttacagatggcctccaaggagaagttgcagcctcccgagattgaggggccggtctatgtcaaagctttatcgaaaacagcagcatcaatacttgaatgtgtcctaaggagggatccccatgaagctgaatatatacagtcgatccaggaggtggttcattccttagaacctgttttggtgaagaatgcccaatatattcaaattttggagcgtttgttggaacctgagagatgctttatcttcagagtgccatggattgatgacagaggtgaagcacacgtcaatagaggtttccgtgtgcaattcagtcaggcgttaggtccatgcaggggtggtcttcggtttcacccatccatgagcttaagtgtggcaaagtttctggcctttgaacatactttaaagaatgctttgtcactatataaacttggaggtgctgctggaggaagtgattttgatccaaagggaaaaagtgataatgagataatgcgcttttgccaaagtttcatggatgagctgtatagatatttgggccctgatcaggattttcccgctgaagatattggtgttggtccaagggaaatgggttacctttttgggcagtatagacgtctttctggtcattttcagggaaattttacaggacctaaaattttctggtcagggtcaagttttcgaacagaagctactggatatggtctggtgttttttgcacgtcttttacttgctgaaatgaataaagagcttaaaggattaagatgtgtgatcagcggttctgggaagatagcaatgcatgttttggaaaagcttttgccttgtggagccattcctattactgtctcagattcaaagggatatttgttagatgaagatgggtttgattatatgaaatattcacttctaagggatattaaggctcagcaaaagagcctcaaggagtacttgaaaacatatccacatgctaagtatattgatgatgcaaaaccatggagccagcagtgtgatgttgcatttccttgtgcatcacataatgagattgaccaaggggaggctgttgcaatcagcaactctggttgtcgtgttcttgtcgagtgttcaaatatgtcgtgcactgttcaagctgttgatatcctaagaaaggcaaaagttattgttgctccagcaaaggcaactgctgctggtggggtagcacttggggagattgaattgaatccagagtttaatttgatgcaattgtcagtggaggattttgagaatagaattcaagatgcaataaagcaaacatatgaaaggtcggtcaaagctgctcaagattacgggatcatgaaagaaagccccgagtttttggtccatggcgcgaacatttgtgctttccttaatatcgcgcaagccatgactgaccagggatgtgtttagttaggcctggattctgtcaagaagcttcaactggagctttctgcaaccgcgagggaaaaaactttctgacaactagaggtgctttgatgcttaaactttgagtagttctgcacaaatcttgaagccctacaaaacagggagtaactaggatccatttacccctgtttatgctagaaatgtgtacagctaaggtgtaggaaaggccaattttgtggtacaatcaagaggagccgaggatgtagatcaccgatgtaccatccattgttatgaacgtaaatgtaaatggaaagttctacattgtatgcaaagcctatatccgcaaaaaaaaaaaaaaaaaaaaaaaaaaaaaaaaaaaaaaaaaaanaaaaaaaaaaaaaaaaanaaanaagaaaaaaaaaaaaaaaanaaaaaaaaaaaaaaacccggggagggaaccacngnttaagggcaaatncgggaaaaaggcaaaaaactggggggcggnngagcagggaaaaaaagggccaaaagcgccctaaggggagggggataacaaagaacgggggggggg

SEQ ID NO: 35733 - DNA, 170 bp, Zea mays
  unsure (1)..(170): unsure at all n locations
  Clone ID: MRT4577_132585C.1
gttgcgtgtactgcgtttccttctcgtcgtctgtcttcttatctcatccccgactccgnacgagcccaacccnggcgacggatggggcggcgacgaagcttgagcagctgggcaccgagatgccggccgtggggctcggcgtctggcggatggactccgccgccgtccgc

SEQ ID NO: 35734 - DNA, 439 bp, Zea mays
  Clone ID: MRT4577_132586C.1
cggacgcgtggggactactcgaggaaggagtgggggtcgcaaggttgctccaggaagagacccgcccgcgctgcggccagagattgatggccaggcggcagagcaacggcgcggcgggcaggcggtcggggccgagctgtgcccgacggtggcgttcgaggggcatgccgttgctacttggggaagaaggccaaaaatcgatctcagtgcgtggctccggcgttgtagatctgctcgcgtccgatggcgtcggagatgcaggcagtcgcgtgcacgcgcgggctttgaacaaccagatctctggtgtgctggccacgcctggtgacggccagccagctgcacgtgcgatggccacaccctggccacgccccgtgatggccagccagcgggacgtgcaatggccacgccccgtgatggctccggcgaccacgaatcgtcg

SEQ ID NO: 35735 - DNA, 256 bp, Zea mays
  Clone ID: MRT4577_132587C.1
cccacgcgtccgtgatgcgcaagtattggtttaaggcaaagccggcggcgagctcctgcagcccgtggtacggtcccgaccgcgtgctctacctgggcccgctgtccggcgcgcccccgagctacctgacgggcgagttcccgggcgactaccgatgggacaacgcggagctgtcggccgacccagagacgttcggcaagaaccaggagctggaggtcatccactaccgctggggcatgctgggcgcgttgggctg

SEQ ID NO: 35736 - DNA, 430 bp, Zea mays
  Clone ID: MRT4577_132588C.1
gatgcgcgttggctgcagctagggaatatgttttgtaccccaaagcacagggaagagtgtgggagcaacaaagcggtccgcggaacacttcggttaccagcaaaagacaggaactcggaggtccattggacatatccatgcagggaagcaagtctaatttggtgatgcagcaccgagtgggactgatctttttaaagagtgccgttgtacaaagaggactggcttagctgggcctgtaaaggaagcaattgacacattggaagcactcgctgctgtacctgatgcatacaggggaagaatctattgtcccatacagaagcagttgctgaagtgttgtcttcatcaaaattgtctttattatgtggatccatgtgcctgccacaaagaatggcatggatggtggttatcctacacgcagtggaaaatcttg

SEQ ID NO: 35737 - DNA, 921 bp, Zea mays
  Clone ID: MRT4577_132589C.1
gatataacaaacccacgagcgagcacaaaaaaaaaaatcccaatatccgcaacggcaatgtctccgctgccccgcatcgtgctcctcgccgtcgccgccgccgccgccgcagcggtcacggcgtcagccacgtcgctcagcggcgcggcgaacgacctactccccaagtacggcctcccgaaggggctcatcccggactccgtcgcctcctacagcttcgacgaggccacgggcgccttcgagatccacctcgccggcacctgctacgtccacttcggctcccacctcgtctactacgagaggaccataaccggcaagctctccaagggcgccatctcggacctctccggcgtccaggccaagaagctcttcctctgggtctacgtcacggggatggtcgcgcaccctgaccagggcaccatcgagttccaggccgggcttcatctcggagtcgctatcggcctcgatgtttgacgaggtgcccacctgcggttccagcgttggcgcgcagctgcgcggcgcggctggggtgatcggcgagcttgggctgctccccgttgcacaggcctgaatgtgggttggagaagtccacatacagtcccagagaaccgcaggaccttaccgtctgctgtcgcgtgagccctagagtgcaggaggcgttcagccgtggtgtgttctgcttctgcctgtacgtaccagtgtctggttgttgctcccggtgtcaaatggacatggatgatatgtagaaatgtatgtctataatatgctgttacggaacatgcgtaggatgtaggcaaattaagccttcctcagtctcttgtagtcccggactatcgtgtgtggaaccatgaacttcccaacaactagagtgcccgccttatgcttttctgaaaaaaaaaaaaaaaacgtttttcttcttct

SEQ ID NO: 35738 - DNA, 738 bp, Zea mays
  Clone ID: MRT4577_13258C.1
ctcctttccctatccgactctatgctgcttggtccactgcgcagccgcctggctcctctccccatggccgagcgccctccttgctcctcctctccttcccatggcgctcggacttctccttctcggccatttcgtcgtgccctccctggttcacgcgcgtggcctcctgttcgccggaatgatcctcctctgcttgaccctgcgcgccgctccctggacgttctcggctcggcatctcccacgagctcgtcctccgctcgacctcacccacccgttcctccatctccgccccttgccggcgatggcaccggcgccggcagcggcctcttgatcctgctgcttctcctcgcctcctactggccccacagggcggattcgtctccctcgacgaggtcaccgcctggaacctccagcagaccaaggctgaccagcatcgctcgcgccgtgacgaggattgtggccggctgtccggtctcgtgaatctgtgcctcgtcgtggatggatggctggatgagggcaggcaaatccggatccgttgcgctactcgcaaagtgcgtggaggcctcgccggccaccgtccgtggtcgtacgacagctgcgactcgccggccatcctgcttctcttctatctcgtcgcgatggagctcgccgcgtccttgtgtttgagttcgtcgaccttcactcttctcctcatggtcggacaacctcgtcgatgctgctatttggtggtcgcctctt

SEQ ID NO: 35739 - DNA, 781 bp, Zea mays
  unsure (1)..(781): unsure at all n locations
  Clone ID: MRT4577_132590C.1
accatgcaaacaactctcctccccttctccataaccctaacccccatggatccccagaaaaacgcattctctagatttgccacacccgccagcaacatttgacgcgccggaatagacggacgggacgacggcgcctccagaggaactgcacatcacagcaagcaaagagcaatggcatcaaccaccgaatcgtcatgcacaactcagaccgtgcaaggcacacatcggttccagatatgtcagttcagttatgggaatgttggtgatgaggattacatccgctcaggcaccttcagggtgggcggattcgactgggttattgtatactgcccggacgctgatggcgatgatggggaggagtacatatcagtttatctggaatcgatgagcaagtatgcggaggctttggcattcgtagacatgagactgatcaaccaagtcactggagatgcgtgtacaatatgtgcagagaacagggtgccgaatcagttcaagtctagcagcttcgaagacgcttcctgggggcgtgaaaaatttatcagtaaacgtgctttgaaagattcagggtatatccgagataaccgccttgttattgagtgtgtcgttactgtggtacacgaactaagggtgtctgaaaacaaagcatcctgcgaaattgaagtccctcccccaaatgcattagagcattttggcaagatgctgaaggataagtccagagcagatgtgaccttcaaagntagaggagaaatgtttcctgcccacaggccagtgctctctgcca

SEQ ID NO: 35740 - DNA, 431 bp, Zea mays
  unsure (1)..(431): unsure at all n locations
  Clone ID: MRT4577_132591C.1
gaagctcgcgtcctattccgcctattctttctcgctataacatgaatcccacctgtacgtcttcttagatccagagctcggttcncctcttccttcctctttatctttccaatcactccttctcctaattcaccaattccttcaccaagttcacttcttcttattctcatattactattctcaattgtttttttagacccttctcaatttattctttttatgtacttatatattatatatcttcttcttttttactcctttattttttattatcatttttttattttccttctttattttttattcatttttttcctatcactcttttcttttacttatttattatcttttttacattttttctttctcttttcttatttttttttttaatctttttttcctctcttttttactttatttcattttatttt

SEQ ID NO: 35741 - DNA, 326 bp, Zea mays
  Clone ID: MRT4577_132592C.1
gtgagtcgtattaagcagatatttttctcatctcgcctgtgcggccactggcacccgccccgttcgttattagatatagaacagcaggctgccagtcgcactcgttgacatcggttcagcgtcggcccaggtaccttccgtacgtggaggaggcggtcgcgatgctctagcttgcattgcaccagcgcgcagagctgcaggaggtgggaagcgcgcaggaggatctcgacacagagagataggctggtcgggacacagcgagttcagtccatttggatatggacgcacgcagcgccggccacgagagcggttttgatctggaggag

SEQ ID NO: 35742 - DNA, 2513 bp, Zea mays
  Clone ID: MRT4577_132593C.1
gattgtttgcctcgcgcacggtagggggtgttctcagacgcgatatcagccccaagtattccagcccggcttcagcagtaagaagagttggttgggattcagcaaaaacccgagatcgcaccccttcgcgtggcgatgcgtggaggagacgtaacagcagcggaggcagggtccccgcgctcgccggacctctacgatctctccgacgactccgactacgccgccgccgcttctgaccagacggcgatgcggaccgatcccgcggacagagcctcagaggagactgcgagggtggatgtggtatatgagaaggagcgtgtgaccatccacccgtcgcagtatggttccagtcgtatcagcgggaagctgcgtctgtttctgcagcagggatcattgttcctgagttgggagccaaacgaaggagccggctctttgtcaaccagttcagtcggtgtggaagtagaaaaatatagaaatctgtacactatcaaggccttgcctttaagtgatgtacgcttcatccgtaagtacaccccaacgtttggactggactacgtaataatcgttctctcatcaggcctggctttccctccattctatttctacaacggtggaattcgtgaattgtttgcaacactgaaacaacatgtattcatcatcaggtcggatgacgatcctaatgtttttctcgtcaacgactttcaagatccccttcagaaaagcttgtcatccttggagcttccaggagtagcctcagtagcaaatgccatgtcaagacaaaattcactcagttttactgggtcaattgatgagtccaggcatggggataatgttagacatggggcaacttctagcatgtctcagtatagctcaaagcaaaatcacaaatcaaatgatccaggtcgtgatctttcaattcaagtcttggagaaattctcattggttactaaatttgcacgagatactacatcaagcctttttcgagacaatagtggtgctcatgcttatggacgccaacaacatcaatacattttggataataaatcaactaataaacataaaaatcagtatgtaacaccagaaaaggcttcggcaccctcagcaacactcgagtcagatccattacctctcgtatggggaaaacaacgagatcacccgttaagtgtcgaagagtggacatctttcttagatcgtgaaggtaggattatggattcaaaggcactgaggaaaaaggttttctatgggggagttgatcatgctttgagaaaagaggtctggaaattcttgttggggtatcatgaatatgattcaacatatgctgagagggaataccttgctgtcatgaaacgagcagaatatgaagtcataaaatctcagtggaagagtatctcagccacccaagctaaaagattcaccaagtttagggaaagaaaaggcctaattgacaaagatgtggtgagaacagataggtccattccctattatgaaggagatgacaatcagaatgttgtagttttacgtgatattctgttaacatattccttctacaatttcgaccttggttattgccaaggaatgagtgactttttggctcccatactttatgtcatggaggatgagtctgaatcattttggtgctttgcttccctgatggaacgtctaggtgccaattttaatcgtgaccagaatggcatgcatgctcagctacttgcattatccaagcttgtggagcttcttgatccttcattgcacaactattttaggcaaaatgactgcttgaactatttcttctgtttccgctgggttcttatacaattcaaaagggagttcagtttcgaccagatcatgcttttatgggaagttctgtggtcccattatttgtcagaacatttccacttgtacttgtgcgtagcaatcttgaaaaaatatcgtcagcggataattggggagcagatggacttcgataccctccttaagttcatcaatgagctcagtggtcagatcaatcttgaccgggctatccaggacgcggaggcattgtgtactattgcaggagaaaatggggcttcctgcattccacctggaaccccaccttcaatgcccgtcgagaccgatggtggcatgtacgtgcaagaagacgaggtcttgtgagatatcggtcaccctagaaaataattgcatagaagcatcgcaagtttttatccagtagtgctttcgtcgtcgtcataaatgtgatccgttgtaagtttggaagaatcatgaaaacctagagttgtgtgtatatactaccttgataaacctgtaattgatactttcactattctgtatggaaccccaggttttacctcagctctccatcagatcttctatctcctagagcatctccatcagcctatctcatcaactgtacctaaaattagtgtttaaaaatagtgttttaggagatagagaagttgcaggtgatcttctatgtcatctatatatctatattttttattaagagatcttctaat

SEQ ID NO: 35743 - DNA, 376 bp, Zea mays
  Clone ID: MRT4577_132594C.1
gttcccccattccgtcgtgtaccaccgccgccgccggagtgtgtcatcgccgattcgcctggtatggcagcatcgcccgggggagcggggatagtgtggcagacgccggccaacccgcccgagtcgcacgactacatcatccgcaacggcaagtaaccgcaacctcctctcctcctcattgctgaaccagtgaaccgcgacgcacgcttgttcccagcaataaaaccctaaacccctcatgtgctgacgattggtgggttccccctgaaggtcggcgctacgtgaggccttactacttcgagttcatctcccatgtaatttcggaccgcttgttcctgtaccttatttttctcttgtaaagtactatattttctct

SEQ ID NO: 35744 - DNA, 346 bp, Zea mays
  Clone ID: MRT4577_132595C.1
ttgtacatgttcttatgagatcaatggacttcattagaactttatgtttgtccaaagcctaccacgtaatatttttttggtattttgtcataagcctttttcaagtcgatgagaatcatgtttaggtaattcttctgctccctgtactgctccatcacttgccttattaaaaaatagcttccacggttaaccttttgagcgtgagttcaaatcgattcttttatatcctcattatttctcgcagacaatgctcaataactttgttccatagcttcatagcgtggctcatcagcttactgctcgcgggctggtgcccctttggctatctcggttatgcttgggggcc

SEQ ID NO: 35745 - DNA, 212 bp, Zea mays
  Clone ID: MRT4577_132596C.1
gttcattcacacatgacgtggagcatcaggccgacagatgaatttaatatgttaaattaaactgaggacaagcactttggtaaatcgacaacttgcaagtaacccacctagtgtccacactctctgtacacctcacttacacaatcacacaggtctcttttcatccacccgtggacaagatgatggtgttacagtctaacgacgacttttag

SEQ ID NO: 35746 - DNA, 255 bp, Zea mays
  Clone ID: MRT4577_132597C.1
cctggatccgccacgcatttggaggcctaaaaccctcagcgtcagtggccggcaggcggcctctctagtgcccatcggtgctatggcagctctcgcgccgtggatcctacggcggcgaaccgtccgctctgtcgcttctctggcctccattcgtgattcatggcatcgaaggtgtgggtcctcttcctcatatccttcagcatcgttcaagtgtttgtggggatggtttggaccagaggcacacgggcggagagg

SEQ ID NO: 35747 - DNA, 383 bp, Zea mays
  Clone ID: MRT4577_132598C.1
gctggtatagcttacgcaagagcttagactgggggactttgcactagtagctgggagagcgaaccggacatactggcagcctggcattatacgcaatgccgccggccacaagcacgcgcccgccgtttagtctaccggtaccattgctgacggaggtcgtttccgtggcgctcctgtcactcgtgtgctttcttgtagctgctgatgcaagcagatcgctgtactaccactaccaccttcggaagcaccggaagcaccactggcaccaccgcgcggagaactacagacacatttccctgccccctgccgcgccttctactggcgctgatagcgattcttccgccggaccggtgggtcttgctccagacatatagcagaacact

SEQ ID NO: 35748 - DNA, 283 bp, Zea mays
  unsure (1)..(283): unsure at all n locations
  Clone ID: MRT4577_132599C.1
agccggccgggccgggnaaagatcacaccactcgccaccgcccaccaccgctcaccgagctcgcggtcgccggagatcaccgttctccggcggccccgcgtacgccggtctcagtaaaggttggttatccacatcgaaaccccagctcgcgcctcccacccgagtcagtcacgccgctaaatttggctcatccgccattcggaccagcgccgctagggttttggacctatggatccgctccggagctacctgggccggatcctcctcgnaagagnatccacca

SEQ ID NO: 35749 - DNA, 380 bp, Zea mays
  Clone ID: MRT4577_1325C.1
cggccgggtaacctctgctgacctccccgacccccgaggccgtctcgttgggtgcctgcactgtgcataccaccggctgatgaagctggtcggcgcgcgcaacaatggccaaggacgtgcacatcgccgatagcggccgtggtgcgcgatggcgctgctcctcctgtgccgcggcgccgaggcccgcgtcctcctcacgctctacgacttcaggggcgtcggcgacggcattgccaacgacacccaggctctcctggacgcgtgggccgccgcgagcagatccacccaggaggccgtactcgccgtgccggacgccaaggcctaccacatctggacggtgcaggtttccgggccctgcaaaaagaggctcaagctgcatg

SEQ ID NO: 35750 - DNA, 272 bp, Zea mays
  unsure (1)..(272): unsure at all n locations
  Clone ID: MRT4577_132600C.1
gcagtacgtacgcgcagcaggcccagctgattgcaccatggaagancatcatcaggggtacaacaacgattgcacacacgtggttngcngnnatggcgatagncgtgntccanatactctccgtcctgattctaggtgccaccaagcagatgggaagaaccgtcttcggancctcccaagcnccgagaacngccngtngcgganggcggtcctctcctcggngtcctgcctgcnatcnctcaccaggaggttnnaangcgtgatttgngacc

SEQ ID NO: 35751 - DNA, 246 bp, Zea mays
  Clone ID: MRT4577_132601C.1
gcagtgccgcacccgccgatctcggcttatctccactccatctcgagtcacagtcgtgaccatagcgcgtgagcgatctatatgtccgtggaaattgcgagtcggtaggatcgccctgggtagccaccaggatgtttagcacccgggcgccctcaaggcggctttctctgagttcatctccaccctcatcttcgtcttcgccggccgagtctccggcatgggcttcagcaagctgaccggcgtctg

SEQ ID NO: 35752 - DNA, 410 bp, Zea mays
  Clone ID: MRT4577_132602C.1
aaaaaaaaaaaaaaaaaaaaaaaaaaaaaaaaagggggccgctcttaaagaaggaagaaggcttccccctgtttgctgacgcctcattcttcttttgtggtgcctaaaattaattttctgggcggcgttgtacaacaactttgactggtaaaaaaccgctgtcacccaacatattattcttgtagcacaacctccttttttcggctggcgccataacaaataggaggcgagcgctgttcctttttaacaactggtcagccttaaaaatgaatagtacacccccccctatagtgcattaaccacgacgggggttgtggttacacgcaacaggaccgtttctatttttagcatcctataacccgccccttttacagtctttccttctcttttttgttacattctctggcttt

SEQ ID NO: 35753 - DNA, 382 bp, Zea mays
  unsure (1)..(382): unsure at all n locations
  Clone ID: MRT4577_132603C.1
accccagtgactggatatgcatgatctagatccaacacgtctggtcttacggttcaatcttggacaaactacgactgcacaaactagagcccgaatacaacaatatcgaaccacacagttcattgtccattcggtacacgcctggtgatagagncattggccataattagcagcaaactgaccttatccattcatggcttccatatccactctggattctacaagttgctacatagtcaggcagtgttactcattcaccatcacacgatcatttctactgataggtatcatatccattcatattatctgctaaacataccatgaggtcactgattcttctgggactcatgacatggacccgcatattgcacaccggcacctg

SEQ ID NO: 35754 - DNA, 300 bp, Zea mays
  Clone ID: MRT4577_132604C.1
agcagtggtaacaacgcagagtacgcgggcgtcgcataccttggaatatgggggaggctgccatgaacacgaacaccttcacctagacactgaagccgctgtgttgcggcgtcctgctcctactactggcctttctggggctcatattcttcgcagaataaacattaattaaactgagggggcctgatggacttgacaggatcatgaccagtgccatgttgtcatgtattatccattcgagcacgacaagtaccagtttttgtctgcgatgataccagtgcttaaaggcgagttctctgc

SEQ ID NO: 35755 - DNA, 352 bp, Zea mays
  Clone ID: MRT4577_132605C.1
aaagactatatactggacaacctaactcgaaagtcccgacacgagacacgctaacactggaaccacagatacataatatcacttgagcatgcctgcagaacactgttgacctaccgtacactgctcactgtatacacgcttggctcaagacaagtttatgtgacgccctgcacgctgactctaagggtacaaggccgacatcgatattgtattctgggggcagctcaactggcgtcctggagctttatattcagctcggcgacaaagtcaaggaaaatgcaccgggcactagccaacagaggccactggggcaccaaatgcggccctcaggttactaacctggtccctgagc

SEQ ID NO: 35756 - DNA, 534 bp, Zea mays
  Clone ID: MRT4577_132606C.1
gataaattatgacacttatccttttgttttatttggttttttaaattttaaaagcatttatttgatacacttaattcatctttggcatatatagtaaagataacgcccactgactacacaagcctaaatgacatgccggtccaccaaaaaaaagcacaggtatttgagaagctgcataaaggcgcgaaggcacataaaggttttaaaattgaacttttgcaattcatcggggggacagcccagccaggacattagaaaggggttaaaatgtactgtggaactcctttttttaacatgagggggcggaccacccaacgtgcaacacatgcagttgcacttgataagaagcatttcattctggcatctattctcatgggacgaggtacagcttggacctgctcacttgaaacaacacgaatagacccaatttttacagaaacatattgttgctgctagaagatagttttctgagatactaaagtccttgggaatggattcttgaagaacatattcaacagcgtctaccatcgactg

SEQ ID NO: 35757 - DNA, 290 bp, Zea mays
  Clone ID: MRT4577_132607C.1
ctattatagattggactaaaaaattaagggtgcacctccattacaatgatgggagatcatacttaaagtttatataaatttactttaaaacattatcatgtaaaattactatcataaatgattctattttaaaaacccaaccatattattaatatctattctcacatttttcatgtactaatcctattatatttttctttaatcccaacatatctacttttactttatctttactattttctattatatattaaatctaattaacagttacctttatttttaatcttttt

SEQ ID NO: 35758 - DNA, 339 bp, Zea mays
  Clone ID: MRT4577_132608C.1
aaacaaacaaatggttttcgatagaatgcatttttcaactgggccaggggggtcccgggccccccatgcagggaattaatcagcctaagggggtgccccaaacaatggaaaacattaacaaacgctttttttccgggaacgggacggggggcccacgggggttttttaaaaatacagtttgggcaatggtgccggggccacaccctggggggggtgctttccccggaattaaacagctgggcgggggggttttcacccaccccacaagcagggcgttaagggttgggggggaacccggttgaccccttaggaagccggccctttgacccaccctggggg

SEQ ID NO: 35759 - DNA, 117 bp, Zea mays
  Clone ID: MRT4577_132609C.1
gaccattagctttatgtactctacagcgcttaacatctcgatcgacaccatgaggatgcggggtaggagccctagctctcctggcttttgcttgcaacgccaattacacgcatacaa

SEQ ID NO: 35760 - DNA, 197 bp, Zea mays
  Clone ID: MRT4577_13260C.1
gggaaatattaagctggaagtagccttagtacacagagatattctttggaacatgctacagaaccatttgatacactggggacatcacagcacacgatgtaacgtatcgagcagggacaggtctggctacatgtaaaacgctcgatgcgggggattccctcaaggcgcccaggacggggcacaacggtggagacagg

SEQ ID NO: 35761 - DNA, 487 bp, Zea mays
  Clone ID: MRT4577_132610C.1
aaacttcaatccacatgggtaaaaggggaaattagtttaaattccccataaaactccctcgatccatgggaatggggattaatcctaaaatcctcaaactagaccttactcgatttggaagggattagggattgaacgttttccctggcagctaagggacttaaattagcccttccatggcctatttttatatatatatatatagacctttatttataaacaaaattatttatatcaaccaaaatccccggcgggtttgtagaaaaaagcaatttcccctcacccccccttttctttttttgtttagggagaatgtggttttccccccctttggccctttttttgggggatttgaataccattttgcattttttttaaaaataccccggttggtgttttgttttgattccggggggggttgggtccccccccccaaaaaacacctccctttaataaaccgccccacaggggtcctcttttttttttt

SEQ ID NO: 35762 - DNA, 246 bp, Zea mays
  Clone ID: MRT4577_132611C.1
cgtcacgcgtccgctctgaccggttattcagctagatgagctcagtgtgatcacactaagatggaatgacaagagaactagtcatcactccgttggaagtatgtatatttggccagagggcgttctaagtcatcgaatagttgactcttgagggtatatacgcttacatacctgctatcgcttcaactatgcttatagccaccatggctgcagcaacgacgatcactgacgctaccagtatccgtc

SEQ ID NO: 35763 - DNA, 2988 bp, Zea mays
  Clone ID: MRT4577_132615C.1
ggccggccgggaaaatgggggttgtgtggccacgtctggcgcctgctgttcactctccaatctccactcccctgcttcccacaccggacaccggagctcactcgaggacgctgtacgagcagcagcagcatacataaggcacggcagctgagctggctcctccacctttctgtccatccatcacagcttcgagactcgtcctccatgggttctggcggcgtcagatggaaggctctgccgctgtgcctagctctcgtggctctgcaagcatgcctccctgctcgcggggcggctcccaagacttacatcgttcagatggccgcatctgagatgccgagctcgttcgatttccaccacgaatggtacgcatccactgtgaaatccgtgagctctgtgcagctggaaggagacgcggacgaccattacgccgcgaggatcgtctacaactacgagacggcgttccacggcttcgcggcgaagctggacgaggacgaggccgagaggatggccgaggcggacggcgtggtgaccgtgctcccggagacggtcctgcagctgcacaccaccaggagcccggacttcctgggcatcagcccggagatcagcgacagcatatggtccgccggcctggccgaccacgacgtcgtcgtcggcgtgctcgacaccggcatctggcccgagagccccagctttagcgacaagggcctcggccctgtcccggccaggtggaagggcctgtgccagaccggccgcggcttcaccgtagccagctgcaaccgcaagatcatcggcgcgcgcatcttctacaacggctacgaggcctcgtcggggcccatcaacgagacggccgagctcaagtctccgcgggaccaggacggccacggcacgcacaccgcggccaccgccgcgggcgcgcccgtgccggacgccagcctcttcggctacgccagcggcgtcgcccgtggcatggcgccccgcgcccgcgtcgcggcgtacaaggtgtgctggacggggggctgcttcagctccgacatcctggcggccgtcgaccgcgccgtggcggacggcgtcgacgtgctctccatctcgctcggcggcggctcgtccccctacttccgcgacagcctggccatcgcgtcgttcggtgccatgcagatgggcgtgttcgtcgcctgctcgggcggcaacggcggcccggaccccataagcctcaccaacctgtcgccgtggataaccacggtgggcgcgagcaccatggaccgggacttcccggccacggtgacgctcggcaatggcgcaaacctcaccggggtttcgctctacaaaggccggcgaggtctttcgtccaaggagcagtacccgttagtctacatgggcggcaactcgagcatccctgaccccaggtccctgtgcctggaggggacactccagccccacgaggtcgctggaaagattgtgatctgcgaccgcggcattagtcctcgggtgcagaagggtcaggttgtcaagaacgccggtgccgcgggcatgatactcgccaacacaccggcaaacggcgaggagcttgtcgccgacagccacctcctgcctgcagtggccgttgggcagtctgaaggcattgccgccaagaagtacagcaaaaccgccccgaaaccaacggccacgctcagcttcgacgggacgaagctcgggatccgcccatcgccagtcgttgccgcgttctcgtcccggggaccaaacttcctgaccctggagatcctcaagccggatgtcatcgcgcccggcgtgaacatcttggcggcatggagcggcgacgccagcccgtcgagcttgtccagcgaccgccggcgggtcggcttcaacatcctgtcggggacgtccatgtcgtgcccgcacgtcgccggcgtggctgcgctgatcaaggccagccacccggactggagccccgcgaagatcaagtccgcgctgatgaccaccgcgtacgtccacgacaacacgtaccggtcgctgaaggacgcggccaccggcaaggcgtccacgccgttcgatcacggagctgggcacatacacccgctgcgtgccctcaaccctggcctggtctacgacatcggccaggacgactacctggagttcctctgcgtggagaacctgacgccgttgcagctcaggtccttcaccaagaactcgagcaagacatgcaagcacaccttcagctcgccgggtgacttgaattatccggccatctccgcggtcttcgcggagcagccatctgctgcgctgacggtgcgtcgcaccgtgacgaacgtcggcccgccgtcttcgacttaccatgtcaaggttacagagttcaaaggcgcagacattgtcgtcgaaccaagcaccctgcacttcacaagttcgaaccagaagctaacctacaaggtgacgatgacaaccaaggctgcccagaagacaccggagttcggagcgctgtcttggagcgacggcgtccacatcgtccggagcccccttgtcctcacatggctgccaccgatgtgagcttcgtttatttaccgtgcgtttagagcaagcaatggagcaggaacctctgggcctgggtaatcaagccagagatccgttgtgtcgcagcggcagcggcagcggcagaacaggttcactaaccaacggaaaaatactgtcaaagctccacatgagaaccgcctttattcttcaatgtattcatgcttattccaaatgttcagttgccagtttgattgtttctacattaatgagtgtacaagaaatggaagcaaatagtacggaaaatttgctgctagcaggtttagcttgattcccaaatggtgacgccatcacaagtgcagagttccttgtagttctctcctacgccggcacttcttgcaatcaccgctgcggcgatgccagggtatgatttgtccttcactgcaaagcaaacgaccggccgttcccaaaatgaactggttttgttaa

SEQ ID NO: 35764 - DNA, 223 bp, Zea mays
  unsure (1)..(223): unsure at all n locations
  Clone ID: MRT4577_132617C.1
cagacccagacgccctctacttctctctagttagtgtacatttcaaactcttggccgccgcctcgctctctgttcgccgcgccccgccgcagaaatggcgtgccgaatcagaggttgtggatacccacttaantgcatgtgngagtgatggaaacaattggaagantatggattagaaaaggcacatggtagtacnnattanatattgaangttattganttg

SEQ ID NO: 35765 - DNA, 259 bp, Zea mays
  Clone ID: MRT4577_132618C.1
ctcaccagcggtttgttaggtctgtgaaaacccaacgctggaaccctacatgatccaacaggctatgccagctggcatttcaccttgatcagcctcggtgacccaacaatcataatgcctattagatcatatacctttggtgcatttattggaacaaaaaataacggcacatcaactacgacaactcgtgctagcaaaactttgctggtactatcaggaacagaaagttgttacattaaaccaactagctgcattgaac

SEQ ID NO: 35766 - DNA, 248 bp, Zea mays
  unsure (1)..(248): unsure at all n locations
  Clone ID: MRT4577_132619C.1
tccccgcgtccggcgagcggccgctcttgcgggtccccgcttccgtgcgcgtgcctgcgacgctctagctcttctgtgttgttccctcctttccttcgttgggggggggggtgctcnttttttttcccttcnngctcctctccctgttcngcctgcctgtgttggggtcccgtgttctcctccggccttcttttgtctgcttttctttgctttccgcctcttccttccgatcttgcccgtttcccctt

SEQ ID NO: 35767 - DNA, 760 bp, Zea mays
  Clone ID: MRT4577_13261C.1
cgagccccccaaccccaagcagccgctgccgcgccgcaatcgtccatggcggctcagccgccgtcttccggagcgccggcggcagccggaaacaccaagcgcaccccgaagcggaagcccaagacaaaaccagccgccccctccgccctaaaccctaactgggcccagctccagtccaagctccctgcctccacgttcctcggcaagcgcaagcgccccgccccttctccgccccctgcgccgtctcctaacccggatgcggcggaactgagtttcaagcttgagccgacctctgacgacaccagcttgacgaaggcgttggcgctggattgcgagatggtcggggttggggctggtggcagcaagagcgccctcgccagggccaccttggttaattccttcggcaacgttgtatatgatgaatatgtgcgaccaatggagcgaattgtggactaccgtacccatattagtgggattagacctaagcacatgaataaagccaaagatttctcgatagttcagaaggacatagctgagcttatcacaggaagggttcttgttggacatgccttacaccatgatcttaaggtcctgctactaggccatccaaagaaggacatacgcgacacctcagaatatgaggtttttcgacgggagggcaagcggagatcgttgaaagatcttgctgctcaagaactttgtgttaagatacaacagcaggagcactgcccgattgaggatgctcgcgcagcaatgttca

SEQ ID NO: 35768 - DNA, 358 bp, Zea mays
  Clone ID: MRT4577_132620C.1
acccacgcgtccgatcacagccaccatctacacatttctttaccacctcaccaccaacgctaaccaccgtgttttttgcgtttttaccgaaggaggcagagccataaaaagcccctatctcagaaccaacagtcaactagatcctactcaactgataccaaatatacaggcagacacaaacattttcttcacaagatcaccatactctactcaaacatcttctaactaaactataccaagttgtccattcactcaccaccgaacaaactaatcacctcaccttcataacgctgatattccgcttgcaatgggcatacctagaaccaaatttgccacatacatttcctacatcatcatt

SEQ ID NO: 35769 - DNA, 350 bp, Zea mays
  Clone ID: MRT4577_132621C.1
tcgaccaccagccagctcctccgtcctctccccccacgcctggcgtcccaccgccgccgcccccgccccgccgtcgccgtccggcgcatcccgcctccccccctcgagcgagcagacggttacttggtggaagatccgtcccccgccggtaaccgaatcggtaagaggaggagggggcagatcgaagctccgggcgagagtcgccggtcatgattaaggagacgggctactacgacgtgctcggcgtgatccccacagtcagtgagaacgagatcaagaaggcctactacatcacggtgaggtacgtcctctcctgacaagaactccaatgactcccaagccgtagggaa

SEQ ID NO: 35770 - DNA, 717 bp, Zea mays
  unsure (1)..(717): unsure at all n locations
  Clone ID: MRT4577_132622C.1
ccgaccagtcgaccaccagccagctcctccgtcctctccccccacgccntggcgtcccaccgccgccgcccccgccccgccgtcgccgtccggcgcatcccgcctccccccctcgagcgagcagtcggtcacttggtggaagatccgtcccccggcggcaaccgaatcgggaagaggaggagggggcagatcgaagctccgggcgagagtcgccggccatggttaaggagacgggctactacgacgtgctcggtgtgatccccacagccagcgagtccgagatcaagaaggcctattacatcaaggcgaggcaggtccacccagacaagaaccctaatgacccccaggccgcagggaagttccaggaactgggggaggcataccaagtgcttagtgaccccgctcatggccaagcttatgatgcacatgggaaatctggcatctcaacggatggaataattgatccagcagcaattttcgcgatgctattcggtagtgagctttttgaggattatattggtcaattggcaatggcgtcaatggctttccttgataattttgacgaagatgagagatcgacccaaaaaagtttgcaagacaaaatgcaggctgttcaaaaagaaagagaggagaaacttgcagagatacttaaaaaacgggctgcacctttatgttcagggaaataaagagggagtttgtcgggtttgctgaggtcga

SEQ ID NO: 35771 - DNA, 336 bp, Zea mays
  unsure (1)..(336): unsure at all n locations
  Clone ID: MRT4577_132623C.1
gccnggccgggttcgcggagtactattaacaacagatgataacattgatgtctatgagtctgcttataggtacctcttcccaaaccttatgatcaccagagtgccatctggaaggttagcattacagaggacccgggtggatgcaatagaccattttatattcctcactacattacctttaacttcctgcgtgcctatgtttttatgcctgacgttctcgcacttgaaccaatgaattgtaaagggcccatttaagactacatgaatttgcttgatagaaatgtgcttcggctaaccgattttgggagaacgacaagaaaaaaaaccgcccctaga

SEQ ID NO: 35772 - DNA, 191 bp, Zea mays
  Clone ID: MRT4577_132624C.1
cgcttaggcggacccctgtacggacgcttgactcctgcttcacggttcaggatcaccgttgacagctggagccatggagttcatcgacggcgcttcgaccttgtcccatgatgacgacgactacagttgtcggacgccgactgacgctgtgagccaggtgaggcctacgtagacctgtccgtctgatccgt

SEQ ID NO: 35773 - DNA, 333 bp, Zea mays
  Clone ID: MRT4577_132625C.1
caacaatggcagccaaaataacctgcgtccttattcgcctgggaaatcccacaaggggggaccctataagacccaaccggccatctcagacgagcatcttacctttatcacccttgctcctacaacaaataattagccttattacagaaattacattttgctgcatttattggcacaaaacatcatggcacaacaacttcaacaacttgagctaccaaaccaagctgtctacttttagaaacaatactttcctcgattcaactaacaagctgtatcttactccgcctcttttttacaacaacaaacaactatctattcaaaacagcttttttc

SEQ ID NO: 35774 - DNA, 649 bp, Zea mays
  Clone ID: MRT4577_132626C.1
aataataataataataataataataggaataattataataataataataataatatatgcatgtgctgcctaatcctcacatttgaagcccctggccggtcccaacggtggtctcgctgaatgtcatgttgcatgtctgaacgtgagctgaatgaaaggtgggagcagaaagcgaatgacaactgaccagcaaatgccgcctgattctctgacaaaaaaaaaaggggggccctctgacttctgaaatagcaattcccctacagtagcctgcagcttcgtcggtgttttcagccccagctagcgtgctcgtcctcaacatacgatcttgtacgtcatgcccacctcgatgagggaggtgttggggatgccgagctccacggcgggccgccgcgagttgcgccggaggaacccgtacaccacgttgatggcgaacttcttcacggcgggcgacgactcgtgggcctgcacgcacgtgtgcccgatcatgtacgacacgccggactcccgctcctccagcagcgtcttcacctcctcctcgctgccggcggccccgctcggctcctcgaaccggaccctcctgccggcgtcgatctcgcaggacgacgccgccgagcccgcgtccacgtgcgccggaatcaccgacagctcc

SEQ ID NO: 35775 - DNA, 766 bp, Zea mays
  unsure (1)..(766): unsure at all n locations
  Clone ID: MRT4577_132627C.1
ccccccatccccatcttgccgccgctcccgcagtccttcccgtccccccgggagcatcgaaccccgcgtcagagttcagcggcagagccgccagccctccgccggatttgagcggcaggagcagagcgaatcaccgagcaacaaataaaaaggattctagatcgaggagggagcaagccattgcagaggagaggggagacgatggttggtggaggtcaggcatcggcagtggagacgaggaagagcgcgagaggtgacgccggccggatgagatgtggcagcggagcccaagacagagcagcacattcttgtcacccttctccttgcctccacccaagcggctccctgcagaggagaactcgatgatagctctcagttcatggagaaaaggctggcaccagcagagaaatctcacgggtagatgagcaacatgtttttgatcttgaatccccttttaaattcagattgacacttcaatggctcattgagatgaaagtgccaacgaatgattcccacgggaagaagcagtttccaaacaaggaaggtatccttgctaggttgttgccatgaagatgggagaaacatcctggtctatgagtccatgatgaatgggattctgaaagagcatcttcatgtttgaagctgtccagacctgtaaaatagatatgctttgtaaccttgatataatagtatatacatgactanaggagcggacatcgtcgtcgtcgtgaagatgctctatcccgtttaaaaaagagggtcgacg

SEQ ID NO: 35776 - DNA, 443 bp, Zea mays
  Clone ID: MRT4577_132628C.1
cccacgcgtccgccaagggtggtcgtccattgacagctcgctcttctccatcgagaccgtgtccgggggcatcacgaatctatgtgagttgttgtggcatggctcgtagcgccattcagaattcctcgccttttgcgcctgagcagcatgatgattgtagtaaatgaaatgaatagtgcataatagttacattgaaatgttgcacatcgttgacatgaggacataacttttttttatctcctgctgtaacgacaacttgtccgcttccgcttcctgctcctcattgttcccgtttactgataaaacagcagaacctaatgctttttgcaaactgtgtgcgattagattagatactctccggggtgctgcataatatttcctttggcctgtatcatttctgatgtcatttgtcacatctgcggatctgccccaccatgcttgca

SEQ ID NO: 35777 - DNA, 809 bp, Zea mays
  unsure (1)..(809): unsure at all n locations
  Clone ID: MRT4577_132629C.1
cattgggacctcgagccggccgggaaatctttctcaacaatcgtcgcacagtacagctgtctcgcctctctgcctctcttttgtctgcttcgccctctatctcgcgccgccgcaacgccgtcgttctccggtccggcagtcgcgccggcatgtggagcggggctcctcgcatggcagaacggctggagctggagcgccaagcaactctcgatgggcacgtgcctcaagatctcgaagccggagtgaacagcggcggcgcacaaggtctgcatcctgtgcgagttcgtcgtcttcctccgactacaggacgatttggtgggatggacaacatttggcagcaatacggagacaccaaccaagcttatggtaatgtcacctacaccccaggaattgacttgactctctccccgggaaatgacttgactcggttccaagattcagctgttgtgcatggcccaggtccaattattcaggaaaaccagtcgttcagctctacctcacaagtgcctcaacctgtcaatgatcgaagaaagaagggggttgccaagcgtgagaagaactactccaatttggaggatgaaacattatgctcggcgtacctaaatgtgtcgaaggatccagtggtaggtgtgaaccagccaatgaaatcatactgggcaagaatcactgactacttcaacgagatgaggactactgacgtggagcgcagcagctcctctctccacatagatggggcgatatctcaagggacaccgcattggtctgcagttactatgctgagattgaacggaagcatcnaagcggtaaaa

SEQ ID NO: 35778 - DNA, 380 bp, Zea mays
  Clone ID: MRT4577_13262C.1
ctttaaactctcgttttttgagtgaacgttttaacatcaatctccacaacgtaaatacagctaacttaaccaagtttgttaaacaccaacgtttgcggtatgacattactacgaattctcttcttgtaacatgggtcatcttaattatcaactaactcacctgcaataattgtgttaattttaccatcttaccatatctacttaatgaaaacctgtcatcaatacttgttttctttctaaagatgctatttttataaatctgactggaaaatagagtacagacgtccgttgatattacttatattacagtgctttaataatttcgatgtacatatcgatgcacatatatgtcttcttcaaatcacgacctctcataaata

SEQ ID NO: 35779 - DNA, 315 bp, Zea mays
  Clone ID: MRT4577_132630C.1
aaaaaaccaattgtcccgtcaatataacatctcccggtatttgtctacaatataattgacaaaagttccacatccttaaaattcccaacatttttttaacaaaaaatcccattacaccatggttaaacccccaataatcatcggggcattttccttcaaatgcttactgcaaaaggagtgacctcattctttttttgtcatccaaaaattaattcttgtatttaatggcctttttctaaaaaccaatttttggaaattttttttcaaattcctttacattattgcaaaacttttcaatctcaacttggatccttt

SEQ ID NO: 35780 - DNA, 625 bp, Zea mays
  Clone ID: MRT4577_132631C.1
aggctcggccgtgaagtctgatctgctagatgagaaactccttctactcattctgaatgagaagaaaaaaaaaaataaactggaactaagggacaagcaagcgtcgccagcgccaggccatttgaccctttggaggacgatgggaagggctctgggcctggacaggcaaacaactcctacatgtgccatggatttggcctcacacttgttcacacatgaaaccatccgggaccactaggacatagcttctggccgcctctaaagcgctagctcgctcagccacacaggagagctctcactgggcattaatcttgcggaacttcactagcattagaaagatctatgagcgcatcgacgcacgcggagatgcaaaagcttatgaagtgcggcttgtccgacccgctctgcctcccgcagggagctggggaaatatgcacagagctgcgtgtacactcctgtctaacgggactaccgattgtgctgcacaggatcaggtgagcactaataaaaaaaagttgacgcaaatgagcctgcaatggggcagtttattgaaagatttggtggccctgctgctgaccaatattgtggcccctgacactgtactagaaagcatatctcatactgg

SEQ ID NO: 35781 - DNA, 357 bp, Zea mays
  Clone ID: MRT4577_132632C.1
actgaaacagcagacgcttactcaaaatcctatggggcctttcctttcctgcatgcagcaaatgctggcgctttggtcggacatactcacagaactgaagtctcaacggccaaatatttcactccagacaatatattcaatgcaaactattcgaatatcaacgaaacgcttatgaccaacgactttgacatactcactcgacgtggcgcaatgcatctctgactcatgtcatcgggaaacgggacacacctgataatcaataaatacacatcgcatcagatcctccggcatattaacaaactctgactgactagcgattgagcttttatcgagacctaggactcacatcatttgaat

SEQ ID NO: 35782 - DNA, 156 bp, Zea mays
  Clone ID: MRT4577_132633C.1
ggcgagctctatacacactcactatgggaggctgcccccctgaggcccggccgaattccgggtagaccacgcgtcggtagccacccacggcatccctcattggcacactatgatgcttgtctctgctcaccgctgcatataagcgggcccggaagg

SEQ ID NO: 35783 - DNA, 250 bp, Zea mays
  Clone ID: MRT4577_132634C.1
cccacgcgtccgctttaatggcaattctgaatacgctgatcaccttgagcccgttaatggggtggaacctatgaaagctgccggtctactgcaccaccttgagactactgatgagggacaaaaagatctaactaagtcacagatacctgctcacggggcaattggtgcttacaggacagcttattatcaatcccatgcaccggcaggatgtcgcgctctgctctgtcgggataatctgcatacttatcgt

SEQ ID NO: 35784 - DNA, 327 bp, Zea mays
  Clone ID: MRT4577_132635C.1
aaccaaaaattttccaatttttttaaacaaaaggggcccgggtttttcattttttccccccatttcccccccccaaaaaaaaattttttcctccttttttgaagctttccggaacattatcttgggccccccttggggggacccgttttgggtaacacatttcttgatcagggcttagccctcatttaagtaaaccgttttttattgggcccctgccccccgtttttttttacctccttttggccccgtttctttccaaaaaattttacggggtcccccaagtttttgcccatttttttcggggggaaagatatctttacccccccc

SEQ ID NO: 35785 - DNA, 629 bp, Zea mays
  Clone ID: MRT4577_132636C.1
caaaggagcacttatgagttagtatttgaaacgatactctaacttatataacaattaaggtgagactgacatagatggcgagaagacagaagtactgccagctgataagtgataaggaacttatgtgtcagtgaaagtgaatgaaaacaatggagacatagtctataaaaaagtaaggtgccgtttggttcacgaaatgtaacgtaaatggtaatggtaacgattcacactcgaataccggcagtaacaaatttgaataagactatccatttgtagtgtggtatcgattacagttaaacttaaacaaacatgatttaatgttatgagttacccattacgttaccaaaatttgaaccaaacggcacctaaattgctgaggacaacccactaataactttaggatcacatagtaatacttcgaaaaataacaagtttgtaagggcttaaggcaatcaattaagtaagacacgcagacatagtaatacttcgaaaaataacaagtttgtaagggcttaaggcaatcaattaagtgagacacgcagagaacgtagcagcctagcacacaaaaaaaaaaactcgaatcgaatacttccacctttccctgcaacaaaaaatcctcgtgccgaatt

SEQ ID NO: 35786 - DNA, 349 bp, Zea mays
  Clone ID: MRT4577_132637C.1
aaaaaaaaaccggccagaattggggagatgcacatccccaacggacataagatattacgggcgttgatgctccccgggggaacccgcgggcccccaggtgggtttaatttaagaagggactggtaggcaccgaccagtggtccagaacgctctgagaaggaggggcccccggccaacagggggcctgctaccaaaggggcttgctcccccggacgacccccccggatacgaacgggggggatacctattcggtcgccgagggggggggggccttgattaccccactcctttaggtggcggcggggggcttaaaacacgggggggttatcgaccccctgggcgcccgccc

SEQ ID NO: 35787 - DNA, 531 bp, Zea mays
  Clone ID: MRT4577_132638C.1
aaaagggggaaacataacaaataaaccaaattttttgccgggccaggaggacaaccgataacgggccaaaaacctcgaacaatagggaaaattaacctttcacggggggtttaattggggaaaaaaaaaacgggaagcttgcgaggcaaaatttaggcgaccccctcctttttgttttaaccaggggcgccctaaaggtgggggatttaaccctttgcctaaaaagggttgtccttattgatgctaaaaccgattttgaccatgcgggggatccggttgccaaaggggttggggtcatccaggctaaacccgggggtcaggaaaacatttttaaacagaagcatcaaaaaatccttggctgacttgtattttttggaaccctcggcacccttggggggctaatccatgaaagggttcttgggggggacccccattgtttttttgcccaaaagggacccccccatgctcaagtccctaagggccggggccttaaagaacctttccaggggggggggccaaccatacttgcca

SEQ ID NO: 35788 - DNA, 289 bp, Zea mays
  Clone ID: MRT4577_132639C.1
actcttacttagactctcgcttctgtggcatcatcagcttcacgtcaggacagtcttctgctgcggcatgagcgttttttaccctggctgcgataaccacttctgttcatgtcaagccgaaaggcgtcttccccatctgctccagtctctgccgtcctatgatgggctgctcgccgtcatctcatgctttcatgatgatgatgcctccgaacatgatgggcgtctctatctgtttacccagcatgggccagatggtccgtcacccccacatggttggctgctgcattcc

SEQ ID NO: 35789 - DNA, 674 bp, Zea mays
  Clone ID: MRT4577_13263C.1
cctcgaggccggccgggccggggtatctcaaaattgctataatatataccttttcattgctccagacggcgccggcggcggttcttcgacttcctcacgaggccgacgatccatcttgccataatacactactatcccgcctctccacaaaaacgcggccgagcatcaaggccgtgatgactgatactgctgatgctgacttcaccctcccgtatctgtacgagctgctcatgctgtcgcctaagaacctccacatactgatcagcgaccctatcatacaccatgactgatggcattgatgaactgatgacggtgatcgactgctacactggaacagaagaagatcctcaacgatttcatgcacgacacacaaccacgtacaactctactgtttctatgtctaacctcgacgacaaggacgtgaaggaatacgacgactactctctcaactcgtgcatgcagacacgaccccaatgcgtgagatccactgaaggccttcgaattccgtggtgtgcacataggacatcatctgcgacaaagttggcgaccccctgtgcaaaaaaaatgtactcaacgcgcatacagtaaacgactatactgccgtgactgatgacatgtacgaccagaggagaatcgccgctaaggatttgtcacaggcatattaccgggagctc

SEQ ID NO: 35790 - DNA, 750 bp, Zea mays
  unsure (1)..(750): unsure at all n locations
  Clone ID: MRT4577_132640C.1
tttgaccactcgctctgccgtctgtcctcatatatcattcctgcttagagccttagactaccgtattgtctcatacttgtagccaatccccctttgctgtttcactgcaaccttttcaagtcttattactcctgctcatatgcctccgggatgttgttccttctgggcactgtggctaccactgatgctcgcggtggctgcggccaaggaacatggggaagcctgctcggccaggaagtgcggcaacaccaccatctctcacccgttctggctccccgtctgggacacgggaaggtcatgtggttccccggaattcgagcttgcatgtcgttgatcgtggcaagctggaactgttgcacgcttctagcagctgtggattaccgatgtggaacacctccgtcaagctgggcccccggtcctggtttaggatcgcacccgtcaacatgaacctcatcctgtacaattgcaccaaggcggccggggcggcggctctggcacaggatagggagctggtgcagacgaggatgaggtgcggggacgagagcgaggtgtttgcccgcgccggagggcgttactatgagacgaccgattacggcggcggccacgagggctgtgacgcggccgtcatgccggtgctgnngacgtgnncaagcgaggtgaacgccagcgactacgagcgtctcatcagcgatggcttcctcttgacatggcagagcccccctacaggngcccgtaaaatggcaagagtga

SEQ ID NO: 35791 - DNA, 181 bp, Zea mays
  Clone ID: MRT4577_132641C.1
cggcgggagtgttacttcggttcccaggtttgaagattatctcacccggccccagctatataagctgaccggtttggaggggcccagcagggccaactccagggattccttccacgacagataaacatacaagactccttcagccaacatgatggtactgaaagtagaggaactggtcact

SEQ ID NO: 35792 - DNA, 326 bp, Zea mays
  unsure (1)..(326): unsure at all n locations
  Clone ID: MRT4577_132642C.1
gggctgtgcttcatttcacttcacctcgcccttactgctacnccttanatgcgcactgcaagtttggtgtcggcggcacatcncacccatcattccaatcnactagcgcatacacttgtgtttcgctcccgtctcgtctcgtagcgtgcgaagctccactccatcacctcggcgccctcacttgcgatgcccagcccgatcgccgcttgcttccgctgcgccgcggcaccttcatcgggcgccagcgctgcgaggcccatcctgaccacctccgtctactaaacccacctcggcctcttcncgctcttctggtcccccaccttgct

SEQ ID NO: 35793 - DNA, 149 bp, Zea mays
  Clone ID: MRT4577_132643C.1
ccgttacccggcgtcttaaaccctagttcccattccatcttcgattccgctccgccggcggggatttagtgcttacttcttgagcgctaacctgtatccactgtcaagcgtgagccagtacattgctccactctgtacgttacatatgc

SEQ ID NO: 35794 - DNA, 318 bp, Zea mays
  Clone ID: MRT4577_132644C.1
ctgaatgagctaaggtgtgacaattgttattcatgagaacaacagtttctgaacaacgaataatcgcgaaaaaaagacagcaagagttatactacaaaatattcacggacctaacactcatcctggagactcacggactcatgctcaaaactcaagaaactaaataggaaattcgcgaaatcgaactgccttttccctagcgggtgcttaattcagaccattattgcaatgagggccgtggctccgaacagcacgtccatcgcgaggcgggctccgatggcaaactcactggagtcctacttgtacagcggggtgagg

SEQ ID NO: 35795 - DNA, 910 bp, Zea mays
  Clone ID: MRT4577_132645C.1
ctttactcactgcaaccagagtttcgtaaaggactgcgtgggacctgcaaaagaaagctacgaacgtagaatgtcaaagatgcttgccaagtctcgtgctcttttcatcaaggagtacaataacaagcttttcaattggttggtgaccttctctttggtcatggtggtgatcgggcgctttgtcatcaagttcttcctacttgaaattgttgcttgggtgatgtttatcttcctagagacgtacacgagaatgttctggtcagcggaatcactgtattataatccagcttggcacatcattgtttcttcctgggagatgatcgtgtacagccctattcttgatctggacagatgggccatcccaattgtcataatgctatcattgggggttctttactggaggtgcttcggccgcagaaggaagcgggtaaagggttccctcctcccattgtacaagaattcttacaagaactcgagtcgcccgagatcagattagttatacgcaatgtttaagtttttcttttaaaggatggtacaaaacatctgcttatagaagaggctacactgcccgtgcttttggatgggcatgttttgatgctgccttgcctatggatctccaattgttttttggtggacgaagagaggcagtgaagctgctagcgatggggcacctgcacaagcctccgttgtaattgtaattctacttctctgccttctgtagctaggctatccttacatgtcacggtctcaattctttgcttattgtttacatccactgcaatttttgcaaggattttgtttttatcgggtcatatacaatgtagttgttatttagagcgtgcaccgtgacattcatatgctcaaagtctggcggtggaatttggaaaaaaaaaaaaaaaaaaggccccta

SEQ ID NO: 35796 - DNA, 449 bp, Zea mays
  Clone ID: MRT4577_132646C.1
ggaaacagagaagggcaacccaaaatgggccaagggaggaaccagggccagcacccggacctttttattattcttccaccgggcacaaaagggggggcttttttatccaacccccataggaaccaaaaaaaatttacgggggattaaaacattggtgctaacccctaaagccgccgccaagaaaccccccaaatcctttttaacttatggccaaccacaaaacgggccagtttaaaaaagttcttgcgccctggggcaaaagggtttaaaagggcaggggggtcttgtacatggaggacccagttgggccaaaaaggaaatgcccgacaagggtcattcccaattgattgggagctttcccaaacatgtaaaatgagaaaagtttgaaacccacggataaaagggccaacccaaaaaatccccgccacatccattttggccccctgaaa

SEQ ID NO: 35797 - DNA, 240 bp, Zea mays
  Clone ID: MRT4577_132647C.1
ggacaaaatccatctttaaatgggggaataccactttaggcaaacttgcagggtccaaccgccaaccacttgacgaaccgattggcctggaacgtgggaaacgatattaaaccgggcagtattccggcttttaacaaagcagttgatttttaacggtaatggttgctcccacttcagggaaaccaaactgccggcaccattaccaggccttttaatactaaataaactttaatacctgga

SEQ ID NO: 35798 - DNA, 583 bp, Zea mays
  unsure (1)..(583): unsure at all n locations
  Clone ID: MRT4577_132648C.1
gctcgaattccatgctgtcgccaccgctcaaccttttccttatctctttgccgaatctctccaatgcctgttcaactttatctccatgtagattttcatggatggatacgtatgcacttcttgaatctggctctcgtctcctccacgtgcttgatctctagagaattcccattgcaccaggttgtctctcacgcgctcaaggccaactcttttcctttcctagcgcccaggttccctgccctagcgtctcccacctcctgccaaagctccctggccgacgccatagtgcccagcctctgtaccgccgcgtcctgcacttggcgctcgtcctcacccttctgttgaccgcccttgctccctgttgcgtccctcccatggctgcctctcttcaatctcctccctccccagccaggtgcccagccctagatgtccatggcgcaggagcaccccatctcctctgccacaattttcgccctccaagccgatgcccaaaccatggcgccctggacaccattcatctccctggnggccgagcctggcccctgtgcccagcacatgcccaaggatatggagcagcaatagc

SEQ ID NO: 35799 - DNA, 260 bp, Zea mays
  Clone ID: MRT4577_132649C.1
aattcccactttttgggccgctcgctcataaagcccaataaccggatacaaaaacctgacagccggacaacacacatactcacccgttctcacacacgaacattgactgtgtgacgccgttctcgttaaacaacaaaatcagcccagaccttataacaagccacattatgtcaacattgccgaccgcgtaatctgaccaattacctagctggagagtcacctggccaacccgattcattgtgccgttctaccagtcatca

SEQ ID NO: 35800 - DNA, 434 bp, Zea mays
  Clone ID: MRT4577_132650C.1
tgggtacctcgaggccggccaatccaatcttatcgttcgataattgaaatgattcctcgggcaaaaaaaaaaaaaaaaaaaaaccctgtgagacgcaccaccaccccggcccagagcactgcactgcttctccctctctgttttacggaggacgaggaggaacaggaagcagcagggtgcaacaatggtgaagttctccaagcggttcgagggccagctggtgcccgaatggaaggacgccttcgtggactactggcagctcaagaaggacgtcaagaagctgcaggccgcggcaggagaggctgccgtggcggcgccggcgagggctccggctcactgggcgatgaggctgcccttcttccacccccttgggcagccgcctgccgccattcaggtgcacaggaagctggccccagacaggagcgccgacggcg

SEQ ID NO: 35801 - DNA, 433 bp, Zea mays
  Clone ID: MRT4577_132651C.1
ggggggggaaaaaaaagccccccctaggcttaaaaaaataggcatgttacgttaaaaaaacaattaaaaaccccaaaagggtttccgggattttcaggggaaacaaaaaaaaaaaggggggccgttgcccatttaaccgggtcgaaacataaaaagctttacccaaattcatttttaaaacaagctgggggaggaacccacacttaggcccccaaagggcccgctgggggggaccaaaacttccagggggggggaaacttttttgggcccttgaaaaaccgggcaaggggggggatcctgctttccaaaaaaaggaccctgaattaaaaggttttgcccttcctgttcctctaaaggggcttccttatccccacccccttcttgagaaggaagaacaggccctcggggatttttggggccagcccatgggcct

SEQ ID NO: 35802 - DNA, 489 bp, Zea mays
  Clone ID: MRT4577_132652C.1
ggggggggaaaaaaaagccccccctaggcttaaaaacaaatgcatgttacgttaaacagacaattaaaaaccccaaaagggtttacgggattttcaagggaaacataaaaaaagaggggggccgttgtccatttaaccggatcgagacataaaaagctttacacaaattcatttttaaaacaagctgggggaggaaaccacacttaggccaccaaagggctcgctgggggtgacccaaacttccagggggggggaagcttttttgggcccttgaaaaaccgggcaaggggggggatcctgctttccacaaaaatgaccctgaattaaaaggctttgcccttcctgtccctctaaaggggcttccttatccccaccccctttttgaaaaggaaatacaggtcctcggggatttttggggccaacccatgggccttgaggatgcggaggatcttgctgccggggacccttttgaaagggggataccgggct

SEQ ID NO: 35803 - DNA, 230 bp, Zea mays
  Clone ID: MRT4577_132653C.1
cccctgctgacaccacaccacttcctatatactctcccgcccgctgctgccctcggtccgcgtacatatcccgtcaccaaccgatcctacaccctccagcatggccgttgcgactgccaacgccgcgacagccctggctcttgcgctcgatctctcgctcgcggacaccaactctgagggcgacgcgctctccacgcttctccacatcctaaggtaccccatctacattc

SEQ ID NO: 35804 - DNA, 360 bp, Zea mays
  Clone ID: MRT4577_132654C.1
cccacgcgtgcgcacgattacatcacaaacacctactctggcattgctataataaacttactcgaggagaggaagcgtgatgaacgttgatatcctatgcaggggtgaccttatgtgctgtcatacaatgtcacggattattctttacatcgaaggctgtgtgcttcaagattaagtctcgctccgatggtctcttcaacctgaaatgccagactgacaagaaagatatacggcagttcttgaacaggctctatgacgagcgtctgcgaccccatttttcatgaccagtgagctcgcctatagtcctggctagcataacccgaggatggctggggtcagaccactgacctctacgtggat

SEQ ID NO: 35805 - DNA, 333 bp, Zea mays
  Clone ID: MRT4577_132655C.1
aacatctttttccgtttcttttttttacttcgggcatgacagtcttctatctgacgcaaccctgactcaatcgatcttgcatagactttccattataaacagctgtccaatcttccaaaaggacactatcgattattctaaccttcagatgcgcatactgagggcagactgaccacgccctgctacgttatcatatgcgcctagcccgagatgctttccctcgatcagaccgatactctggcctgtgcagcaccatccggtaccttggccgtgatcactctcttggtgaacactgcagacatccatcccactggagctctgattgagcatgct

SEQ ID NO: 35806 - DNA, 556 bp, Zea mays
  unsure (1)..(556): unsure at all n locations
  Clone ID: MRT4577_132656C.1
tnncgtccgtgtaaaatcaattatatgttgttacaaaaccagttgattgaaggatttctcgaaaaagttgctttgtctgttgaattggtactgcccggtcggtaccgtcgtgactataaggttgattagcccatttaatagcgtgtttataaatgcggttgtagaatcaattatatggtgctactacacccgttgattgaaggatttctctgttgaattttcgtacttggcatgattagcaaatgtctacagtttgttccatgtttgtcatgtattttgacagtgcctaactttgtgttggtttatgaagctgtcctggcggacaatggcaggctgaaatatattgaacgcattgcggagagatttgttgatttgactatggaacataagggggagatgaaggttgtggtcaggacagttatttcactcaccaaggaggaggagaaagaactcaaggaaaccttgcaggatatccttggggaaaacaaaactatttttggttgaacagaagattgactacagcatcatgggagggattagtgattggaattcgggc

SEQ ID NO: 35807 - DNA, 364 bp, Zea mays
  Clone ID: MRT4577_132657C.1
ccttgctttctttcttttgggtaccaccgtgtcggtttttaatagtgaggcacatgaaatcacattactggccgtctttacacagcggggagacgtgtaaatcctcctggtaccaacaatttcacccttttgggcacatataccctcatattgtggtcgctgaagcgaatagtgccttggcgaacgccatttcgaactgatgcacagtactgcatggtgaacggatacactgatgaagctaacaattatgcctgctaaaaatgggaggttgcccctcaacaggagcgctaaaatagtacgggcgaaaaccctcaatattgttgcaagtggcgtgcccttttggcatgggaggccagttgtccaa

SEQ ID NO: 35808 - DNA, 403 bp, Zea mays
  Clone ID: MRT4577_132658C.1
gctgcaccgcaccaaccaacaccaaccttggcagaacgaagctgacgtagtttgctgtgaacgcagtctggcaaacgcgccgaggatcctggacctagacctgctagtgctcctgtgcgctgccgccggccccgtcgtcgcgcagaactgcggctgccagccaaacttgtgctgcagcaagtacggctactgcaggacgaccgacgcctactgctgcgaccggtgccagtcaggcccgtgccattcggtcagaaactgtggctatggtggctgtagaagcggcggatgcatttacggatcgaacgtagctaatgtggtcaccgacgcgttattcaacggcatcaataaccaagacggcagcggatgctagggcaagaacttctacacccggagcgcgttcctg

SEQ ID NO: 35809 - DNA, 365 bp, Zea mays
  Clone ID: MRT4577_132659C.1
gggtgggtttttttttttttttttttttttttttttttttttttttttttttttttttgggccaaaccttttaatgtgtggggcttttttggttaacaccgtttttggggtttaacgggtggggggacacaatttttcaattgccaaccccggggaggggattgctgctgcctgggttattttgggggtttgggtgggccaagccgcacattggtggggggttttgtgctgctttcaagattgccccccgactttgggtggcttggtgggttccccattactcacatgggtgttgttgttgctcctcctgggttttgggttggaccttgttggcttttggttggggtttgttttgggggccaatt

SEQ ID NO: 35810 - DNA, 490 bp, Zea mays
  Clone ID: MRT4577_13265C.1
ccccggcaaaggggggggtttttccccctttaaatttgggtgggaaaagaaaccgggggctttcgttttcagaggcgggggtttttcccggccacacaaaaatttttacccgttgggccggaccagtttcagaattgggggggaggacccccagggggggggggggccccccaaaaagggatggtttaatcccacaggaaaattttgggggggaaactactttaccgggccggaaacaaatggcttaaaaagggacagccttaaaatccggggttttaaaaaaaaggggggccgggccttccgcccccttgaaccccctccctggatactgggagaacaaaattgggctgcccccccaccctgacagggggtgttttttgccttccccgcccaagggaccggggccaaaagttaaaacggttctttgggggggtttttttttatttgttccgggggggaaaaggcccccaggagtttgggtttgggtttt

SEQ ID NO: 35811 - DNA, 522 bp, Zea mays
  Clone ID: MRT4577_132660C.1
ccggccgggacatctctctcctcgggaccgtgctttctccccgcatctccgtccgccgccggtgatctccgcccacggtggcgaatcatcctcggcgtgtgggcctggggcttcggggttgcacgtggagcatacacgatggggtggccatgaccaaggagcgttgaagacaccggaattgctcgccgtcgcttgccccaccgcggattaccgccgtgcgccgtggacgggactcctgggagcttaatcctcgtgaggtcacgtgtcacctgaagatcatcctggtacctggaatctcaaggcccaggtcaagaccaggtactgcaggatgacgctcatggaggatgctgtgatgagttcgtgagaggtctaggtcgtcgtctcccagtcaacttttgggttgctggaccgttgtctccttataatgtaattatttattttgtatagaactcctgttatatataaagatgtgacattcgatcatgtgccactacgaaaaaaaaaaaaaaaaaaggggcggcc

SEQ ID NO: 35812 - DNA, 140 bp, Zea mays
  Clone ID: MRT4577_132661C.1
gtttctcgtaggggtgagccatggtgagcagcagcggtcctatttgagcgatcgtggagttctacggtgctgtattaatggtgccagtcaaagaatgggatattggatggacaatgcaaagagtgtgctaaagtgagtat

SEQ ID NO: 35813 - DNA, 807 bp, Zea mays
  Clone ID: MRT4577_132662C.1
aatataatatgattgtactgatattattatgctggcatgctaaacagcgatctcggtttgaatctggactatgtagttgccaacatgatgcagacatattgaactagcattgcaattaaaactgcgagcgcgatctatccatcgctcgctctggatcaaatgacttgtcacgacaacacgcttacacagagatctggaacaggtaatccaattacccttccttattcccttcgtctacgcaacgcaacgcaacggcaacacacaagaactataacaaagaagtgaagtgaagcactcgatcgatcgaggtctcgccgccggcaagctccggcctcggctcctagcaggtggggacacaggacttggtgcacttggcggcgcacttgctgtgcgccgagagcgtgcagcccttgccgcagatcatcttcttcttgtggcactcctccttggtgaggcagctcttgccctgcttctcgccctcctccttgccgtgctcaccgctgctgccactgccgcccgacgagctctggtcgtcgccctgcgtggccatgccgccgctcggcctcgccggcgacgccttgtcggcagcccaggtggacgcggagggcgccacccttgcaccctctgcgaccagcgggcccgtggccatggcctcctcgtgcagccatgccggcgcggtggcgctggctgtcgcggcgacagcgagaagcaccgacacggcgacgcagcaggagcgagacatcgctgcagatagttagctcgatgtatgcagtgcagcttctgcgttggcgctgggtcgaccggggt

SEQ ID NO: 35814 - DNA, 377 bp, Zea mays
  Clone ID: MRT4577_132663C.1
taatgcatttctttatattagactcattcaatgtttgccccccttttgtcagccaaaactgaaacaaaacctacaaacgatgagatcacaccttctgaagaaaatacagacaaaccagctcacagcagtaacgaagcaccctcgaaggaggtgatccatctcgccatcgttcaaaagatcctcaaatttcggccattcagtgcgggagtatccgcagcatggagcatatcatcacaaggacaaggagctccagataaaaaaaagccgttttcttgttcaatacctccagtgtacatttaggtagctcattgacccgtccaaacgaggtggcttgtatacttgctgagttcatctatatatatctgagctaacatatc

SEQ ID NO: 35815 - DNA, 358 bp, Zea mays
  Clone ID: MRT4577_132664C.1
ataaaaaaaaaaaaaaaaaaaaaaaaaaaaaaaaaaaaaaaaaaaaaaaaaacttagaacgcaacccctctaggggccttttcggcatttttcgctaactctggcggcctctcgccccttcttgtaggggccccaatgccccttttgggggcccttgtttcacattttctctggccgtttttttacaactggccaacgggaaaaaccgtggagtcccccaatttactgcctttgaccccctttccccttttccccttttggcctatttgcgaaagggcccgaaccgctcgcccttcccaactttgccacattttaaatggcttatggcccccccttgtcccggggttttaccctctta

SEQ ID NO: 35816 - DNA, 330 bp, Zea mays
  Clone ID: MRT4577_132665C.1
ccgagtattcaaccttttgataccacaaaacgagaaagcactttacacacggtgagaggaaacgatgagaacacttaagaacaccgaagaaaaaaagcgaaccgttgaatccatgccaagcatgcaacaccagaggcccactgaacaagagcagatgaggtaacaccaacaaacaaaagccgatgactgacatctgtcctccagaagagaaaacatacgttaagggaccacgcaaatgtgggctgcgacagcgatatcctgcaaagggggcatgagatctgtacttgctggagattcttgaggggggaggagtcaaggcccaccttgagc

SEQ ID NO: 35817 - DNA, 607 bp, Zea mays
  Clone ID: MRT4577_132666C.1
tttttttttttttttttttttttttttttttttttttttttttttttttttttttttttttttttttttttttttttttttttttttttttttttttttttttttttaaacaaaacaaaattggcccctttttaatttttttgtttccatttttgggggggcacccccggggttttacccccgtttggaaaaagaacccccaggcccgggggcaagcttttttttgggtaaggggggaggggcgccccaaaaaaaaaaaaaaaaaagccccccttaaaaaataaaacagggccccaaaccctgggttaagctttgttaaaaaaaattaaaggcaaagggtcccttaaaacttaaagggattccacgggaggggcttcggttcaatgggggcccgggggcccccaatttgcaacccgggggaaaagggtgggatttttccccctgggttccaagggggtttgggggggaaaaaatttacttgttgggggacccgaaaacacccattaaaaggtttttaggttttggaccttttttccgccgggggtcgggaagccccaaacaaaaaggaaaaaacctcgctaaacctgagaggggggggatttggggg

SEQ ID NO: 35818 - DNA, 301 bp, Zea mays
  Clone ID: MRT4577_132667C.1
gattgaccagccaatcgcagttagcctaacatacatatctaatcttctttgcaccggatcggttcaatccagagcgagggatatatgcaggtgtagctgccaaaaccgccgagatttttcataataccatgcacatagacgcatgagctgatatacacgcctggcgatcgttgacatcggcctgtcctaggacgacttcctggagtgtgagtctttcccgtcaatatccatacgatcctagagttttatattcagtacgattgattgtacgaacaagtgtattgtaaacttcgctatcctt

SEQ ID NO: 35819 - DNA, 120 bp, Zea mays
  Clone ID: MRT4577_132668C.1
ctctctatctatatcttgccttctacctgccccgttcttacctgactcttgcgacggcgtcaacaagagctgagctaggagaactagactggttcctcaacgaacatggggacggggctg

SEQ ID NO: 35820 - DNA, 344 bp, Zea mays
  unsure (1)..(344): unsure at all n locations
  Clone ID: MRT4577_132669C.1
tcggcaaaccctctagcttccatagctggctagcgagctcacacgaatcggtggtctgtctggagaaccgtggtagctcggggttccattcacgaggtacgtgcgagccagcgtccttgtggaggtagagagaccggcggtccgatcgccatggacagggatctgttccggacggtgaagcaggggacgcggaaccaggccaggctcctgtaccaccgcctggtgtgccgcctgccgcacctcctcgccgtcacgctgctcctcgtcgtggccccgcggttggtgtccacgctgtccctcgccgngttctggagcgaggcgcgcgccaacgcgctcgtgctgtt

SEQ ID NO: 35821 - DNA, 483 bp, Zea mays
  Clone ID: MRT4577_13266C.1
tggcttggaacctttgggctgatttatgtgcttgtgttgctccttttactctgtgtagtgtcatcgttggtcgcttggagctttgattattgcttctggtcttttgttgcgaacttactactttgcaacggagattcgtttgctggcgaagaatacttctccgtcggatctggagggaaagtgtgctgttgcaaagcatcatagtgacgatcggttcatctcacttgtgaagtcggttcctgagaagctggcacccattaaaatttagaaagtgaacgtcggaatggaagccgagaccgcaacgcccgatggctaaaccgcggcacataagcctacttaagattcgtatccccccgccatcggaggagaagaagagaatgagtccaccccagtactagcctcctagggacctctcgacgtcgctgaatgatcctctaaaaatacggcccgataaaggatagtatctgagaacccggacacgac

SEQ ID NO: 35822 - DNA, 363 bp, Zea mays
  unsure (1)..(363): unsure at all n locations
  Clone ID: MRT4577_132670C.1
ccggccgggccgggctgcttcaaagacacatggaggctcntcaaaagggaaaacaagagcaaattggaattcttaagtgcacagtgtatgaagttgaaggggttgatgtaaatgctgataggcaggatgaaaggtcaaaaaggacttctgttgttttaaggaatgaagaagaaaaaggaccaaagaggtcgaagaagagttccaacatagaagtattgatgtagaggtacctagacattacaaccaaactagctgaagatgaaacgacacaactgacaacagaaagggaggcaagacgatgtgatgatttttcaattaataattgcataccagttcgacacgccctgccacatcccaaaatat

SEQ ID NO: 35823 - DNA, 312 bp, Zea mays
  Clone ID: MRT4577_132671C.1
cggacgcgtgggcggccaaaaaatgacctcactttctcctcgtgatttatttctgtatgcagcagaaagaggcgctttggaagtgttttctggtgtttattacgatccaaagctttcattagaacttgacccaaagattctccaactggcttttatgaaagcctctcaaagaggacatgctcccgttgttcaagttcttctaaccgatagccgtgttgatccttcttttgataacaattctgcattacgggccgcggctagaaatggtcattgtgaagtgataaaacaattaatggccgattctcgatgtga

SEQ ID NO: 35824 - DNA, 330 bp, Zea mays
  Clone ID: MRT4577_132672C.1
ggggaagagcgctgcattgcttgtaaactatgcgaagctgtaagttgtactgaagtttagggttttcttacttcagatgatgaagatcaaatacagccaggaacctgttgttttgctgtctttcccgaatgctagttgtcaaatcaaatcccaaaaataccagttacctactggtatctttgctgtcggggtctgagatttttagctaaaccagacgcaaaaccccaaatatgtccttttgagttcatacaagttactataattttagtattttgagtatcatgtcttgaaaagaaatttgaaacgtaagtcatttgcaagcaaatcatt

SEQ ID NO: 35825 - DNA, 297 bp, Zea mays
  Clone ID: MRT4577_132673C.1
atggcttacatcaggcgtccccggccatgcgtcgtcaccggacctctatctggggctctgggcaaggatcaggttcgagatcgtgtggcgatccagtacccccggaccctccttgaatggggatctagaacatgcttgaaggggtctaggccccagcgtaatggtctggacacgtggcgccagcggacctcacttggcttgagttctagtctagatggcacacgtggggtccgggaccattccctgagccctccggaccccctcttcatggacacggtgtccctgaaaggtgcataa

SEQ ID NO: 35826 - DNA, 2826 bp, Zea mays
  Clone ID: MRT4577_132674C.1
atggctggacgaccccctctcccctcctccggcgagctcttccctcctctccctcctctccctctctcctatagggctacgttggtcgcgcctcctcctcccgcgcgcggcgcgactccgaggatggtccccatggccgggcatcccgtgtcgccgcctcccttcaccgaatccggtgggcccgtgtcggccgtgccaccacccgcggtgctggccctcatggccgagagccccacgtcgctgccaccctccggcgcctccggccccgctggcacccctctcgcgccgctgctgggtccggccgactccgactttgccgctgtctgccccacgtcgatctcccttcctcatgcgtcccagaccaccgtgctcggccacgacgacgccctgctattgcccctagttttccccgatggcgccattggcacgaccatctacagccagtcgtccgctaccacctctacactgtgtgctccttccccttcggatgacgcttcagccatcctcgctgccacccatgctgccgttgcggtggctcgccagcggacccaggacaccgcccgtgcccttaagaaggaacaggcggttgtcgacaccatcgagcgccagtacgccgagacctaccgtcacctcgctagcaagggcatgtcggatggttctcccatgtccgctcgtcacagcgccgacactttcgagcccgcgcccgtcccagcctcgacccttcgcgcctctcttcatgcccaggcggcggccctcaccagcatctgggcaactttcaccgacattctcgcgccggactccactcagtatcctcggtggcgcgaccaggtcctgcagaccatccgccgctacaccgtcgtcgaccacgtcctcaccgcggtcgctgcaccgatggaggattggctcctgatggacgaagtgggtgatctctctgtggaagagtactgccgccagatgaagatgatggcggacactctcctcaccctcggggcccccatgaccgatgagagcctcgtgctcaacctcctctgtggtctgagtcctcgcttcgatcacgtggcgcccatcgtcacccacatgaagatgtttcccacctttgcggaggccaagaacaatctgcttctcgtggagctttgcctctccgccgctgcaaccaccgctcccgccatggccctctacagcgtacctcgggctgccccctccgactctgtgggggttcccgctcaccgcactccgaccctgctgccctctagagctccgcgacagactgctggctttagggggtctcgcaaccgcggtcgcggtcgcaagggcggacgaattggcggtggcccgtcgggaggctgtggtggctcatcgggtggctctcagtggctatccttctacaacccgtggactggcaccattcacatgtggcccgggtcgtccacgggagcctcggcccctcaccccaccacctctcagcagcctcagcaaggtcttctatcactcccggggtctccgacccagcccatgtgggggccctggattaacggatgggatgcgcagtccctcgccaactccttctccacgatgatgatggccccgcccatctcagtctctgattgggtggcggattctggcgcctcctaccacaccaccgcagacgcaggtgacacggtccttcccggtacttttcgcttaaccaacgtccgtgttgccccccacatcattcaaaatcttctttctgtacgtcagttcactactgacaactcttgttccatggagtttgacccgtttggtctttctgtgaaggatcttgccactaggacccttctcgctcgaagtcggacacttcccaccctatctcacttcttcgcctgggtctctactcagttcggtcgcaccatccggagcatccagtgtgacaacgggcgcgagttctataacaatgcgtcctgtgacttcttcctctctcgcggcatccacctccgcatgtcatgcccctacacggctacacgtctcctcaaaacggcagggctgaacgctgaggccctcaccactgccacctacctcctcaatcgtcttcccaccaaggcggttgcccaccccactccttacttcacacttttcgacatacacccctcctataaccatcttcgtgttttcgggtgcgcttgctaccctaatctcgcctccacagctcctcataagctagccccccattccactcgctgtgtcttcctcggatactcccctgaccataaggggtatcgatgtctcgacctcacctcccaaagagtcctcatctctcatcacgtcgttttcgacaagtcggatttccccttttcctcctcttccgctgcctctgtcaccgagctcgacgtgttcctcgaccccgactctgtgtccccactgtcgtgccccccttctttgcagcggagtacgcagctctccaggctaaccacacctgggacctggtgcccctcccccggcgccaacgtggtgaccgggaagtggatcttcaagatgaagctgaacggcgacgggtccctggagcggtacaaggcccgctatgtgctccggggcttcacccagcgccccggggttgactacgatgagaccttcagtctggtggtcaagcctgccaccgtccggactgttctggctctggctctgtctagggactggttggtccaccaactcgatgtgatgaacgccttcctccacgacaccctgacggagacggtctactgcactcagcccgttgggtttgtcgaccctgctcaccccgacatggtctgcaagctcaacaagtccctctacggccttaagcagccccactag

SEQ ID NO: 35827 - DNA, 238 bp, Zea mays
  Clone ID: MRT4577_132675C.1
gccggccgggccgggaacctaatcatcatcgccaatcaataaggactcgtggttgatgttctcggcaccggagttgcgttttgctgtaccgttgcttgcttgctgtgcgttgtggctagttttgactgctatcgaataataataaattggtgtcatgaagtggaaaatgccatgcgatggtggctactttctgcagcagcgcctgttgttccaaaaaaaaaaaaaaaaaaggccccta

SEQ ID NO: 35828 - DNA, 791 bp, Zea mays
  Clone ID: MRT4577_132676C.1
ataaacctcatatttcacatttgcgcttgagagccacggccaccacaacaccagcactaacaaatcccaaaaaaaaagtctagccacagcccacagcacttcttctccacaacgaccccacagagggccagagcaagacatccgcaccgcatcgcatatacccagagctgtgatcgctgccattaattctcccctcataggcctccaacaaggtcgatggaggaacaacacatggctgggccgccgtaccgctaccggcttcggcatcgccggctgatggacatagcacccgcaagcgcgagcaacgacgattcagggcatcacggctccaacgggatggccatcatggtgtcgatcctggtggtggtcatcgtctgcaccctcttctactgcgtctactgctggagatggaggaagcgcaacgctgtcaggagagcgcagatagagaggctgaggccgatgtccagctcggacctgccgctcatggacctgtcctccatccacgaggccaccaacagcttctccaaggagaacaagctcggcgaaggcggtttcgggcccgtctatcggggcgtgatgggcggcggcgcggagatcgccgtgaagcggctgtcggctcggtcgcggcagggcgcgggcggagttccgcaacgaggtggagctgatcgccaagctgcagcaccggaacctggtccgcctgctgggatgctgcgtcgagagggacgagaagatgctcgtctacgagtacctccccaaccgaagcctcgacttcttcctcttcgatggcagga

SEQ ID NO: 35829 - DNA, 1951 bp, Zea mays
  unsure (1)..(1951): unsure at all n locations
  Clone ID: MRT4577_132677C.1
cttgaagcaatacggcacaactgatatggagttttgaggaaaagggtttcctatgtatggattttagcaacggtggtcttctattattttgttctatagtatcttttggtaggcaagtttaatcatcatttccacaaatttttttctgttgatgattgcaggtcagctgcctggtgtcaccgctcctattcctggggttggggtgcttccaaacttgtataatttggctgcaggacagccacaagccatgacacaacaggctaccaggcatgctcggcgtgtctatgtgggcggacttcctccaactgctaatgagcagaccgttgccatattcttcaatggagttatggctgctattggaggaaacacagctggtccaggtgatgctgttcttaatgtctacataaaccacgacaagaaatttgcttttgtggagatgagatctgtggaggaagcaagcaatgcaatggtcttagatggcataatgtttgagggagcaccggtcaagattagaagaccaacggactataatccttccctagcagctgctctgggcccgagccagccaaatccaaatctcaatctttctgctgttggcttaacacctggctctgctggaggattagaaggtccagaccggatctttgtaggtggtctacaatattacttcactgaggcccaagtgcgggagttgcttgagtcctttggacctctgcgtggatttgatcttgtaaaggatagagaaactggtaactcgaagggatatgccttctgtgtgtaccaggatcttaatgttaccgacattgcctgtgctgctcttaatggcatcaagatgggagacaagactcttactgttaggcgggcaaaccaaggagcttctcagcctaggccagagcaagaaagcatcctgttgcaagcacagcagcaggtgcaaatgcagaaattcgtataccaagttggaggtgccctgccaacaaaagttgtatgcctgacacaggtagtgacagaagatgaactgagagatgatgaggaatatgatgacattgtggaggacatgagggaggaaggacacaaatatggtaaaccgcacgagactcatcgacttctattaccctctttgttttaaaagctcctctacgttctgctgtcactaccctcagttactgaattggtttcctttttgtgtttttgtcttgtgtgtcttttttgtagtcccgcataatgccattgcagattgttttgtagtccgaccttatgcaatagtggcaatcgggccttaacccacagaagacactattcttttgactttgattaatcattttattattagcgcgtcttgtctatatatatctactctgctcactaagatttggacaggtaacttggtgaaagttgcaattccacggcctgaccccagcggtgctcctgttgctggtgttggaaaggtgtttttggaatatgcagatgtggagggctcaaccaaagcaaagacagggatgcatgggcggaaattcggcgggaaccaggtggtggcggtgttctaccctgaggacaagtttgcagctgagcagtacgactgaaaagttttagaacccctattctagagttgcagttgtggcacacaatgtggttgttttgaccttatgtagttaagtttggtgatcgatccgctgataagtgatataagtttcgtgcccaagtattatatcagccggaatgtagctaagatgaattcgtttgctgtttatccttgggccattgtttgctcagattaacaggtgccgttgtggttttgtgctgacatgggaatacatacatgatggcacctcnnnnnnnnnnnnnnnnnnnnnnnnnnnnnnnnnnnnnnnnnnnnnnnnnnnnnnnnnnnnntcgagactagttctnnnnntcgggccgaattcggcacgaggctactttgttgatgctgacc

SEQ ID NO: 35830 - DNA, 682 bp, Zea mays
  unsure (1)..(682): unsure at all n locations
  Clone ID: MRT4577_132678C.1
ctgttccgccgctcgccacaaaacccctctcccctcacgctccccacccacctcctccccctcgaggcaatgccgagcgcccttaacctagtctgagttcgagctcaatccccattccgtcatggatcggccgccgcatctcgtcatcgacctcaacgaggccccgccgccgccgtcgagcgacaccccgccggcgcaggccccgtcgccgccgcaggagttggctccgcccgtccaagctcctcctcctcctcctcctccgccgccgccgccgcagtttcctcctctcctgccgccgcagctgcccctgggtgcgcccaaccaacaggtgcggctccagcaggaggccctcgacgtggtgcttcgggtccaccgccccctcgaactgaggaatacaccttttgggcccatagggaacgtgcccgccggcttgctccctggtctggggctgccgctgctccctctgcagccgccggcgcctcaccctggggaggcggcggttgnggcaacccgccggccccctgctcgncctgcggncgccaggagattctggggggaaccttggtctgcgacgcgtgtgacagggggttccatcccaactgcgtccgcgtctggccggctctcttccccccgcccccgccacccaacgagggactggatctgccctgcgtgggaaaggcgt

SEQ ID NO: 35831 - DNA, 412 bp, Zea mays
  Clone ID: MRT4577_132679C.1
tttatggggccaaccttgctgtcatggacacatacatggttccaggcctctctgaccggcggaacctttgctacgctggctccatctacgcgccgggatgaggtcagacgaaaacctgctccggtcgatgcatacagccggcgacctcggagccaacctcacttgcccctccaaagacaacgaactgccccgaccccattgcctattctgagttagaaatacttcacagataggaatggagatctttgcgatctcaaggctggttatcctcctatgttcttccatccgtcaccacactttacttcatttggaactgtgaacgtgcatgttgcgtctaaccatagcgtgaaatgactaacgatcactttaccaatatatgataaccggaccgtgcatataaatcttcagagct

SEQ ID NO: 35832 - DNA, 761 bp, Zea mays
  Clone ID: MRT4577_13267C.1
attttaatattttcgacatagatatgtgatcgaacaaaaatataatgtactacaaagttgtagatcaattcggccgcttttttttttttttttttgatatgattttcatataaactttattttcatataaactatattcatgcaagccgtcaagaacatgcggtcaagaatgtctatgtctcacgcagcgcgtgacgcttcgagactaatttatgttggtctagtgtgattcttataatcaaatcacgtaatacacatgcaaaaactcatatgcagtatactaatgtgtacacggaattggggtcctccagattacgaggcccaccagggcggttgccccctttgcccccgccctcaggggccggccggcgctggtgcctgcacgcgcgtgacgttgcgcgcacatcgaccagaaccaccggagatatgatcagccgccgcggcaccgggtcagcgggctgcagccgcgggtgtacttgtttacgggcttccccgggcgggtggccccggggcccctgttcttgtcgcagttgcccagcaccttgcagctgagcaacttatcatacgacagcatcccctcggcgccggcggcctcctgcggcccggtcgccagcagcaggcacagaaccaccgccgctgccaaggccagcctcgtcgccttctccatacctgcggtgtgtggtgctagccagggcggtgtttttttgctcgtgcgcgtggaatcccggccggcctcgagggtcccaatcgcccataggagt

SEQ ID NO: 35833 - DNA, 1032 bp, Zea mays
  Clone ID: MRT4577_132680C.1
tttttttttttttttttaaccccaaaaacgtgatactactatgtctttattcaatgcagctcctcttattacatgtaccacattgtttcagtgaccaattaatgtgtatatgacctattatttttgctcaaaaccgttatctaacacaaaaaatagagtgtaacgtgacaagtcaggtcagcagagaaaactgggttcagcaagtgctcaaaggatggttttccatcaatcaatcaacaaatacaaagatggtggctctactgaaatccgtctgcggccagctgagaagacttgtgtgtatatcaatcaccacaggatggatgacaggactacaggaggagcaacttccagcacaagttggctcgtctgacaaggcgcaggagaggccattatgtactcaatggaatcgatcattctgtcaagatctgtcagaagatgactagaaaaggttgctgctactcatcaccacacagctacttataaaatttggacagctacagaaactaaatttgcagtggatcaccatctattttgaattggagaccttcagtagctcatggaaggcttcctgaggaatgtcgacagatcccacacgtttcatgcgcttcttgccttccttttgcttctctagcaacttcttcttccgagtaatatcaccgccatagcacttggccaggacattcttcctcattgcggacagggtttcccttgcaataacttttgaaccaattgctgcttgtatggtgatctcaaacatttgcctttctataaatttcttgagcttctccactaaatcctttccaacccgctgagccttctggttatgcactatagttgccatagcatcaacaggttgaccattgagaaggatatccatcttaactagatcagcttgttggtattctgaatcttcgtagtcaaaagtagcatagccagacgtaatgcccttcaactcattgtagaagtccacaattatctccttcaatggtaatcggtacttcaacagagcccagagccaaattccgaacttac

SEQ ID NO: 35834 - DNA, 806 bp, Zea mays
  unsure (1)..(806): unsure at all n locations
  Clone ID: MRT4577_132681C.1
gggcgattgggttcctcgaggccggccgggaggctgatagagcgcgacatctccgtgcgagctcaccctgtcgcaggagacatgagtgcactagattgctgtgtgtcacaacacacatcgcaatggatgtccttctttcctcccgtggcaacggtcccgtcgctggcggccccggcggccaagaagcggtccggaggagtcccgcacgtgaaggggatgaactcctaccgagcactccaggagttgaaaaaggcgaacttgctcaaatagtgaaagaccgccgaatgctccttcggaaggtcgtgttggcgctaacccccgcgctaaggaagcgcaccgccccacaggtaggggaccaaatgaacaacaccgccgagatcatcgggatcgccgccaccatggaagaacatccaggtcgacttctgctccaccctgtgcgaggtgatcaaggggaaggacctggtcgagggcaaggagtcatgtgcgttctcccagcagctgaacctggtggtgtacggccggatcctgtgtaagggaaagtgctccgtatataagcggatgacggcgccggacatgaaggtctgccagaaggagtgctgacaaggtgtacgtggtgaaggcggccgaggtccccaaggcctgcagcgtcacctgcgccaaggagaagaacccgcgcctcatggagaactgcaagaggtcctgcacccctcgctccttcttgaagcgaagccccttgaactgaatgaacatgcatgcatgcatgtatgcatgcgcccgnggtgacgtgacgttcagctcaggcgctg

SEQ ID NO: 35835 - DNA, 370 bp, Zea mays
  Clone ID: MRT4577_132682C.1
gtccggtataacactgccatatatataataaagaagcacattttgcactttctagggatcactctggctaatgggcccgggggacactttctttgagaaccatcgtcgtgacatgccgtaccacgccacgctagcagagcacaccgctcatggtacctgggttagcatacggaggcactctgtaccaagactctggtgttgacttaaaacactgccacacgagtactaaattcaaccgaagacaacatgttctgctcaggaaaaagcttatgtccttttaggctccatggccgaggccattcccttcaagcgcgactcgggggcctcgactgtaaaggacccaggcacacggcacgggggacaccactgt

SEQ ID NO: 35836 - DNA, 378 bp, Zea mays
  unsure (1)..(378): unsure at all n locations
  Clone ID: MRT4577_132683C.1
attattttctanagaanagtcatatggattggggaacatttaaaatgtataagtttgattggtcacacaggcccacagggcacagccgacccggagcactatatgattggagcaacccaagtgcccagaaggggacagccagagagcggtactaagacactgcccccttatttctagggggaccccaggactgccaaaataagactctcagaaaagtaccacctggccagaggggtgaaaaacaaccaaagattccactatcaagcaggggatactagaaccttaccctggaggtgaaagtaggcaagaccatgtgcattaagcccagccccccgttttaaatcaaagtaaacgaccttatcgggctccaactgcagg

SEQ ID NO: 35837 - DNA, 2336 bp, Zea mays
  Clone ID: MRT4577_132684C.1
gcagtggccagctactcggcagcagcgctcgctctctagacgcttgggcttggcacgccggcgccgggatcatccatggccggcgcaggccaggaagatgtaaaggtggagcacgagggagaaccctcgtggccggccggcagcaaggatcgtcgcgcggcgccgtggagcaatgcggcggccaagcacagcctgccgtcaccgctccatgctcgtccaagaacccgccggacgcgaggaagccttacgcgactccggaggggtgctccgtccacccggggccgccgcgggatcaacggcccaacgcgtcgccgaaccaccgcgtgtccctggagaacgacgttaggcagctgcagctgcatttgcgtcaggagaggtctgtccgggtcatgctcgatcgggccattggccgggcgtccagcgcgctgtctcctggccataggcatttccgggatttcccggcgcagacaaaggagctgatagcggagatcgaattgctcgaggaggaaatcgccaaccgcgagcagcacgttcttactctctacaggagcatcttcgaccagtgcatgtctgggccaccgtctgggcagagctctggcatctcgtcccccgcgcacgccaaaactatcaccgctaggacacgaaggcagccgagcataatatcgagcgcattttgctcgtccaagaagctcccgctccagcccttccacatcacagagtcactctccgagtcgggaagaaccaagaacacgctcaaggctaagatcaagcacccatctttttcaagcgaaacattggatagcagccattctacttccttcccaccggacccaaaaaagctaccttattctgggagtggcggtctcttgcccgcactctgaaagacacctctaccaatgcccaagcaaaatatccgaagaaatggtcagatgcatggcatccatatactatcttctgcgcaccgaggcgccagcaggaaagcctgagaaggcccgctcgccattcttgtcaagatcatccacgaatgtcatccttcctcggcgggtgaacggagaggaaaacagcacaccgaacaacaagtgcacggtggaaatagcttccatatcagttgacaagaaccagatgccagatgtctcttacgcgatcacccactacaggttgcttgtggaacagcttgaaagagttgatctgagcgtgtcggagaacagcgttaagttggccttctggattaacgtttacaattcgcttatcatgcatgcgtatctggcatatgggattccaaacagctctctgaaaagaatggcgctatttcacaaggctgcctacaatattggagggcatgccattaccgccaatgctatcgagcacgccttgctgtgcttcaggtctccacggatcggtcgttggttcgagtccatcctctcgacggctatgcggaagaaatgcccggacgagaagcagctggtccagctcaagttcggcctgcaggagtgccagcctctggccctcttcgccctgtgcaccggcgcttcgtctgaccccatgctgcgggtgtacacggcgaagaacgtgatggaggagctggagcgcgccaagcgagagttcctgcaggcgacggtggtggtgcgcaagtccacgaagaagctgttcctgccgcgcctggtggagcggtacgcgagggaggcgtgcgtgggccccgacagcgtcctcccgtgggcgcagcgcgagggggccgtcgccgtcgtcgacgaccggccgcagcaggaggccgcccagcggggcgtggggagccggcgcaaggccgtgcaggccgtagagtggctgccgtacgccaccagattccgctatgccttcgccaggagcatggtcgacaagccacactgctagctgcttcgcctcgcactcctcgcatcgcagctgttgccgtctggccccgtttccgctggagaaagacatctgatcgctgtggcgcagccattctgatggctatatgtaaatgtctcgttgatgctgcgctgttgacggctagatagtactgctccgttccgtagtgaacaagtggcaaggatgggacgaagggtttgactaattttgcccaaggtgtacagaagctattatttcaggtttcagcagcagtctgttggagaccatttgaattcattcgaattgtttatctacttggtcgtttgtatttccattggtgggagcaacttgtcctgtttgggacagcttcagctctaaaaaatttggttggtaaagttggtagatagagcaggttattagatactccctctaggtctaaattttttgacgttttggacagattctcacatacc

SEQ ID NO: 35838 - DNA, 793 bp, Zea mays
  Clone ID: MRT4577_132685C.1
cctcgaggccggccgggctaaaaaaaaaaaaaaaaaaatcagatgtctttctccagcggaaacggggccagacggcaacagctgcgatgcgaggagtgcgactgtgcgaggcgaagcagctagcagtgtggcttgtcgaccatgctcctggcgaaggcatagcggaatctggtggcgtacggcagccactctacggcctgcacggccttgcgccggctccccacgccccgctgggcggcctcctgctgcggccggtcgtcgacgacggcgacggccccctcgcgctgcgcccacgggaggacgctgtcggggccaacgcacgcctccctcgcgtaccgctccaccaggcgcggcaggaacagcttcttcgtggacttgcgcaccaccaccgtcgcctgcaggaactctcgcttggcgcgctccagctcctccatcacgttcttcgccgtgtacacccgcagctgcaaacgtgttgctcgacgcccaccaacggttagagatcagatcatggtgtgtgtatcagatagagatagaacaggcatcgtaggatgtgagtaccatggggtcagacgaagcgccggtgcacagggcgaagagggccagaggctggcactcctgcaggccgaacttgagctggaccagctgcttctcgtccgggcatttcttccgcatagccgtcgagaggatggactcgaaccactgcagatggattatattcgttgggttctcagtttagcaggtggtcatgtatcccatgtcatttaaaaacgatctttttctcggagtgatgaaa

SEQ ID NO: 35839 - DNA, 587 bp, Zea mays
  Clone ID: MRT4577_132686C.1
aatcagtaaattatttatattctcatatcataaacatgaataagcatcaacaatattcatattacaatgataccttcgactcaccagaagatgaaaatgcgagaatgacgcaagagtgattacaatccagcgtgaatagtacggggttactgttcatctatttacagacacaagcacgagacgtagcccgaataagattatatccatgcccttgacatatactcttaatcataatgcaaactatcaaggactaagtagtcttttcttccttatgtcggttttgtcctccatcttcgttaacatgacaagccaaagctcctttagccatagcttcggcgtccatccatgttgccttcgggctatatcctcatatcacacgccttcatctcaaaggcgaagcttttctacggcgcgaatacgaaggatccggcgaggagcagcgccgtcgcgagcagccagcgcgctagtgacaccaacgagcgtggcgccgcagcagacgcccccatcttgtggtgcggagtctgctccttctggtacttgtggagctggccgcagtagagagcgttggcggggatggccatctcggt

SEQ ID NO: 35840 - DNA, 285 bp, Zea mays
  Clone ID: MRT4577_132687C.1
gaaggcccaaaaatttattttcaaaaaacgtttgataattcccaaactttgctttaacgaatcaaccttgtcttacttactttgagccacaccacttaataacatctagagcttgcatgtcccccgacaggtgtccttacaatatattttgcctgcacgtacaatgcggagaaaacatagcgcccgtacaattgcacctgctatcctaactcgggccacctgagaaacaaacgcttgctccagaataccttcttttggggccgtagaaatccctacaggactgcc

SEQ ID NO: 35841 - DNA, 286 bp, Zea mays
  Clone ID: MRT4577_132688C.1
agataaaaaatgaataaggaaggaaggtatgttacactttggttgataaaaaaatagggtgattaaagaaaaaaagaaaatgagggatataggtaaagggaatgtatgttagtaggtaaagtcgatatggtatagggatggtttggttattgccaatatgtagggattggatgagaatggaaaaaatgggggagatatttgacttgattgggatgaagacgtgtttaaaattataaattcatggattgaaagttaacggaagcagttgttattaatagggtatagg

SEQ ID NO: 35842 - DNA, 603 bp, Zea mays
  Clone ID: MRT4577_132689C.1
agcccttgcctcgctctctcttgtctcgcccgctagctccgcatcccaggctcccaccgcgcccgactgccccaacatgccccctcgccggtccgctccacgcacggctccagatctgttaccaccgccgccggtggacgccgcaccgcgcgtgccggaggcgccgacgacgtagaggaggatcctgaccggccgagccatcctggcgacgatgacagcgtaatcgctcggcggacgaccgctcccccccggcccctattccggaggtcattgacgtgtgctccttgagacaaaatggcgatgatggtggatccccccgatgggatggcaagtcagggaaaggattactatactatgtggcacagactgtcttgacatgcgacaccaagtacgtgccgatgaagcccatcgaaagacgagcttactgaacgcgtttgctctccgtgttctgcgagaccaacgtgagagtcgcgctcaaaaagataaacgacgtctttgacgaccgagagcatgcgctagagacgcagagagaggtgaaactccttcggcacctgaaggacgtagacgatattgatctctgggtcataaagatgcctgagcata

SEQ ID NO: 35843 - DNA, 369 bp, Zea mays
  Clone ID: MRT4577_13268C.1
gactcctatagggcgattgggaccctcgaggccggccctgaggccttgtaatctggaggaccccaattccgtgtacacattagtattactgcatatgagtttttgcaatgtgtattacgtgatttgattataagaatcacactagaccaacataaattagtctcgaagcgtcacgcgctgcgtgagacatagacattcttgaccgcatgttcttgacggcttgcatgaatatagtttatatgaaaataaaggttatatgaaaatcgtatagctctcgaagtgatctacaactttgtagtacattatatttttgtttgaacatatatccatgttgaaattattaaaaaaaaaaaaaaaaaaggggcggcc

SEQ ID NO: 35844 - DNA, 492 bp, Zea mays
  Clone ID: MRT4577_132690C.1
ggggcgggccctcgattacattcatccgttcaaccttattacaaattgcatgctttatactgacacttgtgcataacaaactaaaaagacacccactttccgaggggttaatgtgtccataacctaaatgggtttctctttttgccgccgcagatcaaaacacgatggaggtcccctttgtatttaacagcacccctctatctttttcccttaggtgcccgggaaaaaccaggcgtgggaagcacattagcaccgggattgactcccgaagacgcagccacagtcgaccacaccttggatgctcacacatggtactttacggtttccaatgaagacttcttcattgacccagaggcacctgaagagcggcggactttgttgttgccctctccttactgttcttgaacaagtcaccgaaaccatgcggccaccccccatttaagaatgatgtctacatacctgcgcgcggcacaaaattcaatgccgggactg

SEQ ID NO: 35845 - DNA, 533 bp, Zea mays
  Clone ID: MRT4577_132691C.1
gtgtgttttttttttttttttttttttttttttttttttttttttttttttttttttttttttttacgagcaatggagccctttttggtgaactgattttgagataagggactaaccagcattatttgggctgtgtttttgacacgggtgttgggggctacaactggatttttacaataagttttgaatcaaaaaactaacgacgtcgctttaaaaaatatacgaatcgcctgcctaaaaaaaaaagggcggtttagcacccccgccaccctagggcttcttcgaagggaatttgttccaagcattcttaaaaaaaaaaaaaaccttctaaaatatgtatttctggctgaacggagcgcccctttggtgtagtttatttggatggacacataggggtgccttcctgtaagcttttttaaaaaaaaccggtgtaatgaaatctgttagtgggaccggttgccagccactattgggaccaaaaatatattgcaatggggatagcagggccctcaaatttccttcctttccatttg

SEQ ID NO: 35846 - DNA, 756 bp, Zea mays
  unsure (1)..(756): unsure at all n locations
  Clone ID: MRT4577_132692C.1
gggcgattgggttcctcgaggccnggccggatcaattatatggcgacgatcatacgggtggggaggctccggcgatcagcctccccgaccacttcgacatcatgcctctggatctgcaacgatagcgacatgtcggcagaatatatggccaagacggacttccccgctgcgattcagggcctcgagaccaatatctatgaacctgagaatcaagtctcttacggaaaatcctatccactacgcccattctggggcgcgcactcacggatgcgacgtcggtgagatgtgcgagggctgtctgaaagatgcgaggacaggctccaggtctctgaggcgaggaactgacggatcgcgcggactggaagagctgacaggatatctgactaacatgggtttgccgactcgtgagctactgatgacgatcctatggacaatacaatcagaggaacgtctgcttgaaggtgagaatggccgaatccccgacccacagactcgtatcttcatcacacagacaccaacccaccaggaaatctgtatcgccagtgattgctgaggaagaggataattgtacagaatctgcgaggggtatccccatgatgacctgacacaaggtgctgacgtgattatttggtaataaacccagcgtgggcgcaaggcgcaatggatatatgtcccaaggaggaccggtaaagaacctataagatggggtcttttgtaacaaatacgatgaaccgctcaaagaagcgcatgatcaaa

SEQ ID NO: 35847 - DNA, 470 bp, Zea mays
  unsure (1)..(470): unsure at all n locations
  Clone ID: MRT4577_132693C.1
ataacacatcccttactacctagtgcctgcctctcctcgcagatcatgctcctaggcctccctaccctccacagatccgtactgttataccagtgagcttgtcttggcatcgcatttgctttccttccacatgttaaatcatgtcccgaaggacgctccaacatctctgacgcccgactgctgaggaagatatgttacactgcgacgccaacgtacaagacacatcctcttattgcaaatgctgaatgccgcatcttgcagaacgatcatctcccgaaaaaccaccccagtccctccccttaggaatcctttcacaagtatgctcttccaccaagcgtgcaaagatagggcaacgaaaaacgtgacactacctagangaaactggcatgccttgtttaagcctggctaaactgtcccaatccatctgcttcctggttaaagtaccctacccataagagcctcttattcca

SEQ ID NO: 35848 - DNA, 191 bp, Zea mays
  Clone ID: MRT4577_132694C.1
acgaacccattttttctttcggaaccaacaacaccacaaaagcacacgggggcagggcactaacatgacagaagggactggcatcaccataaaataaaggtcaaaaactactcagaacagtaaaacacaccggaagacatatcaacagaatcccgaaatgcgaaaacatcaatgcaaaggaaagcacacag

SEQ ID NO: 35849 - DNA, 465 bp, Zea mays
  Clone ID: MRT4577_132695C.1
ggggggtgggttcgggggccatttcaaaaaagggctaaaagaaacaaaacacaaaccgattttcttgggaaacccccccccccctgaattttttcaacccaaccacccctccaaaagggatccggaccaaaatccggctctaccacaaaaaaaaaacaaagggcccccctaaaccttttgattcagggaaaggccaccaaaaaaaaaaaaaaccttttgaaaaaaaagggaaaaaaaaaaacccaattaggcccccccccaaaaacccctgggcaaccaaccaaccctcggagggaggaccaataccagctgacaaccgcacaaaacaaaggattccccccccggaaaacgaaaaccaccccccaaaccttggcggagcttccccccccaagggccaacttgggaagcaacccgggggccccggaacaccacttggcccggcccctgcggaagaaagcccccccc

SEQ ID NO: 35850 - DNA, 318 bp, Zea mays
  Clone ID: MRT4577_132696C.1
atggctaggcgcaccggactgtccggtgcctccaccgggctgtccggtgtgccgcagagcagcatcttttctccaatggctagaattgagttgggacctataaacacatcacccaaccggtcatttgaagaaccttccaagtcattaggcccacctatagttgtccttgtccaacggaccacagacaaccctgcaggtggccctgatcacttgacaagttcggtatctgatttccttaccttgcccaagagcgtttcacccgtcacgcagacattacaatacatcggaggtacaaaaatgcggaagcagttacaataa

SEQ ID NO: 35851 - DNA, 290 bp, Zea mays
  Clone ID: MRT4577_132697C.1
gctgatcatcaaatgatgactggggggactgccaagctgccacactgtatgagtgaagcgagcgcccattgatagagtgggatgacaagaagatcattactttgattctgacacatactctgagctgttaacattgaatgcataaactctcagggttgatcaatatccacaagagctgcctgcatctgacaactaactattgcattcctgactccatgcgtatactaataaataatggcccaaagcatcttaggattcaagtttatgtaaagctgcataatacatggtac

SEQ ID NO: 35852 - DNA, 1220 bp, Zea mays
  unsure (1)..(1220): unsure at all n locations
  Clone ID: MRT4577_132698C.1
tcgcacagccctatcaactctcctcgcctgccgtcgccgcctcgcgctctccgatcccgcgcatattctccaccagtagtcctctgctccgccacacccaccactgctagggcgccgcgccgcaggcccggcagccccctaatctccgagtgctgatcacgcggaaaccgatggcgctcctcgcgccgagcccgcgcgcgctccgcgtgcgggagaccgcggcggcggcgctcccgcactcatcggcgaccgctgcatgctcgaccgtcggcggcggggcggccaggcgggcgctgtggctgtgggacaacggcggcgggaccgggacggggaggaggaaggagcaccgggagagagtccggccggaggcgtactgctgggacgtgtccaggccggtggagatggaggagatcgacagcatggagaagctcgacgacgcgctcaggtggtccgtcgagaacaaccagcccgtcgtcatcgactggatggcaggttggtgtcggaaatgcatctacctgatgcccagaatggagaagatggcaggagaatatcctgagttagtgtgacttcacctcagcagaatgtttttttcggcacagtttagagttttgtcctattgataccttagcaagtaaactgaacccgagttctaaatacatacacatctgagattatgaaatgtgttgatctgtttaaatcacgtttctgttgcagagtcaggttttacttcatcgatgtcaataaagttccacaggcggtggtgaaaagaggaaatgtaactagaatgcccactattcagctatggaaggatggagagtggaaagcggaagtaataggaggccacaaagcttgtcttgtgatggatgaggttagagaaatgatcgagaataacaagtgactaaacacccaagttatatgcaatggatgttgtaatgtgtttgatgtaagtatagacatcagacgatctcttgatatactaagctgaaatcaaatcacgttttagttttgtactaagccaaacttgctgatttgaaccaagcttactgaaaagatgcattaacatctacgatatcaaacaaatctcaaaatacatttcatggtgtattttattaatcttgtttggtgttttagttgtttgtgcatttttcttttaacttggtcaaagattaaaaaaaagtttgacttatgacaaaacgaaaatggattacaattgtaacana

SEQ ID NO: 35853 - DNA, 427 bp, Zea mays
  Clone ID: MRT4577_132699C.1
aaaagccggaaaagggcggtgaccttcttcaaccggagcaattcatgaccaagaagaaccagcgggaaataaaaggccggagacaggattccgaacggggacggggggggggccgagcgggtcacaacccgtgtaaaaagatttcagcacaaggaacgtacgttaacgcgaaccgggtggaggaacatcccatgctccagagaggaacccgattacaaccacttcctgggtacacggggtaccaggaatggagcgtcccttccggcccatcatgctgggaaaggcccgcgggtttcttttgctaccaacgaactctccacaggatgtgacagtgaggtcaacatctttcaccaatggtcagggcaggtaccataacacaacttatgatcaacacgaaaggaccggctcacgtttgacataacaccag

SEQ ID NO: 35854 - DNA, 372 bp, Zea mays
  Clone ID: MRT4577_13269C.1
gacaaatcatattctgctctcatatatggcacatctgctcttgttgcaatttggatatcatcaattgtggtttctgcacttgattcagtccctttggttcctcaagtgatggaagttgttggtcttggcttcacaatttggttcacatcgagatacctgatatttaaggtgttgctaggtgaggcctaggcgtccaagcgccaaaagttcctgggcgctgctgccttggccttgttgcttagggcgcccgccttggcgcattaggcgttgactacgatcgcctggcgggcgagcgccaaaaaatctgggcgcgaggctggacaatttcgtgcatatttccttccgtgtgcgggaatagcatgggaggaagag

SEQ ID NO: 35855 - DNA, 1676 bp, Zea mays
  Clone ID: MRT4577_1326C.1
ggccgcaaattttttttttttttttttgtcacgacccgaatttggtgagtttattggaatctggggcaatgcaaaaacaccccccaaaagcacagagatctttagaaccaagagtgcttaaagcgacagacttcaattacaaatgcaaatactagagcagttcagcaagtgatgatggaaggaaacacccaaacattacccaggggggccaggacacaaacaaaggtttttcaacaccacaacctggctcgacagccaaacagattcatgcaagcagatcagtattcctcctcctcgtcaccgtcatcactgccgccctctgcggcgacctcctcgtagtccttctccagggcggccaggtcctcgcgtgcctcggagaactccccctcctccatgccctcgccgacgtaccagtgcacgaacgcgcgcttggcgtacatgaggtcgaacttgctgttgatgcgggagaacacctcgacgacgctggtggagttggagatcatgcacaccgcgcgctgcaccttggcgaggtcggcacccggcaccactgtcggcgcctggtagttgatgccgcacttgaaccccgtcgggcaccagtccacgaactggatggggcgcttcgtcttgatggtggccaccgcggcgttcacgtccttgggcgcagcaagccatgtacttgccgtgccgtgggtcgcacttgaccatcatggaagccggctcgaacgcgctgctggtgatctccgccacagacagctgctcgtggaaggccttcgcagaagagatcaccggtgcgtaccacgtcgccgcggtacatcagtaggaggagagcatgaagtggatcctcgggtaaggacccaggttggtctggaactcgttcacatccacattgatcgcaccatcgaacctcagagaagcagtcagcgatgagatcacctgagacacaaggcgattcaagttggagtagtctgtggcggagatcaccagcagcgcgttcgagccggcttccatgatggtcaagtgcgacccacggcacggcaagtacatggcttgctgcctgatgtaccgcggcgacgtggtgcccaaggacgtgaacgccgcggtggccaccatcaagacgaagcgcaccatccagttcgtggactggtgcccgacggggttcaagtgcggcatcaactaccaggcgccaacagtggtgccgggtgccgacctcgccaaggtgcagcgtgccgtgtgcatgatctccaactccaccagcgtcgtcgaggtgttctcccgcatcaacagcaagttcgacctcatgtacgccaagcgcgcgttcgtgcactggtacgtcggtgagggcatggaggagggggagttctccgaggcacgcgaggacctggccgccctggagaaggactacgaggaggtcgccgcagagggcggcagtgatgacggcgacgaggaggaggaatactgatctgcttgcatgaatctgtttggctgtcgagccaggttgtggtgttgaaaaacctttgtttgtgtcctgggtaatgtttgggtgtttccttccatcatcacttgctgaactgctctagtatttgcatttgtaattgaagtctgtcgctttaagcactcttggttctaaaaaaaaaaaaaaaaaaaaaaaaaaagtactctgcgttgttaccactgct

SEQ ID NO: 35856 - DNA, 795 bp, Zea mays
  Clone ID: MRT4577_132700C.1
agatctccccttctcttcttgcacgttgcatcgaggattcccgataattcggcctctgcaaaatttgatgccgctaccataatattaattgatatagaggttcaggttcgcaatgatgcatgcctgccacccatcattcttctggttgcacagtgatagttgaatttgtttcatttctaatcgttctcttcatactgcaacttagaatatgtgctcaaacctggaatcgcacggtgctagttgctgctgctccttcagataatatgaatgctcagtgatgctaatttagaatatgcgtaacttagaatatgtgctcataagcagcagttggcgctgcacgccatcctttctaatttagcggaattgttctttctgttaaggtaaaagattctgaaaagtagcattcatctcatccctttattcgggacctctgttgcattttatttatttattttcttcaaagcggctataacatttcccttgtcagaatggttggtatacacaagctgctgacttgatgatgcttccacgttgcagggccaacacagttcgtatccctctgggattgccttgggcaatggcgggtgagtgattgcagggtttctcagtttacttatagttataaaaagactgctcaattgctacagtccttgttgtgccactgctccaatttgtgatgcataacgctgtttttttacatctaagtcacacgcaataccaaatggtgtatacaaaaaaagtaccaagacacgctatcaacttgttcttccgttgtacaaataatcttttagcatg

SEQ ID NO: 35857 - DNA, 340 bp, Zea mays
  unsure (1)..(340): unsure at all n locations
  Clone ID: MRT4577_132701C.1
aaagcgcnnaaattcccacaaaccaaccgccagccaacaaacaggccgccaagacccgaccagaactttctcgcagccccgagaacccgacagcgcgagaaggcccccgagcngacgacagccaagacgaccgccaagaaggccgccgcggcggcggcggcggcggcggcggcgaagcccgccacgagggcgcacgcgaccgacccggcgggcgacggcgaccaccggaagggcgaggaggggcaggccaagggcccgcgccaggcccgcccggccgacccccaggcggnggccccgcagccggaagattttttttttttccccccccccccccgcggcg

SEQ ID NO: 35858 - DNA, 585 bp, Zea mays
  Clone ID: MRT4577_132702C.1
atggagaaccaccgcaacttcagggacttcttatcccaaggttgctcttcatcgacgtccaggaaccgcactgatcatgaagctcccgaggacgacgacttcggcaccttctcgcagtcgctgtttgctctgccaccacgcatcaatgtcccagcacctcgcagccgcattgaagctcttgatctgaactcccaatcccagggtaccgattttccatatctctcatccgaccaagatgttctccggacaggtgatggtggatccgacctaggtttgtctcctcttggtcgtggtagatcagcgcgcacactatttcaatccaccagatccatttcagctcctatttctcatgcccgaggtgcaattcgaggttgccgtgtagttagggggagatgcactagtagtcgtggtggaggtcgatctgctatttctgcacctattgaccctgtcctcattgaagattttggagatgaaccaaccaatgaaatagattctcgagctccagtgttcacaggtgtttgtataagcagcaggggcaagcgtgagggtattttggtatttgtatactgctttaactgtgtttag

SEQ ID NO: 35859 - DNA, 347 bp, Zea mays
  unsure (1)..(347): unsure at all n locations
  Clone ID: MRT4577_132704C.1
ggaaaaacagggggtcttggtttatacaggggggatatagagagggagacagaaagcaagggaatttgtaggaacaacccccacggggaaacgaagggggggatatttccttatcaaaaggaacggggggatacgtagggctaatgggggagcactgagcaccgggggtttgggataattcttatgccttccaccaagggtccttggggggcctgaagggggtctccccccacgggaccaaaaggaccctgcccgtnncgccctcggggggaacccggggccgcgacaaaggggccgggccccgggcccccttggccgggggggtggccgggggtcccgggggtggg

SEQ ID NO: 35860 - DNA, 384 bp, Zea mays
  Clone ID: MRT4577_132705C.1
ggcacctaaaagggggggcggggaaagacgagcgggggggacaaccctgggggggcggattacaggggggggggggggggggaagagggaacaaacctgtaaatggtcttaattcaagcagcaggtcaaacccggcaaaaccggcgccgccgccgagggcccggggaacccgcccacccgacccaccatgggcgaccgccaagaaccgaaccccacgggaaccaccctggggacagcgagcccctgattcaccggggacgaaggccaagaactggccgccaggggaagaggaaaaaccagcccccccgcaaaacccccccttctggacaacccatcctttgaccaccacaacaatcttggcgcccaacaacccccacacatccc

SEQ ID NO: 35861 - DNA, 700 bp, Zea mays
  Clone ID: MRT4577_132706C.1
gtctccgggctggggtcactgctcccgcaccgtggccaggagatagcagccgcgcgcagtcgccgggggctggcctccgtgcccgcatggccaaggctgtgcctgcacggctgtgcgccaaacgcccgccgagccgcaggtactcgcacgcccgcgctcgtgcgctggacgcgccgggacgggagacgtcggggccgaggccaccgcgcccgtacgccccgccaggggctgcgcccgcacgccgtcgaggggccgctgcaccgccgagccgacgggccgccgcgcctgcgcaggggcgccggcaggccgcgccgcccgcgcccgtgctccgcagggggccgctcaggccgtgcctggccgccatggccaccgctcctggccgggctgcccgccggcgagtcggggctgggggccgcgcgcgcctggttgaggccggggctgcaggccacgcccgtcgctcctgtccgggccgcccgccggcgagcaagggctgggggccgtgccagccgcaggaggccgtgtccgcctggccgccgcgcctggccgggccgcccgccctggccaagggccgcctggctcgcgtgctggggcccgcgcccgccctggacgcccgcccttgtcgatggccgcctggctcagagccgccggaggccgcgcccgcgtggggttgcgccaccaggggccgcgccggacgcgtggg

SEQ ID NO: 35862 - DNA, 274 bp, Zea mays
  Clone ID: MRT4577_132707C.1
catgcacgtatggccggcctacggcatcaagaagttcgagacgctgtcttatctgccgccgctgtcgacggaagacttgttgaagcatgtggactagctgctgcgcaactgctggataccctgcctcgagttcagcatggtcagcttcgtgttacgcgtgaactccacctccccgtgctactacgacggccgctactggaccatgtggaagctgcccatgttctggtgcaacgacgccacgcaggtgtatagggtgctgcatgaagccatcaaa

SEQ ID NO: 35863 - DNA, 2362 bp, Zea mays
  Clone ID: MRT4577_132708C.1
gttcataatcccctcttaggcttgtcagttaaaccccaaacgaaggattggatcccctgcaacaagtcaaaactcccctccagcccccttgacttggagttcaactgaacaagaccttattggggaaacaaaaaccatttgagatttagtagttaatcagcattatgcttattgtatctttgctccttttatggtagcaaacggccaacaagttttgtcccactgccttctcaagttacctactaatgtttcatgagatatatgacttgatgccgatttacaatatgttttgcactgttaccaggaaagggatgtcaagttcttcacagagacagaggagaacaaccagatgcgaggcccaaggaccgcagtcccatatttcctatgacttcaattgtacaattttagaagtctattcgaatctgtaagggctaaagatcaatcagatgtgtttattgttttaggtccagattatagtgcaatctgatgcgtttgatttctgttttcctttaaccacatgtacaatagaccatcgggacagtcatatgttcctgtatctcttcggtgacactgccaaagttttgtttgtgattttgttcccgtgctatccaaaaaaaaaaaaaaaaaaaaaaaaaaaaaaaaaaaaaaaaaaaaaaaaaaaaaaaaaaaaaaaaaaaaaaaaaaaaaaaaaaaaaaaaaaaaaaaaaaaaaaaagggtaaacgttataaaggatccaaccttaagcaacccaccggccgaacgtaataaaactttaaaaaaaaaaaaaaaaaaaaaaaaaaaaaaaaaaaaaaaaaaaaaaaaacctggtcgtctcgtgcggccgcaagcacgaggctgtgagcgagacagccaaggtgctcatcgactccagccagccgcccaaaaagccaggcgcaaatcacaacctcgcctcctcttcgtcccgtccccagctcttcgttcgttcccctctcgccgcccgtctcccccgcggtcgaggagccgccaatagcaaggagagggtttcctcctccctccacggctccaccgagctccccgatccctccgccccaaatcccacacacccggttggccaccgcctcgccatggatttggatctgtggatctccaaggtcaaggagggtcagcacctcgccgagcacgagcttcagtccctctgcgaatatgtgaaggagatcctcatcgaagagtcgaacgtgcaaccagtgaacagccccgtgacggtttgcggtgatatccatgggcagttccatgacctaatgaagctcttcgcgacggggggccacgtcccagagacgaactatattttcatgggtgattttgtggaccgtggcttcaatagtctagaggttttcaccatcctattgctactaaaagcgaggtatcctgcacacatcacccttctgcgtggaaatcatgaaagtaggcagttgacacaggtgtatggtttctatgatgagtgtcagagaaagtatggcaacgccaatgcatggaggtactgcactgatgtttttgattaccttacgctatcagcaatcattaatggccaagtcctctgtgttcatggtggtctttctcctgatgtacgcactattgaccagatacgaacgattgatcgcaattgtgaaattccccatgaaggccctttctgcgatcttatgtggagtgaccctgaggagatagagacatgggctgttagtccccgtggagcaggttggctgtttggatcgcgagtaacagcagagttcaactttgttaatggtatcgagctagtttgccgggctcaccagctggtccaggaaggcttaaagtacatgttccaggagaagggccttgtaactgtgtggtctgcacccaattattgctacagatgtggcaatgtagcttctatattaagcttcgatgagaagatggaaagagatgtcaagttcttcacagagacagaggaaaacaaccagatgcgaggcccaaggactgcagtcccatatttcctctgacttcaattgtacattttagaagtcaacatttaaatctgtaagggctaaagatcagtcagatgtgtttattattgtaggttcagatcatagtgcaatcttatgcatttgatttctctttttcttttaaccacatgtacaatagaccatccggagtctcatgctcctgtattcgttcagtgacactgtcaaagttttgttgccgatttagttcgcgtgctatccattttgtaccgcgctttcgttatgcagcagaagagtcacgcatggtatgtcattcggccaaaaaaaaaaaaaaaatatcccatttgagattgttcattcatgtgccaagatatttacgtgt

SEQ ID NO: 35864 - DNA, 281 bp, Zea mays
  Clone ID: MRT4577_132709C.1
ctcgagcgctagttctagatcgcgagctgccgcccagctcggccgccctgcctagggccggttcaaccgcccccccccccctctattttttgccatttttttttattttatttgattacactttcggggatcatagctattttattttaagtaggctaatcgttgttcatatgccattgaaatgggaagtttaatttaaaattccgttatgctaattgatttatgtagttaattgtttatctcgtgcgatgttgaacaacttaaaatgattaggttcccac

SEQ ID NO: 35865 - DNA, 298 bp, Zea mays
  Clone ID: MRT4577_13270C.1
aaagaatgaagacaggagtatggatccttttggctgggatttccactttcggttgtttggatggcagaacaagagtgaggcaaagtttattgggtgaagaggttttcaaaaagtgaatcttgtaaccatggttagaaacttttgaagctggtagtcttgccaggtgcaacaatttcttttttgtattttgttttttcgagacaagatttctttgtatgaccttggccttcctggagctagctctgtggaccatgctatcctcaaactcagagagaccagcctgcctctgcctcccaag

SEQ ID NO: 35866 - DNA, 1590 bp, Zea mays
  Clone ID: MRT4577_132710C.1
ctgtgagcgagacagccaaggtgctcatcgactccagccagccgcccaaaaagccaggcgcaaatcacaacctcgcctcctgtcccctccccggctcctcgttcccctctcgccgctcgcctccccgccgagatcgaggaggcgccaatagcgagagggtttcctcttccctccacggctccaacgagcccccggcccctccgcctcaaatcccacgcgcccggttggccgccgcccccgccatggatgtggatctgtggatctccaaggtcaaggaaggccagcacctcgccgagcacgagcttcagtctctctgcgaatacgtaaaggagatcctcatcgaagagtcgaacgttcaaccggtgaatagccctgtgacggtttgcggtgacatccatgggcagttccatgacctgatgaagctcttcgcgacggggggccacgtcccagagacgaactatattttcatgggtgattttgtggaccgtggcttcaacagtctggaggttttcaccatcctattgctactaaaagcgaggtatcctgcacacataacccttctgcgtggaaatcatgaaagtaggcagttgacacaggtgtatggtttctatgatgagtgtcagaggaagtatggcaacgccaatgcatggcggtattgcactgatgtttttgattaccttacgctatcagcaatcattaatggtcaagtcctctgtgttcatggcggtctttctcctgatgtacgtactattgatcagaatgcttatcatcaatgaactagcattgctgactcattttttgaagaatactgagcacatgattctggggttgatttgatacgaacaattgatcgcaattgtgaaattccccatgaaggtcctttctgcgaccttatgtggagtgaccctgaggagatagagacatgggctgttagtccccgtggagcaggttggctgtttggatcgcgcgtcacagcagagttcaactttgttaacggtatcgagctagtttgccgggctcaccagctggtccaggaaggcttaaagtacatgttccaggagaagggccttgtcactgtgtggtctgcacctaattattgctacagatgtggcaatgtcgcttctatcttaagcttcgatgagaagatggaaagggatgtcaagttcttcacagagacagaggagaacaaccagatgcgaggcccaaggaccgcagtcccatttcctatgacttcaattgtacaattttagaagtctattcgaatctgtaagggctaaagatcaatcagatgtgtttattgctttaggtccagattatagtgcaatctgatgcgtttgatttctgttttcctttaaccacatgtacaatagaccatcgggacagtcatatgttcctgtatctcttcggtgacactgccaaagttttgtttgtgattttgttcccgtgctatccattttggactgtgcttgcgttgtgcagcagatgagtcaggctggttatatcttttatctcatttgagattgttcattcatgtgacaggatacttacgtgtacgcagctcctggcatatatcccacctcgttggatgtc

SEQ ID NO: 35867 - DNA, 398 bp, Zea mays
  Clone ID: MRT4577_132711C.1
ttggtttcatcgaggccggccgggattattgctacacgatgtggcaatgtagcttctatattaagcttcgatgagaagatggaaagagatgtcaagttcttcacagagacagaggaaaacaaccagatgcgaggcccaaggactgcagtcccatatttcctctgacttcaattgtacattttagaagtcaacatttaaatctgtaagggctaaagatcagtcagatgtgtttatcattgtaggttcagatcatagtgcaatcttatgcatttgatttctctttttcttttaaccacatgtacaatagaccatccggagtctcatgctcctgtattccttcagtgacactgtcaaagttttgttgccgacccaaaaaaaaaaaaaaaaaaggggcggcc

SEQ ID NO: 35868 - DNA, 1878 bp, Zea mays
  Clone ID: MRT4577_132712C.1
ctgaggggaaattaagcacgtcatgtagtgaaccaaatatagcaaatgccttttggaggcgcagccaaaggagagttgccgaggaaccccgtggtgctagttccagccctgagcatccattaatgagagcaaggggaagatctatacttggtggtgagaagcaatcatttcaagaatacacagaatctggagctgcttcaagatcagatggtcttgggggcacttcaacctctaatgctcgaagaataaggcgtagaagcattagcatcacccctgagattggagatgacattgtgagggcagttcgggctatgaacgaaacactaaagcaaaatcgccttcaaagggatcatgtcgaaggttcatgctcatatgttacggaagaccaaagcaacgccaatgactgcccaaataaagatgatgcatctcggataattggtgctactgacagtgactcaagaaaccgaactggtcctactcaaaaggccatgtcattgccttcttcgcctcatgaatataggggtcaagatacccaaaaaggtgatgattttataagtaaagagaagatggcattggcatggaacaaagttttccagagctccccatttcttaacaagcccttgctgccgtttgaggaatggaacatagatttctctgagataacaattggcacgcgggttggaataggattcttcggagaagttttccgtggtatatggaatggaaccgatgttgccatcaaagtatttctagaacaggacttgacaactgaaaacatggaagatttttgcaacgagatatacatcctgagccggttgcgacatccaaacgttatattgtttcttggtgcatgcattacacctccacacttgtcaatggttactgaatatatggaaatgggatcactgtattatctcatccatatgagtggtcagaaaaagaaacttagttggcgtaggaggttgaaaattattcgtgatatatgcagggggttgatgtgcatacaccgcatgaagatagttcacagggatctcaaaagtgcaaactgcctggtgaacaagcattggactgttaagatatgtgactttggtctatctcgagtgatgattgatagtcctatgactgataattcctctgctggcaccccggaatggatggcccctgagcttatacggaatgaaccttttacagagaaatgtgatatattcagccttggtgttatcatgtgggagctgtgcacattgagtcgcccatgggaaggcatctccccagttcaagtggtgtacgcagttgctaatgaaggttcacggcttgagattcctgaaggacctctcggcaggttaattgcagattgctgggcagagcctgagaatcggccgagctgccaggagatcctaacccgtttgctggactgcgaatacactgtcagctgaaatggaagctgctcgctcgtccactcaattcctgcacaggtggaaacatttcttgtataaaacctgtaaaaaaaggctgccgattctgcggacttgaggtcacatatcgaagcgctgtgttttttttaaacaatggcgaccctttctccaaaaaaaaatgtaaaaatgattccctggttatagaagaacatgtctgattcgataaaaatgccttgaaacgcagggcaagctaattctagataattagcatgccctcgaattaaccaagtgtttgttccgaagaatgttgccagtttgccattaccctgtggaatatggtaagcaagtacatggtgtgaattatgtgtgttgctcctaaacaggcggcaaataggaactagggtgctgtttggttggttccagggacctataacgtaaatggaaatagaaaacaccgctaccagtt

SEQ ID NO: 35869 - DNA, 266 bp, Zea mays
  Clone ID: MRT4577_132713C.1
cgggaagcactttagcgcctactcttccctgatttatcaccagagattccacaccggagagaaaccctataaatgtaatgactgcgggaaagccttcagtgatggctcaatccttatccgacatcgtcggactcacaccggagagaagccatttgagtgcaaggaatgtggcaaaggctttacacaaagttctaaccttatccaacatcagagaattcacactggagagaaaccctataaatgtaatgaatgtgagaaagctttca

SEQ ID NO: 35870 - DNA, 497 bp, Zea mays
  Clone ID: MRT4577_132714C.1
atctactcgttcggttttgtggaggggctatgtgctggtggccgacgaacaaaacccttgctcattcttcggtcttgcctgggccaccagggagcaaccaatggaaaatgcctggtcctaatacctaaagaaactggagtacgaggactaacacggtgacaaaagcgaaaggtcccacgattctatatatagatcatattactcggacaactcctgcatgggcctatacatgacatcatccagccggagctggaacggcgtaagatgacggcaaaccaaccctagtgccgaccgggtgagccggcaccgccttggttaccgccgccgtcaccttggcgccgaccgttatagccgccaccgccgtcataaccgttatgacggcgccggccactataaccgtcggcgccaacgtgaccgccgccgttaccaacgccgtcaccgctaccgccaggggactgagcctggttaacggtgatactacggccgtggagctcctt

SEQ ID NO: 35871 - DNA, 1704 bp, Zea mays
  Clone ID: MRT4577_132715C.1
aaatactgttttttatttggtttccatttttcacctaagatgtggtttccattgcagtctttccacgcgtccgaagtgtaaatgttagttgaatctcgcatggtttttgaggcgtcgcctaggcgttgaggcataccctagatgctgcaggacgccacagggttttagttatccaggcatacccccagcgcctcaggatgccgcaacgcctaaaaaaccaaggaatcgcagcagcttgggctgaaaatttatatttgtgcttaggatgatgcatctcggataattggtgctactgacagtgactcaagaaaccgaactggtcctactcaaaaggccatgtcattgccttcttcgcctcatgaatataggggtcaagatacccaaaaaggtgatgattttataagtaaagagaagatggcattggcatggaacaaagttttccagagctccccatttcttaacaagcccttgctgccgtttgaggaatggaacatagatttctctgagataacaattggcacgcgggttggaataggattcttcggagaagttttccgtggtatatggaatggaaccgatgttgccatcaaagtatttctagaacaggacttgacaactgaaaacatggaagatttttgcaacgagatatacatcctgaggtaccagaatttctcttgattttttactcgatattcttctatttttcattatatactaacattaattgtggcaacttattctttcctttcagccggttgcgacatccaaacggtaaccatcccttttaactgttgtgaaacagttctcaaactgctccacactagatgcctaaactaccttatttcttgtaagattgttttctaaccgtgtgtgtgtgtgtgtttctgttctgtagttatattgtttcttggtgcatgcattacacctccacacttgtcaatggttactgaatatatggaaatgggatcactgtattatctcatccatatgagtggtcagaaaaagaaacttagttggcgtaggaggttgaaaattattcgtgatatatgcagggggttgatgtgcatacaccgcatgaagatagttcacagggatctcaaaagtgcaaactgcctggtgaacaaacattggactgttaagatatgtgactttggtctatctcgagtgatgattgatagtcctatgactgataattcctctgctggcaccccggaatggatggcccctgagcttatacggaatgaaccttttacagagaaatgtgatatattcagccttggtgttatcatgtgggagctgtgcacattgagtcgcccatgggaaggcatctccccagttcaagtggtgtacgcagttgctaatgaaggttcgcggcttgagattcctgaaggacctctcggcaggttgattgcagattgctgggcagagcctgagaatcggccgagctgccaggagatcctaacccgtttgctggactgcgaatacactgtcagctgaaatggaagctgctcgctcgtccactcaattcctgcacaggtggaaacatttcttgtataaaacctgtaaaaaaggctgccgattctgcggacttgaggtcacatatcgaagcgctgtgtttttttttaaacaatggcgaccctttctcaaaaaaaatgttaaaaaaaaaaaaaaaaaaaaaaaaaaaaaaaaaaaaaaaaaaaaaaa

SEQ ID NO: 35872 - DNA, 812 bp, Zea mays
  Clone ID: MRT4577_132716C.1
aaaaaaaaaaaaaaaacaacgcgtactagtacaccagccgcagcaaacccggtggaggcagaggcagctaatgggctccatggccgcggaaatgactgccgtcgaggaggaggcgtgcatctacgccatgcagctgtcttccacggctgtcctgccgctcacgctcaagaacgccatcgagctgggcatgctcgaggtcttgatgggcgccggcggcaagatgctgtcaccgtctgaggtggccgcgcggctgccgccgacgacgaccaacccggacgcgccggccatggtcgaccgcatgctgcacctgctggcatcctacaaggtggtgtcgtgcgaggtggaggaaggcacgcacgcccggcggtacggccccacgcccgtgtgcaagtggttcacgcccaaccaggacggcatctccatggccccgctgctcctcctcaccaacgacaaggtccctatggagagcttgtatcatttgaaggatgcggtgcttgatggtggcctcccattccacaaggcacatgggatgacaatgtacgagtacaccaaaaccgacgcgcgcctgaaccacgtcttcaacgaggccatgaagagctacaccaccatcgtcaccggcaagctcgtcgagctctacacgggcttccacgacgtggccacactcgtggacgtcggtggcggcgtcggcgccaccatccgcgccgtcacctccaagtacccgcacatcaaggggatcaacttcgacctgccccacgtcatcgcggaggcaccgcaatcccccggcgtggagcacgtcgccggcgacatgtttc

SEQ ID NO: 35873 - DNA, 766 bp, Zea mays
  Clone ID: MRT4577_132717C.1
tgtgatatattcagccttggtgttatcatgtgggagctgtgcacattgagtcgcccatgggaaggcatctccccagttcaagtggtgtacgcagttgctaatgaaggttcacggcttgagattcctgaaggacctctcggcaggttaattgcagattgctgggcagagcctgagaatcggccgagctgccaggagatcctaacccgtttgctggactgcgaatacactgtcagctgaaatggaagctgctcgctcgtccactcaattcctgcacaggtggaaacatttcttgtataaaacctgtaaaaaaaggctgccgattctgcggacttgaggtcacatatcgaagcgctgtgttttttttaaacaatggcgaccctttctccaaaaaaaatgtaaaaatgattccctggttatagaagaacatgtctgattcgatagacgtgccttgcatcgcagggcaagctggttgttgtaccttattctagataagtagcacgcccgcgaatcaacaagctgttcggctttcaaatagctgcagctgcaaatttttacctgttgctacagtatttcctttctatataaccaggcggcagcagcagccgaatgttgccagtacgttggagatggcataagcaactccatgttgtgaactgttccctcgcgaccataaagaacatgccatcctagatttggaataaaaatattgtcaaaatttgtatatctaaaaaaaaaaaaaaaaaaaaaaaaaaaactcgaggagggg

SEQ ID NO: 35874 - DNA, 369 bp, Zea mays
  Clone ID: MRT4577_132718C.1
cctctcttttttttttgtggtttttttttgttttttttttttttttctccttttttttgttcctatttttttctcttgtttttactttttccactctgtttgccttctttcaacaaaaagggggggattccctcgtggaccaccccgcgggagcgacgggggccccgtttatacccccccgggggccggggcgtaacacgggggggggggcacaagcctgttttgtggacactgctcccgggggcgggcagaagaaccccccccaattccgccttgggcttgggggcgcacggcccttgcaccatatcccccccctggacccaaaggcgggcgccaggaaagccccccaccgcgcacttggggttcaat

SEQ ID NO: 35875 - DNA, 470 bp, Zea mays
  Clone ID: MRT4577_132719C.1
gggatatggttgatgcctaaggggcatgtttcagttggtcgacatttgtattggcgtacatgctaaatgcagatacttgttcatatgacagtagatactatgtttttaatccttgaatgatgattaagccctttttggattgtatactttcgttgctgatctttcttcgatacatcatgttcacgtcttcgtgaccaattcttaaactaaagttacgtagtttggcgatgggcttcctaactgtgatatcattgtccaacatgttcaccctttaaatagacctaaacagtgacatccaatttaagcatggcttttaagactttgtacctttcttataggtgactggcataacaaatcaataacttgagatacatttcacaagcttagtcccataggttgtaacagataatgtgctaatgtccagcatgatgagtttctatgagcactagctgtgctgagttcatgtatga

SEQ ID NO: 35876 - DNA, 1294 bp, Zea mays
  unsure (1)..(1294): unsure at all n locations
  Clone ID: MRT4577_13271C.1
gggtgaacacccgtccgggccatctcattcttcttcctccatcttgtctctacttgcccttcgtttgggagccgcgagcgtcgcgccactggcgtggcctgcccacaactccggcatggagccgtcggcgtgggccgtcgccttcgccgcactctgcatcgtcgcgctcgcgccgccggcctcagggttctacctccccggcgtcgcgcccaatgacttcgagaagaaagatccacttcctgtgaaagtcaacaagctgacctcaatcaagacacaacttccctactcctactattctctcccattctgcaagccggataccatagttgacagtgcagaaaatctcggtgaagttcttcgtggagatcgcattgaaaactctccctatacgtttgaaatgagggagcctcagatgtgtcaagtagtctgcaagatatctgttggggagaaagaagcaaagcttctcgattctaatcggagggatccttccatttggtgctgtcttcatcgaactcttctttatccttacttccatctggctgcaccagttctactacatctttgggttcctcttccttgtgttcctgattctcatcgtgacatgtgctgagatctcgatttgtcctatgttacttccagctctgcagcgaagagtacctgtggtggtggaggtcgtacttgacttttggttcctcggcactctaccggttcttgtatgcaaccttctacttcttcacaaagcttgagatcaccaagtttgtctcagctgttatgtacttcggttacatgctcattgcctcgtacgccttcttcgccttgaccggcacaatcggattctatgcttgcttcctgttcacaaggctgatttactcatcggtcaagatcgagtaaggtgaagtgcactcttgcctatttctttgttgccacgaagaaagaagtattctatggatagtgaattctacaggactgctgagtttagctgcaagtgggctcgttttgagttttcaaagctggtagttatgatgaagatgcgattcattaccgtatgattccggtattatagctagctcagtatgtttctgtttttcttttgttttttttgttttcgggctgtgcccgaccgtgaggatatatgcttatcaagagcttgacgctgaaagaattgtatacgggtgctgagtaatctatctcttgttcctctcagaatttatgtacttgttgatgtgcactgtgacgtacatgatatacatttataggaaaaaaaaaaaaaaaaaagcggccaaaaaaanaaaaa

SEQ ID NO: 35877 - DNA, 479 bp, Zea mays
  Clone ID: MRT4577_132720C.1
aattcggcacgagggttcttgctgctaagctaagcatcaggagatcacagagaatgctcctattattgaggagtacgtcacaccgcgtacaccatcacttacctgatgcaaggggaaggtcttgagctcgtacgcctggttaacggctgcatcaaatatggacgatgctagaaacaccttgtgctactgctactctaacctcttgactttcagtgccactgtgtatgattgatactgacgcgctaaccgataactcacaccttgaacagtagtcttacgctgatgcctttgatgtcttgactgacccctcagctgtatcatatgagaaggtgctgatgctcgctctgcttccatattacctatgctgttatgctaactaataagattgcctcacagagaaatgacccaactctacgtagatccgggtaccaaattcgtcctatctggagagacattacgcgcactgactgtgcgcctgt

SEQ ID NO: 35878 - DNA, 412 bp, Zea mays
  unsure (1)..(412): unsure at all n locations
  Clone ID: MRT4577_132721C.1
annttgaggtttgatgatatactatatttttttttttttttggaggggcacccccgcatttttatggcccccctttgctttaattccgacgaccaggcctttgtttcccacccccctggacgggacaaattccccccacagttttaatccaagaagccttaatattttttggatttttagaccaggttccaccgctgggttaggggttgccaccgcggtttatggaacaaaagtggaatccactccttccataaggttcgaacaagtgggagccactccttcctgcttgtgccagggggggtgccatgacacaaaccttagaatttacgaaaggggccttcaggccaaaggggagcccgggggagaatggcttcctaagaaccccgcctttcctaaaagggaaacttcctga

SEQ ID NO: 35879 - DNA, 2442 bp, Zea mays
  Clone ID: MRT4577_132722C.1
gataagtctgaaacccaagggaccctcaagcgcttcctcaggagagctcaaaatgagtttgagctcaaagtgaagaagataaggagcgacaacgagtccgagttcaagaatcttcaagtggaggaattccttgaagaagaagggatcaagcatgagttctccgctccctacacaccacagcaaaatggtgtggtagagaggaagaacaggacgctcatcgatatggcgaggacgatgctaggagagttcaagacccccgagtgcttttggacggaagccgtgaacacggcttgccacgccatcaacaggggtctaccttcattcgcctcctcaagaagaacgtcatatgagctactaacccgcaagtgctacattctagtgaagaaaggtagaaattctaagtttgctcccaaagctgtagaagggtttttgttaggttatgactcaaatacaaaggcgtatagagtcttcaacaaatcatcgggtttggttgaagtctctagcgacgttgtatttgatgagactaatggctctccaagagagcaagttgttgattgtgatgatgtagatgaagaagatgttccgacggccgctatacgaaccatggcgattggagaagtacggccacaggaacaagatgaacgagatcaaccttcttcctcaactacggtgcatcccccaactcaagacgatgaacaggttcatcaaaaggaggcgtgtgatcaagggggagcacaagatgatcaagtaatagaggaagaaacgcaaccggcacctccaacccaagttcgagcggtgattcaaagggatcatctcatcgaccaaattttgggtgacattagcaagggagtaactactcgatctcgattagttaatttttgtgagcattactcttttgtctcttctattgagcctttcagggtagaggaggccttgctagatccggattggatattggccatgcaggaggaactcaacaacttcaagcgcaatgaagtttggacactggtgcctcgtcccaagcaaaatgttgtgggaaccaagtgggtgttccgcaacaaacaggacgagcacggggtggtgacgaggaacaaggctcgacttgtggcaaaaggttatgcccaagtcgcaggtttggactttgaggagacatttgctcctgtggctaggctagaatcaattcgtatcttgctagcatatgccgctcaccactctttcaggttgttccaaatggatgtgaagagcgctttcctcaacgggccaatcaaggaggaggtgtacgtggagcaaccccctggcttcgaggatgaacggtaccccgaccacgtgtgtaagctctctaaggcgctctatggacttaagcaagccccaagagcatggtatgaatgccttagagactttttacttgctaatgctttcaaggttgggaaagccgatccaactctgttcactaagacatgtgatggtgatttgtttgtgtgccaaatttatgtcgatgacataatatttggttctactaaccaaaagtcttgtgaagagtttagcagggtgatgacgcagaaattcgagatgtcaatgatgggcgagttgaactacttccttgggttccaagtgaagcaactcaaggatggcactttcatctcccaaacgaagtacacgcaagatctgctaaagcggtttgggatgaaggacgccaagcccgcaaagactccgatgggaaccgacggacacactgacctcaacaaaggaggtaagtccgttgatcaaaaagcataccggtccatgataggttctttgctctatttatgtgctagtagaccggatattatgcttagcgtatgcatgtgtgctagatttcaatccgatcctaaggagtgtcacttagtggcggtgaagcgaattctgagatatttagttgctacgccttgcttcgggctctggtatccaaaggggtctacctttgacttggttggatactcagactccgactatgctggatgtaaggtcgataggaagagcacatcggggacgtgccaattcttaggaaggtccctggtgtcgtggaactctaagaaacaaacctctgttgccctatccaccgctgaggccgagtatgttgccgtaggacagtgttgcgcgcagctactttggatgaggcaaaccctcagggactttggctacaatctgagcaaagtcccactcctatgtgataatgagagtgctatccgcatggcggaaaatcctgttgagcacagccgcacaaagcacatagacatccggcatcactttttgagagaccaccagcaaaagggagatatcgaagtgtttcatgttagcaccgagaaccagctagccgatatctttaccaagcctctagatgagaagaccttttgcaggctgcgtagtgagctaaatgtcttagattcgcggaacttggattga

SEQ ID NO: 35880 - DNA, 3030 bp, Zea mays
  Clone ID: MRT4577_132723C.1
atggatcctaaggggaagggaattgtgatcaacgacaaggagaaggagtccttcgtcaacgagccaagggatgacaagtccaacgactcgggctcgggccacaggcgcaaagatgggaagaagaagaagacaaggcgcatcaaggagatcgtctactacgacagcgacgaatcctcttcttcccaaaaggacgacgaccacgacaaacaaaagacggaaaaggggaacaaaagagagaagaagaagcactacaagaaggccaagggcgaagcacatatcggaaaggagtgggactcggactgctcctcctccgactccgacaatgaaggacttgccgccaccgccttcaacaagtcatctctcttccccaacgagcgtcatacttgccttatggcaagagagaagaaggtttatgcatccgggggttcaagctggattatcgacagcgggtgcacaaaccatatgacgggggagaagaaaatgttcacctcctacgtcaagaataaagattcccaagattcaatcatattcggtgatgggaatcaaggcaaggaaaagtccgaaacccaagggaccctcaaacgcttcctcaggagagctcaaaatgagtttgagctcaaagtgaagaagataaggagcgacaacggatccgagttcaagaaccttcaagtggaggagttccttgaagaggaagggatcaagcacgagttctccgctccctacacaccacaacaaaatggtgtggtagagaggaagaacaggacgctcatcgacatggcgaggacgatgctaggagagttcaagacccccgagtacttttggacggaagccgtgaacacggcttgccacgccatcaacagggtctaccttcatcgcctcctcaagaagacttcgtatgagctactaaccggtaacaaacccaatgtatcttactttcgtgtatttgggagcaagtgctacattctagtgaagaagggtagaaattctaagtttgttcccaaagctgtagaagggtttttgttaggttatgactcaaatacaaaggcgtatagagtcttcaacaaatcatcgggtttggttgaagtctctagcgacgttgtatttgatgagactaatggctctccaagagagcaagttgttgattgtgatgatgtagatgaagaagatgttccgacggccgctatacgaaccatggcgattggagaagtgcggccacaggaacaagatgaacgagatcaaccttcttcctcaactatggtgcatcccccaaccgaaggtgacgtacaggtacctctagtggaggcgattgatcaagggggagcacaaggtgatcaagtgatggaggaagaagcgcaaccggcacctccaacccaagttcgagcgatgattcaaagggatcatcccgtcgaccaaattctgggtgacattagcaagggagtaactactcgatctcgattagttaatttttgtgagcattactcctttgtctcttctattgagcctttcagggtagaggaggccttgctagatccggactgggtattggccatgcaggaggaactcaacaacttcaagcgcaatgaagtttggacactggtgcctcgtccaaagcaaaatgttgtgggaaccaagtgggtgttccgcaacaaacaggacgagcacggggtggtgacgaggaacaaggctcgacttgtggcaaaaggttatgcccaagtcgcgggtttggactttgaggagactttcgctcctgtggctaggctagagtcaattcgtatcttgctagcatatgccgctcaccattctttcaggttgtaccaaatggatgtgaagagcgctttcctcaacgggccaatcaaggaggaggtgtacgtggagcaaccccctggctttgaggatgaacggtaccccgaccatgtgtgtaagctctctaaggcgctctatggacttaagcaagctccaagagcatggtatgaatgccttagagactttttaattgctaatgctttcaaggttgggaaagccgatccaactctttttacaaagacatgtgatggtgatttgtttgtgtgccaaatttatgtcgatgacataatatttggttctactaaccaaaagtcttgtgaagagtttagcagggtgatgacgcagaaattcgagatgtcgatgatgggagagttgaactacttccttgggttccaagtgaagcaactcaaggacggcaccttcatctcccaaacaaagtacacgcaagatctgctaaagcggtttgggatgaaggacgccaagcccgccaagactccgatggggaccgacggacacaccgacctcaacaaaggaggtaagtccgttgatcaaaaagcataccggtcaatgataggttctttgctttacttatgtgctagtagaccggatattatgcttagcgtatgcatgtgtgctagatttcaatccgatcctaaggagtgtcacttagtggcagtgaagcgaattcttagatatttggttgctacgccttgcttcgggctctggtatccaaaggggtctacctttgacttagttggatactcagactccgactatgccggatgtaaggtcgataggaagagtacatcggggacgtgccaattcttaggaaggtccctggtgtcatggaactctaagaaacaaacctccgttgccctatccaccgctgaggccgagtacgttgccgcaggtcagtgttgcgcgcaactactttggatgaggcaaaccctccgggactttggctacaatctgagcaaagtcccactcctatgtgacaatgagagtgctatccgcatggcggagaatcctgttgagcacagccgcacaaagcacatagacatccggcatcactttttgagggaccaccagcaaaagggagatatcgaagtgtttcatgttagcaccgagaaccagctagccgatatcttcactaagcctctagatgagaagaccttttgcaggttgcgtagtgagctaaatgtcatagattcgcggaacctggattga

SEQ ID NO: 35881 - DNA, 161 bp, Zea mays
  unsure (1)..(161): unsure at all n locations
  Clone ID: MRT4577_132724C.1
ccgccagtggtgatggggatatctgcagaaattcgtccctttttcgagcgggccgcgcccgggcatnggtacacgtnnaagagagtcgagtgcaccatgcgtcctgggcaggtcatcaggattgggaagcctatctcgtcatggcaggatggtggtagtga

SEQ ID NO: 35882 - DNA, 3756 bp, Zea mays
  Clone ID: MRT4577_132725C.1
atggagttggtggagggcgagcttgggagatttgtaatgataaggggagaggagccaacccaaacatacaaccggctcaagaccctcatcaacaagataaggagctacggaagcacgcgatggatggatcatgacgtcgttcgcctaatgctaaggtcttttactgtacttgatccacatctggtgaacaatattcgtgaaaatcctaggtacaccaagatgttgcccgaagaagttcttgggaagttcgtaagcgggcgaatgatgatcaaggaggcgagatacgtggacgacgcgttgaatgttccaatcaacgagcctcaacccgttgctctcaaggcaacgaggagcaaggaggcgctacctagcaaggtggcgcaagttgaggcggcagggctcaatgatgaagagatggccctcatcatcaagcgcttcaagacggcgctaaagggtcgcaaggggcagccaagcaagaccaagacaaaggggaagcgctcatgctttaaatgtggtaagattggtcagtttatcgctaactgtcccgataatgatagtgaccaggaacaagggaacaagagggagaagaagaaggcatacaagaaggctaaaggcgaggcacaccttggcaaggagtgggactcggattgttcgtcatccgactccgacaatgaaggactcaccgccaccgccttcaacaagtcatccctcttccccaacgagcgtcacacatgcctcatggcgaaggagaagaagggtctagatagaaccaaggttaataagattaacgaattaattgatgccttgaatgataagaatagattattagagaagcaagaggatcttttatatgaagaacatgataagtttgtagaggctcaaaaatcccttgctttagaaatcaagaggaatgaaatgctttcttgtgaactatctacttgccatgagacaatttctagtttaaaagatgttaacaatgatttaaatgctaaactagaagtagcaaatagatctaactcttgtgtagaacatgttgtgatttgcactaggtgtaaagattttaatgttgatgcttgtagtgaacacctagtgtctattgcaaagttaaatgatgaactagctagtcttaatgcccaacttaagactagcaagagtgaatttgataagttaaaatttgcaagggatgcctacacgattggtagacacccctcaattaaggatggacttggcttcaagagggaagccaagaacttaacaagccataaggctcccatctccgccaaggagaaagggaaggcccctatggctagtagtgctaaaaagaaccatgctttcatgtatcatgataggagacattctaggaatgcctatagaagttatgatgcttttgattctcatgccatgtttgcttctagttcttcctatatgcatggtggagatatgtctaggagaaatgttgttcatcatatgcctaggagaaatgttgttaatgttcctaggaaaattaatgaaccttcgacaatatatcatgcttgcaatgcttcatttgccatttgtagaaaggataagaaagtaattgctaggaaattaggggcaagatgcaagggagataaaacttgcatttgggtccctaagaccattgtgactaaccttgtaggacccaacaagagttgggtttatgcatccgggggttcaagctggattatcgacagcggatgcacaaaccacatgacgggggagaagaagatgttcacctcctacgtcaagaacaaggattcccaagattcaatcatattcggtgatgggaaccaaggcaaggataaatctgaaacccaagggaccctcaagcgcttcctaaggagagctcaaaatgagtttgagctcaaggtgaagaagataaggagcgacaacgggtccgagttcaagaaccttcaagtgtatcttcatcgcctcctcaagaagacttcgtatgagcttctaaccgtgaagaagggtagaaattccaagtttgctcccaaagctgtagaagggtttttgttaggttatgactcaaatacaaaggcgtatagagtcttcaacaaatcatcgggtttggttgaagtctctagtgacgttgtatttgatgagactaatggctctccaagagagcaagttgttgatcttgatgatgtagatgaagaagacgttccatcggccgcgatacgcaccatggcgattggagatgtgcggcctcaggaacaaaaagagcaagatcaaccttcttcctcaacgatggtgaatcccccaaccccagatgacgaacaggtacctcaagtggaggcgcgtgatcaagggggagcacaggatgtccaagtcgaagaggaagaagcacctcaggcacctccaacccaagttcgagcgacgattcaaaggaatcatcccgtcgaccaaatattgggtgatattagcaagggagtaactactcgctctagattggtgaatttttgtgagcattactcttttgtctcttctattgagcctttcagggtagaagaggccttgctagatccggactgggtgttggccatgcaggaagagctcaataatttcaagaggaatgaagtttggacactggtgcctcgtcccaagcaaaacgttgtgggaaccaagtgggtgttccacaacaaacatgacgagcacggggtggtgacgaggaacaaggctcgacttgtggcaaaaggttatgcccaagtcgcaggtttggactttgaggagactttcgctcctgtggctaggctagaatcaattcgtattttgctagcatatgccgctcaccattctttcaggttattccaaatggatgtgaagagcgctttcctcaacgggccgatcaaggaggaggtgtatgtggagcaaccccctggcttcgaggatgaacggtaccccgaccacgtgtgtaagctctctaaggcgctctatggacttaagcaatccccaagagcatggtatgaatgccttagagattttttaattgctaatgctttcaaggttgggaaagccgatccaactcttttcactaagacttgcgatggtgatctttttgtgtgccaaatttatgtcgatgacataatatttggttctactaaccaaaagtcttgtgaagagtttagcagggtgatgacgcagaaattcgagatgtcgatgatgggcgagttgaactacttccttgggttccaagtgaagcaactcaaggatggcaccttcatctcccaaacgaagtacacgcaagacttgctaaagcgttttgggatgaaggacgccaagcccgcaaagacaccgatgggaactgacggacacaccgacctcaacaaaggaggtaagtccgttgatcaaaaagcatatcggtccatgatagggtctttactttatttatgtgctagtagaccggatattatgcttagcgtatgcatgtgtgctagatttcaatccgatccaagggagtttcacttagtggctgtgaagcgaatccttagatatttagtcgctacgccttgcttcgggatctggtatccaaaggggtctaactttgacttgattggatattcagactccgactatgctggatgtaaggtcgatagaaagagtacatcagggacgtgccaattcttaggaaggtccctggtatcatggaattctaagaaacaaacttccgttgccctatcaccgctgaggctgagtatgttgccgcaggacagtgttgcgcgcaactactttggatga

SEQ ID NO: 35883 - DNA, 5091 bp, Zea mays
  Clone ID: MRT4577_132726C.1
atggatcctaaggggaagggaatcgtgatcaacgataaggagaaggagtccttcgtcaatgagctcaaagatgacaagcctaccgactccggctcgggtcatagacgaaaggaagggaagaagaagaagacgaggcgcatcaaggagatcgtctactacgacgacagtgatgagtctacttcttcccaaaaggacgacgaccacaacgactacgagcaaaggaaaccggttaattctaacttttcctttgactactctcgtattccgcaaagctcaaattcacatttgctttccattccactcggcaagcccccacactttgatggggaggactacggattttggagccacaaaatgcgtagtcacctattttctctccatcctagtatatgggagattgtagatagtggaatgcactttaatagttcagatagtcctatattcattaatgagcaaatccataagaatgcacaagctactactgttcttctagcttcattgtgcagggatgaatataacaaagtgagtggcttggataacgccaagcaaatctgggataccctcaagatctctcatgagggaaatgacgctaccttgctcaccaaaatggagttggtagagggcgagcttggacggttcgcgatgataaggggcgaggagccaactcaaacatacaaccggctcaagacccttatcaacaaaataaggagctacggaagcacgcgatggacggaccacgacgtcgtccgactaatgctaaggtcctttaccgttctcgatcctcatttggtgaataatattcgtgagaatcccaggtacaccaaaatgtcgcccgaagaaattcttggaaaatttgtaagcgggcggatgatgatcaaggaggcaaggtacgtcgatgacgcgttgaacggtccaatccacgagcctcaacccattgctctcaaggcatcgagaagcaaggaggcactaccaagcaaggtggcgcaaattgaggcggccgggcttaatgatgaagaaatggctctcatcattaagcgcttcaagacggcgttaaggggtcgcaaggagcatcccaacaagaccaagacaaaggggaagcgctcatgcttcaagtgtggtaagattggtcactttattgctaattgtcccgataatgatagtgaccaggaaaagaagagtgggaaatgggaaaagaagaagaattacaagaagacaaagggcgaggctcatattggaaaggagtgggattcggattgctcctcatccgactccgacaacgaaggactcgccgccaccgccttcaacaaatcaaccctcttcccaaacgagcgtcacacatgccttatggcaaaggagaagaaggtatgtactcgcaactctacctatgcttcttcaagtgaggacgaatctagtgatgaggatgaagtagattattcatgtttgttcaagggcttagacagatctaagatagacaaaattaatgaattaattgatgccttgaatgaaaagaatatacttttagaaaagcaagaggatttgttgtatgaagaacatgataagtttgtagaggctcaaaaatcccttgcattagaaattaagaggaatgaaatgcttgcttgtgaagtgtcaacatgccatgattctatttctaacttaaaaagcataaacgatgatttaaatgctaaactagtagaagcaaataaatccaactcttgtgttaaacatgttgaaatttgcactaggtgtaaggatgttgatattaatgcttgtagtgaacacttagtttacatttcaaaattgagtgatgaagtggctagtcttaatgctcaacttaagactagcaaaagtgattttgaaaaactaaaatttgctagggatgcctacacggttggtagacacccctcaattaaggatggacttggcttcaagagggaagccaagaacttaacaagccataaggctcccattcccgccaaggagaaagggaaggcccctatggctactagtgctaaaaggaaccatgcctttttgtatcatgataaaagacaaactagaagttatgatgcttttgattcatatgtttatgattctcatgccatgtttgctcctagttcttcttatgtgtatgatagaaatgttactaggagaaatgttgttcctaaaagaaatgttgcaaatgttcatagaaaagtagtgaatgaaccctctacaatttattgtgctttgaatgcttcatttgcaatttgtagaaaggatagaaaagtaattgctaggaagttaggggcaaaatgcaaaggtgataaaacttgcatttgggtccctaaggaaattgtgactaaccttgtaggacccaacaagagttgggtttatgcatccgggggttcaagctggattatcgacagcggatgcacaaaccatatgacgggggagaagaaaatgttcacctcctacgtcaagaataaggattcccaagattcaattatattcggtgatgggaatcaaggcaaggtaaaaggtttagatgtgtctgtctttagaagaagtgatggttcactagcttttaagggtgtattagacggcaaactttatttagtagattttgcaaaagaagaggaaaagtccgaaacccaagggactctcaaacgcttcctcaggagagctcaaaatgagtttgagctcaaagtgaagaagataaggagcgacaacggatccgagttcaagaaccttcaagtggaggagttccttgaagaggaagggatcaagcacgagttctccgctccctacacaccacagcaaaatggtgtggtagagaggaagaacaggacgctcatcgatatggcgaggacgatgctaggagagttcaagacccccgagtgcttttggacggaagccgttaacactgcttgccacgccatcaacagggtctaccttcatcgcctcctcaagaagacgtcgtatgagctactaaccggtaacaaacccaatgtatcatactttcgtgtatttgggagtaaatgctacattctagtaaagaagggtagaaattctaagtttgctcccaaagctgtagaagggtttttgttaggttatgactcaaatacaaaggcgtatagagtcttcaacaaatcatcgggtttggttgaagtctctagcgacgttgtatttgatgagactaatggctctccaagagagcaagttgttgattgtgatgatgtagatgaagaagatgttccgacggccgctatacggaccatggcgattggagaagtacggccacaggaacaagataaacgagatcaaccttcttcctcaactatggtgcatcccccaaccaaagatgacgaacaggtacctcaagtggaggcgcttgatcaagggggagcacaagatgatcaagtgatggaggaagaagcgcaaccggcacctccaacccaagttcgagcgatgattcaaagggatcatcccgtcgatcaaattctgggtgacattagcaagggagtaactactcgatctcgattagttaatttttgtgagcattactcctttgtctcttctattgagcctttcagggtagaggaggccttgctagatccggattgggtattggccatgcaggaggagctcaacaacttcaagcgcaatgaagtttggacactggtgcctcgtccgaagcaaaatgttgtgggaaccaagtgggtgttccgcaacaaacaggacgagcacggggtggtgacgaggaacaaggctcgacttgtggcaaaaggttatgcccaagtcgcaggtttggactttgaggagactttcgctcctgtggctaggctagagtccattcgtatcttgctagcatatgccgctcaccattctttcaggttgtaccaaatggatgtgaagagcgctttcctcaacgggccaatcaaggaggaagtgtacgtggagcaaccccctggcttcgaggatgaacggtaccccgaccatgtgtgtaagctctctaaggcgctctatggacttaagcaagccccaagagcatggtatgaatgccttagagactttttacttgctaatgctttcaaggttgggaaggccgatccaactctttttacaaagacatgtgatggtgatttgtttgtgtgccaaatttatgtcgatgacataatatttggttctactaaccaaaagtcttgtgaagagtttagcagggtgatgacgcagaaattcgagatgtcgatgatgggcgagttgaactacttccttgggttccaagtgaagcaactcaaggacggcaccttcatctcccaaacgaagtacacgcaagatctgctaaagcggtttgggatgaaggacgccaagcccgcaaagactccgatggggaccgacggacacaccgacctcaacaaaggaggtaagtccgttgatcaaaaagcataccggtcaatgataggttctttgctttatttatgtgctagtagaccggatattatgcttagcgtatgcatgtgtgctagatttcaatccgatcctaaggagtgtcacttagtggcggtgaagcgaattcttagatatttggttgctacgccttgcttcgggctctggtatccaaaggggtctacctttgacttagttggatactcagactccgactatgctggatgtaaggtcgataggaagagtacatcggggacgtgccaattcttaggaaggtccctggtgtcatggaactctaagaaacaaacatccgttgccctatccaccgctgaggccgagtacgttgccgcaggtcagtgttgcgcgcaactactttggatgaggcaaaccctccgggactttggctacaatctgagcaaagtcccactcctatgtgacaatgagagtgctatccgcatggcggagaatcctgttgaacacagccgcacaaagcacatagacatccggcatcactttttgagagaccaccagcaaaagggagatctcgaagtgtttcatgttagcaccgagaaccagctagccgatatcttcactaagcctctagatgagaagaccttttgtaggttgcgtagtgagctaaatgtcatagattcgcggaacctggattga

SEQ ID NO: 35884 - DNA, 429 bp, Zea mays
  Clone ID: MRT4577_132727C.1
atgcaggaggagctcaacaacttcaagaggaatgaagtttggacactggtgcctcgtcccaagcaaaatattatgggaaccaagtgggtgttccgcaacaaacaggacgagcacggggttgtgacaaggaacaaggctcgacttgtggcaaaaggttatgcccaagtcgcagagtttagcagggtgatgacgcagaaattcgagatgtcaatgatgggcgagttgaactacttccttgggttccaagtgaagcaactcaaggacggcaccttcatctctcaaacgaagtacacgcaagatctgctgaagcggtttgggatgaaggacgccaagcccgcaaagactccgatgggaactgacggacacaccgacctcaacaaaggagttgtaaaaacactccctggacctcacaagtccgttgcaaagtga

SEQ ID NO: 35885 - DNA, 1789 bp, Zea mays
  Clone ID: MRT4577_132728C.1
aaaggataggaaaatagttgctaggaagttaggggcaaaatgcaagggagacaggacttgcatttgggtccctaaggacatttgtgctaaccttgcaggacccaacatgagttgggtttatgcatccgggggttcaagctggattattgacagcggatgcacaaaccatatgacgggggagaagaagatgttcacctcctacgtcaaaaataaggattcccaagattcaattatattcggtgatgggaatcaaggcaagcctttcagggtagaagaggccttgctagatccggactgggtgttggccatgcaagaggagttaaacaacttcaagcgcaatgaagtttggacactggtgcctcatccgaagcaaaatgttgtgggaaccaagtgggtgttccgcaacaaacaggacgagcacggggtggtgacgaggaacaaggctcgacttgtggcaaaaggttatgcccaagtcgcaggtttggatttcgaggagacctttgctcctgtggctaggctagagtcaattcgaatcttgctagcatatgccgctcaccattctttcaggttgtttcaaatggatgtgaagagcgctttcctcaacgggccaatcaaggaggaggtgtacgtggagcaaccccctggcttcgaggatgaacggtaccccgaccatgtgtgtaagctctctaaggcgctctatggacttaagcaagccccaagagcatggtatgaatgccttagagatttcttaattgctaatgctttcaaggttgggaaagccgatccaactctttttactaagacttgtaatggtgatttgtttgtgtgccaaatttatgtcgatgacataatatttggttctactaaccaaaagtcttgtgaagagtttagcagggtgatgacgcagaaattcgagatgtcgatgatgggcgagttgaactacttccttgggttccaagtgaagcaactcaaggacggcaccttcatctcccaaacgaagtacacgcaagatctgctaaagcggtttgggatgaaggacgccaagcccgcaaagactccgatggggaccgacggacacaccgacctcaacaaaggaggtaagtccgttgatcaaaaagcataccggtcaatgataggttctttgctttacttatgtgctagtagaccggatattatgcttagcgtatgcatgtgtgctagatttcaatccgatcctaaggagtgtcacttagtggcggtgaagcgaattcttagatatttggttgctacgccttgcttcgggctctggtatccaaaggggtctacctttgacttagttggatactcagactccgactatgctggatgtaaggtcgataggaagagtacatcggggacgtgccaattcttaggaaggtccctggtgtcatggaactctaagaaacaaacctccgttgccctatccaccgctgaggccgagtacgttgccgcaggtcagtgttgcgcgcaactactatggatgaggcaaaccctccgggactttggctacaatctgagcaaagtcccactcctatgtgacaatgagagtgctatccgcatggcggagaatcctgttgaacacagccgcacaaagcacatagacatccggcatcactttttgagagaccaccagcaaaagggagatatcgaagtgtttcatgttagcaccgagaaccagctagccgatatctttaccaagcctctagatgagaagaccttttgcaggctgcgtagtgagctaaatgtcttagattcgcggaacttggattga

SEQ ID NO: 35886 - DNA, 2451 bp, Zea mays
  Clone ID: MRT4577_132729C.1
atgaccacatcaagacccctagagctgctacatatggacctcttcggacccgtcacctatctaagcataggaggaagtaagtatggtctagttattgttgatgacttttcccgcttcacttgggtgttctttttgcaagataagtctgaaacccaagggaccctcaagcgcttcctaaggagagctcaaaacgagtttgagctcaaggtgaagaagatacggagcgacaatgggtccgaattcaagaaccttcaagtggaggagtaccttgaggaggaagggatcaagcacgagttctccgctccctacacaccacaacaaaatggtgtggtagagaggaagaataggacgctaatcgatatggtgaggacaatgcttggagagttcaagacccccgagcgcttttggtcggaagccgtgaacacggcttgccacgccatcaaccgggtgtatcttcattgcctcctcaagaagacttcgtatgagcttctaaccggtaacaaacccaatgtttcgtatttccgagtctttgggagtaaatgctacattctagtgaagaagggtagaaattctaaatttgctcccaaagcagtagaagggtttttgttaggttatgactcaaatacaaaggcgtatagggtcttcaacaaatcatcgggtttggttgaagtctctagcgacgttatatttgatgagactaatggctctccaagagagcaagttgttgatcttgatgatgtagatgaagaagatgttccgacggccgcaatacgaacaatggcgattggagatgtgtggccacaggaacaaaatgagcaagatcaaccttcttcctcaacaatggtgcatcccccaactcaagacgatgaacaggttcatcaagaggaggcgtctgatcaagggggagcacaagatgatcatcctttcagggtagaagaggccttgctagatccggactgggtgttggccatgcaggaggagctcaacaacttcaagaggaatgaagtttggacactggtgcctcatcctaagcaaaatgttgtgggaaccaagtgggtgttccgcaacaaacaagacgatcacggggtggtgacaaggaacaaggctcgacttgtggcaaaaggttatgcccaagtcgtgggtttggactttgaggagacttttgcttctatggctaggctagagtccattcgtatcttgctagcatatgccgctcaccattctttcaggttgtttcaaatggatgtgaagagcgctttcctcaacgggccaatcaaggaggaggtgtacgtagagcaaccccctggcttcgaggatgaacggtaccccgaccacgtgtgtaagctctctaaggcgctctatggacttaagcaagccccaagagcatggtatgaatgccttagagactttttaattgctaatgctttcaaggttgggaaagccgatccaactctttttactaagacttgcgatggtgatctttttgtgtgccaaatttatgtcgatgacataatatttggttccactaaccaaaagtcttgtgaagagtttagcagggtgatgacgcagaaattcgagatgtcgatgatgggcgagttgaactacttccttgggttccaagtgaagcaactcaaggacggcaccttcatctcccaaacgaagtacacgcaagacttgctaaagcggtttgggatgaaggacgccaagcccgcaaagactccgatggggaccgacagacacaccgacctcaacaaaggaggtaagtccgttgatcaaaaggcataccgatcaatgatagggtctttactttatttatgtgctagtagaccggatattatgctcagcgtatgcatgtgtgctagatttcaatccgatcctaaggagtgtcacttagtggcggtgaagcgaatctttagatatttagtcgctacgccttgcttcgggatctggtatccaaaggggtctacttttgacttaattggatattcagattccgactatgccggatgtaaggtcgataggaagagtacatcggggacatgccaattcttaggaaggtccctggtgtcatggaattctaagaaacaaacttccgttgccctatccaccactgaggccgagtacgttgccgcaggacagtgttgcgcgcaactactttggatgaggcaaacccttcgggactttggctacaatctgagcaaagtcccactcctatgtgataatgagagtgctatccgcatggcggaaaatcctgttgaacacagccgcacaaagcacatagacatccggcatcactttttgagagaccaccagcaaaagggagatatcgacgtgtttcatgttagcaccgagaaccagctagccgatatctttaccaagcctctagatgagaagaccttttgcaggctgcgtagtgagctcaatgtcttagattcgcggaacctggattga

SEQ ID NO: 35887 - DNA, 153 bp, Zea mays
  Clone ID: MRT4577_13272C.1
atggccggtgcagtggggacagatcgcagacgtgagaggcaatggaacaatcttgaggcgatacgagagatcagtaccagttccagtaccagtgaacaatgagtggctaccgggtctctgctcctacaatctaagagtaatgcgtcttgcgca

SEQ ID NO: 35888 - DNA, 381 bp, Zea mays
  Clone ID: MRT4577_132730C.1
gttccgcatcctatttccataaaaataatgtctactaacattctcggtggatacatttggacgctcaacacgtgatttgctagtgcacacccagcactgtaaggcccttaaagcctctttaataatggtccactagggggatgccgattctctaacgcaaatagtgaggattctcatcctcactttagccacagcgttgaggacagcctttccacgggcacacttttaaagtggggcctggttgactaccaggtttaagtgggcacctttaggaacaaaatttacccttgtgttgtactcttcggcttcagcaccgttgaacctcgcgaagcccccccttttattctcaataattttttggcgggcaaggaacttgaactt

SEQ ID NO: 35889 - DNA, 636 bp, Zea mays
  Clone ID: MRT4577_132731C.1
atgaaggatgccaagcccgcaaagactctgatggggaccgacggacacaccgacctcaacaaaggagagtgtcacctagtggcggtgaagcgaattcttagatatttagttgctacgccttgcttcgggatctggtatccaaaggggtctacctttgacttaattggatattcagattccgactatgctggatgtaaggtcgataggaagagtacatcggggacgtgccaattcttaggaaggtccctggtgtcatggaactctaagaaacaaacttccgttgccctatccaccgctgaggccgagtatgttgctgcaggacagtgttgcgcgcaactactttggatgaggcaaaccctcagggactttggctacaatctgagcaaagtcccactcctatgtgataatgagagtgctatccgaatggcggaaaatcctgttgaacacagccgcacaaagcacatagacatccggcatcactttttgagagaccaccagcaaaagggagatatcgaagtgtttcatgttagcaccgagaaccagctagccgatatctttaccaagcctctagatgagaagaccttttgcaggttgcgtagtgagctaaatgtcctagattcgcggaacttggattga

SEQ ID NO: 35890 - DNA, 585 bp, Zea mays
  Clone ID: MRT4577_132732C.1
tacctcgagccggccgggccgggattcccccacagcgaccactaccgcacacttaccatatccccactcgcccctaatcgatcacaccagccaaaccaaaaaccaagcagaactttttctggaagcgccgacatcagcgagacgcttcgccttgccggatgagcaaagacaagagtcttacccctccctcgcccgtgcccacaaggcgaggctaggaagcctaccattgctggaccgccttcctccaacgctgccctgacccaccaaccggtgcaattcatgaaagggtgcagtgaatccaatgagacaaagggaccggtccgcagttgtcttcacggtaaatgacaaatcaagaccagagccgaaatcaacggctcttgaaagagacatcatccttgcaaaaatgatgatggcaatccatatggcgctgtctcttggaacgacgagaatcgattgcctaataagcacaactattcatggcactaccatcctggtggtgactccgtactcccaatggactccacgattacgtccagaaatcctctctgcctcatggggaaacagacatacacatgtgtgcacatg

SEQ ID NO: 35891 - DNA, 791 bp, Zea mays
  Clone ID: MRT4577_132733C.1
tctgacagtggttgatcaagaccctcaatcggaagctcacggtcagtaattgcatgctcctccattgtagatggtgggctgttggtgttaggaacaggattagcggctgcacccgcaatcactctctcatcgtcgtcatccaaccaatcctcctctcgaaagggagcaccgtactgttcgccgttctttggcccggccccgctcttctggaacagcttataaagcgcgtagaactcccgaccctgcgcagcaggcgggagcgcatcggcaagtagggtatactcgtgcatgacccagtccgtacgctccccgcgcggggcgcggccatggtggtacaccagcgtcttcttgttgccaaccgcccggccgccgccgcagatgaagcggtccttccccgtggccttccagtagccgtcgccagtggtgcggctggcgcgcgagccgttggggtacttgcggtccatccggctgaagaagaaccactgcctgtcccccgtctgcagcgccgacctctcggggaggtgggaggggtgtgacttgtacacttcgacgtcggcgacgtagggacaggggcggccggaggcgatccggcgcttcaggaagtagagaacaagctcctcgtcggtggggctgaagcggaagcctggcggccaccggccccgcggcggggtctccatctcgctctcgccggatggttggtgctggtggcgtgtcgtctgccgggtcaacccgatgctccggctacttatgctaaagacatctcaaggggctgccggttctgccccggccgg

SEQ ID NO: 35892 - DNA, 1085 bp, Zea mays
  Clone ID: MRT4577_132734C.1
ctcacgcgtggggccgggcataaaacacggcgcatctcgaagttcggcgcgatcttcactggcctcgagcacaaaatgctgtggccgagcgaatgagaggaagatggctgctaccagcctcagctcctcgttgcccagggccactgcaaaactaacaggagtgccaagatcttcgtcgtactacacccagctgatcttttgctcgaggcatcccttccagaaggcggcggcagctgcagctttccagaagctcccacccgagctcctccggctaagctacccggcgaggaataataagcatgcaagaaccagctggcggcgggccacggacaacgaccaagcggcgccggccgcggcgcaaggaactaccagcacccctcctctcccaggctctcccgttccgagcgccgagagatccccggtgacgcccggcaacggccagccgcagcagcccgtcgccgacgccaacggcagcgcgccgagcgagccgccgaagcgggcgccgctgacggcgcgggagcggctgcgggcggcgcgcgtgcttgggaagtacgcagagccgtcggcgaaagggtcttcgtcgaaaccggccaaaccggagttcgggagcggtgtgctggacgcgctgcgcgaggcggacgcgaagaaggccgggggcgggggcgggcggcgtgggtcgcgcctacccgaggcgccgggcaacctgttcgacgacagcaagcgcgggatgcccaaggacgggtggacgttcgagctgccgttcggggtggacgtcttcctcgtcctcgtctccttcacgctcatcaccaccatcatgttcggcaccgccttcctcgtgtggaagctcggcgctatacacttcaacgagtactagcctttagactgtctctacttgattgggggataaagggcgattatgcagtgattcttgcagtgctagacgagagaactgtgtgcattcgtaatgtactgtattgaccacagacactggtctgccggagattttcgagagaacgtagaaatgtgtgattgcgcgaaacaggtgtcctgttatgtagaattaataaatatggttatgaagactt

SEQ ID NO: 35893 - DNA, 1389 bp, Zea mays
  Clone ID: MRT4577_132735C.1
atgcaggaagaactcaacaacttcaagcgtaatgaagtttggacactggtgccgcgtcccaagcaaaatgttgtgggaaccaagtgggtgttccgcaacaaacaggacgagcatggggtggtgacgaggaacaaggctcgacttgtggcaaaaggttatgcccaagtcgcaggtttggactttgaggagacttttgctcctgtggctaggctagaatctattcgtgtattgctagcatatgccgctcaccattctttcaggttgttccaaatggatgtgaagagcgctttcctcaatgggccaatcaaggaggaggtgtacgtggagcaaccccctagcttcgaggatgaacgataccccgaccacgtatgtaagctctctaaggcgctctatggacttaagcaagccccaagagcatggtatgaatgccttagagactttttaattgctaatgctttcaaggttgggaaagccgatccaactttattcactaagacttgtgatggtgacttatttgtgtgccaaatttatgtcgatgacataatatttggttctactgaccaaaagtcttgtcaagagtttagcagggtgatgactcagaaattcgagatgtcgatgatgggcaagttgaactacttccttgggttccaagtgaagcaactcaaggatggcaccttcatctcccaaacgaagtacacgcaagacttgctaaagcggtttgggatgaaggacgccaagcccgcaaagacttcgatgggaactgacggacatgtcgacctcaacaaaggaggtaagtccgttgatcaaaaggcataccggtccatgatagggtctttactttatttatgtgctagtagaccggatattatgcttagcgtatgcatgtgtgctagatttcaatccgacctaagggagtgtcagcttgtggccgttaagcgaatccttagatatttagtcgctacgccttgcttcgggatctcgtatccaaagggatctacctttaacttaattggatattcagactccgactatgctggatgtaaggtcgataggaagagtacatcggggacgtgccaattcttaggaaggtccctggtgtcatggagttctaagaaacaaacttccgttgccctatccaccgctgaggccgagtatgttgccgcaggacagtgttgcgcgcaactactttggatgaggcaaaccctcagggactttggctacaatctgagcaaagtcccactcctatgtgataatgaaagtgctattcgcatagcggataatcctgttgaacacagccgcacaaagcacattgacatccgacatcactttttgagagaccaccagcaaaagggggatatcgaagtgttttatgttagcaccgagaactag

SEQ ID NO: 35894 - DNA, 701 bp, Zea mays
  Clone ID: MRT4577_132736C.1
ggaaggaaccgggtcggacccaccgccagtccgtatgcagagtcctttctggttgctgccgcgggctaggttcgctggcagatgcagagcgggtgctggagactatgtcggctgttggtgtctcgccagatgtagagagctttgggtgcctcgccttcctgtatgcttggagaggtgttcccagtcgggttgatgaactggatacattgtttgatgctctgggcttcagcaagaaggggtttttcaagaacctggttagtgggtacctcaaatctggtgacttcgagtcggtttcaccaatcattcttcgtgcagtgaaggagcgcagagttggggatgacaatggacttgatgaggaaacctatactgaggttgctcagtgctttgtggatcgtgcgaggattagggaactagctcagttgatcatccaagctcatgagattgagctcgctcaacaatctatatcagttgaggattctgttgggtttggaattgtgaatgcttgtgttgagctcgggctattgaacaaagctcatagcatactcgatgaaatgacagctcaaggagcctctgtagggcttggtgtgtactcttcaatcttgaaagcctattgcaaggagcaaaagactgcagaagctgcacaacttgtggcagagattagtgcagccgggctacagcttgatgctggtaggttatgatgc

SEQ ID NO: 35895 - DNA, 332 bp, Zea mays
  Clone ID: MRT4577_132737C.1
cacgcgtgcacgtgcccggactgacagttatactgtgaggggtcggccacgttcattagccggcgggcgcacgtaccgcgacttcaagactctgttcccgctgtgcattctgccgttctacaaggctgaccagggctcatactcctgaccagacaacacgactctgtctaaactagagccagcgttcacaaaagccctgttgggtaagcatgatgaatctagctccctaactttagtgaacctggaccgtaaactacctggagaggagactgcacacatgtgcagttggcatgtgaacatacacttttggaggcaacttaacgtcccagctg

SEQ ID NO: 35896 - DNA, 278 bp, Zea mays
  Clone ID: MRT4577_132738C.1
tcctcacactccgctgctccgccatggcgatgcacgctccacgcctggatctcgctgttgctcgcgctggccgtcgcgctctccgcccgggcggaggaggagcccgccgccgcggctgagggcgaggccgtgctcaccctcgacgtcgacagcttcgacgaggccgtcgccaagcaccccttcatggtcgtccagttctacgccccctgatgtggacactgaaataaacttgctccatagtattacaatgaggccaagacacctagcaaatatgaccc

SEQ ID NO: 35897 - DNA, 261 bp, Zea mays
  Clone ID: MRT4577_132739C.1
cgcgggcgaaagcggtcacgaatatttatcctcaacaaatttctggtcattttactactcagcaacacggcggcgtggtcgtcttcatgaccatgcacgtccacccatcatctggtctaaaagcccctgatcaccgtcgttaccaaggacgcatccacctccctctacacggcgcctttcaaggacgggcacccgctctttctcaacctcactagcccggtcatctcactggccacatgctccttcttcttcaaaaacaac

SEQ ID NO: 35898 - DNA, 1503 bp, Zea mays
  Clone ID: MRT4577_13273C.1
gctttctggaatggttgtcggcatcatgcttcgtaccctttaccgggatatctctaagtataaccaacttgagactcaggaagaggcccaggaggagactggatggaagcttgttcacggcgatgttttcaggcctccgtcaaactcagactggctctgtgtttatgttggcaccggtgtgcaattctttggcatgctgcttgtcactatggtatttgcggttcttggcttcctttctccatcgaacaggggtggactgatgacagccatgctcctgctctgggtgttcatggggttgcttgctggctactcttcttcacgtctttacaaactgttcaagggctcagaatggaagaacatcgccttgaggacagccttcactttccctggcagtgtgtttgctatttttttcttcttgaatgctcttatctgggggcaaaagtcctcaggtgctgttccattcaccaccatgtttgctcttgtcctcctttggttcggtatttcagtacctttggtttttgttggaagcttccttggcttcaagaaacctaccattgaagatccagtgaagacaaacaagataccaaggcagatccctgagcaggcctggtacatgaacccaatcttctcgattctaatcggagggatccttccatttggtgctgtcttcatcgaactcttctttatccttacttccatctggctgcaccagttctactacatctttgggttcctcttccttgtgttcctgattctcatcgtgacatgtgctgagatctcgattgtcctatgttacttccagctctgcagcgaagattacctgtggtggtggaggtcgtacttgacttctggttcctctgcactctacctcttcttgtatgcaaccttctacttcttcacaaagcttgagatcaccaagtttgtctcagctgttatgtacttcggttacatgctcattgcctcgtacgccttcttcgccttgaccggcacaatcggattctatgcttgcttcctgttcacaaggctgatttactcatcggtcaagatcgagtaaggtgaagtgcactcttgcctatttctttgttgccacgaagaaagaagtattctatggatagtgaattctacaggactgctgagtttagctgcaagtgggctcgttttgagttttcaaagctggtagttatgatgaagatgcgattcattaccgtatgattccggtattatagctagctcagtatgtttctgtttttcttttgtttttttttgttttcgggctgtgcccgaccgtgaggatatatgcttatcaagagcttgacgctgaaagaattgtatacgggtgctgagtaatctatctcttgttcctctcagaatttatgtacttgttgatgtgcactgtgacgtacatgatatacatttatagctaccggctcggcggctcctgtttctttagaaaaaaaaaaaagaaaaaaaaaaaaaaaaaagcggccttctaaaaaaaaaaaa

SEQ ID NO: 35899 - DNA, 322 bp, Zea mays
  Clone ID: MRT4577_132740C.1
gccgctgttgctgctcgtgttgagtctagaaccgtagccagacatgggactggaggacgagcaaaagatgcttaccgaatccggagatcctgaggaggaggaagaggaagaggaggaattagtggatcccctaacaacagtgagagagcaatgcgagcagttggagaaatgtgtaaaggcccgggagcggctagagctctgtgatgagcgtgtatcctctcgatcacatacagaagaggattgcacggaggagctctttgacttcttgcatgcgagggaccattgcgtggcccacaaactctttaacaacttgaaatgaatg

SEQ ID NO: 35900 - DNA, 499 bp, Zea mays
  Clone ID: MRT4577_132741C.1
ggggaaaaaaaggggccatattttaaagggggaccccagcaaacaaaggaaggggggaagccacgggattcggggggctggccaaaagcccagccccaaaaaggaccacagggcaacaaaaagggggggggaaaactaaaaagggaccgatttggggcaaaaactaaaaactggccaaaaaacttataaaaaaaaaaaacgggctaccgggaaaaaccccgagctaaaaaggcccaactttcccctaaaccaaaggaggggaaaaaaggcccaaccacggggctgttttttgacccagggcccccccccaaaaaaaaaagggggctgaatgccggcccctggttaaaccgtaaaacttccaggtaaacgattatgccaagtggacaacagggggaaacactggggacgggaaaaaccagggcaagaaaattctgcaaaaagttagggccaccataaacccttaaatctttgggcgcttactaaaaagaagaccgtattt

SEQ ID NO: 35901 - DNA, 643 bp, Zea mays
  Clone ID: MRT4577_132742C.1
gctggaagctggtcacacaaacctacgtaaagtgacatagcttgtgttggatgaggcggaccccaatcttattagaaacttatccatagcctttggtgtttgatatttgcagtgcaacacagattatgagaaaacatccgagagaagcagtctcaaattcagtagtcagataccgacatgctgcatcggggagtacacggcatcagttgcagacgacaataagcaaccacctgacaatgaacgattaacactgatagcaagagctacaatcttaacaccacctacaagctactgctgcagcgctgcttctccctgagtgagcttcggccttcatctgttcctcacgcatctttgttgcttctaccagttttaccatggtcagacggtgtccggggtcgtcatttccaggacaggccggggaagcccactggctgctgctgctgctgcccatagccgccgccgccgccgccactggcccctgcgtgcggcgggctcggggcgccgccggatgactcgctcaggctcaatgtgcctctggacggcgggctgctcggccctgccgccacgctcgtcggcgcgagctttagtggcgccggtgacgggtctggcggtgacggagcaagctgctgctgctgcttcggct

SEQ ID NO: 35902 - DNA, 671 bp, Zea mays
  unsure (1)..(671): unsure at all n locations
  Clone ID: MRT4577_132743C.1
acgcgtacgnaagctgggatcctttagagcggncgntnnntgtttttttttttttttttttttttttttttgttaggaanaattttaaaaagaaatatggtttagcatcggtgctacaagttacagcaactggtttgaacacatcaagtatccaggtgggggtaaaggggaacatactttagatgagacctactagtaaaccgtggcaagtgaaatactttagtcctaccatntcctatagctggcctagagagtacgaaaccgctattttagcagctggcacccgctccaccagcaaggaacgtgtagtcactatagcaaaagatccgcttgagagaggatataaaacagccacctactacatagatgattgggaacccagtaaactttacaggaaaatgcaatctacatggtcggccaaccacaagagtgagggaatcttttttttttcttcttagatggagcaaaactatgacttgataatgcatagattatcgcttttcttttccgattattccttttttccatgagtaagtgcaccagagcttgtaagatggacaaatgtgttacattaggcagtaggagttatgcatagcgcatgtgctctaggctgtgaggcacctttggagctttacgaggggataatgggtgaagccggaaatacagggggg

SEQ ID NO: 35903 - DNA, 337 bp, Zea mays
  Clone ID: MRT4577_132744C.1
cgtttgttgtgatcagtgtcggactggtacgcccattgtccgcgccagaccactatcagacaggtcaggaggagcgatgattcctttctacactgaagatattttgttcctacccattttatgcggtatgtccacacagataaagctggggggccccactaccacaggcattcgagctaggggaccgagacagacacactcccagttagtcaagttgacaacaaccgcatagacaatgccgctatctcagatttgcttgcacaacttgtcacgggctcgcttggctaggatatcatctaccctggggataaaccgtgcacgaaccaagctctaccgg

SEQ ID NO: 35904 - DNA, 346 bp, Zea mays
  Clone ID: MRT4577_132745C.1
ccaacccttccggccccccaacctgttttcagaagctttttgtcccggcccattaaggggtcccttcaaaacccgggcccaccgccgaaagggaaggcccccttgccaacaaacccaaaggcctaaaacccgccgccattcggccccaaaaaaggccccaagttgaaaatcctgaggcggaagtcctactgttccaacggaatcggcaccttcttaaccttcaataaggatcttaaaaccctttacccgttgttgttccgtttaaccaagttgaactaccccggcttgtttaccaacaattacgctttgaacaagatctttaaggtgaatttattaaggccatttt

SEQ ID NO: 35905 - DNA, 185 bp, Zea mays
  Clone ID: MRT4577_132746C.1
ctgagtctttcgatgcaaggtcgctcggagggcacttgctagggctgtggtcatcgttgggttcatcctacccttgcgtcaaccaatgtgtactgcggatcggtcggtgctgctactgctgctaggacttgtgctaagataatccttaagaaaaaagtagctaattagggctgttattggagctg

SEQ ID NO: 35906 - DNA, 197 bp, Zea mays
  Clone ID: MRT4577_132747C.1
aattcggcacgaggctcgctgctgtctattacgccgccgcgaccgtgcctcggcgactcacaccgtcgggctggcgcggccgtggtcgtgtggccttgtgcgtcggcgttctcttttggttactgtgacgagccggaggaggccagggcgatggatatgtaccgtgggcttcccaagacctctatatgagtgtttgc

SEQ ID NO: 35907 - DNA, 405 bp, Zea mays
  Clone ID: MRT4577_132748C.1
gcttgccagccttaaagcggggcgcgaatgccacgagcgactgtggcggctctgcagttcactgcagggccaaggctcgcggactccatgaactccagcttctcctacggcggcttgcggtccgagaggttgctgtagttgggggagctcttgtgcgcggacttgatcctggacatcaacgtccgcgtggccgtcttcttcgtcttcaccgactggctgatgaacctctggatctactgcggctcctcgcactcgcgcctgtagaggccggacgcgttctactagcgcgcccggaacagtctgagcatccatagccagaggtaccacagactttttctacgccgggtcaatgtgggtgggtggacctacaacaacgtcctccagttcgcactcctggacagctag

SEQ ID NO: 35908 - DNA, 282 bp, Zea mays
  Clone ID: MRT4577_132749C.1
tttctatcgcccggacggaacgtggggcggagtttcccataagcatccggcgagagctttgctcacaagcttgctcgagaatttgacggggactgcacacacagaagagggcaccagcggctatctgaagaaggtcgttgtgaacgtcaggttgatgactaaggagacatgcaccagcctgtagacgatcagctacggattgcactcctggagaatccagctactctcatcatgtacatgtgaacttgaacaccattaggactctgtaggtgctgctgacaa

SEQ ID NO: 35909 - DNA, 1809 bp, Zea mays
  Clone ID: MRT4577_13274C.1
cacatgtgacgattagaatcaggaagacaaggaagaggaacccaaagatgtagtagaattggtgcagccagatggaggtcaggataaagaagagctcaatgaacacagctccaaatggaaggatccctccaattagaatcgaaaagattgagttcatgtaccaggcttgctcaggtacctgcctgggtatcttgtttgttttcactgggtcttcaatggctggtttcttgaaaccaaggtaactcccaacaaacactaaaggcaccgagataccaaaccaaaggaggacaagggcaaacattgtggtgaatggaactgcaccagaagacttctgcccccagataagaatattcaagaagaagaaaacagtgaacacactgccagggaaggtgaatgctgtcctcaaggcaatgttcttccactctgagcccttgaacaacttgtaaagacgtgaagaagagtagccagcaagcaaacccatgaaaacccaaagcaagagcatagctgtcatcagtccacctctgttggagggagaaaggaagccaaggactgcaaagaccatagtgacaagcagcatgccaaagaactggacaccggtgccaacataaacacagagccagtctgagttggcaggcggcctgaaaacatcgccgtgaacaagcttccatccagtctcctcttgggcctcttcctgagtctcaagttggttatacttagagatatcccggtaaagggtacgaagcatgatcattgcaaccattccagaaaggaagagaacaatcatgagagaattcacaatagagaaccagtggatctgatcatctgtcatcaatagatagctgtcccaccgagatgcccacttgatgtcgctctccttgaaatccacatcgtaagtaaatatgatatccttgccaacttcgacctcctgaggagactcggacgaagtaatgatacgttgagcatgagggtcacacgttgtcaggcgggtcttcttatcattccattgcccttcatattcatgcttaacgctgtatggtttcacttcaaaggccacaatcctggaaacatccctttgctcatccctgtgatatttcaccgtaaaagatagatggttgtggatgaagtatttttcatctttgctccctgaatattttcctttggccccaacatggaatccatgttgatagaaatatgcaccttcttgatccactctttgaataggaacgactaaaggtaggttgtcaagaatcatgttaacacggtattcatcttcaatcttctccttgagaagctttgcttctttctccccaacagatatcttgcagactacttgacacatctgaggctccctcatttcaaacgtatagggagagttttcaatgcgatctccacgaagaacttcaccgagattttctgcactgtcaactatggtatccggcttgcagaatgggagagaatagtaggagtagggaagttgtgtcttgattgaggtcagcttgttgactttcacaggaagtggatctttcttctcgaagtcattgggcgcgacgccggggaggtagaaccctgaggccggcggcgcgagcgcgacgatgcagagtgcggcgaaggcgacggcccacgccgacggctccatgccggagttgtgggcaggcgatgggagtggcgcgacgctcgcggctccccggcgcggggcaagtagagacaagatggaggaagaagaatgagatggcgcttttccgctcccggccccggcggccaccatccaccgtttctccgcggagaccgcatcgcaattgcgcacagtgt

SEQ ID NO: 35910 - DNA, 188 bp, Zea mays
  Clone ID: MRT4577_132750C.1
ttctcacataagctcacggctagttataatctttggaaaaaggcgaacttgcataagaggtttatacaaaatgggaacatgctttgtttgcatctggagggtatctaatgatcatgaacaaccctttgtgtcggccgcttgtgagggacttacatgcttttgacaattattgaattgtggcggttgac

SEQ ID NO: 35911 - DNA, 431 bp, Zea mays
  Clone ID: MRT4577_132751C.1
taggggccttttttttttttttttttccggaattaagggaaaaggggccttccggcctggaaccccactttcctccttaaggcaagaagcctaaaaggaacagcaatggccaaaaagaaaaaaaaccaaggccaacttttcaaaaaaaaacgaagggaattccaaacgaaaggcccgaaccacaaccgggaaaccgggttttgggccggggagggcgttttaatcaacccagccggtccaaggcatcaatggaaacctaatccaattccaataaggacggaggaaattaaaacacatggaggggctgggtttccaacggccccttaaaaaggccactggccagggacaagggaacaggaaaccccctggactaaggacgccgccgggggggggaagccaaggtggaggtgaaagcccccggggggaaactg

SEQ ID NO: 35912 - DNA, 360 bp, Zea mays
  Clone ID: MRT4577_132752C.1
gtcatgtatggatatccaccacgccacttcggtatcaccactcaaacagctatctcagtacctgatctagcatcttggattcaggagcgcgagttgatgcaaaagctaatcaaacagcatctactccgggctcaagaccgcatgaagaagcaggctgataagaatcgctcggagcgagtgtttgctgtcaacgattgggtattcttgaagctccaaccgtatgttcagacgtcagtggctacacgtgctcatcataaattgtcattcaaattttttggaccctacaaaatcatcgagaaaatcagccctgttgcctacaagctccagctgccagcagactcagccatccaccctgtgttc

SEQ ID NO: 35913 - DNA, 399 bp, Zea mays
  unsure (1)..(399): unsure at all n locations
  Clone ID: MRT4577_132753C.1
ggggggggggagacagacatcgccgatgctcttctgggcttcggtggcgcggctgccctccctctttgagcgaggtctatcgaggacgcagagacctagcgcccagcggcgtcgatccgctggatttttgctggctatgccgccggctcgggcgggggggacatttttttttttttgccagacgccgggcacccgaggggggcagcgccctccgcagcatggggccccccccagcccccccgggccaagnnaggagccgggncccggcgaggcgggggggcaaagcaagagcgggaaccgcggcccgggcaccgacgccgggaagcacggcgctggggctcccattgtcttggccatcgcgagcaccccccccaggaccggggggcccggcgctggcct

SEQ ID NO: 35914 - DNA, 363 bp, Zea mays
  Clone ID: MRT4577_132754C.1
gtaggtagatctagcaagaacacatatcttagtcttgttcagatattgagtgttggggcaataacctatatatgaggtatgaatcgcttacttatatctttcagacagaacctaccactatgagtggtgcaacaacagaactttggacaggcatgctaatctccagtggggataccaagttttatcttcacaagttcactctcttacaaagaggtcacatgaagagaaggtgcatcctactcacaagcaatgattacaaaaataatcaaggggatatctctgacatacctgggggaccttcaacctttaaaataagggctaagttctgctatcggatgatagcaacactcaatgcatataacg

SEQ ID NO: 35915 - DNA, 1483 bp, Zea mays
  Clone ID: MRT4577_132755C.1
ttgcgacttacctggacgggatcaacgggtgatcaataaggcccgtggtctaggtcagtggcctgcattgcacttggcaggtgcgctggcctaccatcttcccaagtgggagagtggacgtcataatttgtggcagagggggtacgcgtccgcgcggcccctacaatcgcaacatcacaaggctaacctgcatcgccgccgtgcgcgccagcgctgcccagtccgcgcagatggaacgcaggcaggaggcgaaggttgtgaagctgcgggcggtggaggccacgcccgagtccttcgcttcgttcgggcaggtcatcggcgcctcccccgacggcgacgagttcggcccccacgacgcccagctcgatctcagccgcggcatcccaaggttctacatcatgcggttgcagaaccggccgctgaaattctctaccatcacccaccacgccagcgtgacccagtgcctgggctccgtcggcggccaggactggtacctcggggtggccaagccgtcgatcgtggatggggcgtccgagcagagtggcccggagggaaggaagttcttgcagtctgccgcagggcactattacctgcctcctgatccagccgaggtctgcgtgttccgggtttctggccccaagtttctcaagctgaacaaggggacctggcatgccgggcctttgttcaaggcggacgccgttgatttctataatctggaactgagcaacaccaacgttgttgatcataccacacaccatttcaagaaacatgatgggataacatttgtggtggaggactaaaaaaagaacatctctcaatccgaataccactgacaagaccgctggctgatcttgtccatgtttgtagtgaacaaccaacatgtaaagtgtcatgtagaaatgcgcatctgaggtccttgttcaaacttgtgtatcgtgctttgttagaaccgaaataaaggcaaaagttcgccccaaaaaaaaaaaaaaaaaaaaaaaaaaaaaaaaaaaaaaaaaaaaaaaaaaaaaaaaaaaaaaaaaaaaaaaaaaaaaaaaaaaaaaaaaaaaaaaaaaaaaaaaaaaaaaaaaaaaaaaaaaaaaggggggggccgtttttaaaaaaaccaaattttacttccccgtgcttgcaaaagaaaaattttttttttggggcccccaaaattaaattaatgggccgggttttaaaaacgcgggaatgggaaaaaccttggggttcccaaattaaatccctttgaaaaaaatcccctttttccaagttgggtaaaaaaaaaaaaggccccacccaatcccctttccaaaaatttcccaaccctaaatggaaaatggaaccccccctttaggggccattaaagccggggggggggggggtttacccccagggggacctttaaatttgcaagggccttagggcccgcttttttggtttttttcctttctttttttcccactttcgcgggttttcc

SEQ ID NO: 35916 - DNA, 557 bp, Zea mays
  unsure (1)..(557): unsure at all n locations
  Clone ID: MRT4577_132756C.1
gcccacgcgtccgcggnacgcgtgggnaccaagcaggtggtggtggacgacaatgtcaccctgtgcctggtgaaggagatagacgacatagccaccgccgctcgccagccgcgcgatgagcagaagcagcaacagtggtggtgcctcgggcagctgctactggaggcaacgcagcggcggcaggagctggccaacgattttgtccgccttgtatcctggctgcacgcatgcacggagaccctcctgtgtcaggctgcggatgcggcggcggccaacaaggaaatcagcatcgccaccggcaccgcaggcgccgccgcttcggccgacgtctgccggaagctatccaggtacatgatgtacctggtggctgcaaacccaggaggtgctgcttcctcccttttgcaggaaggcaaccctgaagcggagtttcggcgctgtgatgggtaccgtagctgtcgcacggttgacgagcagcgggatgcttgcatgcgccttctgtgtgacggnggcggccctgcagcatcggaggccatgtctacgacgctgtggccttgctc

SEQ ID NO: 35917 - DNA, 367 bp, Zea mays
  Clone ID: MRT4577_132757C.1
aggaaaagccggccggctgccggaaccgggcctccattacagcgtcgacccatgcgttcgtgttgctacagaagaagcagcatatttgacagagtattctatacatgtggatggactaatgagaaaggatcaaatacgggcttacaaagctatgcacaacaggatgattatggggaatgtgataaagaactgaacaaccgcaacataacagtacattgcactacaaaagccatggatgttgttagcactgactaatggcagatgtctggcgtgcatctgaagagaagagatacacgagacgaatcaggtcttactgtgaaaggaatattttatggcataggacatactccaaacagaaaattgttgc

SEQ ID NO: 35918 - DNA, 2957 bp, Zea mays
  Clone ID: MRT4577_132758C.1
cattgggtacctcgaggccggccgggccggtcctatccggtggagggctcttccgcgtcccagagaggccattaaaatcggccgcccccagtctggccgggttcccctttcccacctcccatcccataccaccccccttcatgtcgtcgccttcctccccgcgcacttgcccctgcatctctccgctgcccaccactccctcgcattaacgacgaaggctcatcatctctgatggaggtaacagtcggctaacacaccgccccgccccgcccctgttgtctgtcccttcattttctagcttagaagagtattcttgttccggtttcttcgttccgtcgagcgcggcattctgtgggtcgtgtggattttggcccgggggacgaggaggaggctggtcaaagatctgtggtcaaaaattgatggtggggttcatggaatgggtgcatgactggttgctgtgggacgccttcctggagtgcggagggatcatgaggccaccgattagatagcggctggggagcgagggaccacaggaggcggaggccgccgttagcaccccccaccaccccgcgccgcgagcaagcagccatgggggaagacctcgtcaccaccctgtccatggagaacggcggcggcggcggcggcggccaccacggcccctgcacgctcctctccatggacccgtccggccacctctccgcgccggacgaccgcgccgtcggcgtcatggtgcagaccctcatcggagggggcgtcggcgccggcgcccgcgcccacgccgtgtcgccctccggcgcgcctccgcccgacatcaaccagccgtggcagaccgacctctgcgacatgctggacgtcggcctcggcccgcaggtctacagcgccgaggccgtgctcagctgcgcccccaaagaccgggagctggatttccgccgagctcgtgtacagcatctgcggtgactggttctaattcacattctatttcacgcccctgctgtccgacaagtgcaaggacaaggtcgtccgggacaacagcggcggggtctcgggcttcgacaagtccgacctccgccttgatatgttcctggtgcagcacgacatggagaacatgtacatgtgggtgttcaaggagcggccggagaatgctctggggaagatgcagctgaggagctacatgaacggccactcccggcccggggagccgcagttccccttcagcgtcgacagggggtttgtgcggtcgcaccggatgcagcgtaagcactaccgggggctgtcaaacccgcaatgtatccatgggattgaggtggtcaggtcaccaaatcttgtagggctcaccgaggcagaccttaggaggtgggcggacctgactgggagggagctcaatttcatcatcccacaggaagccagtgatttcgggacatggaggaccattccaaattcagagcttgagcttgagaagccacaccctgtcatgaagagcaacggcacccaaaacccaaagaaaacaggcttgaatctgtcgtcaccgtccaatcattcaggcgaagatggtatggatctctctccagttagcagcaagcgtaggaaggaattgtccccacaggccatggatgaggaagtattcttcccactgaattcttgccctcagaagacacaacaagatgtggagatgcactcaccaacgcagcctgctgcgtggctccatgagtttactggggtgatgagaaacgcctgtgggccagtgactgctgccaagtctatctatgaggatgaccagggctacttaataatggtcagcttgccgtttgttgatcagcagagggtgaaggtttcgtggaggaacactctgactcatggcattgtgaagatcgtttgtgttagtactgctaggatgcaacatataaggagacatggcaggatgttcgcgcttgccgatccttccccagagcattgccctcctggtgatttcattcgtgaaatacctctagctactcgtatccctgaagatgctaagctggaggcttgttttgatgaggctgcctcagtgctggagatcatggtcccaaaacgagggaatgaacctgaagaacatgaagttagggtctctctgcgaccccctcactacggagctaatgatctacttttgacctaagctatctctgcaccatgctacatcttctttgtaaccccagattaatgccaaatttagctgagaatcaaggtttcagtatgcttgttctctgcctaatgtttccagtacttgtgccatactatgtctcttcagcgacgaagacttgctgaagactagtttattctagcttctgtgttatgggtgtctttttaaccctcatgtttagattttgtactaagttcagttaaaagaaataatattctgagttgccactaaaaaaaaaaaaaaagcggccaaacgagaaaaacaggtagctttcggattttccagtgccatgtttattgccatgagatactcgaacgtaacaggtggtgccatggatcagtgagagccatcatatttgctgctaaacatgtagcttataagttgagaaattcttttcctccataagtccccgttcggttaggctggaataagactaggaactattccaggtgaccaattgttatactacaaattatacagttatttcagctgggatccttcctggagtagattcctgaataaccgaacgggacctaaaagttctgtggtttaggcgaaagttacctcctacctctgttaattccccccctcccctctgtacctctgttacacaagtacatcactattggcgatcttccttgactatctgaaagctggctagtgttaagattctgtgtatattcaggcgaccaggttcgtaataatgtcgatggctacttctgattttgaggttcggaatcgtgttgtcgatttcgagagttattttgtaatgattgcctct

SEQ ID NO: 35919 - DNA, 2205 bp, Zea mays
  Clone ID: MRT4577_132759C.1
cccacgcgtccgcccacgcgtccgcccacgcgtccgcccacgcgtccgcccacgcgtccgcttgttccggtttcttcgttccgtcgagcgcggcattctgtgggtcgtgtggattttggcccgggggacgaggaggaggctggtcaaagatctgtggtcaaaaattgatggtggggttcatggaatgggtgcatgactggttgctgtgggacgccttcctggagtgcggagggatcatgaggccaccgattagatagcggctggggagcgagggaccacaggaggcggaggccgccgttagcaccccccaccaccccgcgccgcgagcaagcagccatgggggaagacctcgtcaccaccctgtccatggagaacggcggcggcggcggcggcggccaccacggcccctgcacgctcctctccatggacccgtccggccacctctccgcgccggacgaccgcgccgtcggcgtcatggtgcagaccctcaggggccggcgcccgcgcccacgccgtgtcgccctccggcgcgccgcccgacatcaaccagccgtggcagaccgacctctgcgacatgctggacgtcgtcggcccgcaggtctacagcgccgagccgtgctcagctgcgcccccaaagtcgaccggcagcggcaatggcagtgctactgctactgtcaaattcggcacgaggaagtgtgctaagagaggagacagcatctggggtgcatggttcttcttcaatcactacttcaagcctgctcttgtggagaagccaaaggggaaggtgacgcgagacgcgtctgggagcatctcgggcttcgacaagtccgatctacgccttgatgtcttcctggtgcagcatgacatggagaacatgtacatgtgggttttcaaggagcggcccgacaatgcccttgggaagatgcagctcaggagcttcatgaatgggcattccaagcacggggagccgtctttcccattcagtgccgataagggcttttccaggtcacaccgcatgcagcgaaagcaataccgggggctttcgaacccgcagtgccttcatgggattgagatcgtgggctcaccgaatttgtcagcagttcctgatgcagacttgaagaggtgggctgaactgacaggcagggaacttaatttctcaataccatctgaagccagcgacttcgaggcatggagaaatcttcccagcactgattttgaacttgacaggccacatccaccggcagcaaagagtgccactcatggatctcatagccataagaagggattgaatggttcaggtcttaacctttcaactccaccatcatcagacgatgggatggacctttcaccaaaatgtgccaaacgccgcaaggatttctttggccatggcgtagaggaggactgtgtgatggcgaacaattcttgttccgacagagagcaagaggcagaagctcacactggtgagccatcatggatgcacgagttcactggtgtggccaagcatgcaagcgggcctgtcactgctgccaagacgatatatgaggatgaggaagggtacttaatcgtggtgagcatgcttttctctgatccacatagcgtcaaggtgtcctggaggaacacgctgacgcatggcatcgtgaagataacatgcgtgagcactgcccggatgccctacatcaagagacacgacaggacgttcaagctgacggacccttcccccgagcactgccctcccggcgagtttgtgagggagatacctctggccacaaggattccagaagacgcgaagatcgaggcgtattacgacgagacgggaactggactggaaatcatggtcccaaagcaccgggttggaccggaggagcatgaagttcgggtgtgcatgaggcccccgcatcttggcgacagcgatcttgtgctatcctagaacgaggaaaacaggtagctttcggattttccagtgccatgtttattgccatgagatactcgaacgtaacaggtggtgccatggatcagtgagagccatcatatttgctgctaaacatgtagcttataagttgagaaattcttttcctccataaggccccgttcggttaggctggaataagactaggaactattccaggtgaccaattgttatactgcaaattatacagttattccagctgggatccttcctggagtagattcctgaataaccgagcg

SEQ ID NO: 35920 - DNA, 340 bp, Zea mays
  Clone ID: MRT4577_13275C.1
ggggccacacacacccacttgcataaaaaatcagggggaaaaaagcagtacaatttaaaaggggggaaaagcaaggccagttccctttttaaaaggggacaaactatgacccaccctgggtttactatttgaaacatctaaggactcattagcacaaacttaggtgggtttatgggaaaaaagcaaccacttggggggggcccaaaataaacattttttttgggaaaaaaaaaggggaccacctgcgccttaaaacttttttggggccacgggctgaaaccaggggggctctgccccctatattatcgggtggcggaaaaaacggggcactatcgggctt

SEQ ID NO: 35921 - DNA, 189 bp, Zea mays
  Clone ID: MRT4577_132760C.1
atggattgtgtcactctcatcgaggactaccataacaagattgaatttgaactcaataagatctatgatggaatcctcaagctctttgcttcccaccttcccccctcactaacagttccaaagtccaaggtcttctacctcaagatgaagggtgattactacaggtaccttgcggagtttgaaacttga

SEQ ID NO: 35922 - DNA, 841 bp, Zea mays
  unsure (1)..(841): unsure at all n locations
  Clone ID: MRT4577_132761C.1
ccggccgccggccggcatctcccgcagaacacccaaggagcaagtcaagatgcctccccgcgcccactccaagacctctcgtgtcccccgccgacccttcgagtctgcccgacttgactccgagcttaagctcgtcggcgagtatggcctgcgcaataagcgtgaggtctggcgagtcggtctgactctgtccaagatccgtcgtgctgcccgtcagctccttaccctcgacgagaaggaccccaagcgtctcttcgaaggcaatgccctcattcgacgtctcgtccgtgtcggtgttctcgacgagtcccgcatgaagctggattacgtcctggccctcaagatcgaggatttccttgagcgtcgtctccagacctgtgtctggaagctcggtctcgccaagtctatccaccacgcccgtgtcctcatccgccagcgtcacatccgagtcggaaagcagatcgtcaacgttccttctttcatcgtccgtctcgactcccagaagcacatcgacttcgctcttacctcgcccttcggtggtggccgtcccggccgtgtccgcagaaagaaggccaaggccgccgagggcggtgagggtggcgaggacgaggaggacgaggagtaaatgcaaccaaaaatgcaaaagcggctctccctgtctagggcacttggtgatgggatccactcatgggaaggggattctcttcatagcttgcggcgttggccagaggataaaaatggaatgatttcaccggataacgacaaacaaaactttcccggtgtctctcctaactgtgtatatgaatcccatgaaacctgnatccnattacgacatctacac

SEQ ID NO: 35923 - DNA, 284 bp, Zea mays
  Clone ID: MRT4577_132762C.1
gccgccgaagagaagttatgatatactgttgcgggccatgagttggtctgtggggccttggctgctgctgacctgcagaaggctgtagagaaaggtatgatatggctcttcccgaccgagtgacgtactgaatcaagggtcaataacaacgctgtcgaagcttatgactccgacatgcttgacacgctataagacaagtacagggtttctgcagcgtatggacacacgccatgagtgctccttagctaaaagacgcagaatactctctctatgcaccacgcaag

SEQ ID NO: 35924 - DNA, 416 bp, Zea mays
  Clone ID: MRT4577_132763C.1
aacgacatactgttagggggggtaaactgaacagatacgacgatacttatagcctggccagcacggcatccgatgacgcccctaaaacctggagcaatggtgaaactttagctatcagaggttgcttacctagggctaagataaaccggaggtatgcgatgcgacactgggttgacctgaacaattttggtttgaccagcgtcacccttaagctgaggcatgtgagcccctggctcatcaggcttgtgctaaaaaaggctcacaccgagcttgatcatgggggggatcgcagggccaaaggtgatggggtcatccaggctgaatgcgcatgtcgggagagcattctttaacagcaggaggacgagattccttgacagaatgggaatttttgtgggcctcgaaaacgattgcgagct

SEQ ID NO: 35925 - DNA, 630 bp, Zea mays
  unsure (1)..(630): unsure at all n locations
  Clone ID: MRT4577_132764C.1
atggagagagtacctggggtggaagagcagaagtcagcagaccaagttaaccaagctggtctagctgatgagagtaccacagtaccgtggctgaagttgggtcttgatgcgccaaaaagtgaagaagtcaagcctcaagaggtgaaaccagtgggcactccacataggactttctcctgcaactactgcatgagaaagtttttcagttcgcaggctctcggtgggcaccagaatgcgcacaagaggggagttgaagaacctggagggttagtatggccaggaagcttcacagcaagttcagatgagtccaagaagcaaatggagaaaaatcttgacctaaccctacgtttgtaaattaaactgtaataataagtaggtcatcatatgtaagcattttctgagtcgtgtcatctttttcataatttctgttcggtgaacaaatataggctatgcctccccccctccccccccccctccccnccgcatgtgcaacggctgcactttatctgctcttacgttacttgtagcaggttgaaagaaggacgaaaataaatgttcattagttactctgcatttttgtgataactactcaggagtccacttcgaaattatacttttgtttcattggtt

SEQ ID NO: 35926 - DNA, 168 bp, Zea mays
  Clone ID: MRT4577_132765C.1
ccggccgggcttatagctggcctgcgtgctccgtcacgattcgtgcctggctacatgttcgatttcagtcgccgttccctcgcaccacgcacgtcatgatggatccctcgttacaggctacagcctacaggtaaaaaaaaaacgaaaaaaaaaaaaaaaaaagcggcc

SEQ ID NO: 35927 - DNA, 827 bp, Zea mays
  Clone ID: MRT4577_132766C.1
ccggtcgactccaaacttcagaaaaccctctctaaacacagcaatggagagagtacctggggtggaagagcagaagtcagcagaccaagttaaccaagctggtctagctgatgagagtaccacagtaccgtggctgaagttgggtcttgatgcgccaaaaagtgaagaagtcaagcctcaagaggtgaaaccagtggccactccacataggactttctcctgcaactactgcatgagaaagtttttcagttcgcaggctctcggtgggcaccagaatgcgcacaagagggagaggtgtgcagcaagaaagacatacaaacttcagatgattatgggccttcctccatccgcttcctttctccaacctttgagagtgaactcgcactccacgattctgaagggtcatggtgaaagagctgcggttgccgtagcaagattcgacggaggccaaatgagtggatggatgccttttgcagttgaagaacctggagggttagtatggccagggagcttcacagcaagttcagatgagtccaagaagcaaatggagaaaaatcttgacctaaccctgcgcttgtaaattaaattgtaataagtaggtcatcatatgttagcattttctgttctgagtcgtgtaatccttttcataatttctgttcggtgaacaagtatagactatgctcccccgcgcgcgcgcatgtgcaacggctgcactttatctgctcttatgttacttgtagcaggttgaaaggaggatggaagtaaatgtttattagtttactctgcatctttgtgataaccacgttcgaaatcatacattttgtttc

SEQ ID NO: 35928 - DNA, 130 bp, Zea mays
  Clone ID: MRT4577_132767C.1
cggacgcgtgggcgttactcttcacgactttatattgcttatgctccccttgttgtggttggaacacttctggcagcatcggtacctgttgttggttttaatgcaataatgacgtcagagcactttggca

SEQ ID NO: 35929 - DNA, 369 bp, Zea mays
  Clone ID: MRT4577_132768C.1
acaaacaccaactccccttaacagtagagatgtttacaaaccaaatgcacacaaatgcagccagtgatacctacgcacttgctagatgctgaaaattatgtgtactaattctttttggggacacaacgtcttagtgctacaaacaaatgactggactgggagatgagaatcagatgcaacgcccaagcaggcactaatatcccttcaacagtaggcagacaacccaaacccacaacagagttcatagttcattgtgccttagggttcatgggaatacaagagctgtctcacaaagtggcaatccttcacaacctcgagatgaccgcttcaacctcaaaaggggtgtagaggtggtagctaggggagacc

SEQ ID NO: 35930 - DNA, 872 bp, Zea mays
  Clone ID: MRT4577_132769C.1
cgtccgggccgacgcggctgggcatcgccatcgacgcggcgagggggctcagctacatgcacgacgagtgcgcgcagcccatcgtgcaccgggacgtcaagtccagcaacatcctgctcgacccggggttccgtgccaagatcgccgacttcgggctcgcccggatcctgctcaagtccggcgagcccgagtccgtgtccgccgtcagtggcaccttcggatacatggctccagagtacggacgcggcgccaaggtgaaccagaaggtagacgtgtacagcttcggcgtggtgctgctggagctggcgaccgggagggtagccaacgacagcagcaaggacgccgctgactgctgcctggtggagtgggcgtggcggaggtacaaggcgggggaccctctccacgacgtcgtggacgagaccatccaggacagggccgtttacatcgacgacgccgtggccatgttcaagctcggggtcatgtgcaccggggacgacgcgccgtcccggccgtcgatgaagcaagtcctgcagcaacttgcccggtacgaccgcaccgccagcgttgccggcgcgtgccaggacgaccgcggcgtcgaactgggacatctgcccaagggaaagcaaggtcgtcaccaagttgccaagagatcgttagacgccggatcatttttgggtggcgacgaggagagcggcaacttcgtggcccatcctgtttaaattttcagtttaactttactttttcggtatgacgttaaatatttctcgaatgtaaatttttgtggcttcccgtaatatgtgctgcgtgtacacgatgaagacgatagacaaattagggatttactaaaaaaaaaaaaaaaaaagcggcctttc

SEQ ID NO: 35931 - DNA, 355 bp, Zea mays
  Clone ID: MRT4577_13276C.1
cggccgggtaccccacggttgttcacagcctactacgcagaccgtgtgatcacgtcgtaagaatccgcactttctctatcccgcaccggaaccgtaacataatctccctgcgataggagagcagagcaattcgctggtgaagattcaatgccctcgcgccgccggtgtaccgccgcacgcctgcaattaaggaaaaggtggaggatccggagctgcacattgtagtcgtgacctgtgagactctgtaccgggggatctcatgcgagcagagcgccctatgatgggggttcgtgcgcaaggtctactgcttactcgctgtacaggtgatactgatcactggcgtttgcgggctcac

SEQ ID NO: 35932 - DNA, 552 bp, Zea mays
  unsure (1)..(552): unsure at all n locations
  Clone ID: MRT4577_132770C.1
ngccggcccgggtcgcngaaaaaaaaaaaaaaaaaaaaaaaaaattaaaaaaaaaaaaaaaaaaaaaaaaaaaaaaaaaaaaaaaaaaaaaaaaaaaaaaaaaaaaaaaaatttccaccacctctctctgttccactgaagaagggttcctcctcctccaccaccacggggtccatttcactctcacaggttccaattggaatctcgtctcgggctcgttttccccagtccactcgggttctcgtttcccggagtttcgcgatgcagcgccttctcgcgctgggggaagccctgctggggctgttggcgtcgcgtccagggttggccaccgacccctacgccttcttctattgggacgtctcctacgtaactggggggccgctcggggtaaagcaaaaggggataggcatcaacggaaagttcccagggcccgtcgggaacgtcagccccaactggaaagtcgtcgttaacgtggtcaacgacctcgaagagcccctcctcattacctggaaagggatccagaaccgaaaaaactgttggaaggaagggggg

SEQ ID NO: 35933 - DNA, 1915 bp, Zea mays
  unsure (1)..(1915): unsure at all n locations
  Clone ID: MRT4577_132771C.1
aattccgactgttattccaagttccactcgcaaaccccctcgattcgtccatccctcgcacgcgctggccgcccgccccccatctccacttctcctcgccgctctcctgaatccttcgcccgaaagcctccgaccgcagaaccttagcgttgccgtccacctccatggaatcgaagcctcacgcgccggcgtctgggctggcaacgccgcggttcaggctgggtaaacagtcgtcgctggcgcccgagcgcggcggcgagggcggtggtgcggggtcggcagatgggtcggccgaggcgaacggcgtcatgagcttccagctcatgtacctggcccacgagggcagcgcggaggggatccgcgagctcctcgacggcggcgtcgaccccaatttccgcgactccgacggccgcacggcgctgcacatcgccgcctgcgagggccacgccgaggtcgtcgagctgctgctccagagcggcgcggaggccgccgtggaggaccagtggggcagcacgcctttggcggatgcaatgcattatcagaatcatgatgtgatcaagatctttgagaagcatggctccaagcataagattgctccgatgcatgtgaacaatgttcgtgaagttcctgaatatgagattgacccggctgagcttgatttcagtaatggcaatgatttatccaagggcacatttagaaaagcaacatggaggggcattccggttgctgttaagaagctggacgatgatctaattgcggacggcagcaaagtgcaggcattcagagacgagcttgatgtgctgcaacttatacgtcatccaaatgttgtgcaatttttgggcgctgtgacacaaagcaatccaatgatgattgtcatggaatttatgcgcaagggtgacttgcgcactcacttgagtaagaaaggagctctgccaccatcatatgctgtgaagttagctcttgatattgcaagaggaatgaattacttgcatgagcataaacctcaggctatcatccatcgtgatcttgagccttctaacatattgagggatgacactggacatctgaaggtggcagattttgatttgtgtaagatgctaaaatggagaagaaaagttagagaagataaagcagttacttctccaggcaatgcttgtaaatatgtggctccagaagtcctgcgaaatgaagagtatgataccaaagtggatgtcttctcattcgctctgatacttcaggagatgattgaaggatgccttccttattatgataagaaaaatgatgaaattgagaaggcacataattctaaagaaaggcctccttttcgagctcctccaaagcattatgcacatgggttaagagagttgattgaacagtgctggagcgaaaattctgcagacaggcctgattttagagtaattatcaaccggctgtctgctatccaaaatgagatagctcacagaaaccgttggaaggcgagacctctcaagtgtttcctgagcatcgaaggaatgtggaagaaagatcgcaatgagggcagcaccacccgttcatcacgctcatcgcgatcctatttttaaccaccagcacaagctattgatttcaatcgcaagatcatattggtgattgctagaaaatatactcaaatgtatatcatattttcgttttctaaaactatgaaaaaaaatggttctgcaactggttgattctcagctgatcatagttttgattgtatatcaggcatgccccttggccccaacccctgctttggcattcccctgggttgggacaatatggataatgctaacttaattatatttatataataatgtgttttgatgttnaaaaaaaaaaaaaaaaaaaaaaaaaaaaaaaaaaaaaaaaaaaaaaaaaaggggnnnnnnnannnnnnnaa

SEQ ID NO: 35934 - DNA, 463 bp, Zea mays
  Clone ID: MRT4577_132772C.1
tgcgaccacgcggcggcgccatggcggtcccagcccatccgcaagccgcacttcgaccgcatcgtccgcgcgctcgcctccgaccacccgccaccgccccgcgccgagctgcacgcgtttctcgtccgctcgcacgccgcggccaccgcgcccgccctcgtccgctcgctcctcaacggcgccatcagccgcctctccaagcggcgcccgcgcgccgcgctcgccttgctcctcatcatgccgcgcctgcccgtgcgccccgaccacttcacgctccccttcgcgctcaacgccgccgcgtcgctccgcctcctcccgctcggcgcctccctgcacgccgtcgcgctccgcctcgcgctcctcccgctccgcctccccgtcgccaacgcgctcgtcgacctgtacgccaagtgcgaggagttccccgcggcgcacgccgcgcctggcggacatccccgccccc

SEQ ID NO: 35935 - DNA, 703 bp, Zea mays
  Clone ID: MRT4577_132773C.1
tattttcccaactgctgcagatgattgaaggatgccttccttattatgataagaaaaatgatgaaattgagaaggcacataattctaaagaaaggcctccttttcgagctcctccaaagcattatgcacatgggttaagagagtaagcactcattgtttcccctgtatagtactccctccgttttttttatttgtcacgttttagtttaaaaataaactagcggacgacaaatatttaagaacagaggtagtagcaaacactcttgtgtcttgctatgcatttcaaacttttagcaaacaactttctgcaagtaatgctcaatttaactacttgtatttgtgaaaattaacgtgttgtatttcctccacataccattattgttagtgattttccctttgtaaatttcatcctgacctttttgcctatccacttgacactgatgtaggttgattgaacagtgctggagcgaaaattctgcagacaggcctgattttagagtaattatcaaccggctgtctgctatccaaaatgagatagctcacagaaaccgttggaaggcgagacctctcaagtgtttcctgagcatcgaaggaatgtggaagaaaagatcgcatgagggcagcaccacccgttcatcacgctcatcgcgatcctatttttaccaccagcacaagctattgatttcaatcgcaagacatattg

SEQ ID NO: 35936 - DNA, 370 bp, Zea mays
  Clone ID: MRT4577_132774C.1
atcggttcaagcccagttccacattttcaggttttaatgaggcaaaaagtgaacatatatgaggtgggatttatttgttatcttatgaggcctatcctgaagccaaaggaaatgagatcgcaattgctgggggaattccaaattcacattttcaagaaataaggaggcaaaaatgttcatatatgaattggaattatttgggtgcttattaggcctatcctgaagccaaaggaaatgagatcggaattcctcggggaaatccaattccacattttcaagaaataaggaggcaaaactgttcatatatgaattggaactatttgatgcattattaggcctatcctgaagccaaaggaaatgagaacggaat

SEQ ID NO: 35937 - DNA, 352 bp, Zea mays
  Clone ID: MRT4577_132775C.1
gtataaatagttatattgaacatcaaaccccaaaacaattggaatctattttcaatgattggggccttaaacaacccaaatagcacaaaacattgaccgtgcctttctgaagcatggaacaattcatagaccaccggcccttggttacaaaacttggtccagcagggttacaaaaaaaaggatcacagtttgctgattttgagaaatgggactttgttgcaccgcaacacacttacgccttgagcttgccaaaaaacctctgttttttaagggtagtctcggagcgactcctcccaaatttggaccatggggcgaacaacctgtacttgatctcctccaacacaagccggga

SEQ ID NO: 35938 - DNA, 200 bp, Zea mays
  Clone ID: MRT4577_132776C.1
gagcccgagtgaacgggcgaggtctggacgagatgcagagtcgtcgtgaactacgctgacagcggaagaccaccaccctcgatgtcgagagcagcgacaccatcgacaatgtcaaggccaacatccagtccagggaatggatcccgccggaccagcaaccgctggatcttggccggaagcaggtgcaggatcggcgcacc

SEQ ID NO: 35939 - DNA, 399 bp, Zea mays
  unsure (1)..(399): unsure at all n locations
  Clone ID: MRT4577_132777C.1
ncggncgggagaacgaattagggccaagccagatgcagaatcatggtccaatgtaacatcatcgtgcgccgcacgcctcgcggttgatcttgtggcttcgacgattccagccacggcccatacgaacctggaacctgaaggaggctctacggaggggaatgaccgcacctccggcatggaaaaggaagagacccaaggnaacaacgaagccggtgaccctcgctggatcctatgaatcatgctcaatgacatctacaggaaaatgattataacgcactcctgcttatcaaagtatgataacgatggggatgtgctgaactatcaatcttatccacaagtggatggaatgagtcacccaccggaatgtaaccggatatagatggacattgatcgattccc

SEQ ID NO: 35940 - DNA, 357 bp, Zea mays
  unsure (1)..(357): unsure at all n locations
  Clone ID: MRT4577_132778C.1
ttctctctcctggncatcccctnctcgcctccgntcccacgccgccgaatccgagacctgatctcggattcaccgcagngacgcgaccaatccctcaggggatccccggnacctcctccccgangnttnngccatggnaggaatggtancggaaggttcccagtttgacgttctcaactatgattcttcgatgtttgagctgctgtaccttggtgagacttgtgatttcttcctctcctttcttgcacttcttcgctcatctttgtttgtttgtcctctctcttatntctctccttttacgtttttttcttcttggttctcctatattccttctcgtcttctgtctttttttttttt

SEQ ID NO: 35941 - DNA, 428 bp, Zea mays
  Clone ID: MRT4577_132779C.1
cccacgcgttcgaccacgcgtgcgaagaaatttgccataaatgtggtatactctttggtgagcaagaattgcagggaacctgatgtggtattgaatgtgcctcatacttctttgctagaagtaggtatgatctatcatgtctaactctaactccatttatctcaatcataagagaaatgtaaattatacaaagggaaatagggtcccttaaatttacatatgatgtgtatacaaagagacggggcacaaaataacttccaatttaacaggaggctgtcctacacgttaagaaccacttgacatgaaaatcccttcaatggttttttattttcttgctatgttagcaatgatctgatatcatcatattccaaatcaaaatcacaaggtgaatatatatatatatatacatgtctactagtttcggtgtg

SEQ ID NO: 35942 - DNA, 411 bp, Zea mays
  Clone ID: MRT4577_13277C.1
ttccaaatatctcacacatccttgctctcttacctaaccattaatcctatatagcggccatccttttattttttattttaattatattaataacggctcatatattgttcaggtctaaaacgtactgaagacaatactccaacctacaaacataaaccttaactacactattttacaaaaaagaatattatatacgctaaatacatacacattaaggcaagacatctcccctgataccattctataaaacatacatacaattattaatacctttctacagcaacaaggatcagacagggtgtgtgaaagtactagcaggtaaaggtaaatatctccttacacaaataatacatgcatgatttcttacaatgaataatatatgcattaactttccaaacttaatacacatgc

SEQ ID NO: 35943 - DNA, 432 bp, Zea mays
  Clone ID: MRT4577_132780C.1
taataatttgtgaggtatggaaagtaagatcagtttatacaaataaaatgtttggtacgtattaaattttgtttggtgaaaatattaaagtttataaatggttatagaatgaggtatcttacaatccattttaaacataatttataattgcaaatttaaatggaaacagttattggacacagtggtgttgcaagtctttaacgctgaagtctattcagttttgttaagagcttctaaacgttccaaaagaggtggatgagtgtgattaaaagcagaatataaagcatcatttagagggaaacttaaattagctttgtttaatttcattaaagaactctttaattcttctgcttttcccaatgattttgcgaaagcatccgcttggaattcaaatcgacgagtcaaacttgtgattaaaaatgacagtacttc

SEQ ID NO: 35944 - DNA, 149 bp, Zea mays
  Clone ID: MRT4577_132781C.1
cagaccctcacgagtaaacatctatgtttcttacactaccataccctactaaggtatgccttattgacaacctgaatcgacttcatatttctcagcgtaatgatcacacgtatgccatcacaatcctctaactattaccatagaatgct

SEQ ID NO: 35945 - DNA, 428 bp, Zea mays
  unsure (1)..(428): unsure at all n locations
  Clone ID: MRT4577_132782C.1
ggggtgtgttttttttttttttttttttttttttttttnttttttttttttttttttnttttttttttttttttttttttttttttttttttttttttttacaaacacaaaacatttgggatgttgtttattaatggctccaaaaaggacggggcggggggagagagaataatttccccagaggggtctgggatggtttattttttaaaaaaacttgaagaacccctccaaatatcccagaaggggtttcggggncagggcaaaaacccatttggcccaaaggataaaacatcaaaaaaaaggcccccttttaatttggtttttaaaaccggttggggggttttttaaattttcggttttcgcctttttaagcttggacgcgtcggaatgccccaaaaggccccggttaaatttgacggaaaaagggg

SEQ ID NO: 35946 - DNA, 695 bp, Zea mays
  Clone ID: MRT4577_132783C.1
ggccgcgggtttttttttttttttttgaaaaaaagactattccgttgttcctattgaagccgcgtatttcttcgcttgttattacgaatgttctctatcttcggatggggatgccctcgccgccggcggcaacaggctcaggtgcagcagctgcgtctgcaccctggggcttgtcaacattgtctccctgagtctcgtcgacgctggtctcgctcttgaggaagctgctctccttgatagggctaccggcctggatgccggggacggagccgtggtgcttggggacgttggttccggagccgttcaccggggatgacaggtggggaatgttctcggggagaggatgctgagagccgacggcaccagcgtcaacaccatcacccttgccggccttggacatggcatagtcacccgagtcgaaatacttgcggtccttgagatgctttgcgaagtggtcggatcgagagggcagcttgccgtagagacggaagagacgctgttcctcgggagtgagtgacttgacgtcgaccttgttcttctggtgagggttcatggcgaaggtgatttgtgctggaacgctggcgttgtagttgaaggacaaggaattgcagtcctgctctcttttgtcgatatggtgcagtgcagtgcaaagcggtacgggtacggtcaagcgtcgttttcccggccggagtctg

SEQ ID NO: 35947 - DNA, 326 bp, Zea mays
  Clone ID: MRT4577_132784C.1
ggcgtttatccgggaaatgaatgatggtaatatttatgatgtcggtgtggtgcttctgtcgccaactctcgaccatactaccctcaactcacccccggcaccaccggcaggcattgatattcagagatgaggttttgaatgagacgttcattatttgtacgtatttggaaagtcgtagaacaacatgatcaatactttgttcagaaaaggaacgcagctggcactctagccctttctagtctgcaaaaaattactgcagcatttcgaatgttatcttatggggtagttgctgatgctactattgattcacccctagaagtattcac

SEQ ID NO: 35948 - DNA, 622 bp, Zea mays
  unsure (1)..(622): unsure at all n locations
  Clone ID: MRT4577_132785C.1
cgggcaagatcctaattacctcattgatcagctgttacttntcatcaaagctttctccgtcgttgagcggttggagaagtccgcttgggtccctttcaccaaatgggagggccttgacacgggtccctgattcggggtcggttttgaccccttcaaattgaaagcctgggtcccctttttggcctggaaaccaaatccccctaaaatccctttaaaaggggcggggggtttttttttttgggagggggggaggggtccccccaaaaaagggggggggggattttttttttgggggggggggggccccccccnnnnaaaaacctttttttttttgtttttttcccaccttctgaaaaaaatctcttttttttaaaaaaanattattttttttttattaaacaaacaatttttttttttttttttttttttccgccccccccccctcttttttttgggggggggggggaaaaaaaaaaaaaaacccccccccccccctttttttttttttttttttttntgggggggtgtttttttaaaaaaaaaaaaacaaccccctcccccccccccacaacaccctttttttttttttttttttttttttgtctgtgggtcggcgcccaac

SEQ ID NO: 35949 - DNA, 308 bp, Zea mays
  Clone ID: MRT4577_132786C.1
atttgccctgggttaccgttctgaatctgacaagtgatcttcggtccggggcaatttactcatttatggactgaccactggtttctctgagagggttttcttgaacaaaacgaggttcaagcaaactgttccggtccgcctatctattggtccaatgttcttgacccttgcgttccttgaaatataccttggtgaaaagcaccttttgatgcaaattgtccgaacttttaaacattatgacctaagacaacgatttgaatacacaactcatttcattgggtattctttctcgtacgcccgattaaaga

SEQ ID NO: 35950 - DNA, 216 bp, Zea mays
  Clone ID: MRT4577_132787C.1
cacgcgtctcggaaaaattattttattaaaaaaaatttaaaaaaaaaaaaaaaaaaagggcgggcgcgtcttttagaaacagggttgggggcccctccattcaacggggtagcctttttatagggtccacttaaatgaactcatttgtccgacgtttaaaacgtatattactgggaaaaaccttgatttaactgacttaatttttttaacgtccaa

SEQ ID NO: 35951 - DNA, 381 bp, Zea mays
  unsure (1)..(381): unsure at all n locations
  Clone ID: MRT4577_132788C.1
ggaaggaggggatgtttgttttctagaccaaagggttagttcccacatttattaaatttgggttcaaaattttaaaaggaaaaaaaagggggattagcctttgaaaaaaaaaccccccgaaacccgccgttttataaccccttccacacgacaaacccggccgaaataaacacaacttttacttccccagccggggggtccaccggggcaaacctttgggggggggcccggttcatgggacagcctgggccattttccccngggcccccttgttttttttcttttgggccttggcctggctccactccccggaagagtaggaccccgggccccaaaagggggggcccagccccccccccttttgggtggtgaactttttgg

SEQ ID NO: 35952 - DNA, 269 bp, Zea mays
  Clone ID: MRT4577_132789C.1
tagcacccgcctacactctccccttctaggtgctgcctaggtaagtcggcggcggcgatgacaacgcgcttcaagaagaaccgcaagaagcgcggtccgtgttcgccgggcacggacgatctgctgcacaggaagcacccggaggtcgcgtaacgccggtgcatgcaccaccaccgtatcctcttcgacaagtaccatccgtctacttcggcaaggatgcatgcgtacttcataagctccgaacaagtctactgcccgcgacaacatcg

SEQ ID NO: 35953 - DNA, 434 bp, Zea mays
  Clone ID: MRT4577_13278C.1
cctgtagaaacaccaatcgggggacacagacatacggcaagcagtcagcacttgatcatgtgtcgttctgattcccgaactgtgacacaagacaaaactgataaaatatatggatcaccgcacgcaaagaactacctgctctctgtgcctgtctattttaggggtgcacattgctacgtgtcagggtgcattctgatcttgacggagcgactcttaacaatgaggtcaagctgccgggatacgaaccaaatgttgagcgagttcttgcaggtcacaagcttgttgaacggggcgaagatcttgtccagccggatgatcatctacacgaacggcagccgcctcatggattacgggtgccagcattgctccaacagctctttgaagccgggaggattgcccttgaggctgcccttgagtgatggcctcttgccctt

SEQ ID NO: 35954 - DNA, 127 bp, Zea mays
  Clone ID: MRT4577_132790C.1
tcgtctagatcgcgggcgggcgctcgcgatctagaggtccccgccaggcgttggccaccgttcgtgcaagactcatgtgagccgcgagcccgcgagtgatgagcgccgccgccgccggtgccaagaa

SEQ ID NO: 35955 - DNA, 269 bp, Zea mays
  unsure (1)..(269): unsure at all n locations
  Clone ID: MRT4577_132791C.1
cacgcgctttcttccttgcctacttgttgcttgggcggggctgttaccttggagacctgtgcggtttgagtcgaccgggcgtggacggtctcggtcctccggattttagggccgcgggggcgcccggacaccgcgcgagtgcggtgctcttccgccgctggaccctgggtgggggtggccgntttcgggttggcnggccgttggatgnggggatggctgttnccgnggccccgggcggcgggtgcgggcttgctggcgtgggggggggc

SEQ ID NO: 35956 - DNA, 2655 bp, Zea mays
  Clone ID: MRT4577_132792C.1
caaataaataactttaaactgttataaattatttataagttggaaatatatgctagcttaagtgatcatcctcaataagaagtacagaagagttacttagacttataagaaggtcgtgccctccagcgcttaacaccatccagagtagcacaattctagtacctgtaacaacatgggttcgaaaaccctgagtacggagtgtactttcgcaagtcttactcgacaaaagaaaaagactcttaaggatatgctggcttgagggagtcaaggtaaggctaataaaaaatcaaagactttgtttgcagaaatgattactaataagtggatccttaaaaatccatttttacttgtcaggttaagtttacctgtatctagagttctttctaccctagttcaagcacttggcctatactaggtcgtctttttatcatcccttcagttcactggatggctacgtgtagggcagtgaccaagtcttcatgccgagaagtaacagcgatccgaatcgattaatacccagctggggatctccgatcacacgacatatgtagcacttaacccttgcatatgtcaactcaccaccggggttcttaagaccagatcaggttcacgccaaccgagagcacagatacaccaccgtccagcctcttgccacggagggtacacgctactctcgccatctctccactcccattgcgtgttatcttattccggtattagtctgcccgaggcaaagcttacccatgatgagacatgtgaccagttaaaaggtcctcgatcagcaagcctacatcgacaaggtccttaatcgactcagacgaagacactacaccgagactcccttctcgtgcaagtcaaccgcccggtctcagctttattaatttcaacccaaagtttggtacctggcagaggtacatcttttccgatgttgaacccatcaaggcctttgacggatccaccatcaagttttatttttgaaaacattcccacccactgaagcatcacttttgttttaaaacaaaacatttttgtttgataaagcaaggctaagcatcataaaattcttttttaaaaaggatatcaaggaagggtaatcaattttcaaggaaggaaatgcatcaacggtttatcacacaactcctatcacctaatgcatcagataaggtgaaaaagcatttaaaacacaaggaaggggcaaatgcaccggggcttgcctggaataaacactacgttaatgtttgttagacgatgtccgcttgacgagtatccctcggccgagcacttgcttaatttaaccatcttcaggttggtccatcagcttcatcctgcggattcagcccgtgcttgggtcgacttggctcgtcttccgcatcacgtgattatttatcgtaccataattaaatccagcttgacatcatgaaatggacgatatctttcagctctaacttttcccctgaatacatggtgagtgtcgcatcgaatcacacttcttcttccacatcgagaattttcccgccacgtactaatttgtttccctccgcgtctaatcttctcggatctttagtgtagacgaggatggcgattgacagcattgacgtgtcagcacgacgatctccatacgacgaagacgatggcatgacgacttgttggcgttgatgtgcaggaacgctgcgccggcgtactaccagtgacgacgacggtcaggcactagggactggggcgcggagctgggagcaggcactgctgtgtatgaccgcgactagccgcgcaaagtatcgaacaatcggcaggcgtcaacggcgctgcgcagttcggcgcggtagaggagatcacggcgggggtcgcggcaccaggaagctgcgcagcagcgaccaaccaccatgggagatgagcagcagacctgcgcgagctggaagagaaagggagggcgcagccaaaggaacttcgcgcgtagaaaaaccggctgggggaaagggacttggctgcgacggccatggccgagctggagcagacgcgcagggagccaaagcttgcagggagaaacggctgggcgagcaagaaaccaaggacgcgcgtgggaggaggccgagctgggcgagctccggcgtgcagggagcaaggagcggctgggcagagggatcttctttcactagagccgagcagcgcagtccaagctgaggcaggggcgagctcgagggagatgaggaaatggggcgattgggcagggagatgtgctgggggaagaaccgctcggcgagcttgaggaagatgaagaggaaaccgcagcgcacaggcgctgactgggcgcgcgcaaggaggagctccacgacgcgttgcttgggagagcagggagaacgcagatcgttgagccagggccgggagacgcgccatagggaaaagggcgaagagctgggcgcggcagggagctgctgggtgcagccatggcgacgagctcggggaatatgcgacgcagggacgtcatgaaatcacagggaaaaagagatgcggccatggaagctccaagccggcgcggcactggagatccggccggacgccatggagatggggccgagaagggggcgcggtctgagccaacagagggagcgagggcgagcagagggatggccggtagcgctggaagaggccgagcgccat

SEQ ID NO: 35957 - DNA, 154 bp, Zea mays
  Clone ID: MRT4577_132793C.1
tctctagcacaatggattttggaacaagagaacaaggagctgaactccattaagttccatcaccatgcttatgcaaagtgtgaacagggggggtgggtattaattagggacaaacgagaagtctcgcttggcaaacacgccaaaagatatatga

SEQ ID NO: 35958 - DNA, 706 bp, Zea mays
  unsure (1)..(706): unsure at all n locations
  Clone ID: MRT4577_132794C.1
aattcggcacgaggctcgcccctccgccccccagtccgcctcccgcgatccccttctcccgccgctcgtcgcccgcctctttcctccccactccccgcagagctggtgtgcacttctattacattacatgcatgcggagtaatttacctacggcagattgctgactaaaggcgctgaagtaaaccttccctcagtatacttcctcggatgtcacgtctgcccctctgcgtcatttatggctcagaactcgtcccgtcttcaccgcctcctcacattactagacactggttcgacacaaacaacgaggtttgcggctgcacgccaaattggagaaatcgccaagtcccacccccaggagctgaattcgttgctaaaaaaggtttctcaatatattcgtagtaaaaattgggacacgagggttgcggcagcccatgcgattggtgccatagcagagaatgtcaaacacacatcattgaaggacttgtatgcttccgtgcaagcagaaaaacatgcttccggtttctctgatggaagtgatgatgctggctcagcattgccacggactgatagtgcagcaacatctgatcttgcttttggaagctntgcataggcagggtattggaatttggatctcctctattggcatcaggtggacaggaatacgacattgctgatagtggcaagatccagcagagcgtctagctcg

SEQ ID NO: 35959 - DNA, 2967 bp, Zea mays
  unsure (1)..(2967): unsure at all n locations
  Clone ID: MRT4577_132795C.1
ccccgagcctggtcggttggcggggagggttcgagtctttgactgcggaaggataggcgaccggcgaccgcaagcaggagtagccatcatcaagcagtcaggaaagcaagcgagaagtcgtcgcgctactcttcgttgcctatatactccgcctccgcctccggtggttggttggtccctctaccatcgccagatcgcctgccttccctgctctccccgtcggctcaccgcgcgccccagatctccccgtccaaaggggacccaagcatcgcatcggatccgtcctgcgctttgccgccggcaactgcagaagcgaccagccatggcggcagccttcgatgcttacaccgacaagaacgccgtcttccgccgtctcaaggccaagcccgagaacaagatgtgcttcgactgcaacgccaagaaccccacctgggcctccgtcacctacggcatcttcctctgcctcgactgctccgccgcccaccgcagcctcggggtccacatcaccttcgtcaggtcaacgaacctcgactcatggactccagaccagctgaagatgatggcattcggaggcaacaaccgggcacatgctttcttcaagcagcatggatggaccgatggcgggaaggtcgaggcaaaatacacatcaagagccgctgaactttacaggcagatgcttaccaaggaggtcgctaagagcgccacgaccgataatgccctgccatcgtcacctgtcgcatctgaggcttccaagccgccatccgatgacttccctgaattcaaactcccagatgtgccagcaccaccggcagaggatctgaatgggaagcatgagcccaagtcccccaaagctgctcctcgttcaccaaaggccgctactcatcccacctttgccacttctgtgaagaagcccattggcgcaaagaaagttggaggacaagactgaagggcttggtgttcgaaagcttactacaaagccaaatgaaagcctgtatgagcagaaaccagacgagcccaaacctgctgtaactgccttggctgcttcaactaaaaaaggtggtcaggccttgcattcacgttttgaatacgtggagaacgagccatcatctgattcgagaactgggggatctgtatctcgtgtgagtggccatgtagcaccaccaaaatcatcagacttctttcaagagtatgggatgggtaatgggttccaaaagaattctagcaatgcctcaaaaactcaggttgaggaaacttatgaagcaaggaagaaattctctaatgccaaggcgatctcgtcatctcagttttttggtactcaaaacagagaagagaaagaagctcaactatcccctcagaaatttgcgggctcttcatccatttcaagcgcggatctttttggccgcaatgatgcggacaactctaacctggacctaagcgctgctgatctcatcaacagaatatctttccaggcttcacaggatctgtcttcgctcaaggacatagcaggggagactggaaagaagctgacatctctggcctccaatttcatcagcgacctggacaggatcctttgagcagggcagggcgagaggccagcagcagttttgctatcctcctacctgcaccacagagtatatcccttgtggtgcatcaccgacagttcttgcacagttacagctctgtagagggatagtagatgattcttatcatgcgttttgtattctgacctttgcttgttgtgagacccagtccacatgaagatgttttttttatttgttattgatactttcacgacgttgaagcatacaattatatgcatcaaggttgtttaacaaagattcagcttgtaagaaaatgaattaattcacgctaaacattattacttagacataagaagtaaacacaataaaaaaaaacaaaaataattaatttaatgtacttctctatgccttatggtgcccattcccctaagaatgcacttgaggaatatgcaattaggccaaggcgtcccacatagacgaatgtagttgtcggaagctatggtggatacaacacaagatgggctcttttcttagtatgaacaggcctatcttcttgaacaatatggaaggaaggctccaatgaaagtgcataaatctgagagggagaaacgtaagaaggacaagtagaatgatctcttttgggagctgggaaccatgctaggttctttgattgggctgccatcattttctccgtcgacgaagcatcgtctacagttgtgtaccaaagacgaagtggagtttgcaaaatgaaagatggagagaaaatactccaaggatgagtgtcattgcttgctgacatgtgatttcaagatagtaatataatttgatggctcctattgcttaactgtacaaggatgactgttccatttgctgacatgtgagagtacagtcaccattttatgctgctgattttcatgggttgcagtgatttgttcctgtgccacagttttttttaggatcgaattaccatcgtttttacatttgtatggagctatgaatcattttccgtcttgattgcttgctttcgactgcagctgcaccaacaaacattgtatatggtgattgctttcactcaaggacatagctggagagactggaaagaagctgacatctttcgcctccaatttcatcagcgacctggatagaatcctttgagcaggggaggccatgccagcaaagcatttttcctaccttgcaccagaatttcccttctagcttggattgggtcgcggactccccggtgcatccccgacagtttaaagtagttcttgcacagctacagctctgtaaaggattcctatgacgggtttggattttgaaatttgttgtgagaattgaaggtatttttattcgtgaatacttcccaaaaaaaagcccccccggaaaaaaaaaaaagagnagggcggactattactagtgagctaga

SEQ ID NO: 35960 - DNA, 488 bp, Zea mays
  Clone ID: MRT4577_132796C.1
ggggggcaaaaaaaacccaacgggggtaaaaaaacagggggcccgaatccaaagaaattttccagcaaaggggggggactataaccccttaaaaccctttgggaaaaaaaccgggggctttaaatataaaaggcgggcggttatacccgccaaaaaaaaaattttaaccgattggccggaacaatatcaacatatgttgggaaaaaaaccaacagggggggaaaaccaccaaaaagggaacgtttaataccacaagaaaactattgggtggaaactaaattaaccagccggaaacaaaatgtttaaaaaaggaaagccattaaatcccaccctttaaaaaaaaaggagggcgggccatccccccccttaaactcactccctgaatacttggagaacaaaactgggctgcccccccacactgacagggggggttttttgccttcctttaaaagaaaagggtaaagggacttcttgggaagggggggggg

SEQ ID NO: 35961 - DNA, 402 bp, Zea mays
  Clone ID: MRT4577_132797C.1
aaataaaaaaaaataaaaaaaaaaaaaaaaaaaaaataaaaaaaaaaaaaaaaaaaaaaaaaggaaaaagggcggccggttttggagggcccccgcttttcgagcgcctccgtgtggccgccccttcttttcgatcggggcccccttctttagtgtcccggccgttggtttccctggccggggcttgaaaacccctggcctggcccacccttgtcgtttcccagcttattcccctttcggcacttccccttttagccggttggcccagtaccgatgtgccttcccaccggttgcccttccctaatggcgcccgggccgccccctcgttgcggcccttcctgtcggggggttttggggcccccccctgtggtgcctcctcacttgggggccgcttaaggtccc

SEQ ID NO: 35962 - DNA, 726 bp, Zea mays
  unsure (1)..(726): unsure at all n locations
  Clone ID: MRT4577_132798C.1
cattgggtacctcgagggccggccggannnaatnnnnnnnnnanaaaaaaaaaaaaaaaaaaaaaaaaaaaaaaaaaaaaaaaaaaaaaaaaaaaaaaaaaaaaaaaaaaaaaaaaaaaaaaaaaaaaaacctttttggggccccaaataagggagggttccaaagggggaaggatttttgtggggcttgcccacccggcaagggggaagaacaaattttgccctttaaaggttttggccccaaaaaattttcttggttttggaaaaggaacccctctggtttcccacttaaatccgaaaaaaaagggttcccccaagggttggttcccaaaacttcccccgggttggggtggttttttgttaaacggggaaggggtttgtggggggccaacccacccggatttatctttttggggggtaactttcggaccccggattttccaaggtttccgggccccccaatttccaaaaataaataacaaaaaagtgggttggaaggggtaaaaaaaaaaaaaaaaaaggggccccccaacccccattttttgtccccttaaggggggttaattggccccttggggaaaaccggggcaaaacttgttcccgggggaaattggtttcccctcccaattcccccaaaaattacaacccgaaactaaaaggggaaagcccggggggcccaaggggggggcttaccccacttaattggggtgggccccctggcccgtt

SEQ ID NO: 35963 - DNA, 1830 bp, Zea mays
  unsure (1)..(1830): unsure at all n locations
  Clone ID: MRT4577_132799C.1
atgganctgaggccggcgtacgatatatggtggcaaataatctaggcaaattcataaccattggtaacttcagcatgctcgaagatggaggcacttctcttagttttggcaaaacatgtgagagatgtcaactaaaatgtgtgatacgggttcacaacccccagttctattggaagattgcaaccgaaggagaccctggttttgcatattcctacatcaatggttatatctcgtttgttgataaaaaagaaggcatccagaatattgtcgagattattattgctaacagaggtgaacggaaaaggttgagcagtagccgcgccagcaataaaagtggttatataaaaaagggctggtggacacccttgtttaaaaaaaatggagctgcaatggcaaaatatgttttgcatgaagtcttaaggagaaacactatatcaaaagctcgtaaaaatatctctgcacactatgacctgagtaatgatttctttgctctttttctggatccgacgatgacttactcttgtggtattttcaaggcggaagatgagagtttagaagcagcgcagctacgtaaacttgacaatctaattaataaggctaaggtggatccggggcatcatgtccttgacattggctgtggttggggctcattggcaatacgtttggtgaagagaactggctgcaagtgcacaggaattacattatcggaggagcaactgaaatatgggaagagaaaggtgaaagaatttggattagaggaccgcataactctcctgctttgtgattaccgtcaaataccgaacggccagaagtttgataggattataagttgtgggatgcttgaacacgttggccatgagttctacgaagatttctttgcctcctgcgagtatcatttggccgaacacggcctacttgtcctccagtccatcgcggtcccagaggaactgtacgacaaaatgaggacgaagcctgacttcctgaaggaatatatcttcccaggtggctgcataccttctttagctcggattgcgtctgccatgtctaatgcatcaaggctgtgcatacagcacgttgagaatattgggtaccactattaccccactctgattcactggagggagaactttgaggccaatgaagaaaaagttttggccctaggatttgatgaaaaattcatccgtacttgggagtactatttaaactactgtgcagctatgttcaaatcacacatgggtttagattaccagatagtgtttgctcgcgcaggcgatgcaaagttgccgagctatgtcgccattgcgtaaatggaggaggatgtcgatgtttatgtgagacagaacattgtattttctttgttagttaggaagtccaacattcgccaaataaaaatggtttgctagagatgactcgagggtgagacagtgtcaaagcctcatgatgattaggttatcaacttccgaaagtttttcttggcggggcaaaggtttcctatgatcctttttgtattgaatgtgataaagaagtttaaggttaagtttcatcatttgaatcctttgtgattttctttttatttttttgtgtgggtacgcaaagtctcaaaaggtagaagttaactagaacatgtttgtgcatacgtattgggtgcacattcaaccgaggaaggtgtctgtgtgtggtgtaaccttcacatgtcagttcagggtttataccttttgttggcttgttggctatttgttgaaaaacagtgctataatgtgcagtgttcggcctccggtttccattcaaaaaaaaaaaaaaaaaaaaaaaaaagaggaaaaagaaaagaag

SEQ ID NO: 35964 - DNA, 321 bp, Zea mays
  Clone ID: MRT4577_13279C.1
agtctccacaccccaacttctctcctgaaaaccgcctacggtcaggacccgagacaagatgaccgcctacatcggtgctgcaccgcagccggctctcgcttcgttccgccacgaggaggaggaggaacagcaatcaagacgccgccgaagaggtgtaccacgtggacgatgtcaacgagggcaacggtgacggccgtggccacggcggcgccggccaaggagaactgaacgccagaggcaactgacacaccgccgaggacgccaagctcaaggaactcatcgcgcagttcgggccccagaactgagacctcatcaccgaaa

SEQ ID NO: 35965 - DNA, 263 bp, Zea mays
  Clone ID: MRT4577_1327C.1
aagacacgtccacatgtccgccattcatttttatcatcagatgactgagagaaagatacgtgaacattaaaattcaatttgctaactctctctgcatatacaccctcagactctgtactcatgtacatctctctacatgctcgttcatcaatacaacttcattatctactaccataattacattgatatactataatcatatatcatacaatatatatctactaaaacatgaattactattattaaaatacacaataacatat

SEQ ID NO: 35966 - DNA, 380 bp, Zea mays
  unsure (1)..(380): unsure at all n locations
  Clone ID: MRT4577_132800C.1
ccggcactccctgcttccgtttcctcggacccaccaccgcgcccccattcctcagagctcagatgcagccgcagcccgccgagatggaccccgccgtcgacgcctccgcctccaccgcgcaggctgactccaacgccagcgccgccgtccccgcacccgatccttccccgccccagccggcgccggaggctgagacggtcgatccgccgcccccggggggggggccagcgcccaagacggtcacctggagcgagaagctcacgtccgagtcgtcgacgcacgtgcacgccgtcgctgcgggggtgtccagcccagtcgtgtcccgcgtgcccgcgtcctcctcgtctttnggcgcgttgctttctgtttcggggaggctc

SEQ ID NO: 35967 - DNA, 224 bp, Zea mays
  unsure (1)..(224): unsure at all n locations
  Clone ID: MRT4577_132801C.1
atgtccncaccagggtcggagctgaggacgggagganaccatcccccctcccctcaaccggggcttgggttaccccatctgatcccgctgagtccacccacccacccgcccggtgggtccggcgggtctcgtgggactcgggtccgcgcgaccacgaccaccccgcgtcgccgcggtcagcatgggcanatcagtttttttgggcggactcgacaccttcctct

SEQ ID NO: 35968 - DNA, 1514 bp, Zea mays
  unsure (1)..(1514): unsure at all n locations
  Clone ID: MRT4577_132802C.1
aaaaatcctggctccctttgtcaatcgacaaaaatataacgcatcaccaaccgcttgtttctcctcgaccttctggtccccctaacttttctaggcccttgataatcaagttcccacattagttctgccacatttaaatgtttgacatgcattcacagcggcagtntttctccnnnnnnnnacatacctgtcatgattacaacattgacaggaatggcacacatttctgacacgtatgcaggcctgtgggtgtactgtgtcaaaagcttcagctaaaaggatctgaaacaggagaagaatcctagcgacccagcctgaactcgagatgtggaaactgatgtatgtaaccggaaagaacaccacttggtgtcttcacggttgcaactcacgagcactagccaaggcttcttgaagactggctgcagccttgtcgtacattagaaaacccatgaaccagaactcatgcccttcaacggaaacgacctgaatgtacttctcagcgggatttactttgcttactgaaggattagctgctcttagctggtgaagaggaatgaccacctgtgaagaggaaagcgaagaaaacagtacaaatgaacagacatctgtttaattgaagtcctactgggaattgaacatcaaaacggatcaagcaacaactggaacaaaagatccaagttaggtgttgacaaattagcaagcatcttcttaagtgacagtcagtgcttcagaattcaacctggtttcatccatgtatagggaaagcaccatgaccatgtcctcattagagagatggtaacataagccttgtgacttcgtgaccataaaatcaacttgtatttaccagtgccacttcttttatgattcaggcttgtctctgccgcaagcgtgcaaggcttccaaactaaccagactgcagttgtcacctcctgcggttggtgtgtgatagctcgctttgcagaacagaatgggagtgaagagcatcaccattctcatcctcaaatccaatgacatttttaccagtgaccctaaaaaggtttacctatcctcatgtagtaagtcaaatttataaatctatgtaaaactaacaatgatgaactatagaaatcaattcagtccaaatatgataaactgaggtgcaaaacgaagattgattttgatagggataactagatgctaagaagggagtaaccctcgtcttgtagtaactccattcagttttatttccagctttgtatgacagaggattgtcactgcagaaagcaatcttcgctgtagaaatatacaagactcccatgacaggacctgctgatgttgagagatagcacgcatagcatattttcagctcctcgtctggaagaacctcgaaggtctgcttaaatattttttcatagcctccttctgctaaaactttagtcccttgtgctaggcgtcccatagcagcttcagtaaaactaggtccagtcttgactgttaaatacaatggcatattgtcaggcctagggaaagcccga

SEQ ID NO: 35969 - DNA, 767 bp, Zea mays
  Clone ID: MRT4577_132803C.1
gccaccaaagctcccatataaatatcaatggtgtgaatgcagagaaacatttaagatcctggctcccttcgtcaatcagacaaaaatgtaacgcatcaccaaccgcttgtttctcctcgaccttctggtccccctaacttttctaggcccttgataatcaagttcccacattagttctgccacatttaaatgtttgacatgcattctttctccacatacatctcatgattacaacattgacaggaacaacagacatttctgacgcgtatgcaagctagtgagtgtaccgtgtcaaaggcttcagctaaaaggatctgaaacaggagacactcagaagctaaggaatccttgcgacccagcctgaactcaagatgtggaaactgatgtaaccggaagaaacaccatttaccccggtgtcttcacggttgcaactcacgtgcgctagccaaggcttcttgaagagtggttgcagccttgtcgtacattagaaaacccatgaaccagaactcgtggccttcaatggatacgacctgaatgtacttctcagcgggacttaatttgcttactgaaggattagctgctcttagctggtgaagaggaatgaccaccttgtagtagctccattcagttttatttccagctttgtatgacagaggattgtcactgcagaaagcaatcttcgctgtagaaatatacaagactcccgggacagggggggctgatgttgagagattgcacacataaacattttttccgctcctcgtttg

SEQ ID NO: 35970 - DNA, 415 bp, Zea mays
  Clone ID: MRT4577_132804C.1
ctctaacaataacacttttgatctgtaaccagcgttccaaacttgggacatgtttttctaaagcacaccctttggtgttgaattcacccaaaacacctattgtcgaggccataataaaaaaacataaacactaccctgcatgggtaatttgttcaggcggaggcctacttcttgatctttttaagaccttgacagaaaacaccgattttcttgatattggccccattcttgttaaacgtaaaaaccacagacgcgttatccttaatggtctgaccaacaaaattcctaccgcctacattttgttaaagagaaacttgactgcaccctttacacttttcttgaacaaagcctttttctttggctcccacacagaagtgaagaacattgatgtattttagacaacctagtacacaaa

SEQ ID NO: 35971 - DNA, 335 bp, Zea mays
  Clone ID: MRT4577_132805C.1
tgggaaaaatttaaaaagttggtttaacctaaatatgcccccccccatattatttatgccttactgtggataaaaaccccttattcccccgctaccatatatgaaaaaacattccccccccccattaaacctccccagcaaccctaaatttgcttggtccagccccataatcttttaaaaaccctgcccaccaaggaaacttttcaaaccacttggaaaaccccgttaaaacccccccccccctttttgttgtcccccttaaacccctttttattttttaaccccccttaaaaccccacaattccctttttttaaaaatttccaccccccccccc

SEQ ID NO: 35972 - DNA, 936 bp, Zea mays
  Clone ID: MRT4577_132806C.1
ggtccggattcccgggtcgacccacgcgtccgcgtgcgagctgcgactttgcttaacacggaactgaaacgggttgacccacatcacaattcacaacaccagttgccaaccccacgcacgctctgcgacgcgcgagtcccccttccccactccctgcttccgtttcctcggaccccaccaccgcgcccccattcctcagagctcagatgcagccgcagcccgccgagatggaccccgcctccaccgcgcaggccgactccaacgccagcgccgccgtccccgcagccgatccctccccgcccctgccggcgccggaggctgacacggtcgatccgccgcccccgccgcccgcaccagcgcccaagacggtcacctggagcgagaagctcacgtccgagtcgccgacgcacgtgcacgccgccgctgcggcggagtccagccagtacgtgtcccgcgggcccgcgtcctcctcgtctaaaggcgccgtggaggcgatgagggagacgctgtcgaggtgggggaagtcgtggggggagaccaccaagatggtcgagagcctcagccgcgacacgtggcaacacttcaagactggacctagttttactgaagctgctatgggacgcctagcacaagggactaaagttttagcagaaggaggctatgaaaaaatatttaagcagaccttcgaagttcttccagatgagcagctgaaaatatgctttgcgtgctatctctcaacatcagcgggtcctgtcatgggagtcttgtatatttctacagcaaagattgctttctgcagtgacaatcctctgtcatacaaagctggaaataaaactgaatggagttactacaaggtggtcattcctcttcaccagctaagagcagctaatccttcagtaagcaaattaagtcccccggagaaatacattcaggccc

SEQ ID NO: 35973 - DNA, 543 bp, Zea mays
  Clone ID: MRT4577_132807C.1
ctcgggccggccggatttgatcgctatccatgattcgcaaagattccacttccaaggcttgggacacatcgataatttgtacagctcgattaggagttggtgttcatttcgtttgtacagctccctgttgcttggattgatctagatgtcgcgttacgggtcatcggacgaactagggcatgggttcatttcatcgaatacctggtgagcattgcaaacaacgcattttttgttgcagggaaaggtggaagtattcaattcgagttttttttggtgctaggctgctacgttctctgcgtgtctcacttaattgattgtcttaagcccttacaaacttgttgtttttcgaagtattactatgtgatcctaaagttattagtgggttgtcctcagcaatttacttttttatagactatgtctccattgtgctcattcactttcactgacacataaaaaaatgttgttcccttatcacttatcagctggcagtacttctggcttctccccatctatatcagcgctccccttaattgctaacctaag

SEQ ID NO: 35974 - DNA, 846 bp, Zea mays
  Clone ID: MRT4577_132808C.1
cattgggtacctcgaggccggccgggataaaaccccggccgcgctcgccactgcccaccggcgacggaggaggctctccactactcactccatttctgtgagatcctcgccgcgcaagaagcgaacatcgcgtctgcctgcaggctgcacccgcgtgccgcgcttctttccgagtcccgacacccgaggcccgagcgcctgccggctgccgccaacttctgtttctgacgagtgtcggtgacctcgggtcgggttcgaccttcgacggggaacggagtgaggtcagctgccgacgcaatgagcgcctccgcagccccgacccccgcagcgggagggcgattcttcacgggcttcacaagactgtgcaagggcctcgccgtcgtcctcttactcgcccacattttggtccacctcttcccttcagccgccacatatctcacgctgataccagccaggacaatcccttttgcttggaacctggttaccgctggttacattgagcaaacaattccaggggtgattgtgagcatagttggtcttcttctatttgggaaggtgttggagcctttatggggagctaaggaactgctcaagtttatttttattgttaatctctcaatttcagcgtgtgtcttcgtaactatgattgtgctatactacataacacaggaggagagctacctctacacacctgtttctgggttttatggagttctttcagtactactggtgggcatcaagcagattttatctgatcaggagcttaacctttttgtgttctagtgtactgcaaagtggattccatctattggtgcatttatctcggttgctgtaagcttcttcatg

SEQ ID NO: 35975 - DNA, 2409 bp, Zea mays
  Clone ID: MRT4577_132809C.1
gaggatcaccaacccgggcccggagggtcaagtggagagcaggggaggaggggagaggaaagggaaaagcgggtcgcgagtcgcgactcgcgagtgcccgcttttgctccaatccaatcggtgccgcctcgggcgagatccgctccgcgtgccccgccgctgccgaggtgagctccgaacgcccgccctccgccgttgccgagatagagggtgtcgtccccactccccagcatctggttccacggagagttgttgatcttggatacctgatccgcaatttggggctgattgagtcacttgaccttttcaacatctgccccgttcctgctgccttgctcactataagaggctggcctggttccagagatgattctattgtgagtggagatggattctgtgagaagttggttccagaagttccagccgagagacaaatcgaagaggccagtggtggctgccagacatggaaaagatccaggaaagcccccgatggatgatgccccttctagtgcgacgaaacagagggtcgccgctgcaaaacagtacattgagaaccactacaagacccagatgaagtccctgcaagataggaaagagaggcgctggatgttggagagaaaattacaagatgccgaagttcctgtagaagagcaaaataacattcttaagcatttggagaaaaaagagactgaatatatgcgcttgcagagacacaagatgggagttgaagattttgaacttttgactattattgggagaggtgcattcggagaggtgcgtctttgtagagagaaggcctctaagaatgtttatgcaatgaaaaagctcaagaaatctgaaatgcttcgtaggggccaggtagaacatgtcaaagctgaaaggaaccttcttgctgaagttgatagtgcttacatagttaagctctattattctttccaagacgaagagttcttatatctcatcatggaataccttcctggtggggacatgatgactttacttatgcgcaaagacacactaacagaagatgaagctagattttatattgcagaaactgtgcttgccattgagtctattcacaagcacaactatgttcatcgggatatcaaaccagataatcttttgttagatcgcagtggtcacctgaagctttctgacttcggtttgtgtaaacctttggacagcagtaattttcctaatttgaatgaaccagattatacatctggaaaagttaccaaacctttgcctgataccacttggttaagcaacccttctgcaccgaggcgtacacagcaggagcaattgtcacactggcaaaagaaccgccgaatgttggcatactcaacagtcggcacacctgattatattgctccagaagttctactgaagaagggatatggaacggagtgtgactggtggtcccttggtgctattatgtatgaaatgctagttggttaccctccattttattcagaggacccaatgtctacttgcagaaagattgtgaactggagaagtcacttgaaattccctgaagaggcaaagcttcctcctgaagctaaggctctcatcagcaagcttttgtgtaatgttgagcatcgacttggtacaaaaggagcccatgaaataaaagcgcatccatggttcggaggtgttcagtgggagaagttgtatcagatgaaagctgctttcataccagaagttaatggagagttggatactcagaattttgagaatttcgaggagattggaactcaaattcaaagttcatccaagtcaggcccttggagaaagatgcttccatccaaagatgcaaactttgttgggtatacgtacaagaactttgaaattgtgaatgatgatgaagtggcaggaattgcagagttgaagaaaaagagttccaaaccaaagcgaccaaccatcaagacaatgtttgagaggatggacgaagaggagcctgttcaagggagtttcttaagtatgttgcccccggagggccaaccttcgtcccactccagcgttccacaggaaaaataccaacctcgccgtaaataggatatggaggtttggaaagtaaagcataggaaagtaaaacaagaaaaaaaatcgtctgctgccttttgatctgttccctgtctaggttttgtaaatcctaaccaatgcgttctttagtcaaatgcttaaaaaaatctctccggcaaaatagtgtattgcatttgatgtgaacatcagtgttcggctaaagatcaccggccaaatagtgtatggcattggcatctgatgtgagcatcagtgttcgctgtatattgtgttaccgttctaacttccaagtgatgtttctcagccatattggcaaaaaaaactgtaaactacataccaggagcagacaagctgtgatccacgtgtgct

SEQ ID NO: 35976 - DNA, 719 bp, Zea mays
  Clone ID: MRT4577_13280C.1
ctctctctccccgcgcagtgaaccctagcattcccgatccagatccctcccctcgccgccacccacccctcccctccctacctcagattgtctcccctctccccactctcagatccaactggcccgagacggaggccgtcgtggacatggtcgccaccaccgaccgcgagtgggggtcctcgtcctctcccttgtcgtccttagcggcggcatctggctgagctaccgggccgccaccaccgactgcgagtggttcctggagcggccagtcatcgcgctagaggcgctgcgcctggtgctcttcctcacggggctcgcggggtccctcttccgcgtcttcatcatcttctccttcgtcgtcaccaactgcagccacgacgttacggccgtgcggcacccgccttcagatccctccgcccactcgtgcccttgctcccttctgcctgcggggctgcgcccctcgtgctgctccccaacgacgcgggtaggcgcgcgggcttgtccaagtgtcgggcgaccggtcgtggtggtacaggcatcgttgagagggggccggaggagccatcttcctggccatcgcctactttgaccgcttcttcctctggcgatgcatcgatgtaatgaatcaccgcacaaccgttgtaaaacaaatttagcctctctgcttcttaggaacaggaggatgatgtgcttgtgtgcatgtacaggactgccatgcc

SEQ ID NO: 35977 - DNA, 397 bp, Zea mays
  Clone ID: MRT4577_132810C.1
atccattccacatttgtaagaggtgaagaggcccacctggtcataagtccatcgcatctttcatgtttccttactaagggtgcactctgacaggggaattgaagagcccatgtcctgtgtggaatctcaagtgcacattttcgagtgggcgcgatgtaacattgtacatgctatggatcggattatttcatatcttatctgggctactattgataccaacggacatgagatcggcattccttggggcgacctacgtcctcatgttgaatgcgagtcctatgacccacgcaaggatgaggtccacacccgttgtgcttgcttgaatgccgatcccgaatccacacgacataagatccttattgatgaccggaacactgtgcggggtcctaatgacgag

SEQ ID NO: 35978 - DNA, 939 bp, Zea mays
  unsure (1)..(939): unsure at all n locations
  Clone ID: MRT4577_132811C.1
ngaagagtcggacagggtctctctctctctctctctctctcgtactcctctcacactcttcacacggtttgccttgcccacgaaaagacaaccaacccggggccagggggcaagcggagagcagggaaggaagggagaggaaaaggaaaagcgggtcgcgagtgccccccaccccccgcttttgctccaatcggcgccgcctcgcgcgagatccgctccgcgtgccccgccgccgcgctgctgccgagatagagggtgtcgtccccggcatcgggttccacggagagttgttgatttgggtacctgatccaattgggggtggattgagtcgcttgaccttttcaacatctgtcccgttcctgctgctttggtcaccataagaggcttgcctggttccagagatgatgtcattgtgagtggagatggattctgcgagaagttggttccagaagttccagccgagggacaaatcgaagagtccagctgtgtctgccagccatggaaaggatccaggaaagcccccaactgatgatgccccttctagtgcgacgaaacagagggtcgccgccgcaaaacagtacattgagaatcactacaagacccagatgaagtccctgcaagataggaaagagaggcgctggatgttggagagaaaattacaagatgccgaagttcctgtagaagagcaaaataatattcttaagcatttggagaaaaaagagactgaatatatgcgcttgcagagacacaagatgggagttgaagattttgaacttctgactattattgggagaggtgcatttggagaggtgcgtctttgtagagagaagacatctaagaatgtttacgcaatgaaaaaactcaagaaatctgaaatgcttcgtaggggccaggtagaacatgtcaaagctgaaaggaaccttttctgctgaagtgata

SEQ ID NO: 35979 - DNA, 344 bp, Zea mays
  Clone ID: MRT4577_132812C.1
cccacgcgtccgcggacgcgtgggcgtcgaggtcgcgtagacgtgtagcgcccggccctgctgggaccggaaggtccgatgaggaggccatggatacgtgtgtttgtttgctgcgattacgagttctctctgcgcgtgcagtccggatgctttgcgttcatcgatcagtttttggctcttgcagaattcacactagtagcatatgcgtcagatcagatcgatgaagaatcagtatagttgtgttagtagtctgatacatgtaaaaactttagcatacgtgcttgattcttgattgttatatactactatctgatttggagggttttcctacttgtttactagtt

SEQ ID NO: 35980 - DNA, 2447 bp, Zea mays
  Clone ID: MRT4577_132813C.1
ggtgtggctcatagggagagaggggtcgggtgggcgctgcaagttgttcaggtgcctacgaaccttatctccagagggacagctgggggcaaaaacatagtatattgggcttgccacagcttgtctgctcctggtatcataccagtggtatgtagtatacagtagtttttgccaatatggctgagaaacatcacttggaagttagaacggtaacacaatatacagcgaacactgatgctcacatcagatgccaatgccatacactatttggccggtgatcttttttgttttaaacatttggctaaagaacgcaatggttaggatttacaaaacttagacagggagcatatcaaaaggcagcagaagattttttttttcccacttgttttactttcctatgctttacgttttgaacctccatatcctatttacgtcgaggttggtgtttttcttgtggaacgctggagtgggacgaaggttgcccttcctttgggggcaacatacctaagaaacttccttgaacaggttcctcttcgtccatactctcaaacaatgtcttgatggttggtcgctttgatttggaactctttttcttcaactccgcaattcctgccacttcatcatcatttacaatttcaaagttcttgtacgtatacccaacaaagtttgcatctttggatggaagcatctttctccatgggcctgacttggatgaactttgaatttgagttccagtctcctcaaatttctcaaaattctgagtatccaattctccattaacttctggtatgaaagcagctttcatctgatacaacttctcccactgaacacctctaaaccatggatgcgcttttatttcatgggctccttttgtgccaagtctatgctcaacattacacaaaagcttgctgatgagagccttagcttcaggagaaagctttgcctcttcagggaatttcaagtgacttctccagttcacaatctttctgcaagtagacattgggtcctctgaataaaatggagggtaaccaactagcatttcatacataatagcaccaagggaccaccagtcacactccgttccatatcctttcttcagtagcacttctggagcaatataatcaggtgtaccgactgttgagtatgccaacatccgacggttcttttgccagtgtgacaattgctcctgctgtgtacgcctcggtgcagaagggttgcttaaccgagtggtatcaggcaaaggtgtggtaacttttccagacatataatctggttcattcaaattagggaaattactgctgtccaaaggtttacacaaaccgaagtcagaaagcttcaggtgaccactgtgatctaacaaaagattatctggtttgatatcccgatgaacatagttgtgcttgtgaatagactcgatggcaagcacagtttctgcaatataaaatctagcttcatcttctgttagtatgtctttgcgcataagtaaagtcatcatgtctccaccaggaaggtattccatgatgagatataagaactcttcgtcttggaaagaataatagagcttaactatgtaagcactatcaacttcagcaagaaggttcctttcagctttgacatgttctacctggcccctacgaagcatttcagatttcttgagctttttcattgcataaacattcttagaggccttctctctacaaagacgcacctctccgaatgcacctctcccaataatagtcaaaagttcaaaatcttcaactcccatcttgtgtctctgcaagcgcatatattcagtctcttttttctccaaatgcttaagaatgttattttgctcttctacaggaacttcggcatcttgtaattttctctccaacatccagcgcctctctttcctatcttgcagggacttcatctgggtcttgtagtggttctcaatgtactgttttgcagcggcgaccctctgtttcgtcgcactagaaggggcatcatccatcgggggctttcctggatcttttccatgtctggcagccaccactggcctcttcgatttgtctctcggctggaacttctggaaccaacttctcacagaatccatctccactcacaatagaatcatctctggaaccaggccagcctcttatagtgagcaaggcagcaggaacggggcagatgttgaaaaggtcaagtgactcaatcagccccaaattgcggatcaggtatccaagatcaacaactctccgtggaaccagatgctggggagtggggacgacaccctctatctcggcagcggcggggcacgcggagcggatctcgcccgaggcggcaccgattggattggagcaaaagcgggcactcgcgagtcgcgactcgcgacccgcttttccctttcctctcccctcctcccctgctctccacttgaccctccgggccccccggccggcctcgag

SEQ ID NO: 35981 - DNA, 280 bp, Zea mays
  Clone ID: MRT4577_132814C.1
atcgttgccctgaccactactgcttctgacaagatcggccgttccgttcccgctccaggccagggtgttctcaccacagctcgcgagaaccctggcaagttcccctcgcctcttctcgacatcaactaccgacgccgccagatcgagcgtcgcaagaagactatcaagcaatggcaagagtctgagctcgagtatgttcatgacgatattgatgctatgaaggctcagggtgcttcctttgacgagaaggactatgccgcggaccgcttcgctcacattg

SEQ ID NO: 35982 - DNA, 622 bp, Zea mays
  Clone ID: MRT4577_132815C.1
tttgaaattgtaaatgatgatgaagtggcaggaattccggagttgaaaaaaaagagttccaaatcaaagcgtccaaccatcaagacattgttttaaagtatggacgaagaggaacctgttcaaggaagtttcttaggtatgttgcccccaaaggaagggcaacctttgtcccactccagcgttccacaagaaagacaccaacctcgacgtaaataggatatggaggttcaaaacgtaaagcataggaaagtaaaacaagtgggaaaaaaaaatcttctgctgccttttgatatgctccctgtctaagttttgtaaatcctaaccattgcgttctttagccaaatgtttaaaacaaaaaagatccccggccaaatagtgtatggcattggcatctgatgtgagcatcagtgttcgctgtatattgtgttaccgttctaacttccaagtgatgtttctcagccatattggcaaaaactactgtatactacataccaggaaaagacaagctgtggcaagcatgtgctatgtttttgacctcaaaaaaaaaaaaaaaaaaaaaaaaaaaaaaaaaaaaaaaaaaaaaaaaaaaaaaaaaaaaactcgagaaagggggcccggtacc

SEQ ID NO: 35983 - DNA, 301 bp, Zea mays
  Clone ID: MRT4577_132816C.1
gagatcgcaagaagggttgctgatgaagttcttgaggattgatcctcaagactcagcttcatatgttctacttgccaacatctattcttcagctaacagatggcaaaatgtctctgaggtgaggagagccatgacagacaagatggtgaagaaagcaccaggcataagttgggtagaagtaaagaatcaggttcatcagtttcatatgggtgatgaatgacacccaaaacacgtggagattaatcagtatctggaagaattaacttcagaaatcaagacgcagggctatgtacctgatact

SEQ ID NO: 35984 - DNA, 323 bp, Zea mays
  Clone ID: MRT4577_132817C.1
gcgctatatcacgcagaaaaaagggccatccccccccccatacctcctctttagcccatggcttcgttactgagtgtgcccgagtggtattagtgttccgccgggtgccaaggtgtccatacggatttctagcatatcataataccctagcttcctggcacgtttataccgaggcatatataggtcttgtaattagataaaaagaaggtttggagaatcaggtttatctaaccagtggacatgacattagtaaatcttgagttaattaactttgtactgcaccacatatatggaacactttttgatcggaccaacctaggaac

SEQ ID NO: 35985 - DNA, 375 bp, Zea mays
  Clone ID: MRT4577_132818C.1
acatttttatgcattttgctccagaactacacgtgatttccgatttttatcgcaaatctgggatacaccggtagggacatacatgcatctacaggttttgacaagggccacttggttcaaaccagacattttctacaggacctataacctcttaacaatgcttacctgaaaaggggagctagtccgggtggccagtgtgctatggcccaaatataaaggcagaccttacttaaagcttgcaaggtactatcaaaaacagaagctagccatatctttgctgacttctgaagatagatactcattgtggttcacataccctcaaaaacattaaaggccaagctctacatatctttaagacttcgaatgctaaatata

SEQ ID NO: 35986 - DNA, 326 bp, Zea mays
  Clone ID: MRT4577_132819C.1
tttttatcctagcaagagaccaaaggccggagaggtccttcagcatgcctggtgtcatcgatttacatttttttcacttcctgttcgtccaaaagttttattactttctagaacacctccatgtgttgttttcttaggcaatttattgttcagttgttttttgttgacttctatcttgaactcaatcttactttgtaattttattttttttcttccccaaattttttttgtcaattttttttcttatcattcattttttctatattttttgtttgttaagatattttttcttttctcattttttttttttcctcaatatatttttt

SEQ ID NO: 35987 - DNA, 302 bp, Zea mays
  Clone ID: MRT4577_13281C.1
gcggcataccggcctggttcggagacctgaccagcctacggtcgctggtccgcgggcaggaccagctgaccggcaggatgcccgacgatctgctgcagggacagttccgggcggtagcactgtcgtccaaacagctgacggtcccaaccccgctcgactacgctctcgacgagatcaactctgtagacctctcccacagctagctgacgggcgaccgctcctaccagttcgacgtcgggcggaccagtactcatggacgacctgtcgtgtaactacctggactttgacctgatccatctggt

SEQ ID NO: 35988 - DNA, 272 bp, Zea mays
  Clone ID: MRT4577_132820C.1
gcggccgggagtatcttccaccccatttcaggctagatccacctacgggaccagtcttagcatctattcatcctctgatgagtgatgacgaatagagagtctttttagatcatctacgggacggggcaaccagccaatatttaaattttttctatggttatgttgtgacagaacaccatctcttcctgtgccttggtgggccggttgattttattacatgaattgaaatacactgcttatccgaaaaaaaaaaaaaaaaatttgcaggcccg

SEQ ID NO: 35989 - DNA, 198 bp, Zea mays
  unsure (1)..(198): unsure at all n locations
  Clone ID: MRT4577_132821C.1
gggtggggttttttttnnnnnaaacaactgcatctattactgagcaattactattaaattactaaatgtgtgtgaatacaataaatgaagcagcaaacatgcgaaaaaatgaaaaatgtgtgctacatgtggcaaagaaaaaataaaaagtctagccatacataggaaaaatgtgtgttgcgtgccgaaaaaagcaaa

SEQ ID NO: 35990 - DNA, 250 bp, Zea mays
  Clone ID: MRT4577_132822C.1
gccgctcgagccggccgttaacagacatcgcaaaaaaaacatgccttctcatcccgagaccatcactcttgcacatgggtgttatccggagaatttgaattgttagttgattttgcttgagcccgtctgacttttttttcatttatccacccgggggcgtcttcaccccacctacccatgccgacgaccatggatggggcggggactgcgactgctcacacctcgctccgcgttttcgcgccagcggtac

SEQ ID NO: 35991 - DNA, 341 bp, Zea mays
  unsure (1)..(341): unsure at all n locations
  Clone ID: MRT4577_132823C.1
cgaaanncccggntttcccacccctttggcaaaatccacgccgaacccnccccaccgctactttaacaagcgccttcgcttcctaattccgatccattttcattcaaccggcggcggcattcccgagaggccatggacctgagcaagaagaaaaagtttgtttacttttccggggggggcagcaattttccaaatcttattcttggtatcaaccttacctaaaacaatagcgcaaaaattttcaaattctgtgtccccacccttttttttaaggatttccaacacccttgatgtgatctcaaacatccctttcttttttggtggggtcaccgggcttattc

SEQ ID NO: 35992 - DNA, 408 bp, Zea mays
  Clone ID: MRT4577_132824C.1
caggaaagccgttttgtacccgctttgtaatacagtaaattaccccaacatttatgtaaaataacaaaacgtaatcttgaaacttcaacacgaggggagaattgcagaccgcagctagctcatagtggcaggtagatagattatgccgctagcagattttgaaatgggaaaactttgtgttctcaaacatgttgcgagatgctcatgaagtgctcccgaaggtagattatgccgccttgaagcagttgatcaaatccaacacgttcgcatgcgacgatccgcctttctccacggcagtcttggccttcgccgcaagagctcgtgccctgctcctgcgatcctacccctcgtctcctccgtgcatgatgtttctcaccgccttttgcaccacatgtctggccaccacga

SEQ ID NO: 35993 - DNA, 302 bp, Zea mays
  Clone ID: MRT4577_132825C.1
agtttgtaggcaagcctctttttgggacgcttatagcacttctgcagaatgggaagccggttattggtggcaatgaccagccaatcttgcgagaaatatggattggggtggatggaaaacaaacaactttgaacggacaagaaatatctgttcgcgcttatatacaataagcccacatctctttgaagcagatgctgaagatgcatttattcgtcctcgcgcataaggtgaaagtctcactttatggctgtgattgttatgcttatgctcttctggcttctggttttgtggatattgttgtt

SEQ ID NO: 35994 - DNA, 265 bp, Zea mays
  Clone ID: MRT4577_132826C.1
caagcaacatagaaagtggaatacagtagcaaaaatagagcaacaatggcggtcaagatattttccatccttatgctccttgctctttctgcatgtgttgctaacgcgaccatttatcctcgatactcacaagctcctatagatgcgcttcttccgccataccttccatcaatgaccgactaagtatgtgaaaaagcagcgcttctacactacaggatccagcaagcattcggaacaagcaacttacgcttacacaccggttctt

SEQ ID NO: 35995 - DNA, 527 bp, Zea mays
  unsure (1)..(527): unsure at all n locations
  Clone ID: MRT4577_132827C.1
acccggttgatctatcttttttgtctgtttcggaggcggagccgaccaatccgtttgctacttgatatgatttgacctgaaacagagagaacctgctataatctctatctctgcctctcacatcgatctcacggcatatctgactgaagtgccatattctatcggacatgtgcntcacacgtgtctatttattatgaggtgctgacatactatttatgccatgcttggcatgttacagcggcgtataccatgaggcgctcaactaacacacccacgtggtgtgtcggcaactcgcaccctgtgctgcggaacgtgattggtggtgtgtttagggaccagttctaacgggggagattggttaattgctgagctcattctacccttgatcaggctggttctaacttggaactgctggtgctgcttgtgtttcggctatccatgcgttattactcaagcccctcatgtaccgtttggattttttatcactgcctgaccaatctcttgattgatttgcacagaacacaaaa

SEQ ID NO: 35996 - DNA, 645 bp, Zea mays
  Clone ID: MRT4577_132828C.1
atcgaagaccgccctctcgctctcgctagctccctctcgctctcgctctccaccgccgctagggtttccaccgcccccggcgatgggcgccctcactgacagccggaagcgtctctcggcggaccgctgcctctcggccgaccatcgcctcccctatccctcgttccccccaccgccccttacccctccctccaagcggaccaagctcgccccattccctgaactcgatccctccacctccgccgtcccgcctatccgtccttctccccaaatcatccactccgccgccgcggcatccgcctccttcacgccgggcccttcctcctcttccaccatcgcttccaccccgcttccgcacaggccccgactcccgccgccgccgccattgccgcgcccgatccacggcccacagcggatcctccgcgtcttccggcttggtggggctgcacggacccacgctgccggccgctcgttgttctccccgtcatcacccctgccttgttctctcggattccagcagtacgtagagctcgtcaacagcgtctcccacccggcgccatccactcccgccgccacaaccgatgctacgaggcaggcggtgcccctcgaggtggtggccatcgaggaggaggaggagggggagga

SEQ ID NO: 35997 - DNA, 330 bp, Zea mays
  Clone ID: MRT4577_132829C.1
ggaaccaaaaacatagttttgcgggaaacccattgggggaaatggcggttttttaacagggccccaaaaccgcccccgggtgttaagggggggttaaattgcaggggggggaaaaaaaatggggggcaaattacaggtttaggggggcccaactggccttgggggggggttggcccattttctcctaaaaacccgggggggtttaattttaaccaagctttttgaaacgggacgggtttttggggggaaccccagaccccccgggtggggggtttttttaaaaagccttttaaactttttgtgggggagggggggcgcccccctttataa

SEQ ID NO: 35998 - DNA, 1184 bp, Zea mays
  unsure (1)..(1184): unsure at all n locations
  Clone ID: MRT4577_13282C.1
ttgcctcgctcgaggccgggccgggaagcctatctcctatctccagcagctcctccagacctccacctctctatggcgcgcctgctcctcttcccatcccaagcgtgcgtcgatcctggccgccacctcctcctccacccgccggtctccaggccccgtgctgtccggtctgggcctcctcccgccgcgccacgccgcaccggggtcgtctctcttcccggccgttgcccaccgcccctttgctggaaccaccatccatttcttccttgcagatcatcaaagagaggatgggtcgtttttgcttcagaaaacgtacaagaaatttcttctcaccttcctcgcaaggatgaaaggagaagtgggaatttgcttctgcgattcagtgcactcccatattgcactatggcttggttgagcactgctcaattagcacaatctagtgttggggaaaagctaaatatggtttatgaggtcggggagctgtttgagctgggaattcagctgtcttatctgctcatacttattggactgcttggagctggtacattttttgttatccgtcaggttcttgttcgtagggagcttgatctttctgccaaagagttgcaagaacaagtgagaagcggtgatgcaagtgctactgagtattttgagcttggagcagtcatgctacggagaaaatttatccagctgctatcaaatatctgcagcaagcaattgacaaatgggacagagacgagcaagatcttgcgcaggtctacaatgccctgggggtcagctacaagcgagagaacaaacttgacaaggcgattcagcagtttcagaaggccgtggagctccagccaggctatgtnacagcttggaacaacctgggtgacgcatatgagcagcacaaggacctgaaatcggctctcaaggccttcgaggaggtcctcctctttgatcccaacancaaggttgcaaggccacncgtcgatgacctcanccgctcgtgagcatgtacaanggtgtgcctgtaaaatccgaaaagcgatagctattctttttggtggtaaatcatgcatctgctagtccccagaatanccgntggttatttttgaacggtncatttgtaaacatgatgagatgtgtagtancattggaaangtccctgaaaaanggcngttcntaaaaaaaaanaaaaa

SEQ ID NO: 35999 - DNA, 425 bp, Zea mays
  Clone ID: MRT4577_132830C.1
ggaatcagcgaaaaaaattatcattgatcaatgcacggaggacacaaaacaagaaaaaaagggcgaagaacatgctatcgtccaaaaagggttcaacacaacacgaccacgtaccaatcaatgttcaaatttatgaatcagagcgttcagctagcctaaaaacagcataccgtccccttcctcacatcctatacctcaaaaaaaaacaatttttttttaaattaaccaaccaaagcacgacctccccgaaccaataatgcactgttcagctgggactaccgaacaacaagaatggtgtgtgtgtgtgcgcgcgcgctcggcgctcgtgtgtatgccacttcccatctggccgcggaacgctaacttaaccacaccaacttcctctcagctgttgggaccgaactgtgactttacgtgacgatagc

SEQ ID NO: 36000 - DNA, 280 bp, Zea mays
  unsure (1)..(280): unsure at all n locations
  Clone ID: MRT4577_132832C.1
nnnnnnnnntttttnnntttttttnaaagccggatgcctggtttccaagggcccataaaaaaaattccttcttgatttaagaaaagcttggtgtacaacaaccggccacaccttggttgcttcaggggttgttttttattaccaattccccaagaagagccagaattcttttccccttaaaaaaaaaagaattccccaccaaaccaagaatttaccggggggccccttttcatggggggcccccttcggggggggtcctttggggaaccttccccccttc

SEQ ID NO: 36001 - DNA, 417 bp, Zea mays
  Clone ID: MRT4577_132833C.1
ttcagtctcctaacacgactctaccagaccggctcccccattctctccctctttcagcaccctcgctctccctctcaatcctttgcaaacatgcgtgaagttatttccatccacgtcggacaggccggtattcaaatcggtaacgcctgctgggagctctactgcttggagcacggcatctcgcctgacggtaccgttgcctctgacaagcagtcttctcagtttgactcctcctccagcaccttcttctcggagactggtgccggcaagcatgttccccgtgccatctttgtcgatcttgaggagaccgttgttgacgaggtcagacgcggcacctaccgcagccttttccaccctgagcagttgatcagcggaaaggaggatgctgccaacaactatgctcgtgggcactacacc

SEQ ID NO: 36002 - DNA, 500 bp, Zea mays
  Clone ID: MRT4577_132834C.1
cctatgcctggctggccgtctgctagtcggactcctagcccgccggctacatttgtccggactactccgctacgggcgtgctgccatgctggatgacgcatggcacgaacctgggctatatgaagtgcgaggagatttgagaccaggtgccgatctcggcggagaatttgctggcgctctgcggcagatgctactacgacggcaccgcgttgcatcgaatcatcaaaggatacatgctacagggctgggacccgaccggcatcgatgagggcgggtggatcatctggagcgtatagttacggtcacagttgatggagtaagtaaagcacagcgcacgcggaatcatgtatatgatcaacagcgggcccaacaccaacgggagccagttcttgattacctacgtcaagcagccgcaccttatcgagcactacacagtgtgcgcaaaggtcatccacggcttcgaggtgctggacctaatgtagaaggcgcagactggaccc

SEQ ID NO: 36003 - DNA, 1358 bp, Zea mays
  unsure (1)..(1358): unsure at all n locations
  Clone ID: MRT4577_132835C.1
aattcggcacgaggctaacccacaggtggaacattgaaaatttcaatactacagagcaccagatgctagacacaccatacttgtaagttctcagtccataaagtaaggtttctcaaaatcattgtaatgtagatacttgatgatactaaatattgttgaaccaggtccagtcgatataccagtagagatattctagccatgggtatcagagacttcaattcctctcaacttacttaccagcaagaacttcaacatcttcaaagttgggtgaaagaatgcatgttggaccaactaccatttgtgaggcaaaatttggcatacttcttattgtccgctgctggctgcatgtactcccctgaactgtctgaagctcgcactttgtgtgcgaaaaatggtgcgctcataactgttgttgatgacttctttgatgttggaggatcaaaagaagaacttgaaaaccttatcatgttggttgagctgtatgacccttgtcctttaccacgatgccttgtgcatcatctttctttattaagcaaaagcgatggcttcttatcataatataactctcatttttatgttttttataggtgggacgagcatcacaaaattgagttttactcagaacatgtagagattatattttcttcaatttacaacttagttaaccagtatggtgcanagggctnctttgttacaagtaatccatgttaccaatcacctaatacaaatacttatgggtagtcgagttagttttcagcagtaggtgctattatttaataggtatatgagcatggtatactgaataataccactttagccttgactaattttaggaggtgttttctttgtaatcgagaaaaaggaaaacccttgtatattcaaaattgatatattgttgcaaagggagtacaaggagggcaagttgaacattgtttctctcctcgtttttcatgagggctccatgtccatatcagatgccagatggaaattacagaagcccatagacacatgtaggagagccctcctaagactagtttttcgtgaaaaaagtgttgtacctaggccatgcaaggaattattttggaaaatgtgcaaggtctgctactttttttactcgaaaactgatgggtttaggtccccagtggaaagggccaaaaaagtgaatgcagtgatcaacgagcccctaaagctacaagaaacccatacacccatgtttgttttgtgaaaggaaccaagggtcgatgtgatgtcttcatttgatttagtaggtgtgctttctaaataaaatagttcgctaggtgactgcatcaggtggtgcgtaaaaacccaccccattagtaatgtatagaagttggccc

SEQ ID NO: 36004 - DNA, 493 bp, Zea mays
  Clone ID: MRT4577_132836C.1
tgtcgggttgaccttctcttttaattatttccccttccaccacccacttttgggggggctatattaaagttacttatgggggtggttttaccgagagacctgaaatataaaatactagttacaacatgacaacattttaggttgcctgtttacttcaattccctttaacagtatttaataacatagtaatatcttttactttataccacagtgtgaggccgccttttactgtactaattgaacgccccccccttaaattataccggttggtctgattggcatggccaagagtacgcttgttatacccacctcgggcggaatcgcgcgtcgcataaaccttgtcccccgcgcccatcattcccaattgtacaaatttataaaacttgcccttggaaggacggtttctttctaaaccgaaccgcgcgttgagctcggcccaagctcgagctcggcttggccccaaacccggatctgccgcggcatggaggtcctg

SEQ ID NO: 36005 - DNA, 377 bp, Zea mays
  Clone ID: MRT4577_132837C.1
gggccattatacaaccaaaattggtcaagacatagacagaaaaaaatctgacgcatggcacaatggctttactacctggccggggataccctactaggtacagtcaggccacccccaaccggatcacagcccgttgaacacgagaggtgggatttagctggaccgtaccaccttacggcttgggcttgcacaagaacctctgcttatgatcaaacgccaggacggggccgtgcccttatctgcacgatgttttaatcctctcgagggtgatcttctgccccgccctccggggggtctgcttcctgagggacggggggagggcccccaaactattccttggacccacaccggaggccttgatcatcaagttgtgaccc

SEQ ID NO: 36006 - DNA, 300 bp, Zea mays
  Clone ID: MRT4577_132838C.1
cgaccgactcgtccgtccagcatccagcaaattcaaagctgctatagaatcacaatgacacacatgtctgaaaactgatcacaactactgattaactaatgcaccgacaatgcacatttaacaacgacattgccaccacttaccttaatgcgaactaatgcactacagtgctacccagcccagacacagctcattagggtcatgctcctggtaagcacagtatactttcccagcactggtagccatgcacgatacgacctagatccagacagctaactaagtctaattgctaacttggct

SEQ ID NO: 36007 - DNA, 1368 bp, Zea mays
  Clone ID: MRT4577_132839C.1
gtggccgcctgccagcaggccaactaccgagtgggggaggaccgggaaaccggaggaggggatttctcggcgcgcacgccgtcggcctccgagggtcgcggctccagccgccatgcctccggttccggagagcagcggggcactgggagcaaccccatgaattcaatcggccgtgacctgaccctcaattgcctcctccggctatctcggtccgactacggctcggtggcctccctcagccgggacttccgatccatggtccgcagcggggagatctaccgcctgcggcgccagaatggtgtggccgagcattgggtctacttctcctgcaacgttcttgaatgggatgcctatgacccatatcgagagcgctggatccaagtgcccaagatgccgcctgatgaatgcttcatgtgctctgacaaggaatcacttgcagtgggcactgaactgcttgtgtttgggatggcgcgtattgtcttcagatacagcatcctaaccaattcatggaccagggctcatccaatgaactctccgcggtgcctgtttggttcaacaagtgttggggaaaaggccttcgttgctggaggcactgattctattggcaacatactgagctctgcagagatgtatgactctgagacacatacctggacgcccctcccaagcatgaatagggcaaggaagatgtgttctggggttttcatggatggcaagttctatgtgataggtggtgtggctaacaacaacaaattgctgacttgtggggaggagtatgacttgaagaggcgttcctggaggataatcgagaacatgtctgaaggcctcaatggagtgactggtgctcctccccttattgcagttgtcagcaacgagctatacgccgctgattacagcgagaatgacctcaagaagtatgacaagaagaacaacaggtggatcacccttggaaaactgcctgaacggtctgtgtcaatgaatggttggggccttgctttccgagcctgcggtgactgcctgattgtcatcggaggtccgaggacctacactggccgtactattgagctcaactcatggaccccaaacgagcggccgcctgtgtggaatttgattgccaggcggccatctgggaacttcgtgtacaactgcgccgtgatgggttgctgagttccactgaataaaagataagtgcagtggatatttatgaaggatggtatgcacagaggtagcctgtcccaattgcttcggcccttattcttcgtagtagcggtttctgccgtctggcccagtaccggaattatgtggacatcagctgattgtcagcagtctcatgtaacccttgagttttgaaactcctgtttccctgct

SEQ ID NO: 36008 - DNA, 988 bp, Zea mays
  Clone ID: MRT4577_13283C.1
gcgagcagcgtccgctagggagggagggggcgcgattccccacctggttccacttccgctcctcggccgcagccacagaagagagaccaccgcctccgcagccatggccgccgccgccgccgccgccgagcccaagaccaagtacgatcgccagctcaggatatggggtgatcaaggacaggctgcactggagaaggctagcatatgcttgcttaactgtggccctaccggaactgaagcgctgaagaaccttgtgcttggaggaatagggagtgttactgttgttgatggctccaaagtcgaacaatcggacctgggaaacaattttctgttggatgaagggtgcttgggtcaatcaagagcaaagtctatatgttcattcctacaagagctcaatgatgctgtgaaagccaagtatgttgaggagtcaccagcaacaatgatagatacaaatccttcattcttttcccagttcactgttgtccttgctacccagcttctggagagttctttattgaaattagatagtatctgcaggagcgcaaatattgtgttggtgcgcgttcatatgacgaagacgactacgagagtggaatgagcaatgagcatgtcggccgagctatggacgcttccatcaattcatggaacgacatcactgtgcatatgatctcaggtgtccatcgacagaccgaatcttccctggccagtattccttcggcgacgcggttgccgttagatgaaggaaactgtcgtgtgacagcgaaatgtggttgctacatgctggtagcgcacatagcacactttaggcctgtttggtttgtagctaattatgccacattttacttaaggttagttatttgaattgaaaaactaaccttaagcagaaaaattaggcaaaatgtggcaaattaggcagcgaaccaaacatgccctttatcttccaggttgtgctcatgtttgcttgtttgcttcagaagtaaataaaaga

SEQ ID NO: 36009 - DNA, 1775 bp, Zea mays
  Clone ID: MRT4577_132840C.1
tcccggaatcccctgcccttcctcacatctcctccctgttcgtccgtaatagtcgtttccgaaccttgcgtttcgtgggatttatcgaggcgagggcttcgattggacccaggaatcgcccaaatccgcttgtcttcgacttcggttcatccccacgaatttctagggttttagtgttgattttgtcccccttcattacatttgattggcggtgaattgggccccgttttgatgattccttgggttcgttggacggcaggaaacgagatcctctagaggtttgtgctgtttggcgtgagttttttggggccgatttgctttgctcgcatgggggatcatgtcgcggtggatgttggggagctcgtagcgtcccgagtcggtgaggcagcggggttagtgtccggcgccaaggaggaaacagatgcgctgattgggatggtggagtgccgcatttgccaggaggaggacctcaggaagaacctcgagagcccctgcgcttgcaacggcagcctcaagtatgctcacagagaatgtgtgcaacgatggtgcaatgagaaaggggatacaatctgtgaaatctgccatgagttgtacaagcctggttacactgccccaacccaggtgcatcatgatgaaactaccatagagataagtggtggagattggaccatctctggcaaccgtttggatttacatgatcctagaatattggcaatggctgctgctcaacaccgtctacttgaagacgactatgatgaatatactgcaacaaacaacaacgctgctgcattttgccgctctatatttctgattttgatggcccttttgctcctgaggcatacactgaccattactaacagtgatgatgaagatgatgcatctgctattttctcgctatttcttttgagagccgctggatttttgctgccatgctatattatggcttgggctattagtatcatgcagcgtcaaagacaaagacaggttggtggctcggtgccaatggaaatgtttctctttcatgtgtatactgtattgacttttgacggaaaagaattccacgaaactatttatacctagcatggattgaatatatatatcaacggagttaagcaaccttttttccccattggttgcacacatccttttctttagggatggctgcacacatatccttgtttgaactgaggagttggatcttgggatgatcgtatctgtcctttctgatcaaacatgagatttctaagttagagaaaattgagatcatttgttgtctgtttagtatttccgtagttttataccccattaagtgcgtgggctgggctacatagtctttgttcctaattgccataccagtgaagaacgcatggatggttcttgttcatttttgatatgtcaggaagaagcaatgctgttaccaacggaagtggcgatcattctgcacccggacggaagaacaatgcaatttgcggtggcaccagcggaatctcctgcatcacatcagtgacaggctcacaagcctgcctcgggagtgcatagcataacagatgcatctcagcatctggtcttaaaggtggaaacacgaggacgttgtgcaattcatgttgtgccttcgaatttagttaactttcaagcggagattcaatgtttgttcgatgggccctcagcaccttctgtacataaagagatttatctaataactaataagtgaatataagttaaatcagcaaaaaaaaaaaaaaaaaaaaaaagtactctgcgttgttaccactgct

SEQ ID NO: 36010 - DNA, 239 bp, Zea mays
  Clone ID: MRT4577_132841C.1
aggtatactctctactgggaaaatcgaagcctgccaataacactcagcaggggggggggaaaaaaaaaacaggggaaccttgggatccccggggaagccaaaaatggcgcttcacctttaagcaaactcgggtacgcgaaccccaaagcggggagaaaaacgaactgaccctaacaaacctctggaaggacctccggacaaaaaaagcaatgcctggactaacaagacccttatggatc

SEQ ID NO: 36011 - DNA, 364 bp, Zea mays
  Clone ID: MRT4577_132842C.1
gtaaattgacgagcacaactatatgaatttcaggattttaaaaatttaaaaataacgaatctttatgggcttcaaagtttttgtctgggtcatgtagttgatccacatgaacagttactgaattatctaggtcgtgtagctataacacagcactgtaattccatagataggttaatgttatcagtgagggtaagctttagacagacactactccagaaattggtggtcttagtttagaagttggtgctccatgcatggtaactacggaaaatcagcaagaataagttagaactgagaattgtttataacagccctaactcatttctgtcagcaatctagtttgctgcctgttattgtacttatg

SEQ ID NO: 36012 - DNA, 475 bp, Zea mays
  Clone ID: MRT4577_132843C.1
cagtacttacaaggggaaggtccttctcattgtctatgttgcatctcaatgtggcttgactgactctaattacactgagctgagtcacttgtatgagaagcacaaggggcaaggtttcgagattcttgcttttccctgcaatcagttcggagcgcaagagcctggaaccaacgacgagattgtagaatttgcttgcactcgcttcaaagcggagtaccccatctttgacaaggttgatgtgaatggggacactgctgcgcccatctacaagttcctcaagtcgagcaaaggcagcctctttggcgatggcatcaagtggaacttcgctaagtttcttgttgacaaagaaggccatgttgtccatcgctacgcaccgaccacctctccactgagcattgagaaggatatcaagaaactgctctgagtctcttgagctctttgatgtccttatgttgttactctcttccaagctttt

SEQ ID NO: 36013 - DNA, 240 bp, Zea mays
  Clone ID: MRT4577_132844C.1
acctcgaggccggccgggctactcgcctcgccgtagtgaccagagcacgtgtaacacaaaatcgtgggtgagagaagagggctcgcggccgtgctcgattcgccacggtttaccggatcctgctgtcgattggaagcgggaggtggtcagggaagatcgcacgatcgtgggtgtggcgtcttcttccgcgaaggggcgtcgattgctcgtcaattgcttacccgtggcggaaatccccgc

SEQ ID NO: 36014 - DNA, 272 bp, Zea mays
  Clone ID: MRT4577_132845C.1
gtggatccaagagaccaggacatacctcctcgatgggtcctgtatggtggaagagtcggggaccctcgaatcccagcttgaagctaccaaacgcaagcaccaggaaatccgagccatgagaagtcagctcaaaaagatcgaggacctgggggccgccatggaggaggccctcatcctggacaacaagtacacggagcacagcaccgtgggcctcgcccagcagtgggaccagctggaccagctgggcatgcgcatgcagcacaacctggagc

SEQ ID NO: 36015 - DNA, 775 bp, Zea mays
  Clone ID: MRT4577_132846C.1
tttgcccatctgcaggtttcatcttcctttgtatgcagccttcatgcatgcatgactgactgtctagctagcccgagcagtagagctagtgcatgacgtgatggctccaacctccctgcagaggccgaggaagccgaggtgcccctcccacgccatgctctcgctctcccctgccctcctctccctcctcctcctcgtccccttcctctacctcctcatccaccgttccgcgtgctccccgcccttcagcaacctcacgaccgccaggcgctcatcctcgagcgtcagcggcttcgccggagaccttcgcgacatcgagttctcgtggaaccacctgcccttcatgtcgtcgaagccgccctccgccaagctcaagatcgccgtgttctcgcggaagtggcccgtggccacggcccccggcggcatggagcggcacgcgcacacgctgcacacggcgctcgccgcgcggggccaccgcgtccacgtgttcacctcgcctccgccgcataccgaggccgcgccctcgccctccgccgatgggcctcagctgcatttccttgacggcacccccggccagtggcggtgcgacgaggcgtggaagctgtacgaggctgagggcgacaacgatccattcgacgtcatccactccgagagcgtggcggtgttccaccggtacgcgcgcggcgtgcccaacctgggtcgtgtcgtggcacggaatctccctggaggcgctgcactcgggtatctaccaggacctcgccccgcggcgaggatg

SEQ ID NO: 36016 - DNA, 364 bp, Zea mays
  Clone ID: MRT4577_132847C.1
tcgacctattgcgtggcatgtacggcggcggctactagaagctgtccaccatacatcaatactcatcgctcgtcattatgaacaggctctactgatcttgcatgcatagaataggtctcgtgaatgcaccctttatcatgttaaaactagagattaatattcattcaggttcgctcgaagaaactgactctatgttaagggatagaagccagcctaccattgatctagatagagcaatgcagcctattgggtaatacattgctttcaaaactacgaatagcaaacctagaaagatattaggtgcagacgtgcctgctgaagcacataaaatatgtgacgattatttaactctgccgaaacactg

SEQ ID NO: 36017 - DNA, 272 bp, Zea mays
  Clone ID: MRT4577_132848C.1
ggcgggacccggtccggttataattcccgttccgacgcgctcattattcggcggccgcccttcgacagtccaggggggtctttttaacataaaaccgcggttttcacctctaacaagtgaatcttaatgcattaagggtaccaagttgttctagccggttggggtatcacgatgggagaattacttaaaattggcatgctgtagccaatacttttgatcgactatctcagttattggggatcctcctcttagttcaagctgcttcactagct

SEQ ID NO: 36018 - DNA, 532 bp, Zea mays
  Clone ID: MRT4577_132849C.1
atttattggggcttgcactaaacccccaaacctatgtatagtcacagaatttatgtccggtggaagtgtgtatgattacctccataaacataaaggtgttttcaaacttcctgctttagttggagttgcaacggatgtgtcaaaaggcatgagctacttacaccagaataatattattcatcgtgatttgaaaactgcaaaccttctgatggatgaaaatgggctcaatctggagttatgactgcagaaactggtacttaccgttggatggccccagaggtcattgagcacaaaccctatgatcacaaggctgatgtttttagttttggaattttgatgtgggaactactcacagggaagattccttatgagtacctgactccactacaagccgctgttggtgtggtgcagaagggattacggcctacaattccaaagcatactcacgcaaagctttccgagcttcttcagaaatgctggcagcaggaccctacccaaagaccagacttctccgaaatattagaaactcttc

SEQ ID NO: 36019 - DNA, 417 bp, Zea mays
  Clone ID: MRT4577_13284C.1
gtcgacccagcgtccggcagaaactaggatggcacaacatgtagtagctcagaacactcgagacaaacattgttgcttacttggagagattgagaatcggcatgttattgtgactcccgatatggattctttgttgaacgacaagtagagattaggttgtaatctgtagcaactgtagcagctttggcatatgttgtgtgtagacttgtagctagttagttaggcagggtttggctgccatctgtaccaattgtatcagccttgtcaaatggtgtataggattttagttgtgcagtggtgtacgttttactgtgattgtactactatgttagttttagaaatgcccagttgataaatgtttgtatgaattgacatttgaccttagtggtactggaagaaaataaatcacattgtcct

SEQ ID NO: 36020 - DNA, 2866 bp, Zea mays
  Clone ID: MRT4577_132850C.1
cccacgcgtccgattacaagatgggttcttattgtgatattggtagtctggcatgctaattgggtatggctttgaagtttctgaggttgcacttggcttcttgttattttacctcatttcacttagtcttatttcttctgcaatgattatcctaaagtcacttcaaatcatcatttatatcgagatctctttgctgtcatttacttcccaacatcttatgttaccaatcctttatctcattatctgcatactgattgatctcttgtagaatgggcctagatttgaacttcaaatgcaggatgtaactggatgaatgcaccacatttatgataaaaatcaccccatagtttgcttccgtgacactgcttttttatgtactactttgctgagtatgtttttggattttagccggcctcgtccgcgctcctagccgttcccgccacaccctagtttcctttctcctccccccgccctccttaaaaactcggcccgggtcctttatggctctcgccccgctccgctctcgtaatctgcgagctggggggagatcgagaccctagaacggagggcgggtgtgcggcgctgagggccttagacgaatggcggtggaggagaccgcggagagctgcggcagccacgccgcgaccgctgcgtccggcggcggcgcggcggggcccgcgacgtcctcgtcatcggccgccgcggcggcgcaggcgcggaagcagcaacagcagcagcgccataagctcgaggtgtacacggaggttcttcggcgcctccacgacgccggcctgcccgacgcgcgggcgcccgggttcgacgacgagctctggaatcacttcaaccgcctccctgcccgctacgccatggatgtgaacgtggagagggcggaggacgtgctcacgcacaagcggctcctggagcaggccaaggatccggctcatcgcccggctttcgcggtgcgggccgtgcaggtatctccaattcttgatgggaatcagactgattctgattcgaatactgcaggggaggaagtcgcttcaagactgttgaacaggcagcaaagcatatatcctcctcctgcctttggttcttctacaaatcttgaggcccttgctcttgaagctagcaagtctcatgatcacgatagcacctctgataatggccgatccctgtacaggcccatgcatgaaatcaccttttcaaccattgacaagccaaaacttctcagtgagctgacatctctgcttggtgagcttggtctaaacattcaagaagcacatgcattttcaacaaatgatggctactcacttgatgtcttcgttgttgtcggttggcatgatgaggaaacagaggatttagtagaagcagtgcagaaggaaattggcaggattgaagagacacaagcatggtcttcatctcattcatggtctactccagttgaaaaaatgcagattgctgagaattcagcagctgaccgtgttgagataccaacagatggtgctagtgaatgggaaattgatgtaaagcttctcaagtttgggaataaagtagcatcaggatcatatggtgacctttaccggggtacatattgcagtcaagatgttgctattaaagtgctgaaacctgagagaataaatgcagacatgcaacgagaatttgctcaggaagtatatattatgaggaaggtccgtcacaagaatgttgtgcaatttattggggcttgcactaaacccccaaacctatgtatagtcacagaatttatgtccggtggaagtgtgtatgattacctccataaacataaaggtgttttcaaacttcctgctttagttggagttgcaacggatgtgtcaaaaggcatgagctacttacaccagaataatattattcatcgtgatttgaaaactgcaaaccttctgatggatgaaaatgggactgttaaagttgctgattttggtgttgcacgtgttaaagctcaatctggagttatgactgcagaaactggtacttaccgttggatggccccagaggtcattgagcacaaaccctatgatcacaaggctgatgtttttagttttggaattttgatgtgggaactactcacagggaagattccttatgagtacctgactccactacaagccgctgttggtgtggtgcagaagggattacggcctacaattccaaagcatactcacgcaaagctttccgagcttcttcagaaatgctggcagcaggaccctacccaaagaccagacttctccgaaatattagaaactcttcagagaatagcagaggaggtcggagaggagcacgatgggaagcacaaggacagaacactgggtggtttcttttcggctttgagggggcggagccattgagacacagttgaagacttttaataataaaaatgtagtacatggcctcggtccgtcctttgaaggacctgagctacaaccagtgcagtgcctgttcctcgcacgtcagcaccagtacacagaaatacagacctgctgtgcagctgcagttgactgaagcggcaatttttatttagctgcagccatcgctttccgcatatccgcttgttattcctgagttccattacgcaatgtataacataggtgaggaagcttgggaactgtatcatcagtctgatttccctgaaagtgcaatcctgctgtagatgaaaaaaaaatagccagattcaggccgtggcatgattcttttaaggctcaaaaatataaaatatagtttaacagcgcggcgagcttgagtagctgaacaacagaacaaggcacctgcatctgcatgggttctgctcgggccttttgttccccccgtaaaaaaaaaaaaaaaaaggccccta

SEQ ID NO: 36021 - DNA, 1608 bp, Zea mays
  Clone ID: MRT4577_132851C.1
tgatgaggaaacagaggatttagtagaagcagtgcagaaggaaattggcaggattgaagagacacaagcatggtcttcatctcattcatggtctactccagttgaaaacatgcagattgctgagatttcagcagctggccgtgttgagataccaacagatggtgctagtgaatgggaaattgatgtaaaactgctcaagtttgggaataaagtagcatcaggatcatatggtgatctttaccggggtacatattgcagtcaagatgttgctattaaagtgctgaaacctgagagaataaatgcagacatgcagcgtgaatttgcccaggaagtatatatcatgaggaaggtacgtcacaagaatgttgtgcaatttattggtgcttccactaaacccccaaatctatatatagtgacagaatttatgtccggtggaagtgtgtatgattacctccataaacataaaggtgttttcaaacttcctactttagttggagttgctatggatgtgtcaaaaggcatgagctacttacaccagaataatattattcatcgtgatttgaaaactgcgaaccttctgatggatgaaaatgggactgttaaagttgctgattttggtgtcgcacgtgttaaagctcaatctggagtcatgactgcagaaactggtacttaccgttggatggccccagaggtcatagagcataaaccctatgatcacaaggctgatgtttttagttttggaattttgatgtgggagctactcacagggaagattccttatgagtatctgactccactacaagcagctgttggcgtggtgcagaagggattacggcctacaattccgaaacatacttatgcaatgctttctgagcttcttcagaaatgttggcagcaagaccccgctcaaagaccagacttttccgaaatattagaaactcttcagagaatagcagaggaagtcggagacgagcacgaggggaagcacaaggacagaacactgggtggtttcttttcagctctgagggggcggagccattgagacacggttgaagacttgaaatgtacatggcctcggtccatcctggaaggatctgaactacaaccagctcctgttccccgcacatagcgacagtacacagaaatactgtacagacatgctgcagccggagttgactaagtggcaattttttagcggcagccatcgcttttcgcctatctgcttgttactcctgagttccatcacaatgagaggaagcttgggaactgtgcatcataaccagtctgatttctctaacagagtctaatcttgctgtagatgaaaataataagccagatccaggccgtggcatgattcttttaaggttccatcttttagcatattttcttctacgtgccgtcattcttttctggacatgctccacccctctgttgtggaacaacgcggcaagcttgagttagctgagcaaggcacctgcatctgcatgggatctgctcggaacaaagttgggttatcttgtgctaagcttttgttccccagtttccgtgactacaaatgatatcaatttattttaaagaaaaaaaaaaaaaaaaaaggcccctagggcc

SEQ ID NO: 36022 - DNA, 213 bp, Zea mays
  Clone ID: MRT4577_132852C.1
cccacgcgttcgagccagccagccagccgggtcctgccgcgtagctagcgtatgcgtacgcgtagccgtagcagcgtgtgctagaggggaagaaatgctggaggggaggtctcgtgtggaggacacggacatgccggctcggatgcatgacgctgagacgtctgctgcctcgcgcgcgctcgacctatttgacgtcgtcgactgctgcgccat

SEQ ID NO: 36023 - DNA, 1396 bp, Zea mays
  Clone ID: MRT4577_132853C.1
ccggctctccggctctccctcggatatttcttcgctgcaggccatcggatttatctgtgccgtgggtgcttgcctcagcccaaaccgcgcccatggcatgctcttcccttgcagctcgccgagctctccttctccccagttccgcgcgagcgcgcccctagttcggccctgctcgccctgcccatctcccatggcggctctctctgtccggccatggagctcacccatctcggatcgtgaccctctctactcgtcctccacctcgcccatggcgccctggccagcctcatagaccttgcgcgtctccctacaaccagttcggatctcgcccaagtcactgccgtcactctactcggcgcctgcttctcgcccctgctgcgcacgtcgaactccctcgctgtccgcgctgtcgaaacttctcaggccgtgcgctcctctgtccggaccaccagcctccaatcccagtattcccatcattgaaaaatagtcgccacgctctgcgtcctcatcgtgttcgtgaagctgtcgtggagttttggtttgatcagctcgtcattgacttcgccggtgtcgtcgaaccgtcgaaccccttccttagtcgcatcaggtctctatgcctgttgtcgtcgtccgtcgtcgcgtcgtttgtgcagctctatatacctcaccctcccgtatcgtcgtcgagcccgtcgaacctcgttcttccctgctcgacctcgtcgaaccccgaatcccgaacgctaggcaaaaataagcgaggtccgtgtgcatcgcttatcaagtgctcgattgaagactttaatcgaaggtcgtcgtcatttcgtgcgtcatcaaggaatcccaagaatcggatgaagatgaagctagcagcgtgatattccccaagtgctcgacacaagagctgaaccagaatccttgccatgttagcggatagcgtgtcagatttagtatggtaagccgattcaaatttccgttagcttaattatcgaagtagttcgatgaatgtgatgtgcttattttcatgattttgaagcagtcgcgttgcggtaggattaaatatatgtgaagtaggatggagttagtaatgcgaaagatagattaatttaggtaatattcgggcgagctgatgacaaaagaaataagcttagtattcctatcagctagttaatagaattttctagtgtcgttatgtcaatttgattaattgatataatcgatgccctgcttaattagttagtttattctaggtttggtatttagtttgatgtcatgagagacgtgcaaattacatgtgtaattaacggtgaatgtcatcgatctatctaattagcgtggaattcaaggtaattgagaaacacaatttagacagttagttaatatgctcccttacttt

SEQ ID NO: 36024 - DNA, 781 bp, Zea mays
  Clone ID: MRT4577_132854C.1
ttgggaccctcgaggccggccgagagagtattctattctccgatccgcccaggtcaccatggtggaggatggtacaagcagccacccgtcgcgctacgtgaagctcaccaaggcaccatcgacgtcgcccgcgcacgaggaacatgccgctccctggcgatgctcaaccacgccagatcacgtcccgcagatctaaggccgtacgagtagcgagtgcgtgcatgtcctgcccgagagctacgagccgcccgccgaccagccctggaccaccgggatcttcggatgcaccgatgacccacagacctgccaaactggattgtgttgcccctgcgtgctgcttgagagcaacgatgaggctgctagggaggacatcccttggacagactcgcttgcgtgtggcatgctgtatatcttgaacgagggatcatcgctggcgattctgacggttatatttcacggcgttgatccgaggactgcattcctgattgaagaacgtctgctgatcaactggtggttatgtgcctcctacactggaatcttccgacatgggcttcataggaaatatcatctcaagaactctccgagtgacccatggatgctccactgctgcttgcactggtgtgccaactgcctacagcatcgcgataggacgggacgagcttgcagagaacaacgcatcgcccatgacagctgtgaacccgcctccgctgcaagatatgatcatgctggacgagaagggagcagagactagtgatcactatgatgtgaaaggtcattcctc

SEQ ID NO: 36025 - DNA, 736 bp, Zea mays
  Clone ID: MRT4577_132855C.1
aataatacctatttattgataatctattggtgatattgtaaacccgctaacattgttttcttttttactctcacatcttcatttttttactactaagctcgaccaagagaagagacctatatcttcattaaaagaataagaagggtcgtggtccctatttttacagaaactctatgatcagttagcaagtcagaaccttaatctaaacacctgcagtagtatctttaatgatgggcacatccaagattagctatccacattgagttttgtgcttcgtatcatgcagtgtcaggttcgtcatccattaccagatttcagacagtgatgttcaatatgcattgacatgtgtcgaggtacgcaaaaagtttatatgcactgatctgccatgacttggtgcattcccttccttttgttgtgtgccttgcaatatgaggaataaaataatatatatggtaatcacagatgccaaaaggcccaaaccagagtaacactttaaagcagacacaataatcaaaagtcatggctacaatgaatggcccaacacacgtgtatttgcaacgtgcaagggtgacaagaatatgagcactctaatgcaccacccttttggtaactgggctgatacagtgaggtacgttatctaaatgccacacttttaggtatacaagttaaacaactaaaaatcttgaagtttatatctatttatttttattgattcataatgtattctccaattagg

SEQ ID NO: 36026 - DNA, 1480 bp, Zea mays
  unsure (1)..(1480): unsure at all n locations
  Clone ID: MRT4577_132856C.1
attatcagtgcaactcttctgggtgatgccttcttcgattggtctgatgctgctgcgtatgaggaacttcttatgttggtcgctaaagatggttgcttctgggcttcttacacattcctccattttggagggctagctatacgaggtatcagaccctatgtgctaaattgaagatattaacagagagcgtcatcagaaaatcaagataccaaaatagttcgcttcaccattttgatcagagatcttgtcagaaaagtgaggggacagatccacatagaagtgttttagacaacatgatgcgaagtcattgcctccatggggctgctaaaggaccacttaatttagaagaggaaacatgtggaaacatcatgggtttgatgttgcatggtatttccacttctgctaacttgattggtaacattttgacaaggcttgtcttgtttcctgaattgcaagatcagctacatgaggagattgtttcagtctgcaataaatcatctaaagtggaggttgatgatctgcttaggatgcaagttctacttgctactgtatgtgaatctgctcgccttttgcctgctggacctcttctgcagcgatgttctttgaaacatgatttgactcttggctcaggtgtcactgtgccagcgcgatcaatattagtagttcctctgcatctcgtgcaaatggatgcttctgtttggggtgatgatgctgaccagtttaatcctcatcggttccttaaaagggacattgatcttggagaaatattaggagcacctaaaggatcaactaggataaatatttccagtgagtgtaccaaggccgaatcatttcttccatttggttctggaagtcgagcatgtgttgggcagaagtttgtggttctggcaatatcgatgttgattgccagtctgctccgcagctatgaggtacagcctcatccaagtttgtctaaagaaatggacacaacagttgatagcagccaccttcatcttccaaaccctaagatcatcctcaccaaaagaaggatctgaagggagagtttggcaaacgaaaatctggcacgtttgctttcactgtattgtttttcactggtgttacaccagtatatgatctttagtttcctaccgtcgtttggaccatgctgaagtttggaaaggcgaccttgacgatgcggaagtgccttttttcctccggatttttgacagaccctgtgtgcttcgttggatctaagtttttgtcaggtttttggagcacctgcagggctgttagatcacaggagacgtatgctgatgtgtataaacagactcgttttttcagttggggttttctcctatctgtggagaatgtaattaatgtccaacgcatgatgtcgctcgccacatatattttattgtatcttacttgcatataaacatgtgagcttattgtttggaccataatttgtgataaatctgaannnnnnnnaaaaaaaaaaaaa

SEQ ID NO: 36027 - DNA, 315 bp, Zea mays
  Clone ID: MRT4577_132857C.1
attcccattcgaccacgggtacgcgacttccaccctcgattcgatcctagctgacttctatgattcttggactcgctccaccatgggccattgcacacgatgccaaccgaacggccttcattgtacatcatctccagatgatcataccacctgaaagatcaatcagttgccaaccctaatgctttctcttaaaagtgtaaacgatgcgctcctaccttactctgcatgaactatgccagatgtcaaattattccatcacctactatactgtcagataaatgtgtaatcatgtgccgaaatcagatctgttcaatg

SEQ ID NO: 36028 - DNA, 829 bp, Zea mays
  Clone ID: MRT4577_132858C.1
ccggccggctatatgaagaaaacccacgatgtctaccggcgacgaccgagaaaaacatcggccgggacgaccgagctaggagaagcacgaacgcgtgcacgcgctgacgccgacgtcaaggtgtacggtaactcggagcgtcatcggagagagagacccgccaccgccacgcttgaccgtaatccgtggagagtgagtgcccggccgggctaccagctaagacacgacggtccatccagccatcggtggcccagcagattccacaatggcggcaacggcggacatggagcggatcttcaagcggttcgacaccaacggggacggcaagatctcgctgtcggagctgacggaggctctgcggactctggggtccacctccgccgacgaggtgcagcgcatgatggccgagatcgacaccgacggcgacggctgcatcgacttcaacgagttcatcaccttcagtaacgccaacccggggctcatgaaggacgtcgcaaaggtcttctgaaacatcacatcatcatcaataggataccatcgatgatcatgcccccaacgtgtcatttcatctggcctgcctcgccggtcttattgctgtcgttcacctccttataagtactactagtaggattttgttttgttttattttatattttcatggtcaccaatcaaatatatatgtggacttccatttatttattttttctgtgtttcctcgatcggataagtgtatacctgccagtccagctttaatttccatgtatttaatttttactggagaaagagaaaaaaaaaaaaaacaccagaaaaaaaaaaaaaaattgcgggc

SEQ ID NO: 36029 - DNA, 460 bp, Zea mays
  unsure (1)..(460): unsure at all n locations
  Clone ID: MRT4577_132859C.1
caaccccaaaaaaaagcccggggaaacaaggggcccccaggcccaaaagggaaacacagcaccccccccccccaaaaaccaaaaattaaggggggcccaacacggcccagttttcccccacggggggaggggagggcagggcccccaaaaaaaaaggggtttttccggccggccccggccactaggggaaaaaaaaaaggggctaaggaaaaaaaccccccaacaacagaaggggggagggggggggggggtttggccctaacacaaaaataacgggggggggtagtaaaaagggacgagggaccagaaggccagaataagaagccgcccagccccagccatgggggggacaaccccgggggaagccttgttgtcgtggggggccaccgaccccatcggggggggggggaacaccccggccaaaccgctgttggtgttngttgtcgaaaaaaaattgggg

SEQ ID NO: 36030 - DNA, 1146 bp, Zea mays
  Clone ID: MRT4577_13285C.1
cattgggtacctcgaggccggccgggcttccaagccttcgcattttcctctcgtcttcccctccccctactccaaattaccaccccctgctaactacatatcctgtccacactctcgctccctgcgctgcgccttgcagtttttggttgtgtatcggggaaatggcaatcgacgacgaatcgccgatcagagtcaacagcagaggcggcggcgccatgggaggaggggagtgcgacggggcggagaaccagcggtggccgccgtggctcaagccgctgctggggacgagcttcttcggccaatgcaaggtgcacgcggacgcgcacaagagcgagtgcaacatgtactgcctcgcctgcatgaacggcgcgctctgctcccagtgcctcgcctaccaccgcgaccaccacgccatccagatacggaggtcctcctaccacgacgtgatccgggtgtcggagatccagaaggtgctggacatctccggcgtgcagacgtacatcatcaacagcgcgcgcgtggtgttcctgaacgagcgcccgcagcagaggccaggcaagggcgtcaccaacacctgcgaggtctgccagcgcagcctcctcgacaccttccgcttctgctccctcgggtgcaagaagcaggccgttgtcaagaagcatcagaagaagaagaagcagcaggcgcagcagcacaggggcgccgcgttggactcggaggacgactcttcgtccaccagcaccagccgcggcagcgacaggagcagcgtggtgcagagcttcaccccgtcgaccccgccggcgacgcccaacagcttccgaaccgggaagcggcgcaagggcgtgccgcaccggtcgccgttcggcagcctcgtgctggagttctagaaagcagcggttctataccatctataggtgttgccggatcggcctcggccggtctacatagttcatagccacccaagaaaaaaaaaacggagctagtagtagcaactatagcaagcaataaccaaggccccactgcacgcccgcgcttctggacgacgaggccggtgcaatgtggcacgtacgtcgtacggtacggttacctctacttccattccatagtactgtactactactgtagtttacatgcagtcgcagagctgtg

SEQ ID NO: 36031 - DNA, 485 bp, Zea mays
  Clone ID: MRT4577_132860C.1
ggggcgctgacacaccctagcgcgctggggggtttattttcactcaagcccagttcgcttttacagaccatggccctttcaagggcgggggggacagcagtgtcagcgacagcccacagctttggtgcatttcggggggggtaaccggatacgggtcaggggacgcgggggcacaaggggagcccctcggggatggggacctggcaaacgtgaacccggggatcgggggccacggccccgttaaactccctgggggccccagggagcgcccggcccccctcggagagggggttgtcggggggcgcggccaccgaccccccccacaacgtgttgtcgtaggcgaagaggccccccaccctgaacaactgcagcagcccctcgggggagttgaggaagataccttgtccgcgccacgaacgcgaagtcgaacttgcccttgttcccctcctcggaaaccatttggtccagcacgggcagggcgagcc

SEQ ID NO: 36032 - DNA, 611 bp, Zea mays
  Clone ID: MRT4577_132861C.1
gggtacctcgaggccggccgggagcaactccagacgcagggcgcggccacccactctcttacatcggctgcgccgcgcgtacaaccatgtggagataggatggccgctggatacggtcaggcttcgcggagaggcaacgtatttcgatcccccttccgcaggaagggatacatgccgcgaacgacctacctgcagatgtactggatcgagcatgacattcaggctgacggaaagatggccggcgacaagagcattgcggaagaggatgatgatttcagcaccttcctcagcgagactggtgctgggagtgacatggcccgtgatgttatcaatgaccttgatcccaccgtcatcaataaggtgaggcctggccgctagcaccaggtcttccactccgactagctcatcaatgtcaagctggatgcagccaacaactacgcccgtgttccctacgccattgacaaggagatggttgacctatgcctagatggcatcaggaagcttgccgacaactgcactggtatccagggctcactcatactcaaccctgctgccgaaggaacaggatctgggcttgattccctcctcctagagcgcctgtctgatgacta

SEQ ID NO: 36033 - DNA, 628 bp, Zea mays
  Clone ID: MRT4577_132862C.1
ttgggtccctcgaggccggccgggtacaggctgtgagttgcgacctccccgtttccaggcccggcggactatcaggtctgacgatgccgctgctgtgtcccacgtcctccggggttctcttgcctgactccctcctccgggatgcaggacgatcaccgcctcggccgtctcgttcagcatctctgtgatgtcttctcctttctgctagctgattctgatcaacttggtgagctccatctacgaatatcacgaatatgttgctgcccaaactgctcatgctgctgattctctcgctggacgactgaaagcaagcatgccggaaaaatcggactttacatactcgaatgacgatgcgcctagaggggagatcatataagcaccagctgcgtatgtctttcttgcgtcgcgcatctggagaaaaaaatatgaagccgtcactgtcttgattagaggcacgctcggttgatgagaagcctaagaaagatactgatggcatgatgaaaagcaagtacacgagcgaagcagagggtaagcgctagcccatatgctacttccatgaatatcttgacatgcatcatggtggacctgtgagcatgcatcaggatctagagatgcagaggaagcttgc

SEQ ID NO: 36034 - DNA, 345 bp, Zea mays
  Clone ID: MRT4577_132863C.1
tcaacaacttacaatccatgttatcataacaagccttctaacacttaggtgtagaactcttttcgtcatgagctccaacctgacatatatatttaaactctaattccaatgtcccaaacaacaaaacaaacatattaaacaaaaatacaaactaaaacactaacattaataaaaaaaacaataaaacaacaaaaaaatacaatattaaaaccaaaaaattaaacctacaaaaaccactaacaatccacctatcataatacctctatcaccctcaatcctgcaacaaacataacatcttataaataaactacctaactttaatttacatcccctctttattaaaac

SEQ ID NO: 36035 - DNA, 799 bp, Zea mays
  Clone ID: MRT4577_132864C.1
ttttattttctttacttttttttatataaacctcttcagttgcatatttaaatgctggtttcagacttcggttgtaggagccgtggcttcggccctcaatctaggctccaagcggagatgcattgcagatttgcagtggctctaatattcactcaccaggctcgttatgctcgcttaggtcttgtttttgaataggagtggcattaaaaaggattggcagggattaaatcatcttctatttaaatttgaatatgaagggatttaatctacttcaatcaactctaatcccttttgaaacgaacggtccttattaggatatttgactatacgaaggccaacaaaatctccagcacaaagaaatcactactttttatatattgtttgagactaaaatatatgccttgttcataggcaatactatggtttaatggaatatactagagtattttatatttataaagtgtttgtttgctttcataaaaaatgtttttaaaaatcatagtattctatatactattgatatttttcaagtattaggctgccttcagcaagggtatgtatacggtcctgaactttaaatatagagatttacaggtttctttccgtgtccaacaacaacaaataaagcgtactctaaaatagaggagcactcgagcatccgctatccctggagttcttctgctggtctgctatcaggcgctagcaatagcttgaccgtccagaagcacttgccagtcgtacgatccgtacattggcaggggtaggagcaatactgtttgctacaaaaaaaaaaaaaaaa

SEQ ID NO: 36036 - DNA, 209 bp, Zea mays
  Clone ID: MRT4577_132865C.1
gagctcactagtctgtggccgcccttgtttttttttttgggtgtttttaaagaaaattggggtgtgttttgatccaagtaaattaacttcaacacacaaagacaccatttgatcgggctcccagggggctacttaatttcagttgatgggccgaaaaataaacaccacggaggggggaaaaacctgggttgatacaattttaacggagc

SEQ ID NO: 36037 - DNA, 350 bp, Zea mays
  Clone ID: MRT4577_132866C.1
ggggcgtaaaaaaaaaacaacacaaaaaacaaacaacccaacccggggcaaagcccaaacgcacccctgtccccacaccactttatggccacaacaccttattgagacactacggcaccatgagctttaaacaaaccaaaatacaacctatgccacgaaataaactggggggaccactacacatagggccacccacaataaaccacaacagaggtcaccccccaacttaaccccggtccccttttgatgccagctttttctcctccctgccctaaccctaataaaggaaaaaaaaaaccaggcaaggcgcaaaacaagtttaaaacttcaaacggaaaaaactttaaagg

SEQ ID NO: 36038 - DNA, 147 bp, Zea mays
  Clone ID: MRT4577_132867C.1
cacctaccggtgtacctgctcaccgcttgttgtgacccgctaccacatcaggtgcgtgtgccggcatcccaaggacgccttcgtctcgtggtggatctttgacaacagcatgctgcgcaggggcttctcctgctactccggggacct

SEQ ID NO: 36039 - DNA, 717 bp, Zea mays
  unsure (1)..(717): unsure at all n locations
  Clone ID: MRT4577_132868C.1
cacgccccccttcggtctcctcgagcctctgaagctcgtcatcgatgacggccgctccccttcgataccggagagcacgccagtgcacatcatggttcccgtcgatgcccggatggcggtccttgtgtccatcgacgggagcgggaacgtcacggtgagcgctccgtcctggcgcatacctataatcagggccggaaagttcgaggccactacctcctccggcgcggggccactgtcattcgttgacctacatactgatgggcgctactccggcatagatttccccgttcccgctggggcgtacagaagcatcggggaaatcatcaaggcaacctgctcctgcttaagccgcccctgcccctctcactatcggcatgaggatggtccctctgcgctgcaacagccgagtgactcgtcccccactacaacgtttgaggacttggaggaggccatgttcgaggcagctccaacatttgaggccacttcctctacctgtccgcaggcacaggcagtaactcccgggtcacccatgtcacccattttgagccatatacgacatgattggggtctggaattttacatcagggttgatcaccaaggatcattccacacatatcctgacattggtggcccgtttcagagcttgcaacaagctanaaatgccattgatcaacatcttcatggccgtcgtcacacctcaatgtgcatggagcaagc

SEQ ID NO: 36040 - DNA, 186 bp, Zea mays
  Clone ID: MRT4577_132869C.1
aatcattaaattcacctacaagggggggccttgtctccactggagccgagcccccatcaaaccctaactatctaaaaccccagtttcgctgtccgatggtcgtcggctagacgcgcccttactaccccactcaaagggccccaagatgtccttctcctccaacccagaagccgatgcttgatccca

SEQ ID NO: 36041 - DNA, 1536 bp, Zea mays
  Clone ID: MRT4577_13286C.1
gggtacctcgccggccggggctcttcttccttccaagccttcgcattttcctctcgtcttccccttccccttactccaaattaccaccccctgctatctacatatcctgtccacactctccctccctgcgctgggccttgcagtttttggttgtgtatcggggaaatggcaatcgacgacgaatcgccgatcagagtcaacagcagaggcggcggcgccatgggaggaggggagtgcgacggggcggagaaccagcggtggccgccgtggctcaagccgctgctggggacgagcttcttcggccaatgcaagctgcacgcggacgcgcacaagagcgagtgcaacatgtactgcctcgcctgcatgaacggcgcgctctgctcccagtgcctcgcctaccaccgcgaccaccacgccatccagatacggaggtcctcctaccacgacgtgatccgggtgtcggagatccagaaggtgctggacatctccggcgtgcagacgtacatcatcaacagcgcgcgcgtggtgttcctgaacgagcgcccgcagcagaggccaggcaagggcgtcaccaacacctgcgaggtctgccagcgcagcctcctcgacaccttccgcttctgctccctcgggtgcaagatcgtggggacctccggtgacttgcgcatccggaagaagcaggccgtcgtcaagaagcatcagaaacgcgtccagcagcatgcgcagcagcagcagcagcagcacaggggcgccgcgttggactcggaggacgactcttcgtccaccagcaccagccgcggcagcgacaggagcagcgtggtgcagagcttcaccccgtcgaccccgccggcgacggccaacagcttccgaaccgggaagcggcgcaagggcgtgccgcaccggtcgccgttcggcagcctcatggtggaggagttctagtcaaaggcgtggtccgaacccgatgccggcccacgcggttgccccctcgccaaaagcagcggtacaccccactgtagcatacgcacttctataccatctactataggtgttgccggatcggccggtctacatagttcatagccacccaagaaaaaaaaaaggagctagtagtagcaagcaataaccaaggccccactgcacgcccgcgcttctggacgacgaggccggtgcaatgtggcacgtacgtcgtacggtacggttacttccattccatagtactgtgctactactactgtagtttacatgcagtcgcagagctgtgctggtagtgagacaacggtttgggttttggtgcctgtaaaaggaaacgaggtagttgtagcagttaccctagtcgtcaccactcatcagcagccagacactactaaattacatagtataataggtgtttcctagtttttaccggcgcttgatatagatgtggatgtacctgcccgggcggccgctcgcagatggggaacggtaggagtgttgttggtactggtgtttgcgtttgttgcctgtaataataaagaggataagaatgctgcatgctcc

SEQ ID NO: 36042 - DNA, 363 bp, Zea mays
  unsure (1)..(363): unsure at all n locations
  Clone ID: MRT4577_132870C.1
ttnataatttttattttacaaggaacctgttttggatgttgctttaaacagttgttttggtgagatcagaccccaagaagccaaaaaggaactgaaaggcgagctcactcaaacggacatacaccgaactcaaatcaagttcatgccaacatgattcttgcttcctgtcacctgagaaccgacctaaatttcagcggccggctctggccaaacataatgcaaacgaggcttgcgaggaaacttacgagcgttggggggtgcaaaacaaagtgtggacccgggcagcatggtgtacgttccagagaagtgcttttatggaaggtaaagcccctcaggcgatggacaggcaggggaccaccattg

SEQ ID NO: 36043 - DNA, 232 bp, Zea mays
  Clone ID: MRT4577_132871C.1
ggacactcagcatgcgtcaatagaataaaataatttgggtacttacaggtacaacaaccttttggttttggtaccaatatataagaatcggggtttttttctttgggacctttaggtccaacaaagaaatggtttatacaatatttggttaaacaattttttaaaaatttggcttgattcttggagggaccaaacaattaaggtggtcaaacctggaatttaattccttttt

SEQ ID NO: 36044 - DNA, 124 bp, Zea mays
  Clone ID: MRT4577_132872C.1
gttacgtgcatgctatacatattaaactttacagtttttctactactaacgtttttttactttaactttgacagacagaccacgacgctcgactgtagctgcgtcctgtgtgcttattgctgtt

SEQ ID NO: 36045 - DNA, 552 bp, Zea mays
  Clone ID: MRT4577_132873C.1
atttctagattcttaaaaaaaaaaaaaaaaaaaaaaaaaaaaaaaaaaaaaaaaaaaaaaaaaaaaaaaaaaaaaaaaaaccctaaaaaaaaaaaaaaaaaaaaaaaaaaggtttttccttccccggggggccctttggggggttttttggggttttccttcccctggggggccgttgggccttccttttgggggccccatttccccctttgggggggggttttccattccctgggccgcgtttttccaccttcgggttggggaaacccttgggtttccccacttttttgcctttggggcccttcccctttttcccggtgggggttttcccaaaggggccccccccgttcccctttccaaacatttgcccaccctgtttggcaatgggccccccccttttcggggcctttaaccccggggggggggggggttccccccagggggccctttccttttgccggcccctttgccccccctcttttgctttttttcctttcttttttgccccctttggcgggttttccccggaagcttttaattggggggttcctt

SEQ ID NO: 36046 - DNA, 286 bp, Zea mays
  Clone ID: MRT4577_132875C.1
cgccgtcgccgccgcggccatcctcctgacagcgtcggccaagaagtccagcgacgtcaccgagcttcagatcggcgtcaagtacaaacctgagtcatgtatcctgcaagcacacaaaggagacaaaattaaggttcattatcgtgctgggaccaaggattgctaggtatgtgcgtcggtgaaaagcggaagctaaagatacctggaaagatgggctatggcgagcgatgctccccaccgaagattccagatgctatgactctgattttaggactggagcatatag

SEQ ID NO: 36047 - DNA, 323 bp, Zea mays
  Clone ID: MRT4577_132876C.1
cgggccggaattcccggctcgacccacgcgtccgcattgtcagtggagggtgagggtgaccccatctgctatttttgtgctcatcctcatacaaccatttggggatgtgcctattagggctccgtaagaactcagatgcctggcctagcagccttcccttgacgcctacatttctaggcacatgtgaggcatctttcctggagccccgagccagccctgtccctccccagggcagcatggcactcaggagatacaggccggactcatcgtgacattgagatcctactggagggtaggggtggtaataaacttctccaagcgct

SEQ ID NO: 36048 - DNA, 899 bp, Zea mays
  Clone ID: MRT4577_132877C.1
attgggacctcgagccggccgggaaacctctcctcttttgaagcccggaaagagccgaacgggaacgaggaaggaaggttccagcgaccgcggtcgtggagtaggactgtaggagaaagcgcgatggggaagaagcggcagcttatctgcctcgcagccgccgtcgccgccgcggccatcctcctgacagcgtcggccaagaagtccagcgacgtcaccgagcttcagatcggcgtcaagtacaaacctgagtcatgtatcctgcaagcacacaaaggagacaaaattaaggttcattatcgtggggcactcactgacggatcagtttttgattctagctatgacagaggtgacccgtttgaatttactcttggaaatggccaagtgataaaaggctgggaccaaggattgctaggtatgtgcgtcggtgaaaagcggaagctaaagatacctgcaaagatgggctatggcgagcgaggctccccaccgaagattccaggcggagcgactctggtcttcgacacggagcttatcgccgtcaacgggaagacatctggcggtgcaaatccagaaactgaaagtgagctctgatacgatgcatttggatggagagtttcagctcgagggagtagtagcagagtcacgtagttcatttggtgccgtgaaagggctgttgtcttgtttccttcatgcatggcaatttatgttttagagatgtcatactctggaaacagttccctttttttgatggtacgaaagctcgatttgtcaagctaccatggccttcaacattgaagcaggtctggactgttgttgcatcgatccacgggtcggaaaatttcaatgtaatgagtggtgaggcagcatttaaaaaaaaaaaaaaaactcgagcagagggg

SEQ ID NO: 36049 - DNA, 463 bp, Zea mays
  Clone ID: MRT4577_132878C.1
ccggccgggagtccgtactacccaggcaagcgatcgtcggagcagagagagacttcctcgcctccatcccatcccgccgccgccgtctctacggtcgctaataagccgccgcatccagggatggagatgaagaagagcgcctgcgccgtcctcgtcgccgcctcggccaccgtggcgctggtcgcgagaggcgccggttcctcaagctcaccgggacgccgcacatcctcgggttcaagttctaaagaccgcatgcatgccatggtatatacagcacacgctagggaggtggtacatacatgtttgtacctgaggtgtcgcaagacaggagggctaacgtttgtacctttacccttttttttcctttctttttggaccctttgggtggttctcttggggcaaattttcaaggaaatgagaaatatttttgcaccaacaaaaaaaaaaaaaattgctgctcctt

SEQ ID NO: 36050 - DNA, 847 bp, Zea mays
  Clone ID: MRT4577_132879C.1
cattgggtacctcgaggccggccgggactggtgaagtcgaagtctcgaaggttccagcgagcgactgtgtcgagcaggagagagcgcgatggggaagatgcggcagctgatctgcctcgtggccgccgtcgccgccgcggccatcctcctgacagcgtcggccaagaagtccggcgacgtcaccgagcttcagatcggcgtcaagtacaagcctgagtcatgtacgctgcaagcacacaaaggagacaaaattaaggttcactatcgtgggacactcactgatggatcagttttcgattctagctatgacagaggtgacccgtttgaattcactcttggaaatggccaagtgataaaaggttgggaccaaggattgctcggtatgtgcgtgggtgaaaagaggaagctaaagatacctgcaaagatgggttatggtgagcgaggctccccaccaaagattccaggtggagcaactctgatcttcgacacggagcttatcgccgtcaacgggaagacatccggcggtgcaaaggcagagagtgatagtgagctctgatacaatgcattggagagttccaaagctcgggggggaatagtagcagcgtcgcatagttcattaggtgaaagggttgctgtttcctccacatagcagtttatgctatagagatgtcacagaaacaagtcaggttttgcccgatggtctatcagtctatgcaaccccgactgcctacgtactcccagaacagtttcctttacatctcatgaaaactcgaatttgtctataaagctaccatggtcttcaacattgcaaaaaaaaaaaaagccgaaaaaaaaaaaaaaggaaaaa

SEQ ID NO: 36051 - DNA, 357 bp, Zea mays
  Clone ID: MRT4577_13287C.1
gactatcagtagatcgcgagcgcacgacctcccctttggctctcattgacctcccggatagatccatgtactagaatgtgaccacgagctctgcgctcaaaggcggcgcataaagcctaccagacacacagggctgcatgtactactcggtgacgatcatcggcactatacaggagacgagaggaagcctcagcatgctctccactatgtggcatgtggaccttctctgcctccgcagtgatcgtgttggacatccaaaacctccagtatatgatcctctggagatgtaacgcttcgacgtacaccaccaggacgaacatcctgcatggtatgcgtgacggccgccttagcatatgc

SEQ ID NO: 36052 - DNA, 412 bp, Zea mays
  Clone ID: MRT4577_132880C.1
ttttttttttttttttgtgcaatcatgcaatatcatttcgcttaccagcctcgctttgcaagtgcaatggcaagggttatatacatctccttcctccagcctagatgctgatactcttctttcctccgcctgcccagacctgctgccagtccatcaatataaaaaaccagaaccaaaaaagcaaaaagcgatcctccgctccctacactctatcccctacactcgccgcttaggcaaggttgagggtagcaccctcgccaggaacacacttggtgccaggggcaacgggcatggcgacgctccaggcaccggcggcgcactgggagaaggtcgagccgtcgtggcacttgaaggtaccctcagtgcaggcaccaccggaagcggggggaggagtgttgttgacgggaggagg

SEQ ID NO: 36053 - DNA, 332 bp, Zea mays
  Clone ID: MRT4577_132881C.1
cgacacagcttgttataatgtaatggagtcgtttacgagccacccataggtcgttcactggtcgggcggcacctgaggagggtcatgccagccatcgccaacactggccgcgtgggcaatgggctgcatgcacctccgcatggatggggatggagtgtactggcaatgggtggctcgtcaggggctccattacattataacgacagtacctggccggccggccgcccgagggggcgtttccgcgcactggggggcggcgctcggggagccgcgcgcggggcccgcgcgtggcgtcccggggtgggggtgtccgcggccgccgggcgggccgc

SEQ ID NO: 36054 - DNA, 661 bp, Zea mays
  Clone ID: MRT4577_132882C.1
ccctcctcgagttttttttttctttttttttttttttttttttttttttttttttttttttttttttttttttttttttttttttttaacaaaaaaaaagggcccaattctttttcattaaaaaaaataaaaaacccccaacccctggccggggggaaaaaaaaactcccaaaagcaaaaggggaaggggaccttttttttttttttaacctttttaaataaaaagcaaaggaaagggaaaaaaaaaaaaacaaaaaggccccccgggcccccaaaagaacgggggggggggggggggggggcccccccaaccccccttgttggcgccaaacccaaaccccgaaggaaaaaacttgacaacccccggaacctcaacggggaagggggggatgcaacccccccaggccccgtgggggggggttttaatgctggggaggcccttcaaaaaggggctggggcacttaaacccgttgccaaaaccaatttgccaaacccggcccccgggggaaaggcggcccttggccctaatgaaggcaacccccaaccaaagggacctgctgaacgttttcccaaaacggggcaaggtaatgcggaacccccccacggggggggggaaaaggtggaggtttttttgaaactcgaaaaaaacggcccccccccc

SEQ ID NO: 36055 - DNA, 328 bp, Zea mays
  Clone ID: MRT4577_132883C.1
gtgaagaaagaagtaaggcgaagctcacgagcagtgattaggctatttatctatacgcctctggtctctggagtgagatagaagtgtttctcaaactagtctatgcgaaggcaggaggtactgatatttgtatatatgataggagtaacaggtaccgcggatctccgtcacagtgtgtgctagcctgctgaccgctgttaggaatccggtgtttgtcttttggcgaattgtgttattgcaactagaacggacaaatagtcctagtcatgagattgatatgtcatttaacttgggattcgaattgaagatacccatcatataattttgt

SEQ ID NO: 36056 - DNA, 767 bp, Zea mays
  Clone ID: MRT4577_132884C.1
gcttctcaccactaattcaccgttgaggagaggagctggctgtgggcctgtggctggccggagagcaccggccggccggacctaacagcatacaccacacactagctagcaaagagagagggtgccgcgcgccatggcggagacgtacggcgatctcagtggttctgtccaagctcggggagctagcgagacgaacgaggcgaccatactgcttgaggtgggcgacaacatggcgcagcttcgcgaccgcctcgagtggctgcaggccttcgtccgcgacgccgacaggaagcgccgggccggcaccgaccagctcacccgcgtgtgggtgcgccagacgcgcgacgtcgccttcgaagccgaggatgcactcgatgacttcttttacgagactgtaatcttgctgacggagagtacatcctcgtgccggagcaaggagctgctcaggaggtagccccagatccagcaccagagccagcaccagaggacctgcctgccactgctttggaaggttctctggaggagatggttgctgggataacttggccgaccaccctgccaccgggttggactgtcgagtgggaccctgcctcgactgaggaggagcatgaggagtgatgggacaggcttccccatctctctgtgttaattaccgttagttttattccgctgcacttcgaacaatgatggatcctttttcaaaaactccgatgatgatgatggtgatgtaataatttaaccttatgacatgtatggttttatgcttt

SEQ ID NO: 36057 - DNA, 910 bp, Zea mays
  Clone ID: MRT4577_132885C.1
tgaaaaaggatccatcattgttcgaagtgcagcggaataaaactaacggtaattaacacagagagatggggaagcctgtcccatcacgggggaggctcctcctcagtcgaggcagggtcccactcgacagtccaacccggtggcagggtggtcggccaagttatcccagcaaccatctcctccagagaaccttccaaagcagtggcaggcaggtcctctggtgctggctctggtgctggatctggggctacctcctgagcagctccttgctccggcacgaggatgtactctccgtcagcaagattacagtcatgctgaaaaggctatagtggaagatgccatcggcgctaatggtgtgtgctcgatcttgtactccttctggttctctgagatcttctcaagccttgtattgatttttttaatccgagtagacaacccgtgtcgaacaacaatttgggtgtacaaacttgtcaggaattcgtggcacagtttccagccttgataacctttgctttctagatcaatctcgtaaaagaagtcatcgagtgcatcctcggcttcgaaggcgacgtcgcgcgtctggcgcacccacacgcgggtgagctggtcggtgccggcccggcgcttcctgtcggcgtcgcggacgaaggcctgcagccactcgaggcggtcgcgaagctgcgccatgttgtcgcccacctcaagcagtatggtcgcctcgttcgtctcgctagctccccgagcttggacagaaccactgagatcgccgtacgtctccgccatggcgcgcggcaccctctctctttgctagctagtgtgtggtgtatgctgttaggtccggccggccggtgctctccggccagccacaggcccacagccagctcctctcctcaacgggaattaggggagc

SEQ ID NO: 36058 - DNA, 694 bp, Zea mays
  unsure (1)..(694): unsure at all n locations
  Clone ID: MRT4577_132886C.1
agaaccatacatgttcgcaatgttaagttattacatcaccatgatcatcatcggagtttttgcaaaagtaaccactcattgttttgaagtgcagcggaaaaaaaactagcggtcattaaacagagagatggggaagcctgtcccatcactcctcatgctcctcctcaggcgaggcagggtcccactcgacagtccaacccggtggcagggtggtcggccaagttatcccagcaaccatctcttccagagaaccttccaaagcagtggcaggcaggtcctctggtgcaggctctggtgctggatctggggctacctcctgagcagctccttgctccggcacgaggatgtactctccgtcagcaagattacagtcggatacctcgccaaagaaatccaattcctgtctcttattgtagtcacttttgatgtcaaagatgtggacaaagtctgctgcttctgccatcgacaagaagtgcccgtctgatgtaaaacgaatagatcttattgctccaacgttgcctctcaagacatggacagactcggtgagattcctggcatcccaaatccgacaagttttgtcttggttaccagtggcgaatgtcaggccatctgggctccaagccgaagcanaggagaatccaagtgacctttcatggaatgaatagtctttcctgaattagatcaataggtaaag

SEQ ID NO: 36059 - DNA, 816 bp, Zea mays
  unsure (1)..(816): unsure at all n locations
  Clone ID: MRT4577_132887C.1
aaagcataaaaccatacatgtcacaatgttaaattattacatcgccatcatcatcatcggagtttttgcaaaagtaaccatcattgttcgaagtgcagcggaataaaactatcgataattaaacagagagatggggaagcctgtcccatcactcctcatgctcctcctcagccgaggcagggtcccactcaacagtccaacccggtggcaaggtggacggccaagttatcccagcaaccgtctcctccagagaaccttccaaagcagtggcaggcaggtcctctggtgcaggctctggtgctgggtctggggcaacctcctgggcagctccttgctccggcacgaggatgtactctccgtcagcaagattacagtttgagggaacctggtgaattgatgaagaggctgttgttagagtccgggtcgaggaggaggagctggctggcgacggcgtccgcgagtaagtccacgatctcgttgccgaggaagactatgcgctcccggaagaggaggcccataacgtcgccggcgccggcgccggcaccaccgcccgcggcatccgactccgctcgtcacagcggtgcgtgcggtgtcagtgaggcgcaaggcttgaggctgagtgccccttgctgcgcccactgggagggagcccaagcgcgagcgcatggccgcttgacacgcagagcggctgctcttccccgccgcgacggagagggacgcggtggcactggaacttcccggccgccatatatgtaccgaatgggactgagccgaactgtctgccagtagcggccggcggcggtgttcncccaccag

SEQ ID NO: 36060 - DNA, 335 bp, Zea mays
  Clone ID: MRT4577_132888C.1
tatttttttttttttattttttgacataaagacaacttattccatacttttctactatacagattcattctaaggggtacggattttgattgccatccatgctcacacaaaattgagcttgatacatgggacattatgcttggcgatatttgtattttgccaacaaaaaagtgattacacctattacctaaacttaacccctaggattatgtattggaggctaaaagattacagtttcatacaggtgccatgttttacgacataattatagctttgatggagtcaatcccacataatgccatggtctggtttatgtgaaaatgggttccaattta

SEQ ID NO: 36061 - DNA, 166 bp, Zea mays
  Clone ID: MRT4577_132889C.1
cggcgcgtaggcagacgcgtctacggtacgcatgggttttagcatgtgagcggatcatgtagaggtatctacgaccatcaacatgtgcattacaggtgctacctgtggtgtatttatatgcacataccattacgggacaaccgctatactaacatgcgcctgtaaa

SEQ ID NO: 36062 - DNA, 1576 bp, Zea mays
  Clone ID: MRT4577_13288C.1
ccccgccgccggccgggcttctaagccttcgcctttttcctctcgtcttcctctctctcccccgctccaaatcccaccctctctctttctctctccacattctccctgctgtgcaccttgcagcagccttgggctgtggatcggaaatggcaatcgacgatgaatcgccgctcagagtcaacaccagaggcggcgccatgggaggaggggagcgtgacggcggggagaaccagcggtggccgccgtggctgaagccgctgctggggacgagcttcttcggccaatgcaagctgcacgcggacgcgcacaagagcgagtgcaacatgtactgcctcgactgcatgaacggcgcgctctgctcccagtgcctcgcctaccaccgcgaccaccacgacgtggctgaaggggctgctgtgcacgagctacgcggtccggtgcagggaccacgccgacgcgcacatgagcgagtgcaacatgtactgcctcgactgcatggacggcgcgctctgctccctctgcctcgcgcgccaccgcgaccaccactccatccagatacggaggtcgtcgtaccacgacgtgatccgggtgtcggagatacacaaggtgctggacatcgccggcgtgcagacgtacatcatcaacagcgcgcgcgtggtgttcctcaacgagcgcccgcagcctcgcccgggcaagggcgtcaccaacacctgcgaggtctgcgagcgcagcctcctcgactgcttccgcttctgctccctcgggtgcaagatagtgggcacggcgcgtggttaccgtcccaagaagaagcacggcggcggaggcggcggcggtaacaagaggaagagagcggcgcttaaggacgtgcgctctgactcggaggagtcgtgcaccagcaccagcggcgccagcagcgacaagagcagcgtcgtgcagagcttctcgccgtcgaccccgccgccggcctccactagctaccgccgcccagggaacaagcgccggaagggcgtcccgcaccggtcgcccttcggtagcctcatcgtcgagttctaggactccttcgtcagcgcctaggcaatgcgctctctactgtacagtacatgacaaagcccagaagggaagggaataacaggacgcgctacgggacgtggaggccggcctcgttcggtagaatcgccctatagttgtcggactcctttgtcagggcctaggcaatgcgctttttactgtacaggacatgacaaagcccggaagggaagggaataacaggacgcgtttttggacgtggaggccggccggcggggcaaatgccagcgacgggcgaaagcggtaagcacaccccagcggtgcagcccgtgctgctatagttttgcttttttttcgcgctttgttacttcagttggtattaagttttgcacccttgtacattgtaatatactagtactcctctccaatgctagatgtacatatacatacccagtgttggcagtttcataatttgggggtagcagtaggcagcgaggtgtgtttgtatgcgcatcatcagctgtgtaataaaaataaaaaaatgcttgctccc

SEQ ID NO: 36063 - DNA, 657 bp, Zea mays
  unsure (1)..(657): unsure at all n locations
  Clone ID: MRT4577_132890C.1
gtttcntgcaggggaatcggatatgccacaggctgcatggggggggggtgtgtgtggatccccatatcaaatttgtttttccctaatcaggcaactcaattgtgcgagtaatagcaggagctcttccgaaaggccttcacatgttaatcctatcgaagaataacatatcaactattgaacgcctcanagaattggcgcgggggcgcttgttggatatcaactataataggatatctagaattggccatggtatgtgttttagcttctcatatgatcttttttatgtgtttctccttggttgtggccacatgataggtagcttactttgttcctatcccctttcccccattttcgtcttttgatatggcaagttcactgtgctttggattcttaactatctcaagtcatatgagaaaccccgttcatggatacttcctgataattatattcttcttgcattgacttgtgttttagatcatctgttaggattggcctcatgttcctctttgaaggagttgtatctggtcggtgacaagatcagtgaggtagatggtcttcaccgacttctgaagctcaaggttctggacttgtgccacattcagtcttctgtagccactatacttggggttggtgaggctggtggagggttcagttctt

SEQ ID NO: 36064 - DNA, 739 bp, Zea mays
  unsure (1)..(739): unsure at all n locations
  Clone ID: MRT4577_132891C.1
tggtacgcctgcagttaccggtccggaattcccgggtcgacccacgcgtccggttgacggagaagcagacagaggtggagactgtcatgtcagaggtatcgggcttccctatgcctcagctggatccccgggtcctggaagtttaccgaggagtccgggaggtgttatgtaagtaccgcagtgggaaactgcccaaggcttttaaggtcatccctgcactgtccaactgggagcagatcctctatgtcactgagcctgaggcctggactgcagccgccatgtatcaagccaccaggatttttgcctctaacttgaaggagcgcatggctcancgcttctacaaccttgtcctgcttccccgagtgcgagatgacattgctgaatacaaacgactcaactttcacctctacatggcgctcaagaaggccctgttcaagcctggagcctggttcaaaggaatcctgatcccactgtgtgagtccggcacctgtaccctccgtgaagccatcatcgtgggcagcatcatcaccaagtgctccatccccgtgctgcactccagtgcggccatgctgaagatcgcagaaatggaatacagcggtgccaacagcatcttcctgcgcctgctgctggataagaagtacgcattgccctaccgcgtgctcgacgctctggtcttccactgtctggccttccggacggaaaagcgccagctgcctgtcctctgncccagtgcctgctg

SEQ ID NO: 36065 - DNA, 477 bp, Zea mays
  Clone ID: MRT4577_132892C.1
cggggtctaagctctacttctcgagcggccgagcctttcttagaggtgggttggattctcctccccctgcgcttccggttcgggttcgcgaggttctccgcggttcgggttcgtgggtgagcggctcgagaggcggcgtctgatgtttgttaccgatgattctgggcggcctcagctgggccacggacgaccactgcggtccacaacgccttcagcacctacggcgaggtgctcgactccacgatcatcctggatcgggaaacgcagaggtcccgcggcttcggctttgataccttctccacggaggaggcgatgcggaacgccatcaagggcgtgaacggcaatgatcttgccggtcctagcatctccggatacgacgccctgttccgcggctgccgtggaggcggcgtccgtggcctctgtaggtggccgtgggcgctgcgcgtacacttgtggtctgcgccatgatggctgagg

SEQ ID NO: 36066 - DNA, 581 bp, Zea mays
  unsure (1)..(581): unsure at all n locations
  Clone ID: MRT4577_132893C.1
ggcatccgaaagatcaatttattttgcactccgctgttatatcgacgtgcaccaccgtcttgccgtcgctcatttcctcctcgctcggctgcttgcctagggtttcacctgctaccgccccacctccagccgtcgcttcagatcccgccgctgccggcgctcgatcctacttcgttgctcctagctgatcccgctgagctcggatttgggcccttcctccccgccggaacagcgtccggacgcgcgggggcagatctgggttttggtggcccgcttggtgtatgagaaggcctccagagcttggaagtaatggaggtggagccggcgaggagggacgcggcancgctggacccggagctgctgcagctggcggagctcgcgccgggcgcgcttcgtgaaaactccatagctgatgcgctgtattcgcaagtggctcgtgctacccgagacgaacaangctggtgaagtcctttgatttgatgatgcaaaagnactgggtggcngtggcttaaatggttgcctgggnangctctgcnnanccacaaaatgcntggcttcaaagtaatntctcctaaccttcc

SEQ ID NO: 36067 - DNA, 358 bp, Zea mays
  Clone ID: MRT4577_132894C.1
ggcccgactccccggccccattcctgaccgtcagattacgatcgggaggctcaagcgcaccaactggcggcgccgccccgccgccggagagctctccggcgtcggtgcctcaccgtctcccgttattccggcgccttccgttcctcgacagaagcggggctatggtcgccagtcgtcacgcgctcgccgcacgagcaggagcaggagcagggactgctggccggttagcctccagatgggtagctgttctgcgcaacaactggaggagcgcggagggagaagggactaaacaccaggggggaggtggcggaggcctttctaactcgaggggtcactttctggtctaagatttttagac

SEQ ID NO: 36068 - DNA, 614 bp, Zea mays
  unsure (1)..(614): unsure at all n locations
  Clone ID: MRT4577_132895C.1
cctggacagcaataccgaccggccacaaccatcacgtgagtccctgccaacccgtggccgctcgagaggagacggagagagcgacaacatcacaagagacccacttaccgatgatgaggccgcgcgaccttaatcccggcgatgaacctcgagcactgcagtgaggacacgtgtcatctgaaaagcaagttggtacctgaaatctcaagtgccaggtcaagaataggtatcataggatgaggtgcttggaggatgctgtgacgagttcgtgagaggtctaggctgtcgtctctcagtcaactttgggttgctggaccgttgtctccttataatgtaattatttatttattttgtatagaactcctactatgtagtaaagttgtgacattcgatcctgtgccatgattcatcatatgtgtgagacttggtcccagcacacctgggtgattatgttcgcgcccgggtcttggtgccccanaactcgggtgtgacagaagtggtatcagaggaatgttgactataggacgaaacctagatagaactggacaacccttatttacttacctctgctactctgattcttttctanacttttcttaatcatttctgatcta

SEQ ID NO: 36069 - DNA, 566 bp, Zea mays
  unsure (1)..(566): unsure at all n locations
  Clone ID: MRT4577_132896C.1
cggnactccggtcggagcccgcggcggcccgcgggtgcgcgccggtgctgcggccctcatcccgggccggcgccgtccggcactgccgccgccgcgccgggacgtgggctctgctcatgcggatcttcaggaggctcttcgttgtcgagaagaccgtcgtctccaggcgccagcgccaccgcgccgctgccaaggcgagggcgcgctgacgcgacgaccacgcacccttgcgcaggcgcagccaggcaggcagttgccatttgcctccacgaatgtaatgagttgcttcctatgcgacaagggaagaagaaccatgcatgcgttgcttccttcctatgcgatcgtacggcctactagtaagttacgtattatactgctatgataatccattagacacgggagtgaggaggtctgctcttgatgctgtaaataaataggatttcagtgttgttcatcgtcagctgatacagagaaattagagcagtgccatagcaatgtcgtcattaaatctcttcattctcccactgtaaattaataatttatttattactaacccccacaaaaac

SEQ ID NO: 36070 - DNA, 275 bp, Zea mays
  Clone ID: MRT4577_132897C.1
tcgagcggccgcccgggcaggtgcaaatccagaatgacgtagttctgacgttgggctcgcattgtcgcgtgttacaataatcataataactatgaggaataaatatgggaatgttgccagatagtactggcgtcggttcttaaaaaaaaaaaaaaaaaaaaaaaaaaaaaaaaaaaaaaaaaaaaaaaaaaaaaaaaaaaaaaaaaaaaaaaaaaaaaaaaaaaaaaaaaaaaaaaaaaaagggttggccctgggccggaacccccctaggggca

SEQ ID NO: 36071 - DNA, 641 bp, Zea mays
  Clone ID: MRT4577_132898C.1
attgggtacctcgaggccggccgggggtcaccgccaacaagccaccgcatgttcttgtagaagaaatctgagagccattaacattgctatgcgggtgagagagaggaggaagtcacctcgtgtctacgccatcgacaagcattggagtcggtctggagagcgtccgggaaaccaggaattcgtcgccggagtacatcaccgccgcggtgctcctttgtttcgtggacaaggactgctactactctagggccgcagtgaggacacgtgtcacctgaagagcaagttggtacatggaatctcaagtgtcaggtcaagaacaggtaccacaggatgaggcgctcggaggatgctatgatgtgttcgtgagaggtctaggtcgtcgtctcccagtcgactttgggttgctggaccgttgtctccttataatgtaattatttattttgtatagaactcctgttatgtagtaaagatgtgacattcgatcctgtgccatgattcatcatatgtgtgagacttggtcctagcacacctggtgattatgttcgcgcccgggtcttggtgccccgaaacccgggtgtgacacaaatgcaagtcttgtctcctttgcatttggaccgaaaaaaaaaaaaaaaaaagcggcc

SEQ ID NO: 36072 - DNA, 401 bp, Zea mays
  Clone ID: MRT4577_132899C.1
agcacgaaaatgggagcgccagacacgcctatggggagttacatttcagtgccgacatagataacatctagacaacgtagcgggctggaacagtgaccgggaatacacagaaggctcaaggcacggaggtaaataggacctcccccccaacgggggggaggcatacaaggcgacgatggataaaaaagaccacttgacaacggtgtagaaactttaggagaggtagaaggaaaagcccagctagaaaacgcggttagtccacctgaagacaccaaaggggaaggacgaacaggcacgccgtggtgcgcatcatgaacaacttgaccgttggcccgggcacgcagatcgtggtgatcacgaggaacgtaacccccgttaggatcccactcccagacgtaaat

SEQ ID NO: 36073 - DNA, 506 bp, Zea mays
  Clone ID: MRT4577_13289C.1
gaccatatccgactgtcgttgaaattatgcaggattttgtggtgttaacccgtccatcacatgaccgactgtgataggcctccacagtcacctgccatggacgatcaccgtgctgatgccactcgcaccgttggtgtacctcaacagggtgaccgatgggtgcattggtctcctcgcctacaagttggacctcatggaactgtgctccagcactgatgatagaattggctacggctcgaccactgacgcatagcagatatggctagttacttgaggcgagactgatctgatagaaccatctagagcgcacactggcttaggagtggcctttatggctgcggccaaggactactagcttactctcactgtgcttgcctcacatgagctgggagaggaagatcatattctatgttctggaagctgaacttggccttactgacccgctctagggactgtgcggcggtgtctataccgcgaccgagatactagcaattactccctactct

SEQ ID NO: 36074 - DNA, 314 bp, Zea mays
  Clone ID: MRT4577_1328C.1
ggcttggacctttgggctgatttagtgcttggcgggggaagagacgacgtgggagatgcatacggatgcgtcgttgctggcggagtatacagttgatctatggagtggtggtcggcctttgggtgtggtgtgctctcggatggtggtggagaataagtagcctgagtgggtgtcggttgggtctgattctcgttgtttggatcgggagaaggcggtgtgggttactttgggttggatggcgtgtgaggcttctagttatcccaagagttcatacgctgatgcctagtagactgagagtggctaggagtttacgt

SEQ ID NO: 36075 - DNA, 1737 bp, Zea mays
  Clone ID: MRT4577_132900C.1
ccggtccccgtgtcgtgcccctgcccaggcatgcaccatcacagtcgccgtcgcgtgcctcggtgctgagcgtcgccgccacagtcatcgccccagctatgccccgtggccatgttgtcgcactggctagggctggctctccgccacctacctagtagccacccatgcttcattcgtcgacgaacattgtcacacccgtgttttaggggcaccaagacccgggcgtgaacataatcaccaggtgtgctgggaccaagtctcacacatatgatgaatcatggcacaggatcaaatgtcacatctttactacataacaggagttctatacaaaataagtaaataattacattataaggagacaacggtccagcaacccaaagttgactgggagacgacggcctagacctctcacgaactcatcacagcatcctccatgcgcctcatcctgcggtacctgttcttgacctgggacttgagattccaggtaccaacttgctcttctgatgacacgtgacctcgctgcgaagagttgcccagccgtcgctgcttccgataagtctacgtgcgccgtccctgcatgactccgtccccggctttccgcgatgaggcacaggccctcgcgctggtgctccccagtggcagcaattcgtcttcaccttcctggcaggcgagcggggcacagacgaaggttactggtgacggctccctcatcctccctgctcgcggcggtagaactgtcgagtcggggctggctataggtgagcaccagggtcttcatatttatacccgcgagaggatgccgaggtgagggaaaatcctatcagaatcctaacagatcaggcgattgttacgggatccgtaacaacccatgtgcgcagtgcgcttgcgtttgctgacgatgcttctggaatgttgcccacatgctacgaatcagtatggcttatgtcatggctgaccccatgatgatgcgatcaacggctagagaatgtataaaaggaaaaaaaagagcaagaagcgtgggctatatattccaacagcttgacgtgctgggtgcatggaatagggcaatctggcccaaccggcctacatgtttctcttttttttttaaatttcaacttcaagtttatgttacattttaaacttagggtaaaatacagggtaaaatacagcaacgaaaagatcaacataaatgcaaatatgtgtatatatatttgtttgtattatttactttattaattgattacgcaaatgttttcaaatatgaataccgcacacatattatttatttcaagagaacatcattttaaatgtatagacaatttaaatgtttattcaaaatttccataattattactaattcattttaagagatgttattttcaaatttctattgggagatactttagtttgatttcttttgctaaccccaaaattaggattttaggtgttataaattctaccccccttaacagaaatctcgtcctcgagatttgtaagaaaagggatataataagtttggtctagaattttagtttctcatttggttttggaaaccaaagttttgtttaaagttttttatatggatatctatgtctagccatttattatgtcagatgaggtacggttatggcaagtataggttgtggcaaggaagagtataataaggaaagacttcatctagaactggggatcttgattccgctggcgattcaacttgatctttgaagacttgagttg

SEQ ID NO: 36076 - DNA, 441 bp, Zea mays
  Clone ID: MRT4577_132901C.1
tggtatgcgtgggcccacgcgttcgccgaggcgtcctcgtacccgcggggctgtgcgggtacgaacgcagcactgcgcctacaaaaggaggacaacgttcgccatctccagcaggcaggccaggtgacataaacaacgtgccctatggcatgcccaggaccacctccgttctgcaggcgcactaccaccaccgatacaatggaatgctcgcggtcaactaaccatacatgccgcccacgcgctgcgactacaccgtctctccgcccaacatcacgcatagggcccacggaacctgaatcatgctactcacatgaaacaccaccggccaggtggtgttgcaagacaccagcaagcactgctcctactgccacccgctgcacctagactgctactgctccttggggaacagcacgggctttagagactacgactctcccaaca

SEQ ID NO: 36077 - DNA, 322 bp, Zea mays
  Clone ID: MRT4577_132902C.1
atattgtcagtagagcggaaaacggtccgcggcatgtttgggccattgcacatttttctaagtttgaacctaacaatataacgcactttccaatgcaaccgattcaaaaataaacagatggggttgaaaactgcccggaaacactgcaaacgggtgattttttgttcaaagtgactaccagggccttgttttctgatacaaatggagaaagctaggtcgttgctcccaaacatggattgataaaaccacaaccttgtggacttcccggcctggcaattaacgggtttttattgtgtcctgggataatgttcagaggtttttt

SEQ ID NO: 36078 - DNA, 222 bp, Zea mays
  Clone ID: MRT4577_132903C.1
aaaaaacatacagaaacaaaaaaaaaaacaagataaaaggaagaacaaaaaaagaaaaaaaggaaagctagaaaccagaggtggggaagaccaacagcttgaccgtgactgcgagcccagatctccaggccggtctggcctaagatgacgtctgcaaagagcctgctggtcccacagacaaattgacatcgctggcgatgccagtgcaccagctggtgagac

SEQ ID NO: 36079 - DNA, 401 bp, Zea mays
  Clone ID: MRT4577_132904C.1
ggacacgcagggtcaacccacgcgcgcggcctgctatcagatcctcacggattgtcaagctcaagccagcacatcggtactgcatacttcagagactgtctacaccagctatggtgtgcgtacagaaactcaggaacatcttgctgcacccgggttaaagaacgctgaccattccattggcgcaaccgatgcaagtgaccaattgcttggcaatctagttccctgccctttagagaaacctgatgagaacacacagtactattggtgaaaatgccacagggacaggagatgcaaacacgatcatgggagcatgccataggtgctgatctggaaccattaccagctagcaaactctcttgaattcttgaattcgatggagcttcgcaaggaaatcctgggaa

SEQ ID NO: 36080 - DNA, 476 bp, Zea mays
  Clone ID: MRT4577_132905C.1
tggcttggaacctttgggctgatttatgtgcttggggatgcccggttaactaagactaggactaggaggcaaaagaacgtgttacactgcgtacgagcccggcggctctcatccccggcgacggctccgaaagagaaccattagtacgttcctttacatctgccgataggacgggcaacgaaaccataagatccatagtcgctaaggtacccctagccaccgtgaacctattctcatgcaccgactctctgcgcgcttcggactacgccgccctcgagtctatagtcccttcctgtaaggttaatagagtctccaggtaggtgatgccgggaatctcaaacctcccggccgctatacacggcggctagaccggtctcctcctgcacgagataacaactgtggaatccctaatttctacaagtgatacggacccgtacacgattgtctccgtaccggaatcccgccgtataacaacg

SEQ ID NO: 36081 - DNA, 194 bp, Zea mays
  Clone ID: MRT4577_132906C.1
cgctcgccatggccggcggcggagagagcgagggcgcgcggccatggagtccggcgataagcgcctcaacgagctcggctacaagcaggagctccgcagggagatgacgctgttcaagacgctgggcatctcctgctccacgatgacgctcttcactcggatcacgccgctgtacgggaacaagcctgcagtac

SEQ ID NO: 36082 - DNA, 430 bp, Zea mays
  Clone ID: MRT4577_132907C.1
gtcctgactttgccatctctctcctcgtctcctttcctctctctctctctctctctgtcgctctccaatcttctttcctcttctttgatcaccagccaggccaaccgcagatataactccttccgattctcccctccgtggactccgcttgattcgacaaaagtatatgaccactcgacgatcacaagaagtagcagattgctagctaggaacttggtgtctccggccgtgctccatttgatcgtgaaagaacacagctgcaacaccgtggctttccgtttgcttgatcgtctcccaatgctgcgaaggaacctaccgaatctctccctccagataagcccgccacccgccgcggcatctgacgcaccggcgacgtattccgaaggaagcgacgaggtagggttcttcgcaaaccctagctccggcgcgg

SEQ ID NO: 36083 - DNA, 370 bp, Zea mays
  Clone ID: MRT4577_132908C.1
cggactgtgaaaccctaaagccctgtgcttctagccgccgccaatctttcctgctctgaaccgattagcggaggacggaagccggaggggcgatggcctcgcatatcgtgtccgaacttggacgacgactcttgcgtggggccgggactacgaccgagtctggatcattgcgctcgaccagggtaaccgaaccacgcacttgcacggcgtcttgaccgactactagcgcctgatagaagatgcggccaagaaaccaaacagccatgaacccaatcaacaccgactttgatactaagagtattatctgcaggagggtcagtgatgcaccagaccagagagatctcaagatgtggcccttgaacgtcatttc

SEQ ID NO: 36084 - DNA, 599 bp, Zea mays
  Clone ID: MRT4577_132909C.1
tcccatgcatgtaacggctgcccgtttccccggcatctcctctacccattcactccaagaaggaatggccgccatgccattaatggcgttgaagacaccgaccgttctccctctctctacgacgtccctccctcctccttctctctataaaacgcgagctcgtgcacatggagctgattcttggtcgccccaacctctccatgatctctccctctctcccgccgtagagaatcgctgtcggttcgctgctcgccgccgttcgacgtccggagccgaagccgatgccgcgccgacgacccccactgctgaggtcgtgccctgcttccccttgctgctccatcggtcatcgcaccctgctcctttaccgaccccctgctcttcaatttcgtccacacgcaagaaccaagggtgaggaagaagactttgcagatgatgtcgacaagtactaagtctaccgatgcgccagtcaccttcctgtggaagagtgtccaagcttaattctgttgtactttgataatgatactttttaagacactatggtctggatgatgtaataaagttactctactctctttaaaaatttaaaaaaaaaagcggcc

SEQ ID NO: 36085 - DNA, 269 bp, Zea mays
  Clone ID: MRT4577_13290C.1
cgaaagcaatcatcggcgacgacctaatgcgaagcggcaggttgtgattgcgttgcgttgcgtgcgtgcgtcctccatcgtccatccgaaacaagaatcgcgtatgtgtttgcctagagcatgcagcagccaaacaaggcttaaatgtgtgtgtctcgtaagcaataaaaccactttgtaaaggtaatcatggttgtggggttgtggcctgaatgtttgtagtgtatgcttaagcaatgcgcttccggtgaattgttgagcagttttac

SEQ ID NO: 36086 - DNA, 378 bp, Zea mays
  Clone ID: MRT4577_132910C.1
cgcagccgcgtcgtaagctggacctctaggcggcgcctggggtgttgtgtttttttttttttttttttttgttgttttttttttttttttttttttttttttttttttttttgggaagaaaatttggggttttcaattccgaaggacagaactcgggttaaaggtttttttttgagggggggggggggccattttcttgtaaaggaagggggcttttcccagggggggagggggggtttcccccccgggggccctttaacgggaaaaacaccctacaaaaatttggacaggggttggagagtaattatggccccgggaggggggcgggcaaaaaaggggacccatgtttttttccaaaatccaccgtaattgggccgg

SEQ ID NO: 36087 - DNA, 197 bp, Zea mays
  Clone ID: MRT4577_132911C.1
gacattggcggggggaaacgtctatgtgtcgtgtcggggcttttaagaagagttcacatttacaacagagggacaccatgtgctgaatggagttggcgattgatgaattcagcttgattagcgtaccctagtactagaccatgatggtcacgaagtggcacgatcgtctcaagcataagctgcactagaaggggtgt

SEQ ID NO: 36088 - DNA, 313 bp, Zea mays
  Clone ID: MRT4577_132912C.1
ggctcgagatagaattccctcatagccgccgccgccgccgccgccgccgctcatctcgccgagaggtgacgggaccgaggaactcgccgagttctaagacacagaatcgcttttcacagcctggggtctgctgcgtagggtcctgttgaaggggagaagtttaagatctgttccacagatcacgcgtgcgtcctcgcgaacgggggttcgacacaacatacgagccgaccccaggctgtgaaaagcgattctctatcttagaactcggcgagttcctcggtcccgtcacctctcggaaagatgagcggcggcg

SEQ ID NO: 36089 - DNA, 444 bp, Zea mays
  unsure (1)..(444): unsure at all n locations
  Clone ID: MRT4577_132913C.1
gcccgaaanccccgggccgcccacacccttccaattaaaaccaattaccaccataaaattcccattattgacccaccaatgccacccaagaaatggtcctacctaatcctgctggggcttactcaaaatcctcttccccaacccattttccaacattcttaacaacctccaatactttccttttttccccaatacttttaaccaccgtttttttaagtttttaaaaccccaatttttaaaccttccagaatccaccagccaatcccagcagccatttaaccttaataacccttgttcttccaacacccgtaagccttataccaccatttccctttgttccatttgttgcaccaaaccataaaggcccaccacctccaccaccttttcctagaaaaccttgttgcctactttaagaaccagaagttttttccattaaaccaactg

SEQ ID NO: 36090 - DNA, 372 bp, Zea mays
  Clone ID: MRT4577_132914C.1
tacgcttcttgggcgctatcacccgccgctggtcagtcattcctgcagtacggtgccctgctcgcatgccactcacgcgttgcgctccctatggaaacccaacgagagccgctggggacccgtcttgcggctgctgtatgacttattgggggccagacatggagagcaagcctgtggggcgcaagacgccccagaacgccgcgtgcctcaggagggggccgccaactcaatctatgatgaacaggatgacctgtatgtgttgccgctgcgcatgggcccccggcccaccgagaacctgaactcggaggggcatcgcagcagagcgtctgcatacacacagctaaccgcgtgcaacacttgcttcatgctact

SEQ ID NO: 36091 - DNA, 1077 bp, Zea mays
  Clone ID: MRT4577_132915C.1
acccttccaaacctgaggagttgtgcagtcaggcttgcacagatcggctggcagaatatggtcaagaaatggtgaggcgccatgaaaaggactacgaccggagaaaagcaccaatcgatcccatggtggtgtatgctactggaggcagaaagagtcatgggcggtagccccctcccttctcccgacacgcgtccgctccatgtttaatggagtgattgactccagagaggttagatctcagaggtcggggtcttcctccgaacgatcaggggctagaactcatcgccaatcagagcatgagttggaggttgcaagggtgcaagaggagataaggcaacgtgatgcattccaaaggcacaacatgagtactttgcctcattcttggcgcagcagcagaccgtgcttcaagcaactttccaacagcaggggataaacgtagtccttccacaatttcaacctccaccactgccaccaatatggggatcgggtacccaataccttctgcaagtcaaacggccgatgctggaactacatttgtaaatgcaatcttcggtccaccctctggaggcagcggccaaaactccaatcatctgagaggtggcttgtcacactcggatttaagggcaaactcgggcgcatctcaaatgtgtgctaggatcaagtctcacacatatgatggctcatggtacagaaatcaatgtcatatctttattaaataatcggagtttttttacaaaataactaaatacaatacaccatatggcgacgagatcctccaccaacaaagttgactgggagacgacggcatagatctctccgaactcatcgtaacatccttcatgctctttatcttgcagtacctgtctttgacctggtgtgattatagcaagggtgagctcccatacggtcatcgctcagcaagtgtgggaaataatgtgtatgagctcacttacggtgggagctcatgtgtagtgtaaggctgatcaacaaataatggttaaggctgagcattgcttttaataagttggtcaaaattttattagctaaaaaaattaaaaaataatctttaataatatt

SEQ ID NO: 36092 - DNA, 186 bp, Zea mays
  Clone ID: MRT4577_132916C.1
ggcacgaggcttacctcttaagtcatggggtggcgtggtattccacgagagagggtattgtggcacacgtcctacgtgtgatgggcatacataaaaatctgtcattctggcacctcttctgtaccactagtacagttagcgggggtgctatttggatgatacatatgaaaaaaaaaaaaaaaaaaa

SEQ ID NO: 36093 - DNA, 500 bp, Zea mays
  unsure (1)..(500): unsure at all n locations
  Clone ID: MRT4577_132917C.1
ctgttaacaaagcttttgaaacatctcttgccgaaggacttaactatgagaggcgaattttccatgctacattttcaaccaaggaccagcaagaaggcatgaatgcatttgtggagaaacgagctcctaaatggaccagctcctaaatattatgtacctgattattggcagtgcatgcctctgttatcattctgtgttaagactgttacattttcctctgttagtgccatatgagacctccgatgtgtttgtccccatttctgtgttttgtacatacctttacaccatttgcaagacctgttttattattctgtgtaagtttttgaattttatttttttatattgttaaatttggctgttacatcttggttggcaaataaactaatattgtctattaaaaaaaaaaaaaaaaaaaaaaaaaaaaaaaaaaaaaaaaaaaaaaaaaaaaaaaaaaaaaaaaaaaaaaaaaaaaaaaaaaaaaaaaaaaaaaanggggggcg

SEQ ID NO: 36094 - DNA, 795 bp, Zea mays
  Clone ID: MRT4577_132918C.1
cctcgagccggcgggcggattctatgcatagtcccacacggcggcggacgcgggcgtgctagggttgagcggggctccgtgggcgtgctaaagtttcgtgagcgcagcggtggccggcgcgcaggtgagtgctcccgcctctgattcactccccggctcctcgagcggccaagcgtccgtgcgtggccgtgtgggcgaaccacttgcgccagccgccgtgcgccgctgggcaagcacgtgaggccagaggtgaagcacaggcacaagcaaccgcaccagtttagtgcgagactgcagggtagcaggcaagccacgagcgcgtgactgcagatgctagccaagcgagcgtgtgactgcaggacaacaagcaacgacaacggcaagcaagtaagcaacggggatcatgtctgggctcacacttgggctcgttgctcggccttattgagctagagatcctccaacgtagaggcactgataccaaggctcaggctgggttaaaaaatctcctgggttgtcccatgccaaaccactgctctaagcctcgaccccagtgatgtcttggtcgttctcaaatgggctacggtgccgttgctacgccaaagcataggtctaagactcggccccgttgtcgtccttccagctgttcaaaagcagcaccagcttcatgtcaccctgttgttgtgtaatgttgctgtcatggagtgattgtgtgagcatcttatgcttccacgttctcttcacaaggatcatgtctgggctcacattggggctcatgtcgctcagcctcgtcgagct

SEQ ID NO: 36095 - DNA, 834 bp, Zea mays
  Clone ID: MRT4577_132919C.1
cccacgcgtccgcccacgcgtccgcggacgcgtgggtgcgaggctgccatcgcaatgtacctgaacgtctcctgcatccccgaggcgcaggcgatcatcggctcgagcgtcgctatccctttcctcgtcaatggcctaggggaaggtggctcccggagcgacacgtgccgcctggacgcgctgctcaccctgtacaacctctccctgcacgcgcccaacatcccgtccctcatggcgtccggcatcatcgagggcctccggggagtgctgacgccgtcgtccccgtggacggacaaggccctcgcggtgctgctgaacctggcgatgacccggaggggcaaggaagagatcgcggccagcgcggccatggtgggcgccatcgtgctcatcctggacaacggtgagccgggggagaaggagaaggccgtgtcgtgtctgtacgtgatctgcagcggcgacgatggcagcagccagacggtgctccaggagggcgtgatcccggcgctggtgtccgtgacggccaacggcacggccagggcccgggacaaggcgcagcggctgctgaggctgttccgggaacagcggcagcgggagttggagctggaggagatgcagccgcgggtggagctgcacgaggtggcgagccaggcggccgcgcggcaggaggaggaggaggaagaagaggaagagatggtgctggccgtgacgccggccgccgcggccagtaagccgagaggcggcggcaagaagccgcggttgcgcaggtcaggctccaggaggttcaccaaggccttcacgtgcctgctcaagaagtggagcctgcgctgagcactg

SEQ ID NO: 36096 - DNA, 518 bp, Zea mays
  Clone ID: MRT4577_13291C.1
atacgaaactacactgttttttatagagagaaatttgatcatgtcgaccgagtattgttgggagctgctcgaaacaagctagaccggccgggctcatttggccaggtgtagactactatagactgaaactttcctgcaacatatatactttttgacgacggtactagggaccgaatctctttgccctagctatattcttcattaatctatcttctcgcgctcgtcactactattgtattgcattgcatacgtcctaaaagaacggtcttgtctggttttgacctcttgtgatcttgcttgctattttacaatgaacgtgcaaaccgcaaaccaacacacgtacgttagtcgaggtgggagagtgtactcgaaaatttaccaggggtggaagagtccttttgaaaaatgaggtgtttatctatttcggtacgttcttcaggcctttgtgcttttttccggtgtatcctttaataatcttggcgatcctgatggagtaggcggcggcaggcggggaagct

SEQ ID NO: 36097 - DNA, 433 bp, Zea mays
  Clone ID: MRT4577_132920C.1
caacagccaacagggaataaaacgaataatggccatcacccttacaagcagttacaacaacagggcgggcggatccacccataaagatcaaagggagttccaacggccaccgatctttccttgtttaaaggaaacaacgacccacctggtacccaaactattctgtaaagcagaaaatgcatacctttttttacacaaccacccacgaaacaaacacggacagggggagttccaagggcaccgctttgtcggggccgccccatggacaacttaaagggttggaggagagccaaaagcttccctttactgggttggtttcgcgcgcttaatgccgccgttactgaagggggagacccttccaggatgaggactgttttctttcagggttgagttaaagataaccaggtccctcagctgttgccttttggaaaaa

SEQ ID NO: 36098 - DNA, 387 bp, Zea mays
  Clone ID: MRT4577_132921C.1
gatcgtccgaaccaaggtggtcatgctctctgctcggtcctcctacctgaaaatagccaaatcctgcagggcccaccggtcgttttgctgtgcagggaacaagagagaaggggagacaccccgagagggggaggcgcgacgttcctccttttgctgggggcccaaacggagcctctcacacgcggctcactctgagccagagaaaatcggcgccggatgcaagatctacctgaaggtgctggaggagcaggagcgagacgaccgtgctaccggcgatggcgctgccgcgcatcggtctgcggtggacaacccgccgcgcaccttgaggctcaacaagaaggcgagccacgcgcactgtttggagcgctgcgggcttgtggggctcct

SEQ ID NO: 36099 - DNA, 768 bp, Zea mays
  Clone ID: MRT4577_132922C.1
cctcgaggccggccgggccgggagagccttctattgcggcgtcggcgccacgacccttctccgccagtccccactagagggcttagaactgcgtggaccacccggcgcctcttggcctctctcgctccgtccttgcgggcgcgacgacggcctccgacagctccgcaaagtcatccaagcctggaacaggatgcgcgtcagctactagttgctgtgtcgaagataacaaattttcaaagctgtcgacctcttgccagggatccaaaaatctccctcccaggtggtgctgcctgctgcgtgcaggggagtgagcgtggctgcgtgggcaccctcggggagtcggatctgaaggggaagaaggcggtcgcgccgacctcgactcgatgacggccagaagataaccgacgacatcggaccgcatccgcgcctcctcgagaagggcgccaacgtcatccttgctagccacctgaattacagatgcgattgtgacttgcatcattgcatgccgccgccatggcctcgccctccattcccaagcggtgggcggctggcaactccctcttccgccgccaccgccgcccgcagccgctcctcttccctgccgtctctcaccgcgaccacctccgcgttctgtcccactggcctcgtgtccggcctcgcccgtaaacccctttgttgcctcccgccttctcctcgcatcctccaggctctccctccccttctccctcaccctcctcgcctatctcccgggctcctcgctctcatcgt

SEQ ID NO: 36100 - DNA, 167 bp, Zea mays
  Clone ID: MRT4577_132923C.1
acacaaaccggatggataatagagggtaaccaacgaggggaaaatttaccgtggagtggcgtggacattgggggacaggcttaaaacacctaatcacataaacaggaaggacaaactacacatgctacgtggatgagggtaaggaaggcacccgggtttgtggattg

SEQ ID NO: 36101 - DNA, 321 bp, Zea mays
  Clone ID: MRT4577_132924C.1
aggcctgtattatgctgcatcttactaccctggggccggccttgtcaacttgggttggggttctaacacattggcgttgcttcacatcgacgcgcctgctacgccggtccgacgggccttgacctcacttgttgcccccgtgcacctactataccttctctgcacgcgcctagggagctgcatctgccttcgtctggaggagtgtgaagaagcgctgtcgaactaataatttacgaacccatacagctgctggtagcatgagtgcctgtgactggctgtagaagctagagatgctaattgcttgctgtgtgcgctgccaaa

SEQ ID NO: 36102 - DNA, 277 bp, Zea mays
  Clone ID: MRT4577_132925C.1
gcggaaacttactatttgcttcgaggaaaacttttgcccacacctggctttagaaaacataattgagctattgttttctaaacctaagctcacttggcccaaagcttgggcacatgtgaagaggcacactagatgagcctgtagggtctctccaaggcttatgcctaccattaaacccactagcctttacaacaaaatcacgagtctcttttctcatcctgctccagctaggggcattcttctgtgcaggctactcaaatggctctccttggacaag

SEQ ID NO: 36103 - DNA, 218 bp, Zea mays
  Clone ID: MRT4577_132926C.1
gatcaccgagcagcagtgctgtctatggcaccccacattacgcgcagcatcctaacaacatcacactgtctctcttcgaaccacaggtatgtatagaccatcgtaagagcgaggtagagttgaatgagtgatctaatcactgttcacctagatgtattatatcttacagtgtgtatttatacagagagataaacatgcttggatgcataattttgttt

SEQ ID NO: 36104 - DNA, 450 bp, Zea mays
  Clone ID: MRT4577_132928C.1
aagggaaacccttgtcccccgttttagggacaaatttccaggggggtaagggaaaaaaattccccgcacccttccaaaattttccaaaacccaaattgggaaggaaatgggggggtttttggaactttaaaaaaaattttaccctttgaacccttaaacccccaccttccgttgataaaacagggatttgggggttttttgggggatcaacccttgggggaaacaacctccccgtccccaaaggggccccccaaacctttgggggggccttattgcccctttaaccttaaaaggtctttaaaaaaatgggggtggtcccttgggggggcccctcctatttggggggcacccgtttctttttgaagggattttgggaggctgggccctttatttgaacccatgtgatttgttcttttgggggaccccttgaatttaccatcccctaagggg

SEQ ID NO: 36105 - DNA, 1708 bp, Zea mays
  Clone ID: MRT4577_132929C.1
gtacccgcccgccgggaggcggggcggggtgcctgcccgggcggtagataggagaggtcaagaacgacgacacgaccgccgacgtagcagagggatctgttcgcctcccgtaccgagacccccctaccctttcgtcgacgactaggcttgcggcgaccgcccttggcttcgccgtcggcgagcatcaccagggactgacgattggcgggggagcgaatgcggagatgggctgatcagaactgcgacaaggtccggttttctctctaaaccgcggtctctggaggtgggtttgctttttccgtagtcacagatggacgacgacgacggcagcctgggcattcggaactggggcttctatgacaccgtgaaaggcagcctcggcctgcagctcatgtcgcccatgccacctgatcgggacacgaagccactgctcccgagagctggtttcttgcagcagcatgggcatcacaatgccccacaccagctccacgcacagcagccgcagcattaccgtgactccgctggtggcggagtctctggtggcacacctgccgagcagcaccctatccacatggacttctcgcgcaatgaagcttggctgcacccatcacaccaccagcatccccatgaacagaaggtccttcattctcgccctatcggaccagctgggcatgttgggcatccaggccatgttgcccatcctgtgcatgccgtgcatgttgtgcatcaccatcctactggctatgggatgatatcagatgcacaacatactcttcagatgatgcaaccacagcttgagtcacagcttcaggagcctcctccttgcaagggagacgaagcaccacctccgccaattgaggatcactctgtggttagtaccgggccacctgtgaaaaagaggcagcgaggccagcagcagagtcggcagcctaagtcaccaaagcctaagaagcctaagaaggttgctgttctgccagagggtggggcacttaatgggcatgcgacccggaggaggggacctaagaagaatgtggggatgatgattaacggtattgagttggaccttgccaacataccaacaccagtgtgctcgtgcaccggagctccccagcagtgctaccggtggggtgcaggtgggtggcagtctgcatgctgcacgacttctatttcaacgtatccactgccaatgaacacaaagcgccggggcgcacgtattgctggaaggaagatgagccaaggtgcattcaaaaaggtgcttgagaagcttgctggtgaagggtacaatcttgttaatccaattgacttgaagacgttttgggctaagcatggtacaaataagtttgtaacgatcagataaagaagccgtgctatgtttgtcgctttgtaggttgtagagctgcagttaggcctgatttattgtttgtatgcctatgtgccagtctgcagacatttgtagtagtagtttttagccatgtttagtttcgttgtcttaattgtcatgtctatctcgagctttggatatcgaccaactgaagtccttgtatcctcactttgcaaattgtactgtacccataatagtctctaatttagggcatcaagatcaatgctttagttgattgtgtgtggtaattgtcatgcctatctcgttttctctggtggagggcattacccagctgaagtctttgtatccttcactttgcaaattgta

SEQ ID NO: 36106 - DNA, 607 bp, Zea mays
  unsure (1)..(607): unsure at all n locations
  Clone ID: MRT4577_13292C.1
tcgaccgctgttacctctgtaattgatggcttngaaaaggattctatgtcgaaaaactgaagcctttggaagtcgcctacagatataatgattttgctcgtgattttgaagcaaagccaatggttatgctcttgggtcagtattcaacagngaaaaacaacattcattaagcatctgttaaagacaagctacccaggagctcacgttggactagaaccaacaactgatagattcgtagttgtcatgtcaggatctgatggaagagccattcctgacaatactattgttgttctattgtgctatgccattgaagttcatgaggctcctgaggtgttggtgggaatgactaaacaatgtttagtaataccacgactattatctgctcctgaggttgacataggaccctggccgccacctcttgagaacaagtacacatggctcaatgacaccatgacgccatattgcagtttagatctgtcattcggttatggtcaggaagatgtgaagcaaataccaccatggcctccacctcaggagttggcgtgcttgggtttgaacatatggtcgtctctgtgttccttgctaccagtgacctacatgcagtgac

SEQ ID NO: 36107 - DNA, 155 bp, Zea mays
  Clone ID: MRT4577_132930C.1
caatagtagtccagctacagtaaacacctggaagccgcctcgctcccaaacccgaccgagcaaagcgcacagcctgccaaccggtataatccgcatattgatggcgcccaatgcgttcaaaaagccgccggcgatgaagcccgcggcggcggagc

SEQ ID NO: 36108 - DNA, 1820 bp, Zea mays
  Clone ID: MRT4577_132931C.1
gagaggtcaagaactacggcacgaccgccgacgtagcagagggatctgttcgcctcccgtaccgagacccccctaccctttcgtcgacgactaggcttgcggcgaccgcccttggcttcgccgtcggcgagcatcaccaggtccggccaccgcttcccttgcatttttatccggatctgcctccttcactgcacgcatgtattacgcccactggctcggattcgattcggcatctagggtttgggtacggcaccctggggtctgcttctgtcagaacctcgatgctctatgcctctatccgattgacagaatggatgtgtagggactgacgattggcgggggagcgaatgcggagatgggctgatcagaactgcgacaaggtccggttttctctctaaaccgcggtctctggaggtgggtttgctttttccgtagtcacagatggacgacgacgacggcagcctgggcattcggaactggggcttctatgacaccgtgaaaggcagcctcggcctgcagctcatgtcgcccatgccacctgatcgggacacgaagccactgctcccgagagctggtttcttgcagcagcatgggcatcacaatgccccacaccagctccacgcacagcagccgcagcattaccgtgactccgctggtggcggagtctctggtggcacacctgccgagcagcaccctatccacatggacttctcgcgcaatgaagcttggctgcacccatcacaccaccagcatccccatgaacagaaggtccttcattctcgccctatcggaccagctgggcatgttgggcatccaggccatgttgcccatcctgtgcatgccgtgcatgttgtgcatcaccatcctactggctatgggatgatatcagatgcacaacatactcttcagatgatgcaaccacagcttgagtcacagcttcaggagcctcctccttgcaaggaagacgaagcaccacctccactggttgaggatcactccgtggttagtaccgggccacccgtgaagaagaggcagcggggccagaagcagagctgtcagcctaagtcaccaaagcctaagaagcctaagaagtctgctgtcccaccggagggtgggacaattaatgggcacgcgacccggaggaggggacctaagaagaatgtggggatgatgattaacggtattgagttggaccttgccaacataccaacaccagtgtgctcgtgcaccggagctccccagcagtgctaccggtggggtgcaggtgggtggcagtctgcatgctgcacgacttctatttcaacgtatccactgccaatgaacacaaagcgccggggcgcacgtattgctggaaggaagatgagccaaggtgcattcaaaaaggtgcttgagaagcttgctggtgaagggtacaatcttgttaatccaattgacttgaagacgttttgggctaagcatggtacaaataagtttgtaacgatcagataaagaagccgtgctatgtttgtcgctttgtaggttgtagagctgcagttaggcctgatttattgcttgtatgcctatgtgccaatctgcagacatttgtagtagtagtttttagccatgtttagtttcgtcgtcttaattgtcatgtctatctcgagagcttcagatattgacccgactgaagtccttgtatccttcactttgcaaattgtattgtatccataatagtctctaatttaggacatcaagttcgatgtgttagttaaatatgcgtggaactaagcattatgtggaggttttctctggtggaggacatttgccagcacctttttgac

SEQ ID NO: 36109 - DNA, 280 bp, Zea mays
  Clone ID: MRT4577_132932C.1
ctctctgtctatctgcctgtgtttaacgctttcagctatcataatatttaatatttgttggacttttaaagtcaactactgtgtttttgtctgagtgctctccactttgtatgacacacggcagtcatttttgcttgtagaccctggaaattcgctgaggaatacttatatgtatctgagtactatacagtttcaaatctcagttgaagtagttcgaaaaattgcagttgaaataaatacttctcaattgtattagtatccatcggtctaatagaaaagg

SEQ ID NO: 36110 - DNA, 716 bp, Zea mays
  Clone ID: MRT4577_132933C.1
cattgggtacctcgaggccggccggggtgcctatctctcttctgatttccgcctcttcttgctcgaggtcggactaagaccaagcggcctggcgctcatactacattacccagctcctctctcgtctcaacgcaggccgcctctccaagtctccgtacctgcgtctgctacctcttgcatctatacgagagtgcaaggcgactacatagacagtgatggcttctcctgatccatcggcggcagacggctgcagcggcgcgcgagtcgacgaacatccagcggacgaggaagcgatccggatgccgaccgtggaggagatcaaggaggaggacatctgccacaactgcgccgttagcatggtgctcagcgccgtcatgggaagcgcgcccgatgagctcatggaactttacgtcgcacctttggaaaatgcgataatgatcgacctcatgaccgccagggagcaaatagtatacacagacccgccaatagggcaaagaagactgacccatgcccaaaccttaggagacatgaatgagattctctcatgagctgaatgtaccatacataacgctcgggctaaggatgacactaccaatagaccgatagctggatgagattctgcacgagctttaactgtaaaaggcgaacctaaagctacatgctttggatgagtgcaggttgctgcactctcagcggctattgataagctctttgat

SEQ ID NO: 36111 - DNA, 295 bp, Zea mays
  Clone ID: MRT4577_132934C.1
ccgcttgcacctcggcgatccccgactcccttctttatggcgtcgctcctgtgctgtgggccgaagctggccgtgtgcggcatcgtcctcagcgcctggggagtgatcatataatgctcggaatatttttcaatgtccattccgctgtgttgattgaggacgttcccttcacggagaaagattttgagaatggcccctagaacatatacaacctttacgagcaagtcagctacaactgtttcatcgctgcaggcctttacctcctcctcggaggcttctctttctgccaagttcg

SEQ ID NO: 36112 - DNA, 350 bp, Zea mays
  Clone ID: MRT4577_132935C.1
ctattactcactcattaatttttttattgtgtgggtaacgatcttcattgtgtgaatctagacaggtagcaacaaaatcaacagcacccatccactcacccacctcattccagctagcccggggggcccagcgcgcagactacacccctataacctgagactggccaaattgccccccaaaactccacctaccaaggaaaagctcatcaacacttatctacatacccccctggcaactcgcacaagctttggcctgacctgacggaccggacacccctgccaaaacttgtgcaccattccatgggggatcggatactacagctgcacactattgcttactaacccagact

SEQ ID NO: 36113 - DNA, 380 bp, Zea mays
  Clone ID: MRT4577_132936C.1
ctgcaattcacttgtaatgcagagggacacctctggtttaaccactgagaacagggagctgaagctccggctgcaggccatggaagaacaagctaaactccgagatggtacgtagtctttctccggaaggtcttgagccactatcataccaggcccagaaagcgactcactttccctgtttcaagatcattacaaggcaaacgatatcaaccgatcagttatctcctgtcctgaccaactttattctcttgaaaaatactgtagttatcttctgagcagataggtagatattagttggactagcctatcatttatcaagcaatttgttgaaaccctggttgtgtttgatgatgcagctctaaatgacgccctgagagaag

SEQ ID NO: 36114 - DNA, 304 bp, Zea mays
  Clone ID: MRT4577_132937C.1
ctctagagtctcgagattaaccgtatgagcttctcattagtgggtagtaggcatgagaaatccaggctgctctttatagacctggttagtgtggctaatcaatagcgaaccgaatgtcgggccatactcagaactgtgatcgatatcgccgtaagggacatcggggtgcactgttacgattgacgttagacaacctctgtattttgctgatcggagctgtacccgatgcagtggcacagctgtgaagagcaggcatgcagggatgatactggccatggcttacaatgtgatcaatggaaaaacc

SEQ ID NO: 36115 - DNA, 179 bp, Zea mays
  Clone ID: MRT4577_132938C.1
cccacgcgtacaaaacgatgggagaagacaactgaaaggggtgatagagattgatttttaggtgttctaactcgatcttgaccttaacatgtactgtgtgagagatcacactttgtctgacctgaaaacgctttgttatggtaaacactgcagctgcagaagcttgtacaaaatcgaca

SEQ ID NO: 36116 - DNA, 390 bp, Zea mays
  Clone ID: MRT4577_132939C.1
gccaaacattttgggtcatttttagggttgtagacggggcaaacactggatgaacaaacataggggtgcgaccttttattacctgcaacaggaaacattgataatagccccacccgggtggttaatacagcctggttcaaaaaactcagactgggggggtaaaaccccctggcgcattatatgaaaaagaactcctcgaaatgcctgggcccaacacaagctaaagcgctcaccgaaatgcttatgaccaacacacaaaaagtcgggcaaagccatccttatgtaggggccattcttagcctgcctaaaatatgcacatctttgggaacgataaacttgaactgggaatttattaacccttgaaaggggacccttgaatacatgatgttt

SEQ ID NO: 36117 - DNA, 275 bp, Zea mays
  Clone ID: MRT4577_13293C.1
aacaatcatatcaagtagttgcatgcgaacacttggtgcttacctccagaagcaacagcttattgcattcaatcaactagatggggtgaaccctgctatctacttgctggctcaacagctactaccatttaacctacttgtcgggagcccttatgccttcttactgcaacaacagcttctaccattccatctgcaagctgtggcaaacattgctgctgtcttgagacaacaacatttgctgccattttacccacaggttgtgggaaacattaatg

SEQ ID NO: 36118 - DNA, 379 bp, Zea mays
  unsure (1)..(379): unsure at all n locations
  Clone ID: MRT4577_132940C.1
cctccggccgcctcgccaaaccgctccccttcctctgccccgccgcgaccccgccgtcccgcgcctgccgccacgacgtgctcggctccgggaccgccaactacggccacgggagcatcgtccgctcccgcggcgggggcgccgtgcccgccgccaccgacgacgacgcggtcctcaggcgcgccatgtcggccgccgaccccgaggaggtcaagagggccgggaacgacctgtacaggaagggctgcttcgagggggccctcaagctctacgaccgcgccctcgccctctgccccgacaatgctgcgtgccggggcaaccgcgccgncgctctcattggcctcgaccgcctcggcgaggccgtcaaggagtgtgagga

SEQ ID NO: 36119 - DNA, 393 bp, Zea mays
  Clone ID: MRT4577_132941C.1
gagtgacagactgctagagaaggaggggttggccgacgagggcgtcacctggtgcgggctcacctgcgtgccctcatccgccggcgtctgctaatggtgaagctgcatcattagcccggactcagagtgcacgcagctgtctactcttgcgagggatgagagcgagcgagccgtcagagaggtcaacttgtgcaaggtgaagtacgcgcactacatcgtcaccggcggtcacttcgtcatcaagatcctcgactgcagcaagagcctgtccctgcgaatcgaccaccagatcaggagggagatccggacgctcaagctgctgatgcacccgattgtgttaccgttgcacgtaggctgtgccagtccaacgaacagctacatggtgcttgagtt

SEQ ID NO: 36120 - DNA, 478 bp, Zea mays
  Clone ID: MRT4577_132942C.1
aatttccaaccgcatctcctggactgcagcatagaatcccccgatcccccgaatccgatcgaagcttttcttcctcctcaatccaaatctcgcgcgcggtgcgatggcgggcgccgccatctcccacctccggcggggcgcgcagcgccacgcgctcctatacctctcgcgccgccacttctcctctccgtcctccctcgccgccgcagccccgctcgccgccgccgctcggcgacttctctcgacgtcggtggagtccggcacggcctcgaaggaggcaagctataagcccccgcccctcgaccccttccgcgctgaccgcgctccagcgtcgacgccgctggagccgcctcccctcgaggagacacccgctaccccgtcgctgccggaggtaggttctgcggccgcggcgaccgagcaggatccggcggtgatgcacaacgagcaattggagaggctgaaggcaagggctggaggc

SEQ ID NO: 36121 - DNA, 274 bp, Zea mays
  Clone ID: MRT4577_132943C.1
gagaaaacagtgcccacatatgccttagtttttctttttcgcgtagaattttcttgatgagttcttcttttgctgttagagtgggtgcttgacaagttgacacttttttcgagagctgaaaatattagcttttgctgtacattctgtaaatttttccgttgactaggattcttctttgtacgtaacattcagctaactttttgtacatcaagcgaacccagaaaaaaaaaaaaaaaaaaaaaaaaaaaaaaaaaaaaaaaaaaaaaggcaaaaa

SEQ ID NO: 36122 - DNA, 382 bp, Zea mays
  Clone ID: MRT4577_132944C.1
ctttcttgaccttcttggggggggcttctccttccttctggcgccgtttggtcttgtttccttgttcggtgccctccttctgtccgcgctgtcgccgctccagctcttttccttctccgccctccccttcttttgttggggggtggcgcggtgcctcctttgcctcctgtactctctctaggatggctcgcgttctctctcttctttcggcgaatgccgcttccctccttgtcgcagtctcacttctgccaccacggtcttggccctgtctccggtgcccagtatgacggctcctttgggtctaacgtttgtcgggccgtgggcctatctcatatctggcaccaccttgtcgcctaccttgttgctgatgtgcctgtccact

SEQ ID NO: 36123 - DNA, 444 bp, Zea mays
  Clone ID: MRT4577_132945C.1
gacactatagaagagcgcacacgtacgtagacgactcgtacttcagctcgaggctttgaagtctgaactccgaagacaagagttatgtggagtgtagactgaactgaacaaaaaaatgagaaaagattgggagacatataccttcagacgaggtgctcatctccagtccctgtgtgttcgagccgccagtgtagagagaagggtgtcaaagggagagagaagggtgaagaagggagctgccaatcctggaagaagaacagctgtcctggtctccggggtacaggtttgtagggaagaagagacgtgggatcttggggggcggctagctatattaattatgggctagccaaacacgtctttggagaacagactgttggactaccctgagtatcgcgactgatcgctaaccagctgattaatcgttccatatcgtcgactaatcag

SEQ ID NO: 36124 - DNA, 414 bp, Zea mays
  Clone ID: MRT4577_132946C.1
acaagcaggattaaaggaatcccgcaatcattggataggacaggggaacaaccctacaacaggggggatagggccttatttggacaagggctaggaagcaaacccaaggcccctacacgggttgatagaggaaaaacacaaatcccggaaaatattagcgaggggctatggggggctcaacttccaccgagacaactatgccctttaggggagggttcgggaaaaaaaaaaaaactttaggctggccagggccccaccattatattagctggggaagggtttttttacaccccgaactaacagtccttaaaaggggaggcctgggccaaaagccaaaaacaaaccccactcttcacttattgcccctttttttaactcggccctcaaggaccccaacacaaaaaaaattggatt

SEQ ID NO: 36125 - DNA, 399 bp, Zea mays
  Clone ID: MRT4577_132947C.1
accacgcgtccgacctcagacagacttcctgagagccatctcagtccgctggcagcagatgtacgatctgttatgagacgacgtatttagggatgtgtaggatgaagaggtgctgcgagccactcataggcgactctggcaacgctgagctggctgctgaagctcctgctgcctataccggcaatggctacacccaggccttgaacgtcgtcaagggtgtcaactctggctccgtcttaacgacctacattatctgaacgtccgtgacatgagaccgacccaagagcatgataacagctagggaccagagactcggaataatcagcactactctgatgatcaagctcgatcacgacgcaaatgctgaagtatgccctcacaccacaatcggcgatgaac

SEQ ID NO: 36126 - DNA, 612 bp, Zea mays
  Clone ID: MRT4577_132948C.1
gagtacgttttctaccacgacctctccgagcatccgcaggttgtcccgttcctcaacgattccgggttcgcggtcccgcccgtcgtcttctaccgttaggccaggccagctttgtaaagcgtgcgctatgtgctcgacgttatgtgggaacgggtgttttgtacacttatttttccggttttggttagtgagtacgatgtaaaagttagaatttccatttccaattgtgattatacgaaataggcatatcgaaatagtaaaattttcgtgtgctgttggaggtggaagatgtatattggggtttaggctactccattggtatagaagaagtgattgtttggatttttttctttctgcgcgacagacagtagtagccagtgtctggaattgtaaccttagactgatatttaaatttgttaagaaacaaaatgtatatcttatatacagctttaccatcactttggagctatgtccaagaataatgcatgtcattttattttcatgtacttgttgcacactcatttgtattcaaatactgtgttgtattcctttatcatcactctggtacctacgaagtatatggttcctctttattaccgatctttttgttct

SEQ ID NO: 36127 - DNA, 394 bp, Zea mays
  Clone ID: MRT4577_132949C.1
ccgacgcgtccgcggacgcgtggggccctcagtcctccagccacttgagcctcctaagacagtcgcatttcacccgttcatcttctcggagcttctcaacaagatggtgcgtcaccgcaatcctttggtggtggagttcatcagtgactccgacgaaatctaggaggaatcgcctgttccttctcctgcgtctcatcgatctctctccaagagaggactaggctctggccgtttggaaggggagggaccctcgatgccctcgcaacccgcgcgccaggggcgtcaaaaggttggcgccactcgttctcgccaaagcaccttctccgcttgatacccttcatgccaggaggaggatggagcgttcgacgactaggtctaacttccatctttcgac

SEQ ID NO: 36128 - DNA, 1877 bp, Zea mays
  Clone ID: MRT4577_13294C.1
catgtgcgcttggtgcaattgtgtttgtcggtacctggctgagattgtagtggtcgatgatcaacaatagccaagcgagggtgcatggttgaggatgcccaagcacgttaaggtccctgcagctgcatttactatcagtgctgtgtccttgctgaaccctgactgggagtggaattcaaccttttttgatgaaccggtcatgcttcttggatttgtacttcttggacgatctcttgaagaaagtgcaaggcttaaggcatccagcgatatgaatgagctcatttcactgttatcacctcagtcgaggttaattgttacttcctcaagtgacaacccttctgcggacagtagtttgaattctgatgcgatcacagtcgaggttcctgttgatgatgtccgtgttggagactcaatattggtcctgccgggagagactatacctgtagatggtaatgtcattgaaggatcaagttttgttgacgaatcaatgcttactggagagtccttgcctgtagccaaggagactgggcttcctgtattttcaggaactgtgaactgggatggcccgctaaagattagagcaacatgtactggaccatcatcaacaatagctaagatagtccgcatggttgaggatgcccaagcacgtgaagctcctgttcaaaggctcgcagattccatcgcaggaccatttgtgtatactgttatgacgttggctgcaacaaccttttccttctggtattacattggcacacacttatttcctgaggttcttctgaatgatattgctggtccggatggggattcattacttttgagtataaagcttgctgtggatgtattagttgtttcctgtccttgtgcacttggattagctacacctacagctatcttaataggaacttccctaggtgctaaaagagggttactggttagaggaggtgatgttttagagcgtttggctggaatagatactcttgtgcttgataaaacagggacgcttacagaaggaaaaccagtagtgacttctattgcttctctggcatatgaggagacagaggtccttcgtcttgctgctgcagtggagaaaacagcattgcacccaattgcaaatgctataatgaacaaggctgaactactcaagttggatattccgatcacaagtggtcagcttacatcgcctggatttggttgtttggctgaagtagatgggagtttagttgcagtgggcactttggattgggtgcatgatcgttttgaaactaaagcatcgccaactgaactgagagaccttagaaaccggctggagtttatgttgtcaagtgaagcatcatcatcaaaccagtcgaagtcaattgcttatgttggccgtgagggagaaggaattataggtgctattgctatatcagatattttacgagaagatgcaaacttaactgtggagaggttgcagcaggaaagcattacaacgttcctgctgtcaggggataggggagaagcagtgacaagcattgggaggaccattggaatcaggaatgaaaacataaagtcttccctgactccgcaagacaaagcaagcattatatcaactttgcaagcgaagggacacagagttgcaatggttggtgatggaataaacgatgccccgtctttagcagccgcagatgttggaatagccatgcgaacttattcaaaagagaacgctgcctctgatgcagcttcagttgttctactaggcaacagactttctcaggtggtagatgcgctatccctgtcgagggcaacgatggcaaaagtttaccataaattggtctgggcagcggcatataacatagttgccatttcaattgccgctggagtgctgctgccacaatatg

SEQ ID NO: 36129 - DNA, 498 bp, Zea mays
  Clone ID: MRT4577_132950C.1
aattcggcacgaggaacacagccaaaaagccaccccgtgcaaaacacatagagctcccagtcccaacccggtcaccctccctctcctgctcctcgcatcgccggtgtcctcgacggctcgcgccgtcgcgctctcgcaaaaccctagctctgcttccctccgtcgtctcgcccgttcgattgaatcgcgccgcagaagctgttgcctctcatctctctccccgccctcctccggaaaccctagcccactccgcgaggccgcgatggcggagaggaagctggatcgaccctcggcgctcggcaaaggtgggctgtcgcttgggatcgaggaggacagggttgccgccgccatggggttcgtcgaccactcgaaagatcagcaccacctggataacagcattcccctctctcctcagtggctctacgccaaacctgctgatggaaagatctcgctgcctcatgggtcctcccttgaacttgctgaaaaggaagtgaggat

SEQ ID NO: 36130 - DNA, 363 bp, Zea mays
  unsure (1)..(363): unsure at all n locations
  Clone ID: MRT4577_132951C.1
cggaccgcgtgggccggactgcgtgaggcaccactgnnctcttataacccatagtaccaaagcgaaggtaacgtcacgatggcaaccttccaatgggttagtctttcgtcttgcatctgcccttagtttctatcttctcccttctccaagtgctcgtccccttgtgcccacctcatgtgggtggctttggttcccacccagttctatgactcattcgtgcccccaagggcgaaggacgaattgtgccagtccacttgtgtgcacagagccctgtggcccaagggagacccacggatggctggtcatacttnntagtcagacctgcnnatttccatgaaactgctttgtcaaagggcttgcgat

SEQ ID NO: 36131 - DNA, 346 bp, Zea mays
  Clone ID: MRT4577_132952C.1
agacaaatggggaagctggcccacctgattttctatcattaaacacacgaacttctgaaaacagagcaaatgtgcagtcgtggaaggccgagctcctctccgtgaggagaaagaaaccaatacggcaggcagtgggaacatcataggagctggatgcgacttggttaatatttcataaataatactctcatacggagtaagacacaaaagcaacagcttgcttatagtacaaatagtaaattagcctgcccagacaatggcagtgtcacaaacaactgaatgatccccccttacgcgtagtaattcaagctggacttcttctttgcctgcaccttggatgatcccc

SEQ ID NO: 36132 - DNA, 260 bp, Zea mays
  Clone ID: MRT4577_132955C.1
acgcgttcgcccaggcattcgctgcagatgtttatgacattttgactgaaaagttgattgtgcaaataagtgttaactaaagcgttgaatgagatattccatctagccaatataccaggttttaatagaaaataactatgactccagcttccatcttaagggaagctggtcttgcaagatatggtcctggtacctgaaaaaactatcttgaggtcaggtcaaggaatactacctgtgaacctaatgtgatactggcttct

SEQ ID NO: 36133 - DNA, 437 bp, Zea mays
  Clone ID: MRT4577_132957C.1
acaaaaacaacttttttccccacaaatccggctcaaatttaagggcatagagcatttctcgggaagttttggggaccggattactctagggcccaggaaaaaaaagctcacaaaaaatgggcaaaggcccgggtccacccataaaaaaccccgcaaactcgaaacccttttacagaatatgacattttttacatgcattcaactcataaagggatcgggggtggggctagatccgggggcacatgttctcaacagacgggcaagaaaaccgggtttggggaacctcccagggaaaagaatcccgaagagcaagaaccccccgagaaatagagacaagcccagtcggcccaaggagggggagggggcagccagccgaactgggggggcccagggggggccccagccgggggggtcggcaccagccatgggcaggggct

SEQ ID NO: 36134 - DNA, 779 bp, Zea mays
  Clone ID: MRT4577_132958C.1
gaagcagagtcaaagagaagacatccaagtgtcattgccagattaatgggtcttgaggaggatttacctactaaagaaccaactgtacaccataccgtaagtgacttgagtagagatttgaatgccacaaacaacaccttacagggaaaagaacaccatcactttataatgtcgaagacacaaaactaccaatcctgtcatgaaaaaattgaatacaatgatgtttttgaagtatctgaaggacaaccgggaacagactgttttcatgatagaacttcacagaaaggatggtcttccgagaacaagagtgagcaattcaatattgcacgagacaagatcatggaaccagaacagttagctattgaagagaagctcctttgtacaaaggagttgcctgaagctcttgtttttccatgttcaaatagagatttatttcttgaatttcctgaagaacataaccccacattctcaagacagtcgagtgggcttcatgcaaaccaagcaccgcctcaaacaaaacgcattacagtgctgaaaccaattagatctgttgatattgatggcataagacgacccagagcagaaattggtaagcaaaatgtattgaagatgagaaggttccatcagattcctagtccaaaggaagagataccttccccaccaagtagaataatacttttgaggccctacccagggaagccaggtatatcaaaggcaaagctgacatccagggcaaactcatttcagttacctaaccgtaacagtctcaatagatcatt

SEQ ID NO: 36135 - DNA, 293 bp, Zea mays
  Clone ID: MRT4577_132959C.1
attgagaccaacatgcaacatagcaagtggaatccagtagcaacattcgagcagcaacggcgaccaagatactttcactacttatgctcctggctctgtcagcatgtcatgctaacgcgacacttctgcttcaatgcttacaagctcctatagctaaccttgttactccataccttccatcaatgatagcttcagtatgtgaaaacctagcttttcaaccatataggctacagcaagctattgcagctagcaacatacctctatcacccttgattcaactatctacagcccta

SEQ ID NO: 36136 - DNA, 573 bp, Zea mays
  Clone ID: MRT4577_13295C.1
tattcggcacgagggccgtggtaaatgctcggccgcggcggccattagaaggcgctaatcacgcccaggattaaagagcccccctctccgccttggcctcggctcgcgcacctgcctgcctcactgcctgcctacctacctgcgttgttgccttcttcgcctcctccccctgtggccgcaccgcagcagctgcggcggcggcagaggtgaacagcttcccgcggccttgtcctgtccggactccggggccgggaccggcagcgcagcgggctcgcaggatctcccgagtcccgacccccatgcgtcggcctcggtgacaggtaacggaggatttcacccccccctgctcttgtatccggttcctggtgctgcttgctacctactagggcgcgctgctcggggttggaggaatttggcggctgcttgtgtgacgaggagcgggcgtgtttggtagatggcgcggagttctgcaatgcggaggagcggttttgccgggttctcgtgcttcgctgggcaggctcgtcgtctccttccgtttcgattccagggtttgctagcggagtccatccaact

SEQ ID NO: 36137 - DNA, 207 bp, Zea mays
  Clone ID: MRT4577_132960C.1
ctgaagaaaaagccatgcatattgtacgggtgttgaacaacccaaggccttgggggcatttactttaaatcctcgtccaaagtgggtgccacaaatttttatcataaaaacaagcatcttttaagccacacctgttcaccttaaccttcttttaaaaaaggtcattcttaatggggggagcgggttggcaacagctgagacttatgt

SEQ ID NO: 36138 - DNA, 661 bp, Zea mays
  Clone ID: MRT4577_132961C.1
ccggaattcccggttcgatccacgcgtccggacaagcggcaaataacctctccggcggcgagacagatggagtcgacctccggcgaggatgctcccaaacgcaacccgctcccgtccgcgctcgtctccaacctacagtccgtgctcgccgcccgccgcccgtccgcggcagaggtcaacaccgccgccacagctagcgaggctgaggctgaggctcaggaagcggaggcgtccgatgcccccgcgggagatgggacgccggcgaggcccatcgtgctgctgacctgtgccggggggatccggtcggcgggtctcgcggcgctcgtcgactccctcgttgccgccggccgctgcgacgtccacgtgtgtgcccccgaatcggacatgcaagcctgtggccattcaattaccatccgtgaaaccatcgctgcgtcatccgtggatttcacaggcgctaaagcttttgagacatcaggcacgccggttgactgtgtctcgttggccttatctgggaggctgtttccttggtcgtctcctgctttggtgatcagtggtatcaacacgggatcaaattgtggatatgagatgttccactcttctgccattgctgctgcgagggaggccttagtgtatggtgtgccttcaatgcaatctcattgaa

SEQ ID NO: 36139 - DNA, 177 bp, Zea mays
  Clone ID: MRT4577_132962C.1
gctaacttaaggaatctatcgggttgccgacagatcttcttgagcagagccactttttgatgaaatctgaaacgggttcacatgactgtgtgttacaaattactgtctttgactataataaaatcaaaaatcttctgcattatgacaccatttttttacatataattcattacaagg

SEQ ID NO: 36140 - DNA, 2381 bp, Zea mays
  Clone ID: MRT4577_132963C.1
ctccgcgacacacgcctccctctcctctgccccaccctcctccccacgccatcggcgccgccatcatcggatccggcccaagatgcctccgccccacgcgcccgagtcgtcgaggcacactccttcccgcctccgtcgtccacgcatatctccgcctcacctcggcgcccgagtcgtcgcacgcgttcgcggtggtgtccatcccggcaccggcctcacgcaccgtctacagctcccaactctgctcctctcagttctccctccgcatttcgccttctctcccttcctctccaagcagcgtcctcctcgcctagatccgtacaagcggcaaataacctctccggcggcgagacagatggagtcgacctccggcgaggatgctccgaagcacaacccgattccgtccgcgctcgtctccaacctacagtccgtgctcaccgcccgccgcttgtccgcagccgaggtcagcaccgccgccacagctagcgaggttgaggccttggcttaggaagcagaggcgttcgctgcccccacgggagatgggacgctggcgaggcccatcgtgctactgacctatgccggggggatccggtcggcgggtctcgcggcgctcgtcgacgccctcgttgccgccgaccgctgcgacgtccacgtgtgtgcccccgaatcgtacgtgctgcgacttagaaaaccaaaccacagcgggaccagtgctcggatagggtccgacgacgatgcaagcaaggagtggcgcgcggccgacggggcgcagatcggctcctgcacgtgcagcgcagccgcgtgacagtgaagcagggaggccgcgataggtggcgcagggagggtgcgacggaggcaaagtgcaagcacctggggacttcaggtaagtagaaaaccaacactgaatttgtcggttctctgttttgtgattgaccgattggtttgttgatctcagaaaccaaaaattgtttcaccgttaagcaccaatttttgggtaggtcagtgttttgggatgattctcctatgcatcaatagtaaccttgtgcttggcaaagttatttgccctgataatgttgtaggtttagtgaaaagaaatatactgacatatccaccgatccatcgatgcccaatggagattgacctctatcaagatttagttatgtgtctcagtagggcaatatttctgtgagttgtatactgtggattcctcatctgcatcatgaattgatcgcactatttatgccctatttttcaaaccatggtttctgtaattctttgcaccatggtatttttctcaaatgattttatctttcacaacccggactgaactcactgaagcagaaagaaagagtacaagtctactactgcagaaagcaaggagaatgccaatagaagcagatttcatgtatgggatcggataaaatcctgtgcaaaatgggagaaggtttgggttttctgcaatctgtcgtctcctcttctgctgggtatctccattattattctaatgaagagggctacgagttggattttcgtaggtacatttgagcgtgttttggaatgctgggatcgtgaaacacgtgaatatgttgccataaaagttgtacacagtatccacaagtactgtgatgctgcaatgattgagatagatgtgctcaatcgccttgtagaaaatgaaaaatatagatttctgctacacttggggaatcaaagaaaagtgaaagtgccatgtcaaagttgatgaccagaagcttgctattggaaccctctctattgaaaaatacccctagatagaaattgatttggttttcaataaagagtgtgagctgtcacacacatcgaaaactacacgtgtatttttctttggttacaaggttgagcaaccaatcgaggaagatgaataatggatcttgattctgaagatgaagagaaggagctaaacattccagtaatcaaggaaaatggcaaaggtgatgggaaggaggaccagagaagtgaagagaaggcagttgctgcagcttcaaaatcaagtcttgggcttgaaaaaaagcaaggatgagtatgagtctgatgattctaatgagggagaaggtgaaaccggagaatgagcagatgcggctgttcatggacaacagcatcaagaaacctgcaacatgcaacctgattttaagaaatttgccacctgcaacatgactgggcagtggtatctctgagatataatgtggacaacggcaaagaatactatgcatacacaacagaagagtcctgcaacctgattttaagtccatttgtagcaaacaatcttggaagccattaactcgttgaatttgaagcggatgtgcagttttatttttatgtcagttttactaatgcagttagttcct

SEQ ID NO: 36141 - DNA, 210 bp, Zea mays
  Clone ID: MRT4577_132964C.1
ggcctggacaataaaccacggctactaatcataagccccaagtaatgatccgggggcccagggagctcttgagctgaaccagggcgctcgtgatctccggcaacgcggtgcttccgctccactcacccgggacttttttcaaacatggaagaggaggaagaccagccgtccaacaggaggacaacgtcagccttggacccactgcgcggg

SEQ ID NO: 36142 - DNA, 384 bp, Zea mays
  Clone ID: MRT4577_132965C.1
ggcaaaagacaaagctttaaacaaaagaagtttttttgttttccaccatttttttgagattaccttggggaatctataattttatgggggctaaatcctaaatcctacaacgaatggggcaactaattaaacccgtttcctttgtacaaggaaaacaaagctgggggggggactggacaaaagggtgcccatgccctggaaggcattaagtctatttggggggggaattaccagcatttactttgtacatgcttcccctggctggggggacaaagaacagactaactccataggccttctttttatcacccccacaaaaacctggggtggattaaggctcccctaaggaaacccccggaaaatgaaaaggttttaccggccaaa

SEQ ID NO: 36143 - DNA, 314 bp, Zea mays
  Clone ID: MRT4577_132966C.1
agccgctaaaaccctagacccccagccgaatggtcgccgtcctcctccgcgcgccgccatgctgctccgccgccttctgcactccacacgccacttccggcacggcctccggaccgtaactccggccaacaccaccaccaccacttcctcctcctccaccccccttccatttcgctgcttcccggacctccccctctctcgcgtcctctccccgcggctcctctccacctccggccgcgacgacgaccgcaacaagccgtggagcttcgaggcggactcgggcgatccggaccccttcgccaatgaggacgccg

SEQ ID NO: 36144 - DNA, 489 bp, Zea mays
  Clone ID: MRT4577_132967C.1
cccacgcgtccgcggacgcgtggtgctgatggcgctccaaggtcatggacatggcgcccaaaaagaaggtgatccgctactacgagagctggtctaagcagtggttgggcgcgggcatcttctctgagggcagagagtaggtgtccgtggacgtgatcaagaagctggagcggcgcatggtgctcagcaccgtggagaaagccggcctgctgtccaagggctaggagctggggctgacgctctcctagatggagaagctgggcctgctctccaagggcgatgacctgggactgctcatgctggtagagaccgctgcggggacgtccccgtccgtgctggcctgcatctcgctgacgctcctcgtggccgccgtcgccgctgtggtagtcgtgcctgatgactccttgacactcgtcgccctacaggcacgtagcacagcggagctctcggctgcagccgccggtctgttcgtgggctctgtcgtgctcg

SEQ ID NO: 36145 - DNA, 1006 bp, Zea mays
  Clone ID: MRT4577_132968C.1
ccggccggacagacaataggcccttcaatcgatcgcgaactctgcggtagtcctccacagcgtgaagcaataatggaggtcgggggcggcggcaagcacttcgtgctggtgcacggcctctgccacggcgcgtggtgctggtacaaggtggccaccgcgctggaatccgccggccaccgcgtgacggcgctggacctggcggcggcgggcgcgcacccggcgcgcctgcacgaggtgcgctccctggaggactactcgcgcccgctgctggacgcggtcgccgcggcccccgacggcgacaggcttgtcctcgtcggccacagccacggcggcgtctgcctcgcgctcgccatggagaggttccctagcaaggtcgccgccgccgtgttcgtggccgccgcgctgccgtgcgtcggcaagcacttgggtgtcaccctcgacgagttcatgagaaggaatgcttccgaagggctgctcatggactgccaacgggtgcccatctccggcgtggggcagcaagggacagcgatcgtgatgggtccaaggtatatggaggagaagtactaccaggagagcccctcggaggacctgaccctggcgaagctgctggtgaggcccggcaaccagttcatggacgacccgctgatgaaggacgcggcgctgctcacggccgccagctacgggtccgtcaggaaggtgttcgtggtggccaaggccgactgctccagcaccgaggagatgcagcgctggatggtggccatgagccctggcacgacggaggtccacgagatcgctggcgccgaccacgccgtcatgaactccaagcctgtggggaactctgcgacgtccttggacgggtagccagcagctgtggctgagaacatgacgacgacgactattgttgcagcttgtagtgtagtactacactactagtagcacctgtatatctcgtgaacactgcttatattattgaatgaataaaatgactcgggttatttcgaattac

SEQ ID NO: 36146 - DNA, 372 bp, Zea mays
  unsure (1)..(372): unsure at all n locations
  Clone ID: MRT4577_132969C.1
ccccgaaggcgccacccgaccccaacangaccaccaancacaacgggaagaaggcacaacgcgagggccaccaggaacggagagcccaacagagccgacgcaccggacaacggcggngcgagcggcaccaagaacgcgaaccagccaccccacagcggcaagacggcgagcggcaacgaaccaaacancaaggacgagaagggctgcggagcaagctacaaggggagacgcaaggaaaaaccggagggcgggggcaaaccacacacagggacatcacagacatgaaccacgagccgaacgctccctaccacaacgacgagagcggaaaggcctacggcacccgggcaaagcccgggcacaacgacaagacgc

SEQ ID NO: 36147 - DNA, 694 bp, Zea mays
  Clone ID: MRT4577_13296C.1
cttcgtttttggcgattaatgccaaagggggagaaatattaagcccaaagcaaaaggaccgcaccaccaaacttcaaaatttttcgaaaatgatgatttatgtttgtcttttcaattggtatcttatgatagaaatttcttcaattgatatgatattttcaattggtatatttaaagatggaatttcaaaactagtatctaagtataagttccaattggtatctattaaaaccctcttgaaaactaagaggagaattttattcagggggagttttgtttagtcaaaggaaaagcatttgaaacagggggagaaatttcaaatcttgaaaatgcttcgtgtaatcttattcatatacctttgactatttgcaaaaagagtttgaaaagattttccaaaaagatttgcaaaaacaaaacaagtggtgcaaatgtggtccaaaatgttaaagaaaagaaaagcaatccattcatatctagtgaaatattcaattggtttaattccaagtaacctatgcacttaccatatgcaaactagttcatttctgcactttatatatttgctttggtttgtgttggcatcaatcaccaaaagggggagattgaaagggaaatagggttaaccttttcatacaattaattttggtggttgaatgcccaacacaaatatatggactaactagtttgctctagagtc

SEQ ID NO: 36148 - DNA, 437 bp, Zea mays
  Clone ID: MRT4577_132970C.1
gacttccaaagagctccactgcacgacttggatggcggtggggtccatttgctacgcctttcttcgagctgctgggcaggaggagacagcatcgattaccctcttgactctacataatggtgattatatacaccactctggacaacgcctattggaccaccttcctgtgcttaatggcataagggaccgactacatatacatagcgaccctgcctaatatgtaccactatgggagcaaggcgcacatgcttttcaagagcaaaaccctttactgcgctagatggaagcaaccgtgatcctggacaaacggacattcaaagaggcaacacacggcccaccggaagtacgacactagttgaaaccgcgttcgaaccaatctctatcgacgcatggtcataggagaattctgggtgggaatgatcgtctaccacaaattc

SEQ ID NO: 36149 - DNA, 325 bp, Zea mays
  Clone ID: MRT4577_132971C.1
ccaccaaacccaaaaaaataatacctttcccaaaacatttacaccagttaaaaaacactttttttatcaactttaaccccccaccatttttttcctcccagttttgggtaaccaaaccctaaaacacctcccataaacagttaaatttttaatttacataaaacagtttttacttatatatggccatatgaattcggcccacaaaaccatattttctccctaaatgtccaatcttctccgtcccaaaaaaattttttttttaactacaatacaaaagaaccttgcccctcttataaaaaaaagtcttaacgttttcccgtttccc

SEQ ID NO: 36150 - DNA, 578 bp, Zea mays
  unsure (1)..(578): unsure at all n locations
  Clone ID: MRT4577_132972C.1
ccggccgggctagtgtcctcccttctgacagtctgcgtcgtcgatctgctctctgatgccgccaacatgttcagaagagctgcgacatgctatcgactgatcattaacaacgcataccccaagaccgagtactgccgtgatgtccctgatcccaatagcaggatctaccatgaatgtaatgaagataacgaccgctgatgaggtcccctactgcgtgcaccttgtctcttgtgacaatgataatgatacagtgaggctcttgaagatgaccagtactatgtctgcaacaagtacatgagcaagcttgcaacacatgatgccttccaccttacctgccgtcctcgccccttacatgtcctacatatcatcgagatgcttgcgcgtagttggggctgataagctccacactgcaacgaggtgcgcctctggcaagactcatgccacctgagctatgacgcaccctgaccaggacctcctttctgatcgatgccatcacgacaatgctanatcatgccagagaaaatctgctacttgcccagttgctgttccctggtcgctagaaaattattgataggaaa

SEQ ID NO: 36151 - DNA, 641 bp, Zea mays
  Clone ID: MRT4577_132973C.1
gggacctcgagccggccgggcccctttgccgctttgcgccttgcagagcagctagagccaggggacactcgcttgtctgatttgctattttagcttgtatgacctaaattttgtggagctcatcaaattcaccgtttccttcttcctcgcgaagctcactggtcacgcttgcttcctcctccgcgcgctccccatcgaccgcgcttgctcctcctccgcctgccctggccctggccacgcaaccctagccatggtgagccctggtcctggccatagccgcgtggccgccgaatcggcgaggccgcgctcgcccggtgaggctgcgggagctccaggccgcctgcgcccgcactggcctcgtcctcgtgttcgtgtttttttttccacgcaaattcgtcatatgaggaggaatggatgaaagggggcaaattaatccatttcaaccaagttgtccttcaggtggagctgctatgtaatttaaacgggttttacggtggatcttaaatccactcatggagccaaatctagattcactttgcgtctgtttagttgcttgtatatgagtcaggcctgtatggttggatacaaaataagtcattttgatgctactaaaaaaaaaaaaaaaaaaggcccctagggcc

SEQ ID NO: 36152 - DNA, 297 bp, Zea mays
  Clone ID: MRT4577_132974C.1
gttctagatcgcgagcgggcgcccttttttttttttttttttaaacgggaatttcaggtctcatagcattatcatgaatcttagaacataacaggtggaacacgaattaaaccgaagcgccctggggttcacaaatccacacctaaaccgcttaattaaactgcgagcgatacatgataaacttagaccaccacttaaattaccaccattttgtttttaaaccaatgaacttatttactgcgaagcgcaaaaaaacccgaaggagacccttagggggcttgtttttgcccctttttt

SEQ ID NO: 36153 - DNA, 519 bp, Zea mays
  Clone ID: MRT4577_132975C.1
atataaaatatatatatacttatttctggcgataatattgcatatgccgccgtttttttaatcaaggctaagggcatcttctccttttggggtttagtaaaactatccactaaaaagggggggactaaaaaaacaaaaaaaagggggagctaacactttgctgacactcaactttttttttttttctcctatatatccatcatcacttttccttggcttttagtattctatgattaggctggggtatcactcgcttccaatgctgaactttacatccccatggctccgggatcggaggacaccctgcccatggggaaaaagtaggagctgggcaaagggatttccaccccaggggggcggaaatggttactgcccccgtcaatcttgctcccaacatgggacgcggggttctcaggctccggggggggaaaactgtcgtgcacaagcgcggaaaacttggtaggggacccaaatgggctgtccggcaagttgtgctctccactttgggcgctatcaggg

SEQ ID NO: 36154 - DNA, 237 bp, Zea mays
  Clone ID: MRT4577_132976C.1
aattccaggggcgacggccgaatgcatccactctggtgggggcagctcgtcatgtttgcctggactttcaggcagatgagaatgcggtcttactaaacgggtcattccttcacacctagacatggattaagacgcttcaggcccaaactgcctgtggggtaccaccagcatttgtgactacatcatggactggaagatcgaactcttaaccatatccccatgcgggagcatctgaaa

SEQ ID NO: 36155 - DNA, 388 bp, Zea mays
  Clone ID: MRT4577_132977C.1
gaggggcagcgaaaactttttttttttttttttcaaacaaagcaggggccaaaaaaaatctttttattagctaggattgggcgggcccacccataaattggatttttattacaaaaaaaaaggactgcgggaaaaatcgaaagcccccttaaaagtcgggggggggaacgtaacccccccaaatgaaaacgtaacccccccaaaaatgaccccccccacaacaagggcagaaaccggttactactggacatgagctaaacaagaggggtatgcaaaggctgccccccccccccccccgaaaaactcacactaactagctagctagctagctagcaaaaagggctgcagcacccccacccatatgttgggcaagggcggcagttacagg

SEQ ID NO: 36156 - DNA, 329 bp, Zea mays
  unsure (1)..(329): unsure at all n locations
  Clone ID: MRT4577_132978C.1
agnatgaacagttcatcaatgcggccaagatcatccgccaccccaaatacaacagccggactctggacaatgacatcctgctgatcaagctctcctcacctgccgtcatcaattcccgcgtgtccgccatctctctgcccactgcccctccagctgctggcaccgagtccctcagctccggctggggcaacactctgagttctggtgccgactacccagacgagctgcagtgcctggatgctcctgtgctgagccaggctgagtgtgaagcctcctaccctggaaagattaccagcaacatgttctgtgtgggcttcctcgagggaggc

SEQ ID NO: 36157 - DNA, 200 bp, Zea mays
  Clone ID: MRT4577_132979C.1
gcgttccttttgggccaccagctttgaccgccggcgcggttcatctccgatactgctagtagacacccgactcccgcggaggagcgccaggggcggctgctgcgaccaggacaccgccgacagcctcaagtgcctcgaggctcacctgggcggcaaaacctatgtgtctggcgactgcattactaaggatgacataaagg

SEQ ID NO: 36158 - DNA, 568 bp, Zea mays
  Clone ID: MRT4577_13297C.1
agcttgatttgatgcccttccttaacctcggatttcggttcgggatgtcctggcccatcatcaacattagctaagatagtccgcatggttgaggatgcccaagcacgtgaagctcctgttcaaaggctcgcagattccatcgcaggaccatttgtgtatactgttatgacgttggctgcaacaaccttttccttctggtgtgctcttgtttttttatttcttctatgaaaatcttatgactaaaaatattgcctttttatccctcacccccttcccaaggtattacattggcacacacttatttcctgaggttcttctgaatgatattgctggtccggatggggattcattacttttgagtataaagcttgctgtggatgtattagttgtttcctgtccttgtgcacttggattagctacacctacagctatcttaataggaacttccctaggtgctaaaagagggttactggttagaggaggtgatgttttagagcgtttggctggaatagatactcttgtgcttgataaaacagggacgcttacagaagggaaaccagtagtgact

SEQ ID NO: 36159 - DNA, 380 bp, Zea mays
  Clone ID: MRT4577_132980C.1
cctgaacatgccgtccaccaactcgaaactcttgaccgtttcgttctcgcgatctggtgatccaaccgtcgactacctgacaaagaaaaaggcagagaaacaggaagacgatggggctgttcctttccttctagttctaggcaatcgcgtccttttgtgtctgtctgtatacaccggacaccagctacccgattacctgattacgcgtttgcatcgagtccaaatatcgtcctccagccgtaaatggttcaggatattgccggtggtctgagaaatgtcagacacgcgcagcgcttgcttgtttcgttggcaatcgtcagattcctaccattttcttattatgtttttttttctcagcaacaataataagcaaatgcata

SEQ ID NO: 36160 - DNA, 751 bp, Zea mays
  Clone ID: MRT4577_132981C.1
attgggtacctcgaggccggccggggcaagatactgctaggtaggttgggtcccgaagaacacccttctctggatggcgcatcgcagggcagatagctatgtagctaacatccgccgtggggcgcgtgcggagacggtgtgcatgtggtgagcgcgctggacgcgacgaagactgagtgtgaccacttcacggccatcatcgtcgccagtgtgggctatcttcacggacgcctacgacctcttctgcatctccctcgacaccaagctagctgggccgcatctgactacacgaacaccacgcaaggacagctcctcggggagctggcgcccaacggcccggagaagctcaacggcgatggcttctgtggaacgctggccgtacagcgtcttcttcgaggtggcgtgagccacaaggtagcgaagcagagagcgacgtgcgagatgacgctcatgatcatgatcctctgctccgtcacggcggccctcgcgatcagtcacacccccacgccgggcatgagcacgctctgcgtcttccgcttctgaatcggattccgcatcggaggcgactacccgctgtcaatcaccatcatgctcgagtacgccaacaacatgacccgcggcgccttcgtcgagatcgtctgcgtcatgccactgttcggcatcctcgacggaggaatcgacgcgatcgacatctccgccgactacccggcggcgtacacgaccgcggagtacagtgaggactacttgaact

SEQ ID NO: 36161 - DNA, 442 bp, Zea mays
  Clone ID: MRT4577_132982C.1
ataacctaatacctcttttcttgcacccgcaaccccgaaacaaaacaccgagacactacaccatcagacacctgaaccggtaccacccaaaatttcccttgtatcggctttacaaacaatacgcacctaccgtccacatggaatcctatcctcctgcaaaaaaacatgagcaaggggcaaccattttcatacttcacaggatcagagtattatgacgtcagcgcagaggggcatccacgtccacttgatgccttgcaaaccgtgataggagattgtctctcctgcgctgactaggtacttgacccaggcatggctacatacagggaacattccacatcccagggatagcctatgcatgatccgagatcttttcctcacagctcgcctaggctgacaggtggataccgaagaaagataagcgccaatttatccaggatctctt

SEQ ID NO: 36162 - DNA, 377 bp, Zea mays
  Clone ID: MRT4577_132983C.1
ccgggaacgacccaacgcgcccggttcttgtgaacgcgcaccaaacgaacaaaacggaggaccgcttgaaaaaggcaacagggcaaactccgcagatatgcggccaaagagaatggaatacataacaaacagccaaatcaacacgaggcgcaccataggaatgcggacagcaagaataacgacagggactaaagtaccattaacaaaccacacaccatgccttcgcgcaagacgactcagcccattgaacgagaaaacaagacgctgaacaggctgcacaacccgaaggggcaaaggaaaatcgaagatacagaaaccaattcaacacagcagcagcaagaggctaagtattcacaccatgacatagacggaagacc

SEQ ID NO: 36163 - DNA, 455 bp, Zea mays
  Clone ID: MRT4577_132984C.1
aactaaccaagtgctccattgacattacattgtgtcactgtctgcttatttgctgcctaattcattgttattggtatatacaatcgtaatatgttttctgctatactgtatttggttggatagaacgatcaaaactcaatcccatagcacgttcttcgaacagcttttttaactactaggaggatgtgcctgacacgtctctccgggtggacatgaatggaggaatgctctgctcgtgcctgaagaagtcatggggatccaccttcgccttcaccgcggcaagcctctcaaaattcgccttgaagtacgcctccccccagaccctcgccttctcgtagctagccaggccacggtggtcgtcatggttgacgccgaggtccaggtccctgtagttcacgtaggcgcccctggggttcttgctcacgtacggctccatctcccggtgcagccccctg

SEQ ID NO: 36164 - DNA, 536 bp, Zea mays
  unsure (1)..(536): unsure at all n locations
  Clone ID: MRT4577_132985C.1
ggaacctnctctgcctgncgnttntcctgntgngggcggncactggtgnaagtactagaggaggacatccgcttncattactgcgcctgcggaggatcggaggaaccagtagcggaggcttngatttttggcggncgcaataaatttcccgcatggtttgnagggccgngtnctcgctcgtttcccgctgcctcctggcgagggcccctgccggcgcgccgcccgctgccccctctgcgccgngcaggacagngcctgcagatgggatgcacaggctggggncaggtgtcctttaaaggnntagnactggggnannagnngaggagcccatnncgccnnnnnnncatgnganctacacanngntnntnattantggnaactnnnnntnntnncnnntccccnnnnnancttnnnaactttggacccttggcacaggggagggtgattgctcatggtggctgaggggtgacgcagtaggacatttaccggtnccantagctgnngnttcgnaagggtttttggatgaangggccatg

SEQ ID NO: 36165 - DNA, 186 bp, Zea mays
  unsure (1)..(186): unsure at all n locations
  Clone ID: MRT4577_132986C.1
accccgggncgacccagcgnccggccgnggctcctgcngggaaggcggccgagccgggggcgaccaccaagnncccgaccaagcccgcgccncccncgcagacggnncgggangcacgcggcggnggcncancagcncgnggaggccccggccgnggngaacgnggccgnggcagaggnggacggg

SEQ ID NO: 36166 - DNA, 276 bp, Zea mays
  Clone ID: MRT4577_132987C.1
ccttctaggggcctccctttttttttttttttttttttttttttattttttttattttttcatcgttttgtttcaatttatagtccttacatcttaccctttattttcattaaccatctgaccttacctatccacatacaatatctcaccttaacaattttaaaatcaaaaaaacatctattttataatcacatatataatcaattcattttccatcatccaaatcttacttaactcgcaaaaccttacattcctaatcattaactccctccaaaa

SEQ ID NO: 36167 - DNA, 240 bp, Zea mays
  Clone ID: MRT4577_132988C.1
cccacgcgtccgcgacccggaagtcacatagcggctcaggacttgtccatcatgcgggcatatcatctcctgttggaggtgaatctcgtgatcgctgatagtgtatctatagagtaatcttgtctagctaatgcgcctctcagccaaaattgtgctatctatcatgtctatgtgcgtataactgtctatgtatcatgcctcgataacatggacagagagtcctctcctgacagactggac

SEQ ID NO: 36168 - DNA, 416 bp, Zea mays
  unsure (1)..(416): unsure at all n locations
  Clone ID: MRT4577_132989C.1
gcgggcgcccttttttttttttttttttttttttttttttttttnngttttttttncnnttttttttttttttggtggggaaaattggggggcattactgttttacccatctcgtgatttacctttcgaaaccgcagcgacaattcccaaaaaaaaaagggggggaaagataaccggggcaaaaaagagccaaaaaaaaaagccgggggataattaatgctgcgggtcgtctattattattggaatgaggatgccgcccgcggccccctctgtggcggtggtggggcaagccaagccagggcattttttcactttacccggggggggagggtgaccccctcccccaccgggagcttgcaaatctcaacccggtcctcggtgggaaaccccttttttaggaccagccccaaatctcg

SEQ ID NO: 36169 - DNA, 1537 bp, Zea mays
  Clone ID: MRT4577_13298C.1
ggagtcgagctccctgcttcctggcgctcggcttctctcgctgccggtgcttgcccgctgcctggccgcgccggattgaagcccctgccgtggcacttcgcttcctctgcgacgttctcctccctgcgcataagctcagctcgccggtcgagctccctgcttgctggccctcggcttctccagctgccggtgcttgccctctgccatggccgcgccggattgaagcccctgccatggcacttcgcttcctctgcgacgttctcctccctctaatctttctgctcgccggcagtaatatccagtcgcgccctgggtttgcccgaagctatgcgcgcccggtcgatctccctgctccagcgctgcgcccgactccagccagctctgctcctctttctctctgctcggcgtccttcctctgcccgctgagtccctccatcgcctggccgcgcccagcttctttgctccgtgcgcgcgcctgctcctatgcggcgcggaacttcctctgcgtccaggtccctcagctcgcgtccatgccgcggcgtcctggtccctacttgaccgtgtcactctgcgctcgcgtcgctgtctggttccgagcgcctgggtcttctttcccctgcgctcggtcatagtcgctgcgagccgtgaaactccctgtgtcgagctcggatccctgcgcagcggagcttttcccctagccaagatcgtcattgcgcgcagattttctttgctgctcgccgcgctcgattcgtcgtgcgctgggcgctgtccggcgccggtattcgccgaccccgcctcaccatgggtgtgtgtcatcaatctcgccctgttctgtccactcgatgtcgcgtgcttctgtgtcgtttgctacgcttggcacatccgtgtcattcgtgttcgacatgtccccggcacggttgtttgcagctgctcggataaacttctctgtttcggcgtgttcgccatcgaccgcccccggtgctcgacgaatggctggaacccggaattcgtcgtcgtttctcatccgcgatctcgtcaacctctgctcgacaagtgttcgatgaagggcctgagccaagtgttgttgctacttccacgaatttctcatcgaattggtaatagtactctagctcgctactcctactaatcaattaattcgatgaatatattggatgaatattacccgcgacgttagaatcagatacttgtgatgtgctgtagtaattatctgtatttcattgtatatgtttgatgttaggttatttctctacgggataggatattgtatttcgatatttaatctcgtctggtatgtagacttgttaggtgttcgagaaaatgtctgaattagaaatcgttgttgttatcaggtgttgagtcaaatatggtcccaatgagctgtgccgtttttactgctattagaattgatgaatggttcgattaaatatataatcacgatgattctcttatttatagcacacatgcgcggtagcgatctgtgttacttagcgctagtttgtttcctttgtgtgtttgc

SEQ ID NO: 36170 - DNA, 2852 bp, Zea mays
  Clone ID: MRT4577_132990C.1
gtgggattaggtattggtgccacaccttttattagcatactgaaagacctgctcaataacatcatcaaaatgggggaagaggaagaagcttcaagcataaaaaacaaccaagaaagcgttaccaaaacttttgattgacggaccatatggttctcctgcacaagactacagcaagtatgacgttttactacttgtgggattaggtattggtgccacaccttttattagcatactgaaagacctgctaataacatcatcaaaatggaggaagaggaagaagcttaagcgatctttacccaccaattggtcgcagcaaggcacatgttgatcttgacacccttatgaggattacctcaaaaccaaagagggtactgaagacaacaaatgcttacttttattgggtgacacgtgaacaagggtcttttgattggtttaaaggggtcatgaatgaaatcgctgaactagatcagaggaatatcattgagatgcacaattatctcacaagtgtttacgaggaaggggatgctcggtcagcactcattacgatgctacaagctctcaaccatgccaagaatggggttgatatagtttcttcggaattcgggcgggcgggcattgccgtttgatgacaacattaacttccacaagactattgcagcagcaattgtggttggtgttgtccttcatgcagggaaccaccttgtatgtgattttccacggctcattagttcatcagaggtgaagtatgctccactgcgcaaatactttggggaaaataaaccaacatatctggatctggtaaaaggagtggagggcataacagggataatcatggttgtgtgcatgcttatcgcttttactctagcaacaaggtggttccgccgtagcctggtgaagcttccaaggccatttgacaaactaactggcttcaatgcattctggtactctcatcatttgttcatcattgtgtacatatcacttgttattcatggagagtgtctataccttatccacgactggtacaaaaggacgacatggatgtaccttgctgttcctgttggtctgtatgtaggggagaggactctgaggtttttcagatcgggcagttattctgtccggttattgaaggtggctatatatcctggtaatgttttgacattgcagatgtctaaacctcccacattccgttacaagagtgggcagtatatgtttgttcaatgccctgcagtttcaccttttgaatggcatcctttctcaattacttcagcacctggggatgactatctaagcattcatgttcgacaacttggtgactggacacgggagctcaaacgggtattctcagcagcttgtgagccacctgtgggtgggaaaagtggccttcttcgagcagacgaaacaaccaagaaagcgttaccaaaacttttgattgacggaccatatggttctcctgcacaagactacagcaagtatgacgttttactacttgtcggattaggtatcggtgccacaccttttattagcatactgaaagacctgctcaataacatcatcaaaatggaggaagaggaagaagcttcaagcgatctttacccaccaattggtcgcagcaaggcacatgttgatcttgacacccttatgaggattacctcaaaaccaaagagggtactgaagacaacaaatgcttacttttattgggtgacacgtgaacaagggtcttttgattggtttaaaggggtcatgaatgaaattgctgaactagatcagaggaatatcattgagatgcacaattatctcacaagtgtttacgaggaaggggatgctcggtcagcactcattacgatgctacaagctctcaaccatgccaagaatggtgttgatatagtttctggaactaaagtgcggacacattttgcaaggccaaattttaaaaaggtcttatctaagatagctaccaaacatccatatgctaagattggagtgttctactgcggggctccagttctggcacaggaactaagcaagctctgttatgaattcaatggcaagtctacaacaaaattcgaattccacaaggagcatttctgacatacaacaaggttaatgcagaatattggaacaagggggagaagatgtgatgtatgtaagtcacttgtgctttaacatgttgctttcttggcgatgagtttgaaagagcaagggattctgcacaaggtgttgtatcaccacagcttactccgcatttgtgatactactgtcccccagttacaactgcattatctattgcttgagatactaaaatacaataagatcgcatagaaaggaaaatgggggtcagctagcacatcacacaaggtttccatcgaaggttcaagagcacataccccaggtggagtagcaagggaatctctcccatggagtccacaaccataaattgtgattatataagtagcgtgatgtaggacacatacaatgaaggccaggatgtcacaaggctacctaactgtatatttgcatgcagctgagtggctgactgaggccacaagtttgatctaactttgtacttgtacacagggttgaaaaacaggaagaaggtacattttgtttttgtaagtagcgtaggttggtagtgactgggctcagattgggggccctcaagtttcattaaagcttgttccgttgcctcgttgagtggtaggttgcatttttttttaggacagatctggctgattcatgtatatctttactgaaggccatgtttttttaaaatttatgatgctgtctacatgttgatatggaaaggattaaatgtggaaaatgatatgtatacctgtgctaatttggcgccagat

SEQ ID NO: 36171 - DNA, 306 bp, Zea mays
  Clone ID: MRT4577_132991C.1
tgagaattgatacaccttaataacatcagagggaaaaggaagatgtacttgctagaatgcttcagctggaaaaagagctgcatgagaagcaacagcttgagctcgaagtataacggttgaatggtacactccaagtgatgaaacatatataaggagaccatgacccgggggatattcattaaaagatggagaagctgagtgaaagatttgagcgggaaaagaagcgcctggaggatttgagtggtgatctggtgacaaaagagcgtgaaagtaatgatgagctacaacaagcccgaaaagaattga

SEQ ID NO: 36172 - DNA, 446 bp, Zea mays
  unsure (1)..(446): unsure at all n locations
  Clone ID: MRT4577_132992C.1
ctcgaggccggccggggagatctcggcggctttccacgttctgctttggaataagcatctactcgctacgtcccaaaataatattcacttagggtccaacctctttttaatttataattcattagctcaagcacttttgcatcatgtgccacattgctgataaaaaaagaagaagaatgcacccaatcaacttctccatttatttactagattttgggcaccaaactagaggtagacacaattgaagaaggtgaggctaatatcaacggcgacactagatgcgtttggttgcgggacaactggggacaggtaggatagagacgtcctcagacatccctctaattttgagggacaacactaagataatcctgtcataacccctgatcctgaactanacaaccttatttaattgatcgttatatcctacctgttcagttattacaact

SEQ ID NO: 36173 - DNA, 571 bp, Zea mays
  Clone ID: MRT4577_132993C.1
gcacgaggcggccgccctttttttttggttttctaacaaaggtccagcaaaacaatttattctctatacattcgcagcatatgtagagttcccacgatccagaagcaatatggtgccaataatataaatattatacaccagactattttcccccctatcataaccatcattcagactatgacgatgacaacataagtacataactagccacccatgcgaagaactgtggtggtaatgaaccaaagaaagaaacagccacaagtggcgtgctccactggtagtaattagcatggccagtcctctcctaagtaccaaaactgctctagcacccacttcaaatgatctcagaatataccctcccctaaccaaatcgacagtacattctactcccttttgttttcctcatcatcgccttcaaaatctgcaactgtattcacgtcctttgttgctttggcctctggcgcaaaaaataaactccagccgttcttggaagcactcgttgctggcctaattaatgacagattgtcctttcgatcaaagaattcgcttgcgtcctaggaaaatctcattg

SEQ ID NO: 36174 - DNA, 208 bp, Zea mays
  Clone ID: MRT4577_132994C.1
ctcccgcatcctcgttccctttccctttttcctagactcctctcaccgcgaagcggaaaattaaacattccccacccccaccccacacgtgccaaaccatcctccctcctcctctaatgtaactatacaacatcagcctccttcattctatttacgctctcactcatactctcacaactccttcttaatctacattttaatcatcctt

SEQ ID NO: 36175 - DNA, 270 bp, Zea mays
  Clone ID: MRT4577_132995C.1
gttcaacatggccaccctgttggttggaatgggtcacccagttccttaaaaacccaaatgggccggttcattggggctgggaatggaaaaaaaacaaggtttttttcaagcgccacacatggcgtgcgttgatttttcatggggcctataaccagctgtttgtggcaccaagacatgatctcaccccatttgtgttttcgctttggactttgggtgttgccctgggtctcacgcgggagaaaatatttcggcttcatctatcaaaatttc

SEQ ID NO: 36176 - DNA, 851 bp, Zea mays
  unsure (1)..(851): unsure at all n locations
  Clone ID: MRT4577_132996C.1
atgtaactcttgagcactactctcctgtttttcagcaccatcctgtgctactggatgctttcttgaagacatgcaagcttgttgcaggtataagaagtagacaaaaagagaacttgcaagatacaacataagttggaatagctaggagagctaatggtggtaattgaagctaaactttagcacttcaattcatatagctaaagtttagcaggaagttaaagtttatcccgtgagattgaaacggggcctaaggcccccgcatcgctctctcgcgtggtcggctcgggaggcgaaaccctagccgctgccccactctccgtctcgccgctgccagaggggctggccgggttggccgcgcgggcccccaggacggcggcggcgaggcatcccctgttggcgttgagagctcccagattcgtgcggggaaggagctcgtggccaaggcttgatcttggtggccgtggtggtgctgtgcgacctcgtgggcacctcatgggcacattcgtgctgtgcggcgaggcataccatgttggcgttccggagttttggcctgacgattgtgctggagcttcttgggcgaaagcctcgggacggtgatacccatgggcgctgttttccctcttgagggcgtcgcacggtgaaagcccgatccattttggacatgcgatgatggcgtcctcgatgtcactaccttcctgaaggcgttgntttttgagttcgtctcggncatgtcgtctccttttggttgcttttgcttctcggcgtccgaatacgggnttggaaggtgtggtcctgcagcgtggagtcggagctgctacattanagtaatgtgggtcggcaacgatgacatg

SEQ ID NO: 36177 - DNA, 1526 bp, Zea mays
  Clone ID: MRT4577_132997C.1
ctgagcttcaaaagctgaatctgaggttgacgttttaggaggcaaggtcaatgcactcttaagtcttgttcaaaagattatgtaactcttgagcactactctcctgtttttcagcaccatcctgtgctactggatgctttcttgaagacatgcaagcttgttgcaggtataagaagtagacaaaaagagaacttgcaagatacaacataagttggaatagctagattactgtgagttcgtgacgttagtttctaccacaccgtgactccctaactcttcttagaagacagcaaaaacagttaactataaccacaaatgaaggagagctaatggtggtaattgaagctaaactttagcacttcaattcatatagctaaagtttagcaggaagttaaagtttatcccgtgagattgaaacggggcctaaggcccccgcatcgctctctcgcgtggtcggctcgggaggcgaaaccctagccgctgccccactctccgtctcgccgctgccagaggggctggccgggttggccgcgcgggcccccaggacggcggcggcgaggcatcccctgttggcgttgagagctcccagattcgtgcggggaaggagctcgtggccaaggcttgatcttggtggccgtggtggtgctgtgcgacctcgtgggcacctcatgggcacattcgtgctgtgcggcgaggcataccatgttggcgttccggagttttggcctgacgattgtgctggagcttcttgggcgaaagcctcgggacggtgatacccatgggcgcggttttccctcttgagggcgtcgcacggtgaaagcccgatccattttggacatgcgatgatggcgtcctcgatgtcactaccttcctgaaggcgttgtttttgaagttcgtctcggccacgtcgtctccttttggttgcttttgcttctcggcgtccgatatacgggtggaggtgtggtcctgcagcgtgaagtcggagctgctacattaggtaatgtgggtcggcaacgatgacatgaggcgtgcccccttcttcgtggaccggtttgcttcgaaggctgagcgttttgccgaggcggggtgaagtatcaagtttggaagtcttattggtgaagaatcggagctgcctcgcgtggggtgtcttggggcttggcaacgacgccgcgccgtggtcttcatacttctgtgccgttttttgggtatagacattgttggtttcctcatttgaccttgtgttgctcattttggctcagagttgctcgtcttttgtgttgagctcgacaacaatgaccttgtatgggctttgtgtgtggggctaccattgtctgggttgcttgtgcatcctgtgtagatttcagactcggttttccttaaaactaagtcaattcctttctttttaattgagaagtagagctcctgccatcacattcaaaaaaaaacatcaacactgatttattgaatggttatgtttcctgcagaatattttttatgaagtgtattgactaaaaaaacccacaccc

SEQ ID NO: 36178 - DNA, 128 bp, Zea mays
  Clone ID: MRT4577_132998C.1
gtctcgaagaattatctatcagacaatacaccattccttttatccaaggcctagggttgtggaaatggagaaggggaagaaggttgctgtcaattgttggttgcttgccagtgcttatcgccgccgaa

SEQ ID NO: 36179 - DNA, 417 bp, Zea mays
  Clone ID: MRT4577_132999C.1
gacctttgggtctgtttatgtgcttgtcttctgtaccccttccgtaattgaccgctcactttttctttaattaaagattgacggtgtttaaggctgagaagaagtttgtggtgaacaagttggcggaggaggagtttgtggctgagaagatgattgttgggaagaagtttaaggtggagaagtgggcttttgtcggtaagcttgttggtaaggagggtggtgagggtaagtgcggtaagaagaagggtaagaagagtgcggagatgcataagactcatactcctaaggcgtcgaagtaggcgtatttggatactggtactcttcttaaagttacgcttactacgaatcttcctactaatgatactcctgagaagtcggttggtgaggttgttaagtctgtgtgtcataataagaagt

SEQ ID NO: 36180 - DNA, 294 bp, Zea mays
  unsure (1)..(294): unsure at all n locations
  Clone ID: MRT4577_13299C.1
aacaattattaatctccataccaacatagaattttcttttcttcaccccatcccaatttcgggcttctacttatacatgaccgggccggccctcaccatatcaactatccctnacccttacctcatcaattcctctttcttatataacactttctcatcctcctcctacactactcttatctaccatcacttcctctttaacatcatccattccacccttctactatctcttcatctttcattcttctctatcctaattactaaatcactttcattttatatctacatcttaac

SEQ ID NO: 36181 - DNA, 351 bp, Zea mays
  Clone ID: MRT4577_1329C.1
acttctacaaagctactgcgtatcgtacatgctacgtgaatgtcgggctgcgtagagatcatgcaagatgaatgtcatactcgagtgtagtgacacgacttctgagcatactgctgccttgcactcatgcatgttggtgtggacgtcactgcataaatgtcatatgaatgtcgagtacaagtatgcatccagatgaggtgcactaatggtggcccatataagtggaggcaaggtggctattccgaagtgaactctacaagctgagtgcagtcaaatccgtctacctctgtacatacgttaccccgggactggctgcggatggacctgagcgtcatcggcttcgggctcatc

SEQ ID NO: 36182 - DNA, 442 bp, Zea mays
  Clone ID: MRT4577_132C.1
gataacccctccgaggaatgccaaatgatttatgaggttgcttatgctgagcaagggaaaatagattggtataggatctacacacctacttgtaagaagactttattgcaaaagcgcaaactaattaggggaataatgccctggctgtcgagaggatacgatccttgcaccgagctgaacataacgaaatactgcaacttgcccgaggtgctggacgcctttcatgccaatgttactgtaataccatacgcctgggtgggctgtagggacccaatatatgagtgctggatggattcgccgaggtccatgcttccgatctaccgtgacctcatctcggcatgcctaaggatatggggatttatcggctacaccgactttctcgcgcccctcacggggacgaggttctccattggcgcgctttctctgccaatgatcaccaagt

SEQ ID NO: 36183 - DNA, 399 bp, Zea mays
  Clone ID: MRT4577_133000C.1
gggggaaaggttccatttggtttttttagggaaatgggatacaacacaataacccttattgggggtggaaataaaaacacatttttgtggcatgggcaataaaagtttgtgtcactgggaagcctggctttttagtagtagcccattttttaatttttaattaagggccagtaacccagcctttggggttactaatttaaaaccctgtttcgcattgcactagtatcatcatcatcctcacccaacctgggggactaggagcaattttttctttcttgaaaccgggatcccaaacaccttgggcatgtccacgttctccgcctttatccccgccgggaggtgccaatcgaaccggtacatgagggtggacaacattcccttaatggtcgcggaccccca

SEQ ID NO: 36184 - DNA, 208 bp, Zea mays
  Clone ID: MRT4577_133001C.1
ctcctaactttttttatttgtctggcacaataaccaccgtctatacagacccggcataaccaccacccaaccttgccaaggaagaattccatagaaaaaagctatctacgccggattcggcataatatgtcagccaaactaactcaaactgtctgaaacgcttcacccacgtgagaaacttaactaacatagcttgagcacaactttt

SEQ ID NO: 36185 - DNA, 419 bp, Zea mays
  Clone ID: MRT4577_133002C.1
tccggtcaagctggctcatctactgctctgcagattgccatgaagacctgtggcactaccgagggggtgttcacaaatcgacggatcctagagctagcttaagagctggctatgcctcttgctgcatgtgaagtactcccgctagaccttcatatttactggcgcacacacagtccatgatctagctatctccgacaatttgctggactcaaccgatactgtgtgcacctgaaatctggtgtacaagattatgtgatagaggatgcatcatgaccaagacagacatgtgacatatactacaccgctaactacacagagcaactaatggtcaaaactcatatgcgcatcactggactggacacagaataaagctcagagtcattgttcaatactaatgctgatggcagcacagcatgtgc

SEQ ID NO: 36186 - DNA, 555 bp, Zea mays
  unsure (1)..(555): unsure at all n locations
  Clone ID: MRT4577_133003C.1
agtacaaaatgcaggaatagaccaaaccataatatcagtatcagcagggcacatccgtactaattttgtttgttttcaaatgatctggactgtcatcattttggctagctaatggtagtgatacaggtaagatgataacaggaacgaaaacagcaagcccaacagcagcagacgtaaagcaaaaccacacgcgggggagaatcaacagagacgcgctcacagtggcacacaccaaaagcactgcgacacttgtgagaccaaacagcgtccggtggccacatcggccatggccaaacactcgcaggcagagacccagagcgggggtgcctggccgagctagcaggcgtcccagagggagccgtgtggccagcacagggccacctccgccgggtcgccgacgacgccggtggcccagcccggcgggtccaggagcatggcctccgccatctcggcccaaaggctgggcgagtccaggtccagctcgaactcctcgtcgttcccgagctcgaccaccggcgccggcccggccccaaactcgcggncgtggtcgtggtc

SEQ ID NO: 36187 - DNA, 818 bp, Zea mays
  Clone ID: MRT4577_133004C.1
acttccccacgcgacatcacagatcaccaccctcccctccgcccgacctccagatcccgaccccatcgtccgtccatggcgaccgccttcgactcgccgacctcctcgccggcggccgcgcccttccacgacgaccccttcctcagcttcgccgactcccccgcccccgccgcggccgacgtccacgtctccgggggcgccgacgactcctccttcccggcctcccccgacccctacgccttccgccacgactccgccgccgcgcaccccttcggcatgcccgactccaacggcaacggcatgcaccacgacgcggagggtgacggcctcttcaccgactccggccccgtcctccccgaccccgcccagatgggggccgacgagggcttcctcctccgcgagtggcgccgtcaaaatgcactcctcctggaggaaaaagagaagcacgagaaggagctgaggagccaaatcatccttgaagctgaagagttcaagaagggtttcgttgagaagcgcaagttgaaccttgagacaagcaaggatcacaaccgggaaagggagaagcttttcctctccaaccaggagaagttccacaagggcgccgacaagcagtactggaaggcgatatccgagctcatcccacaggagattgcacacatcgagaagaggacaggcaagaaggacaaggacaagaagcctgggatcatcgtggtccagggccccaagcccgggaaggccaccgacatggcacggatgcgccagatcctgtcgaagctgaagcacacaccgccgccacacatgaagccacctccaccacc

SEQ ID NO: 36188 - DNA, 382 bp, Zea mays
  unsure (1)..(382): unsure at all n locations
  Clone ID: MRT4577_133005C.1
gttttatgaagtacatagctaccaaggcctcacctgattctggccagagtgacttggaagcaaattattggactcatcaaataaatgcctatctgacagcccttcacagagaaaagcatacattagatgtcaggtcttcaaaaacgacttcagtagccatatcatctctgataagctctgtagcatctgttttggtaatgcatccaaaacttggtacttctgcagcagaatctttggccatgcttggcacatcggacccaagattgggtatgccactttttgtagttatcctcttctacagcaagattctatgcagcagcggtaaattttcagcggaaatctnnctcagtttgctagagtcattgccatcacttgctataca

SEQ ID NO: 36189 - DNA, 476 bp, Zea mays
  unsure (1)..(476): unsure at all n locations
  Clone ID: MRT4577_133006C.1
gccacncgtagagcacgcgaaggtcgatgtctacgaggacagtcattgggctattgatgaccacgctcatctatgtactgcacgacgtcaccgataggtataaaatctcctctgatgagccgttggccctccacagacctatgacatctgaccttagcgactacagcatgtaatagagctggaacatgatagctgctatcgaccaccttgatcagatcataaccttgattatccacatgctgagcaccgagagatctatggtttgcattaaaaagaatgaatgctaggtgtgctgggccattatgaagactgatgacttactattcatgtagccccacatgatgaaataaataaacggtgctgagattgttgctacacttatgatactccttcactgcaaacattgagaaggctcgctgtgattagtgtatgcactcgtatgagatacgcactaataataatagtatgtaaatata

SEQ ID NO: 36190 - DNA, 475 bp, Zea mays
  Clone ID: MRT4577_133007C.1
cgcgatcgttgcccgtcttccgacgtaggtgctgacccgggcgccgggtccacctttaactgaccagctcgcactgacctatcgcacagctccgccttagcaggcacaactcgtccgcggccggcggctggagcagcatactcctgcatccacagtggagtaccgttcgcatacggagggcgcactctacggtctgtcctccaccgcaagggccatctggaaagcctaggtacatggtcaacacagagcatgaacatatgagctaaactgactactacaacccatggatgagatattagtgaggtccaaccgataaaggcaacgctgctggaaaggcttaggagctactgctcttggttcatatacgctagagggcctgacgtgggatgcggctacaaaacacgtgaactgatcgccaaaggtggcagcacacaataacagggtgcacgaactaaaggacgctgtagagctctac

SEQ ID NO: 36191 - DNA, 259 bp, Zea mays
  Clone ID: MRT4577_133008C.1
tttagaatggttacacaaataataaattctcttaggataacccacattcatactgtcttctaagcctttgagttcctaaatgattttgtaaatttgtatacctttgagttcctagatgattttgtaaatatgtatactttaaagttcactgtgtcacattcactggatttagcatatatgaaatgtcatgtgactgttagagtatctactgtaaacgtaactttaatttgcctcatgtaattgtcatatctcaagctta

SEQ ID NO: 36192 - DNA, 611 bp, Zea mays
  Clone ID: MRT4577_133009C.1
cctcgaggccggccgggctggtatttcccactttgcttgcaggcccctgaaactgataaagaaggcacaagcctgcgatctccagcatggcgaggagaaagattgaaatccagaggctcaagaaaacacgacccgccagggcacctattgcaaacgccgaagagggctcctctagaaggcctacgagctctccgccctatgatacgacaaggtggcgatcgtcaccttctccctatgtgttttacctctactagcacgccagcaacagagtgtcagggtacctctggagaggaactcgagggttcacgccggatgtttcttcctctgaaccaccgctctgtagagtacagtggccacgatctcctcgctgatgaatctcgcacaagtgtccacccacattccgatgttgttcaacgctactctggactggtatgcagcactctgtgcagaaacattgtcgctcagagaatgtgtccagatgtcagagccgcctgtgatagaggcggtctctgaagatctgctactcgatacagtgagctgttagggtgccgccatctgttacatgtcacacatgagatagtgagcatttctactgaccacaatgactctca

SEQ ID NO: 36193 - DNA, 564 bp, Zea mays
  Clone ID: MRT4577_13300C.1
tcccgggctcgacccacgcgtccggcgacgcggaggagatgaagtcggtggacgcgttccggcagacgctggtgctggaggagctcctcccggcgcgccacgacgactaccacatgatgctccgcttcctccgcgcccgcaagttcgacatcgacaagagcaagcagatgtggagcgacatgctgcaatggcgcaaggagttcggatctgacaccatcctcgacgacttccagttcgaggagatggaccaggtgctcgagcactacccgcagggccaccatggcgtcgaccgcgacggccgccccgtctacatcgagaagctcggcgcgatcgacaccgccaagctcctccaggtcaccagcatggaccgctacgtcaagtaccatgtccgcgagttcgagcgcgccttcgccgtcaagttccccgcctgctccatcgccgccaagcgccatgtcgaccagagcaccaccatcctcgacgtctccggcgttgggtacaagaacttcaacaaggccgccagggatctcatcggccgcctccaaaagtcgatggtgacaactaccc

SEQ ID NO: 36194 - DNA, 231 bp, Zea mays
  Clone ID: MRT4577_133010C.1
tgcttggtgttgttgtagtttgtagctgtccgtgtgtagtaatatccggtattgatgctttacggtaccgttggtagcgctcggctgacttgacggtctttatgaagaaactgaagaagagtatagagagtactaataataagtcgtagtcggcgacgaaaagtggtaagcatatttcgggtcataagattggctcgaagatgtcgtgtaatcgtaaaggaaagtcgacta

SEQ ID NO: 36195 - DNA, 366 bp, Zea mays
  Clone ID: MRT4577_133011C.1
gggccgacccacgcgtccacccaagcgtccgggatgtgcatacagctgtgcatccaagttggagtcgacaccccaatggacccgcagcaagatctcctgctagatctcttgtactccatgctccagtcgcagcgacatgttcactgacatggcatgactcatgcgcccaatgattcgctgaaggttactcgcgacatgctttgccgcaagtttgggcctagcagatggtgatgcaacctcagactcaacatcatcttcatcagatcatactactgatactgatggaactactactggtgatctacctgcacatctgccttctccagagccgtgctctgatcatttagatgctcctttggcagattc

SEQ ID NO: 36196 - DNA, 1910 bp, Zea mays
  Clone ID: MRT4577_133012C.1
ccccggtggcgtgggcgtgtgcattgagttttgtttcccttcccccacccttcctcttcctccctatctatcagcactgctcgccggcgccgcctctgcaaaaggctcacttttgcctccggaacccagcggaatccgccggcggaccggaaacactcgctcgcccccctcaccccctgtctgcccggccgtcggagcgcgtcgcctccgggcgtgcagcagcagtccgtggaggtggagccgggaggaggaggaggaggacgaggacgaggcataatctgccgagagcgggacagcaggagtgggctgctccgctcgcgctggagccaaagctactgattgccttgtcctgaccagcgaaagagggatctttgggaggcaatcagaggtgttcggtttggtcaaacaaagctcagctctcttgggatgcttgctgcgagctgcttgtgttcatacttgagagaataaaacagtgcatcatcttgcggtcttgtccttcgtgattggaagagaaaacgtgctgctgttcttgctatgtctgtctcggagaaggtggcgccatcgaagtcatcagtttcttcgtcgtcagatttggatccgttgctgaagggtctcacggagaagaagttgacctttaggaggaacgtggtgtcattggcagctgagctcaaggatgtgaggagcaagcttgcttcccaggagcacctgtttgtaagggaatctcaaactagaaaggttgtggagacaaaagcaaggagcatggaagaggaagtaagcaagctgcagaaatgcttacaggacaaggatgagcaactgcgttcatccacaagtagcacggaacagtacctccatgagttggatgatcttagaacacaactgtcatttactcaagctacaccagaagctagtgctgcatcagctgagtcatcacggatccagagcttattattgttgaaatgatctgaatgagcaggcaattttctccatagaggttgagattcgactgaacaatgtatgggagcagcgtggtattcttcagagggaactacaagcaagggcgatctcgcaaatgcaagttaaagatgaagttataagaatcgagaccgacatcatggatgcagttgccaaagctgggtctaggtctgacaaagataatgagcttttaaagatcttatctgatgtttcaccaaggaatgtccagaacctcaacaaccttttgaatgctaaggatacagaaattgcgaggttgagagaggaaatcagaatattgtctgctcattggacaaacaaaaccaaggaacttgagtcacagttagaaaagcaccggagaactgatcaggagctgaagaagagggttctgaagcttgaattttgccttcaagaatcccagtctcagatgcgaaaattaaagaggatgggcgagagaagagacaaggctctcaaggagctcatggaccaggtggccacgaagcagccaaacagcatgtgccatggcaacaaggagaatttctgggagggccagggcttcaagttcatcgcgtctatgtcgatgctggcactagtgatcctcgcaaagcgatgaagcagcatcgcatacccaatcttgtgtaaatcaatcgttaggtgagcaactagctcatagcttaagcagatgtcgatgtagcgtttacattagtttgtattcttgggcagctgtgcatactgcatgttcagaagttgcggtctgtaatccgtagtctctgctagggcatgtgaactcagaagctgtcttgtactcacagctagttcatgtcagctcatgagcagtcatgaatctacatcttgtaatttcagagtagcttcagcagttgtcacatgtaactctataattgctgaatctacatcttataatttgcactcttatggttgcg

SEQ ID NO: 36197 - DNA, 688 bp, Zea mays
  unsure (1)..(688): unsure at all n locations
  Clone ID: MRT4577_133013C.1
ccgggtcacctccaccaccggtgcacacgnacccacgcacacacaggggacagttgtcgtggtggggcgcgannncgaactcgccgggtgatgtcctgtcnngtctactcggactcggtgtgggtattcgggccctctgcaggaaagtgttgcnggcaaacatggcagcccacnncaccatcacggganaatttggggcagtgggcagtgtggcaccgtgcagnaagctgacgtggggggagggaggcnngccagctnngaccacctggctgcnnccgcacggtcggccgcttgcttgtcaggggtcaaggggtgctccgccttccgcgcgtgctgaaccgggaaccctcctcactggcgcactggcatttcaccatcaccaccacggcgcatcgccattcaccagggagcaggnggacccaccaccgccgcgcatcnnaccaccaccggcgcgggctttgggcggcgggtgccgcgaggggttccaacgccgggtgctgcgtgggcgtcanncaccaccatcgctaccactgaatcctgctgncccctcccgccggtcgcagaaggtcttctggggatccggacnnccctacctggatgggtgcagcagcttcaggggaggttcgaggacccctggaacgacggggctggtggcgctcannggtgcaggctgcagggagtacggcgg

SEQ ID NO: 36198 - DNA, 128 bp, Zea mays
  Clone ID: MRT4577_133014C.1
gaaggtccaagaagcaccattgctttggggaggggttaacacaaaataaagcctgaaaggggttactgcacacatccatccgcaaaccataatggctaaaacaaggtcatggacaaaaccctgcaaaa

SEQ ID NO: 36199 - DNA, 617 bp, Zea mays
  unsure (1)..(617): unsure at all n locations
  Clone ID: MRT4577_133015C.1
cagttcgcagnacacacanccgtnctgcttcaagnaaaccactttaggannncccaaccgcacagnncgtngaggaggagagggcagggagacacaagggacagnnntagcggtggggnnccggggagnncaaagatggannggggaaggnnaggagganncgtgcgcnnctgggnncgccnnnacaagttctttcggagcngnngcagcccatttcggcacngnngcggcgcaaggggcgcnncggggccccggggaccgacgaccaaggtgggggggggggagnncccccnnccgnngcgccgcttgnnttcgagcccnnnngagcttcaagtgcgctggtcctttctnnaccgcgcgggcatttcgccgnnagttcgtcgccacctttcctctttcctctacantcaccgtccttcaccgtcattgggcgtctccaagtccacctccaagtgcgggagcgtcggcatccagggcattgtttggtccttnggagggatgatcttcgcgctcgtttactgcaccgncggnatcttcggaggacacattaacccagctgtgaccttggggctgatcttgggcaggaagcttggcctgacttggagcatgttagtcat

SEQ ID NO: 36200 - DNA, 251 bp, Zea mays
  Clone ID: MRT4577_133016C.1
gcaggacaaagcggcgattaaaaaccatcaacacggctacacacggactcgagactatcgaattagacatccgtccgtttaggagacgactacagcgcgtagactaaagagcccgacagactgtgtgctatgttcctttcatttacgagaccgagtgatcatggttgatcagagaaccacgggcgccatggaagccacacggttaactgacggcccatgggggtacacccccgggtgggcgtaagcgaaca

SEQ ID NO: 36201 - DNA, 558 bp, Zea mays
  Clone ID: MRT4577_133017C.1
ccggctgtaattgatgttgggacagcagggttgattaagaaaggcgtcgtgaaggtaaaaattctgtttaacaaatcttggtaataataagcgtgctcgaatcgaacgtgtgcaataactttcttaccatatccaaaatgtggtgtctcctgctaggtgttcaagaggatttcgaagatcactggaaacaaagttcagttcgaatgcgggaaggactgcgaattcgatgccatcgtgtttgcaacaggttacaagagcagtgcgaatctttggctcaagggatttgaactgtgtctcatgtcaagtttcgtaatacatacatacgcagctggcatatgggacgccggcttttaatttctcacaaattcttttgtatgggacaggcagacgacaagtgcatggtgaatagtgacggacgtccaaacacatgttcgtgccaatatttggaaaggagaagatggcctctatttctctggttttaggaggatgggattggctggtatttgcatggatgcttataatattggcaatgaaaacgtatctgtttactgaagattt

SEQ ID NO: 36202 - DNA, 562 bp, Zea mays
  Clone ID: MRT4577_133018C.1
acccacgcgtacgacccggccctctccttttgacaccatcacatccagccagccaacaaaaatgtcgcgcgacacagctgcggagctctgttacatgctcaccgttgctggcctcagcgcggccgaggccccggcaaaggcaccgaaggaaggcagggctgccaaggcacctgaggctgccaagagaactgctgcccccgctgaagcacccggagccgggtacacccccgacggcgccggtgccccataatagacggctaggaagtctggaccagctaccgcgccagccaccggctttacaccccctttttccacggacgaggagatgagcccttccccgccagcatccaccgccagggagacccctgcggctgaaggaccggctgatgatgaacccggcggtgctgctgcccttggaagaggagctgccatcgccggcgtagccgctggagatgctaccatgatcttcttctactaaactcacccgcgatggtccgggccgcggagagacattagggggggcacggtaatgggctgggctgtaatcgctctcggtgggggg

SEQ ID NO: 36203 - DNA, 483 bp, Zea mays
  Clone ID: MRT4577_133019C.1
tccgagaaaacaattggatatggagttgctgcaggtagtttggtgaaccttgcaacaatgttgtacttcaattcaatccggggaccagcaaccattgcatactccctctgcgcattcttcgggctgcaagttctgatcgggcttgtcaaggttaagaagttggatcggcaggagagactgataactggcactgcgtgagctgagttcttgatcaatgagtgagaactgaaccgtcacttttcagcgctgtgcgttgtcttcacgtctcctttttttggcctaattttacccccagcgggatttagcataggcacggccccccggtgtatgatagctgtatgtagatgagataacagataaagatgtacatagtgtataatagaaattctacatgtattgttcgcttccgtggagtagcagatacgtacaggattttctttctaaaatgatgattcagggttaaatgattgatttggtggtttt

SEQ ID NO: 36204 - DNA, 385 bp, Zea mays
  Clone ID: MRT4577_13301C.1
ttcaatcccgagcagaggtgcgaggggtgggcttgctccggtgaccataacaactaggaagccgtggttgcactggtagcggcagtagtaaggggaagatgtccttggcgttcagcggcgatgagaccgcccttttcttcggcttccttggcgcctccgctgggctcgtcttctcatgcatgggggcggcgtacgggacagtcaagagtggcgttggcgtggcgtttatgggtgttatgcgcccagagctcgtcttgaagtccattgtgcctcgggtcatggatggtgtgctcggtatttacggtcttataattgtcggtatcatcagcactgggatcaaccccaaggtctagccctactacctttttggcggctttgtccaccc

SEQ ID NO: 36205 - DNA, 293 bp, Zea mays
  Clone ID: MRT4577_133020C.1
cggactgcgtgggcttgagcctgcacctgttgtcgttgttccacggcgtatcgtcggttgagtgccgggggcgatggcggcgggcgcaggtggttgcttatggcggtcctgcctgctatccaatttattcagggcacggacgatcagacggtcccggtcgtgctgctgacctagttccgcgacggcacctacggcgtggccgtctttcgttttcaacgtttctcggtgttttactcgtctgcttgatctgggctacattacgggcttttacatggtggacgactagggcgtgc

SEQ ID NO: 36206 - DNA, 399 bp, Zea mays
  unsure (1)..(399): unsure at all n locations
  Clone ID: MRT4577_133021C.1
cttctctactccncctcccccgttcctcacctcctctccttctcntccattcccnccgggggatcagttgaccccgcgaccacgctaatcgcctctcaacactcaaaagatatcctaaagaagcttgtcccaaagaaaatcatagaaatccctgactggtattttctccctcttttatcatggccttttgcactggcaatctaccggcctttatagcctgctacgtttaatgcacggatgcttcttgaagttttgatcaacaaaaatatcatagacggcatgggcatttcctttgagatggataaatgatgcaatgcatgctttagtttgggcaatctcccgttggcatcattgacacagctatctcttaagatttctgggtggaattgacacaacctt

SEQ ID NO: 36207 - DNA, 324 bp, Zea mays
  Clone ID: MRT4577_133022C.1
aagagatcaggcaccgacgactggtatccgtaaggaggaagaagatcgtccggccgtccgatctagtttgggcagaggagattagaaagtcagataatgttccattgcattaaaaccaagccgctgatcggcaatccaaggactttggataggtgttggtgtggacgactcttgggccactgattcgagatctaacgaatgagacttcatatcagtttgtaaagataaggatctattcgtcggcacatgatttagatcctacggctcagatcggccgatatctcttcgattgtgtatgttttactaaagagacctatgttttct

SEQ ID NO: 36208 - DNA, 149 bp, Zea mays
  Clone ID: MRT4577_133023C.1
ccggccgcatgcgggcgtagacccttatgctcctgtttcggtctctttagtgaggagtgaatggcggcgctggacacactcatggatcatagatgctttctgcgcgaaaaacggatcacgtaccaaggccacacaccttacattcgcag

SEQ ID NO: 36209 - DNA, 139 bp, Zea mays
  Clone ID: MRT4577_133025C.1
aaacgaggctgcaatttttattttaaaatcagacaaatattacaatacatagcacaatttgcagcttaaatattgaatatagacacacaacacatgttagaactcaattgatatataaatcatacacttaaacctaaaa

SEQ ID NO: 36210 - DNA, 150 bp, Zea mays
  Clone ID: MRT4577_133026C.1
ccagtgaccggacactcacactcccctgctgcgggtgccgtctgcgtttcgggcaccgcactacttccccaatccccttgatatcgcccacccgcgctcgccgccgccgctgtgcggtgatggaatcccctattggctgcccgcgtcctc

SEQ ID NO: 36211 - DNA, 450 bp, Zea mays
  Clone ID: MRT4577_133027C.1
gggggtggggccctatttaacggggaggccggagaggaaaaaaaaagaaaagggtagagaaaaacggagcccgcgccccgggagaaagtagagggggacgggcccaacaaaggggagggccccaaaaagataaaaaacgggggggggcccgggccccgccccggcgcccggggggggggccggggaggacgggccgcggggacccaaaagacctcgccgggggcctaaaagggggccagggcccaagcgaagggggggaccaaaggggggggtgggggggcgccaaaaacctggaggcccccaaactactggcagacgaaaaacgggggggggaacccccccggggatgagggaacaggggccggggtcccccccaaccatggggacaagcacccaaacccgggggaggaaaacaaagcggggggcaggggccccggggcccaagggggg

SEQ ID NO: 36212 - DNA, 414 bp, Zea mays
  Clone ID: MRT4577_133028C.1
ctactccattacttattttattttactcaactgttcaagaacatcaaggccgatgattttttcatctatggcgctcctatccatgcttccatccttatcgtttatttcaattacaacgtacattaccttcttcttctctacttcacccctctttccctttatcatctatactgcttgatgatttatgacatttcttatccctattaacaccaccatccccaccaataatgatcacgttttcttcacctactcttacaaccagccctatttcctgatccatttttaccaagtttgatatgacccttactctctacaacaacctgctttacaaattctatctctccatcatccccccttcaccccatttttttccacacatcaccgttttctttgacatctactccaacttcattc

SEQ ID NO: 36213 - DNA, 789 bp, Zea mays
  unsure (1)..(789): unsure at all n locations
  Clone ID: MRT4577_133029C.1
tttcggccggggcangggtgggccggcctcgtacatacaaaagccagagccagacagacagtgtcactccagagctggctagctagtaggctcctcccctccccctcacctgttcgtctgttccccattctacaatacagctcgcaagggatcgcgttcacccctcagccaccggctagcagctagaccttcaggacctcgctgcattcccccatgggtggcgccatgaggcagctgctcagctttctgggagcgagcaatggccgccccagggagaagaagacgaagaggacgacgctgcggcggcgcctgctggtgcccacggtggagctcagggtcaggatggactgcgagcgctgcgagcgcgaggtcaagaaagcgctctccggcatcagaggttggtcatcatccgtcactctggtcccccgtctgtcccctacatacccatccattcgcacccagctttcgtcgctcgctagcattgcgccccggccatgaccatggctcttctcttctgtgccctgacaatgagctagatacatgcacttactgagtcagtcagcaatgaccatcatgtcctttcggcacgagcttttcccagcataagcatacctttgtttttccctgcaataatgcagcggcatatgccggccctgcacctaacaagtaacaacatccgagcgacacactagcgaaagaatcttccacttggaatcgaagtgctttcgcgaggagaagagccccagtttacaccgacgattaataataacccttgatgattgatgactg

SEQ ID NO: 36214 - DNA, 116 bp, Zea mays
  unsure (1)..(116): unsure at all n locations
  Clone ID: MRT4577_13302C.1
atgcatgatttttaaatgtatatncncccaacgatactgaccaaacgtnccaaggattncccgctagtnctgtaattnagctataccttattacaagttgacacataacataagaa

SEQ ID NO: 36215 - DNA, 346 bp, Zea mays
  Clone ID: MRT4577_133030C.1
tcgagatctagaacgccgtaggagggaacacactaaaacatgtcaagaaaagtgcattggtaaaaacaaaacaaaaagaaaatataggaacaaccaggacggggttaatggtttgggagctgagagagttgatgggagggacaaccggagaagcaaacctagcagaaatttgcatctgcttttccaagatgatgtgctgctcggtggatgatcatcatcatgcatccaatgtaaaggtcctcgatccttatatgcattcaatttcctttgttgagtcctctgcaatctcaatactctggatccaactaaatgttcttgtcttgccctgaaccgcctcaaccttctt

SEQ ID NO: 36216 - DNA, 260 bp, Zea mays
  unsure (1)..(260): unsure at all n locations
  Clone ID: MRT4577_133031C.1
ggggtggggttgnttnntttnnngaaacaaggagggtggcacttgcaaaaatgctattttgggtggaggttgacattaaaacaacttattcgacaaggttgccaccacaaaatttttcccttgaaaaaaatttgaggccctaaatattgcacaaaaatggatttctggttcaaaaaaaaaggtttttcccattgttccggaaaaaaaaccggtttcattatttgagcagaaaaaaaaaaaaaaaatggcggccccccttt

SEQ ID NO: 36217 - DNA, 370 bp, Zea mays
  Clone ID: MRT4577_133032C.1
tttttgtggggttaactggtattcatagcgaaaatactaggagaatacagcagacggagcacatatcgacaaatggcaaggcgatggacgccctacttagatacagtctacaaccgcctaacaacccctacataaaggccgactggcataattatctaaccgaacgcaggtgcacagtgctgagaagaggcccggatgcaaactaggtggggcccaacgggtatgcacaggagcacaaactggtacgagctgaacataaaggccctgctagctccggcctggaggttcagaacatctgaagtctcacacagcaccttgcattgcgagtgtaggctatgcaccatgttctccagcatcatggacctgatct

SEQ ID NO: 36218 - DNA, 445 bp, Zea mays
  Clone ID: MRT4577_133033C.1
cccacccgtccgtgttcctgtatgccttgcttccgctcctgttactccgctactcaggcctaagtttttcattgaacagggaaagctacaacatacacatcgatctacaactctattcccaagtattattgattccactattcatcaaccgaaattattgctcgcttcaatcgtggctaccctaatcgggaacttatccgttattctgtgcttagatcatagctgtgtagatatatgtgtaactcattggttataatggagatgcttatggaactcattttactcccttttgacgaccttattcattactttgccctataaactggttgacaacatacctcccacgtttacttatacttacttctttttgacactactgtacatacaattcgacaatttatttattggcacattaaatcatccatttaactaccggcacgagaac

SEQ ID NO: 36219 - DNA, 339 bp, Zea mays
  Clone ID: MRT4577_133034C.1
atggtgtggtcgggcacctcctcaaatcctgacaccggtaatgcttccatgtcgtactcctcgtccttaccagtgtatgtaccgaacttgggttggattagggtatcggggcccctgctggtcgtgcttggatggagcgccgccgtggggagtaatctccgccaagctgatatgcgggaggatgaagatggccttctggcccttcattctgtgatgggcggtccagattgggacacaccatcccttcacgctatcaaatctagaccatcgatctcgggttatacgatcacgattagaaggaaggcggggtcggttttgaaccgtaggatagagatctag

SEQ ID NO: 36220 - DNA, 655 bp, Zea mays
  Clone ID: MRT4577_133035C.1
acgaggtgcacgtggtacgtccggccgatggtgccgatctccgccatgaacgcctcctggaccttcctgttcatggacgacaccttgaggactttcgcggccaccagcaggccgttcggcagctcgcccttgtagaccacgccgtagccgccggaccctagctccgacgagtagttccgggtgcaggccgccagctgctcggagctgaaacgcatcggcttctcgttgaggatctggttgagaaacgtctccactggcccgacctcgatcgccacatcttccacggcgttgctcgcctgcatctcgctgttctttttctcaatctcctccaggactttcttcacgattttcttcttcatcttcttcctcacgacgcggcaccttctgatgagggcgacgattactaccactgtcgcagttgaggctactgtagatatgattgtaactgctgcattccccatgtcggcgacgcatcagggctgtaagcttgtttagagtctacgtctctcgctccagctgcgagctccaagaacgatcgaacaatccaggctacagcagatgcttgagcctctccgtgcttcaacaagccgacgaagcccggccgacaacaagagcttcaaaacggaggaggttaactagagcctcgtgccgaaat

SEQ ID NO: 36221 - DNA, 325 bp, Zea mays
  Clone ID: MRT4577_133036C.1
aacacgcgtacggctgcgagaagacgacagaaggggagatgtagaggtataaaacggagaaagggcacggcgaggaaaactacactattgccgacaccatgctgaaatctacccaagagaatggcggtgtgtgtgagaggtcataacattttttgggatgatccaaaagatctgtctgattgggttaggaccctatcacctgcggatttaacgggcgcagcaacaaaaagaatgaattgggaactctcaagattcaccggagtactgattggatgggatgtgatgaatgagaacctgcgttttcactgtgacgaggacagatccg

SEQ ID NO: 36222 - DNA, 1009 bp, Zea mays
  Clone ID: MRT4577_133037C.1
gagctttctagtcggcggccgccgccggtcagcgacatgtgcgtgttctcgcgctcgcccagtcgcgccagcccgaagtcggccaccttcggggtgtcatcggccgtgagcaggatgttggccggcttgatgtcgtagtgcacgatccgctgctggcactcctcgtgcaggtacctgatccccttcgccgtgccgacggcgatgccgtgcagcgttccccactccagccttgtgctcgtcgtgctgccctcgtcaccgtagtaaaggtacttctccagcgagccgttctccaggaactcgtacactagcgctttggtgctcgcgtcgaagcagaagccgtagaggcggacgaggtgcacgtggtacgtccggccgatggtgccgatctccgccatgaacgcctcctgcaccttcctgttcatggaccaccttgagcaccttcacggccaccagcaggccgttcggcagctcacccttgtagaccacgccgtagccgccggaccccagctccgacgagtagttccgggtgcaggccgccagctgctcggagctgaaacgcatcggcttctcgttcaggatctcgttgaggaacgtctccactggcccgacctcgatcgccacatcttccacggcgttgctggcttgcctctcgcggttctttttctcgatctcctccaagactttctttacgattttcttcttcatcttcttcctcacgacgcggcaccttctgatgagggcgatgattactactaccgtcgcagttgccgcgactgaagataggattgcagctgctgcgttcaccaggtccgcgacgcttccgggctgtaagcttgattagactcgctgtgtggaacgtgtggataaccttagctttccgtgttctttggcctttgctcgcaatcgcaactgctgcccgcagggctaaatgcctaaatcgttgagctgatgagagaccagtctagccgattcagtggtgaatggtgacccggccagcccggagggtacc

SEQ ID NO: 36223 - DNA, 914 bp, Zea mays
  Clone ID: MRT4577_133038C.1
cctcgaggccgtgccgggatacccattaccactgaatcggctagactggtctctcaccagctcaacgatttaggcatttagccctgcgagcagcagttgcgagcaaaggccaaagaacacggagaggcaaggcttcccagtccacacagggtattcgggctactcgccttgttaattcagtcaggagatgatagtacctcatgcagtcaagctcgtgcgcgtttcttctgtagatcgatggaatgatcagtaacttttatcgattcagagattttgttcgggtcgattcctcctccatgctgtttgcattagagtctaatcaagcttacagcccggaagcgtcacagacatggggaacgcagcagttgcaatcatatcttcagtctcggcaactgcgacggtagtagtaatgatcgccctcatcagaaggtgccgcgtcgtgaggaagaagataaagaagaaaatcgtaaagaaagtcttggaggagatcgagcggaagaaccgcgtgggggcagcctgcgacgccttggaagacgtggtgatcgagatcggtcccgtggagaagttcctcaacgagatcctgaacgagaagccgatgcgtttcagctccgagcagctggcggcctgcaccaagaactactcgtcggagctggggtccggcggctacggcgtggtctacaagggcgagctgcccaacggcctgctggtggccgtgaaggtgctcaaggtgtccatgaacaagaaggtgcaggaggcgttcatggcggagatcggcaccatcgggcggacgtaccacgtgcacctcgtccgcctctacggcttctgcttcgacgcggacaccaaggcgctggtgtacgagttcctggagaaggggtcgctcgagaagtacctctactgtgacgagggcagcacgg

SEQ ID NO: 36224 - DNA, 214 bp, Zea mays
  Clone ID: MRT4577_133039C.1
ggccgcttttttttttttttttttctttgttttttttttttttttttttttttttttttttttttttttttttttttttttggggcgcagaaaccaatccgatacttaaacaaaggcattggatgcaaaaaaaattgcccgcctgacaaacggagggcagactttatgaccataaatgtttttggggaccgaaggccccacctattaggatagg

SEQ ID NO: 36225 - DNA, 520 bp, Zea mays
  Clone ID: MRT4577_13303C.1
aacatcaaatgccaaatttttattttaattacacacttttttgtttaaaccaccccccccattgttttggcctctgcccccatccattagctagcttccatgcatggggggtaagtacttatataaatactaattaatcatttcctgcatggaatatatatgctcacaaacagccgcaagacctttgaatatataaaagctagagtacctggggcgggcgcatgcatgggccatgcacaaaaacgatcgaaaatttatgccagcgaaccggggcctggcccgctgaaaaaaaattaccacctccctgttggggagcattggcggggcgggaaaaacaacaacccaattcctgaggggaaccccccccatctgggtgactgggggcaccccggagctcctttaaaggagggctgggctgagcttggggaaccccacgaagaccctctccgaaagggctgaggaaagcttgccgaaattcttgacctcgggagtcgccgccaccggggaaatgttgatggac

SEQ ID NO: 36226 - DNA, 824 bp, Zea mays
  Clone ID: MRT4577_133040C.1
gagttctggcggctctcccgcttggtcactcctgcttccttgccgttcgagagctatctgacacctgaacggagttccagttcctctatcggcctgagggcattgggtttcttgatgggagacagcaggaggcacgaaccgtgggttatcctccaaccggatggctggctgcgcaggcctgcgttgggattgaacagcctgatgcagattcccgataagattcagagctctcttaaggtgcaatttgggcgtttcttgaacaaggatggtgctgcccgccgcatgagtgctgagatatcgtcagagaaagcgaaacagtcgtgttctgctgctgcttccgcggaggttcgcttggataggcatctccaagcttggtgggacaatcctagctggaccgacgagccaccagaaataaaggtgaatgtaccagaaggatccctttgcaacctcaatctgagatttaaggccggattaccaccagatgcagtatacaatatcataattgatccagagaacaaaagggtgttcaagaatattaaggaagtaatatcaaggaaagtcttgctcgacgaaggatcaagacaagtagtcgaagtggagcaggcagcaatctggaagttcctctggtaaagtttaggcaagggcgagctggttttatgaggaagtttgagggttgctggacgatagaacccctttttgttgacaggaattatgccttcctctgaaccacattcattggaggatatgaatcttgtactggtggcaggggggagagttggatctgccatttactttggacagcttattgagcctgctctttaccc

SEQ ID NO: 36227 - DNA, 364 bp, Zea mays
  Clone ID: MRT4577_133041C.1
aaaatttgtttttaaagggactgaactggaaggcagcgcaagcatttttcgtaaggaaccaaaccaaatgggcatgtttggagcactgccagaaatctatctgatggattacatacttcaaacgctcagtggcgggcaatgtatccaatatcacagccggccttttcgtattctgcatgataatgatcagcttgatatttgtaaacagtccagaaatgtgtattcaatagcgaaatgtaagaagattattttcacttccttagatgtaggacctcccaaatgtaaagagtgtcctactgtagatcacatgcagcatatatccacatgtgcactatgcgaaaccatcatgtgtatttattatggg

SEQ ID NO: 36228 - DNA, 458 bp, Zea mays
  Clone ID: MRT4577_133042C.1
ggataccagcatattaaaacgttttaccactgataaaaaaaaacaaaccggtatcggtactatttacgttacatttgggaaaccaaacgggaccaaagggttttaaccccagggggttggcctaaccccgggaggattttgttcctttgttaaggaagggactccaaataattttgacatttaataaaattttatataaattaaataatcaatctgtctaggaaggataaaatagccattgttccgggccataaatccggaaaaaccaaacagggttttaaagaaaaaaaaaaccacccggttttaatggggcccctatttttttaaaaaaaaggtttgacctttaaatttccttggacaaaaaagggacccagtttcaaaaaaaaagggccaaaactcgctttgcaaaaaataaaacaagcctaagtttggaataaaaatttccaaaggcccacctt

SEQ ID NO: 36229 - DNA, 1667 bp, Zea mays
  Clone ID: MRT4577_133043C.1
cctttctgagttctggcggctctcccgcttggtcactcctgcttccttgccgttcgagagctatctgacacctgaacggagttccggttcctctatcggcctgaggtcagatttttctccttttctcctccatcatcgtatttatctaattaattatcttctgtttctccgtcttttcaagccgctgggcttgcgatgcttcgtattccattcatgtctgggtgacttttctagggcattgggtttcttgatgggagacagcaggaggcacgaaccgtgggttatcctccaaccggatggctggctgcgcaggcctgcgttgggattgaacagcctgatgcagattcccgataagattcagagctctcttaaggtcggcttatcaaaaggaaaagatctaggggttcggaactggtcgtgcagatgtgaatttgttgttgcctacatcttgcaataggtgcaatttgggcgtttcttgaacaaggatggtgctgtccgccgcatgagtgctgagatatcgtcagagaaagcgaaacagtcgtgttctgctgctgcttccgcggaggttcgcttggataggcatctccaagcttggtgggacaatcctagctggaccgacgagccaccagaaataaaggtgaatgtaccagaaggatccctttgcaacctcaatctgagatttaaggccggattaccaccagatgcagtatacaatatcataattgatccagagaacaaaagggtgttcaagaatattaaggaagtaatatcaaggaaagtcttgctcgacgaaggatcaagacaagtagtcgaagtggagcaggcagcaatctggaagttcctctggtggtctggcaccttttccgttcatgtttttgttgatcagaacagaaaaaaacacactgtaaagtttaggcaagggcgagctggctttatgaggaagtttgagggttgctggacgatagaacccctttttgttgacaaggaattatgccttcctctgaacccacattcattggaggaatatgaatcttgtactggtggcagggggagagttggatctgccattactttggaccagcttattgagcctgctcttttacccccaccacccatttcgtggtacttgagagggattacttcaaggacaactgagatgctggtgaacgatctgatagcggaaactgctcgattgcgcaccatctcaaacaacgcgaatgccaagcaaggtactgaagaaaccggtgatgctaacataggtgatccagttagagagtgtggtgacattaaggaaaggtggcgacagagaagaaaaagtggacgtcatggatcatcccttagattaacaagtcgattcttgtaagataagctatgaagcagtgctcattttaggacccgttttacctgtatcttagtttgtaaggttttggttgtaggtaacattgtgtaagatgtctctttgtgaacatgtagaagctagttgttcaatacttatatatgttttatttatatgaataaaggtttacttgctccaaaataaatattataaattataatatctattattttaatattttaattatgtggtggtctgttttagaggatttcaatgcttaacttaacttcttgcaattccgattttttattgcttttttttattgtgtgtt

SEQ ID NO: 36230 - DNA, 215 bp, Zea mays
  Clone ID: MRT4577_133044C.1
actgcactccactgctccgtcgtaaatacagaggcggcggcaacaataaggccgcgcgagaaaacaagaggaagcctaaaggagaacgagctcggaagggagcgaatggcaatggctctgctccagctattgctgtcgctcctcatcgtctcctgcgccgcgcatgctgcggacgcggcgaagggtcctccacctcgtcgcctcggcgccggctg

SEQ ID NO: 36231 - DNA, 122 bp, Zea mays
  unsure (1)..(122): unsure at all n locations
  Clone ID: MRT4577_133045C.1
ggcctaaaactaaatttcaaacggnnaatccccatgttacaaacgcaagnaaacacngaaagnncaagaacncgnngaaggaacccagccacgccaatatacccagagcgagccagcacaca

SEQ ID NO: 36232 - DNA, 309 bp, Zea mays
  Clone ID: MRT4577_133046C.1
gtcgtatagagccgcctcggcgactccgtcagcatcccgctgccgccgcgggccgcgtccgagatggcgagggaccaggaccgctgatacagcgaccactggggccgccgcgcctacgactcggtctcgctcagcagcgactccatgcccgtcctcacgggacgcacgcccgtcgagtgctacagctccttcattcgcgcgttccgccaccacttcgccacgcacctcgccagcacgatctcggcgatctaggtcggcatgggccccgcctgcgacctgcgctacccgtcgttctcggcgagcaacggc

SEQ ID NO: 36233 - DNA, 366 bp, Zea mays
  Clone ID: MRT4577_133047C.1
ctctataccatcctcgagcaggctcgcattctgatggatatctgcacaattcgtgtttggagcggccgcccgggcacgtactctaagtccaacacatatacttgaagagcacatgtcaaaaaaaatgacatagtgggagctggctagaagggttcattggctcagagcactgcctgctcagagtgtggcctgtatcacactggggcctagggagtatccattattagatgaggtcttgctgagtctgtgctgactgtgggtgtggtctttaagaacctgtgcttctggtcctgtgggctgattcactctaagccaagttccaacacattggcaggcgttactaatggatcccgagcttggaaccat

SEQ ID NO: 36234 - DNA, 126 bp, Zea mays
  unsure (1)..(126): unsure at all n locations
  Clone ID: MRT4577_133048C.1
taaaacgaaccaatacatggagattgtctattatacactatgtacatctttaagtcttatgttaacatttacatagccctatcatacaaccnncgggggaggggtaaccggcatgcctattctaaa

SEQ ID NO: 36235 - DNA, 476 bp, Zea mays
  Clone ID: MRT4577_133049C.1
cgcttcatttcttttcttttattttttttccacagcagctagttgtttactgcacgggatcccatcagttactgaagcaaacaaatgttcagtttttttttgggcgcggtgttagctaggtcgttgttggcttggcaatacacgttaactacctcaaactttttatccatgctggtgcacatcattcgtgcttacaacctgtacaagtataatactgcactatactggtatccaaattaaaacagtgttgccgcacaaatggaaaaagaagaaaaaaaagacacatccaggctgtggcctgtggctgttcatcccacatgcaaaccccagtcggatgcaccgaacctgccctctacaacggtgcacgcgtacacccacgctccgcccagaattaggtgtcactggccaccgctcggcgggccacccctgtcccaccgaccataccagcatagttgggcaagagagaaagcaggtcg

SEQ ID NO: 36236 - DNA, 568 bp, Zea mays
  Clone ID: MRT4577_13304C.1
gctcggtacccctggtgtggtggtggtagctggcgttccaaaaactgttgcctgctgctcttcaccgtacgtgtgtattgtttctggtcagtattcgtggcgtgcgccgggcagatacatgtaaagatgacgacgagtgtttctctgtctgtcacggctagcttctaccatgaacatggcatggcatggcatggcatgcccacacgtcaaggacatctccccagtttgagtttgactagctagctagctagtcttcctagattcttcacgctagctctcttcctcaagaacatgtgccgcgcgcacgcacgtttcttccgaataaccgtgagaaaacatgcacatgtaagctggtggcgtgtcacatgcatatatattagtatcatatcattagtagcgcagtgcgcagcaccaccgctttcttgttgctaacaatcatatcatcatcatgtcattatgatgccaactctcgtatatataagcactaattgtgatatatagaaggaagcaaagcgagtgccttttcttttccgctgtttggcggccacgatgctagctaagcattttt

SEQ ID NO: 36237 - DNA, 784 bp, Zea mays
  unsure (1)..(784): unsure at all n locations
  Clone ID: MRT4577_133050C.1
tcttgctcgctcgctcgatcgattgcttacaaggtttcatggccactaacaatccggtcagtctcaaagcagaggagcagaaatgctatggcggcggcggcggccgggtcattcaggcaatcacgatgctcgtggcgacggcggtcacggcgcaggcggcgtaccgggctcgccgggagccatgggacctcgccttcgtgctcttcgcctacgccgacctgggcctcctcttcctgtgcctctcgatgtacgagcgcctgccgcctccgctggaagaaatacagaagggggacagcggcgacgacggtgcggccgtgaggcggcggctcaagatggccgtgtgggcgctgtcgacggcgctgagcgtcgccttcgcgtggcgcgtggcggcggtcatgccggcgccggcgatgagggccgccgtctggggcatgacgtcgacggtggcggtcgccggtttctacctactgttcgtctacaggcctgtgaccatttcctcctactccgaaatggatacctgcaaacacaagcagtcgtcgcccaagctcgaccagatggtataacgaacaatgtggagaagaggagcttaatgtttaatcttgtaatcaatataaatttgatagcaataataagtgaattccccattcacatatactacgtcttctctcggaatggtggaatctctcttttttacggtttttataaattaggcccatgatattttnctaatattatgaattgtccagtatttgttataaacaattgactaccatatccattatct

SEQ ID NO: 36238 - DNA, 350 bp, Zea mays
  unsure (1)..(350): unsure at all n locations
  Clone ID: MRT4577_133051C.1
tatgccgactcgcacgtccctaagtcgtaactcagccacagacccgccgtcctctctcacgtggggcgacacgctttgtcttcggctccgactacggataagagcagaataaaatgcacagggcagtggagaccggcaggtcacacggcattgatcttaaatatgctgttctagaggacatcaatgctcccaagccagcaatgctttctggtgccttttatcggttcatgtcagttacatctgatagactaaaggatcggggattggaaactgccactgtcacagatgtacacgaatctaaagggaagagcgcatgagagatcttgcntcaggggcaccacagatgatat

SEQ ID NO: 36239 - DNA, 543 bp, Zea mays
  unsure (1)..(543): unsure at all n locations
  Clone ID: MRT4577_133052C.1
cccggggttccgctgtttctcttctcccttttcttctcccgtttatcgggcgtgcgcgacaactaggaggccgccgccgccctacggtcagcttctctgcgccggcgacaagcacccaccacaccagaagaagggatcaaggaacagcgaccagagaaaggctgcgtctgccgctgctcctacggctgctgatgctacgggggggaggcccaggatcaatcatggatccgccactgggcggcaggagggaggccatagagcgggagctgaagaagcttcggacagagcgggaggagctcgacggccggatacggctgctggaatcgcagctcgaggcagggcctgcgggattcaacggtgcggcagcggggaaaggagtaggggatgatgcgtgcggcaggagtggagcgtgccagaaccgcgtgggtaacgggtttgctccggacggtagcctcccggcggatatgatctaccggtacagccgccaccttcttctnccggacttcgggggcgaaggccagcggaagctgtcacagtcgtcga

SEQ ID NO: 36240 - DNA, 225 bp, Zea mays
  Clone ID: MRT4577_133053C.1
gggagagtgaggcaatcaggggcacgggccagcggaagggcgccagcgacaggcgtgccggacgaaagaagcaacccgacgcccacagccacccaagggccatgtacgaccactgcgcccagaagccccatacggcggccggggaacaccgcgcagcgccgagcaagccggagcgcgagacccaaaggctacggggaggaggcaccccgacccatcacagacaag

SEQ ID NO: 36241 - DNA, 793 bp, Zea mays
  Clone ID: MRT4577_133054C.1
ccctcgggctgccggggcttagtcatcggcttcgcaagttcgcatcgaatccgtcgtcttttgcactgtcaccttcatcgttgctccagttgttcgtcccattccctccatggacgcgatgtgactagaggacggcgcgaccgtacaactttgtttcgattcgtcggcgccacagctttctccatgcttgtaatgtagtgcacctgctgaagaaggggaaaaacgagagagagagagaaaagggaaaaaacgagagagaaatcgctccagtagcgcgcccggagaaggtaccttgctcgtctcgggcgctcggctgttccgctgtttctcttctcccgtctcttctcccgtttatctggcgtgcgcgacaactaggaggccgccgccgccctacgctcagcttctctgcgccggcgacaagcacccaccacaccaggtatcacacaccaagatcatcgtcttcacttgaccaaaactgaggcacatgagttcgggcgcgggctggcgggcggaattcacggcggcgatggctggcacgcgtgcggtatgtcggacgcggggaaggaagacgcgcgcgggggcacggtgatgcctgtggacgccctcgttgtgcccttaagaagaagggatcaaggaacagcgaccagagaaaggctgcgtctgctgctgctcctacggctgctgatgctacgaacaagaggcccagggagggaggccatagagcgggagctgaagaagcttcgggcagagcgggaggagctcgacggccggataccgctgctggaatcgcagc

SEQ ID NO: 36242 - DNA, 656 bp, Zea mays
  Clone ID: MRT4577_133055C.1
aattcggcacgaggatcgccctctccccgttgtccctctcccgtcatttcatcttctcttctagtcgtttcatctttcccggcagctttggcttcagtcatcggcttcgcaagttcgcatcgaatccgtcgtcttttgcactgtcaccttcatcgttgctccagttgttcgtcccattccctccatggacgcgatgtgactagaggacggcgcgaccgtacaactttgtttcgattcgtcggcgccacagctttctccatgcttgtaatgtagtgcacctgctgaagaaggggaaaaacgagagagagagagaaaagggaaaaaacgagagagaaatcgctccagtagcgcgcccggagaaggtaccttgctcgtctcgggcgctcggctgttccgctgtttctcttctcccgtctcttctcccgtttatctggcgtgcgcgacaactaggaggccgccgccgccctacgctcagcttctctgcgccggcgacaagcacccaccacaccaggtaacatatgaaaactcaaaggcaggtatcacacaccaagatcatcgtcttcacttgaccaaaactgaggcacatgagttcggcgcgggctggcgggcggaattcacggcggcgatggctggcacgcgtgcggtatgtcggacgc

SEQ ID NO: 36243 - DNA, 1765 bp, Zea mays
  unsure (1)..(1765): unsure at all n locations
  Clone ID: MRT4577_133056C.1
attgggtacctcgaggccggccgggattttcgccagctgagaattcgggcagaagtgagcaaagcgttcaggtgcggagccgcggagggatgggcggcaggagggaggccatagagcgggagctgaagaagcttcgggcagagcgggaggagctcgacggccggatacggctgctggaatcgcagctcgaggcagggcctgcgggattcaacggtgcggcggcggggaaaggagtaggggacgatgcgtgcggcgggagtggagcgtgccagagccgcgtgggtaacgagtttgctccggacggtagcctcccggcggatatgatctaccggtacagccgccacctccttctcccggacttcggggtcgaaggccagcggaagctgtcacagtcgtcgattttagttgttggggctggaggtttgggctctcccctggcattgtatctagcagcttgtggtgtcggtcgcttgggcattgtggatggtgatgatgttgaattgaataatcttcatcgacagataattcataaagaagcatatgttggacaatctaaagtgaagtcagcagctgatgcttgccgtgagattaattcctctatcaaagtagtagagtatcaccatactctgaagccatgcaatgctttggagattgcacggaaatatgatatagttgttgatgcaactgacaaccttcctactaggtatatgatcagcgattgctgtgttttgctgaacaagccacttgtatctggtgcggcattaggcttagaagggcagttgactgtttatcatcataatggaagcccatgctatcggtgcctctttccaactccaccacctgtggcagcctgccagagatgctcagacagtggtgtccttggggttgttccgggagtgattggttgcttacaagctctggaggctataaaggttgcaactggtgttggtgagcccctatgtggaagaatgctactatttgatgcactctctgctcgtattagagttgttaaacttcgtggaagctctccagattgcacccattgtggcgaaaactccgttttcacagaagaagactttcagaagtttgactatgagagcttcacacagtcaccaatgtctgataaggcagcagcaagcgtgaacgtactcccagagagcgcgcgtatcacttgcagagagtacaagaaactggccgacgatggtgaacctcatctactgctggacgtacgacctgcgcatcacttccagatagcttcgatctctccgtcccacaacatcccgctctccatgctggaagagaagctgcccgcgctcgaagcctcgctgaaggaagcaggggaggggtcagccttggttgtcctgtgtaggagaggcaatgactctcagagagccgtccagcttctccgcgagaagggattcgccaacgcgaaggatatcatcggtgggctgcaggcgtggggacaagacgtcgatcctgatttccctgtgtactagcgagatggaaatggatgcactacaccttgtaacagtttgaatgccgccagagattctggtggtgttgcaagaacgagaactctggtactatgatttgggtactaattttgccataccgtgtacttgcaaaaatatatatatatacanctgctatggacacggtattgtcatggataatgccatggacaagattaaatttgagatacagaattactttaaaaaaaaaaaaaaagggcggccaaaaactagtagcatgnnnnncgggaatt

SEQ ID NO: 36244 - DNA, 1519 bp, Zea mays
  Clone ID: MRT4577_133057C.1
acttcgaggccggccgggaggaggagaccctcctccccctctccggcgcgcgacgctcgccgccgcgcctcccctcccctcctccgaacgccgtggctgccgtgcgcccgaccggccggtgacggacacggcagctgctacgagaggaggaggatatatactagtatatagctagagcaattattagctggtcgtaagcatgaatcgattggacatgatagacaacatcgacggccgtcgggtaaccaagaacaaggcgcgcatccaagttggcgactcctcttcgtcggacgaaagcgacagggagaaggaggaagatgaagaagaagcacatgaggaagtggccaaggcgcccccgttgggttggaatcatcacaatcaccacgaagcggccggcggcattggcaacaacagcaacaggaggcggcttctgtcgaagcagctgtccatgaaggagaccaccagggagatcaaatgggagaagcgccggcggcagatactgcggcgcagcagcctggtggtgtcgttaaacgacgacggaggaggaggatgctgcggcagcatgaagagcgccgccgaggaaccggaacggcactgtcatcatcacgttacgaggtcttcgtcggagcgcgtaatgaggtgcctgaccgacgaggacctggacgagctgcggggctccttcgagctcgggttcgggttcgacgaggagtccggcggcgcccacctccgcgacacgctccccgccctcgacttctacttcgccgtgaaccgtcagctgtccgaccccgccaagctgcggacgctgtcgtcggcggcgagcctcacgtccacgccgtcggccgtgtcctcgtcgtccacgctccccgacgtcccgaacgacccacgcagccccaaggtcggcgcaaccgccgcgtctggcggcggcgccgacgcatggaagatttttacgccaggtgacaaccctcagcttgtgaagacgaggctgaggcactgggcgcaggtggtggcttgctccatcaagcacggctgataagacgacgcgcggacggacgatgtcctgtgtagtcgagagcaatatgttatataggtgggtggccaaattaaaatgtgaaactcttgatgaatgaattaataaccagcaaccaccaagaatgatcgatgtctaaacacgcgtggtcgccgttgtcgtctgtcattcctcgtgtacagaagaagcttagtgcctaacacatgaattaacggtacactgaatctatcacatgtctcgcctatatatgttcctgttggccgtccatcgacttggacattttggaacccacaaaccacacagagcaatactgaaaaaaatgtgggtttacagagaaaaaaaaaaaaaaaaaaaaaaaaaaaaaaaaaaaaaaaaaaaaaaaaaaaaaaaaaaaaaaaaaaaaaaaaaaaaaaaaaaaaaaaaaaaaaaaaagggggggccccccaaaaggttcaaagcttacttacccttgaaggcaagttcaaagccctt

SEQ ID NO: 36245 - DNA, 264 bp, Zea mays
  Clone ID: MRT4577_133058C.1
attcaactcctttcaatcgatttcattctcttctcaaatccatctcaacttttgatcgaggtcataattcagaattcctcaatgttaaaactatcgcttcaaaatatttaccaatattttttagtatgtttcacgcagaagtatcaacaccccgcacgaaccatatcttttgctcgtcaagcgtcttttcatccaaccctcaaaatcttctcccttcttcagatcctatttttgtccccttagaagagttaatcgactacactt

SEQ ID NO: 36246 - DNA, 602 bp, Zea mays
  Clone ID: MRT4577_133059C.1
ggggagtcggcggcacaaaaggcggcggcggcggcggcggctggtgctgcagggtcggcagctcccgcggcagcggccggcgccccgggatctgggggcgcaccctcagggtcgcagggggtgctgatcggggacaggctgtactccggggtgctcatcaccttggagaactgcctcctgcctgacgacaagctccgtttcacgccgtccatgtcgagcggcctcgacaccgacacagagaccgacctccgcgtggtgggctgcgagctcatccaggcggccggtatcctgctccgcctgccgcaggtggccatggctaccgggcaggtgttgttccagcggttcttttataccaagtccttcgtgaagcactccatggagcatgtgtcaatggcctgtgtccacctggcttccaagatagaagaggccccaagacgcatacgggacgtcatcaatgtgtttcaccgccttcgacagctgagagacaaaaagaagcccgtgcctctactactggatcaagattatgttaatttaaagaaccaaattataaaggcggaaagacgagttctcaaagagttgggtttctgcgtccatgtgaagca

SEQ ID NO: 36247 - DNA, 214 bp, Zea mays
  Clone ID: MRT4577_13305C.1
acacaaccctgggggtttttataagccaagggggagcacacacaccccagggggcacgccaaaaaaggcgtgcttcaggacacaacgaaagaggttacacaggaaccaaagggctaaaattacggatgctaacaagacccaaagggaccgttccacctggaaaaggggaagaacacccacaaattcgcaaagtggaaaccggcaccacaaatac

SEQ ID NO: 36248 - DNA, 302 bp, Zea mays
  Clone ID: MRT4577_133060C.1
tttacatggtcgggtcacggtggaaggggggggccatcgggctgatcattcagagggaaaaccaaaaaatcataaaggactagatcaaacgcctgacaaccaccacggactgagctaccctcatggtctgggcggagaaattgaccgactccttcaacataaatgggtacacgcttcagagcacgaactatagggagtcagagatgactatgatatgatcgaaatggtgctctcggtaccgatctatttccttgtgtggtaccaaggagacatgtgactgcattaccgccacacttactatg

SEQ ID NO: 36249 - DNA, 425 bp, Zea mays
  Clone ID: MRT4577_133061C.1
ctaattctctctcagatcgtccagtgctatttagttatttacaccgtacctgtctgtgcttcgagttctcagtttttagtggcttattggtgaaaatttgttatccgtttgaaatttctcatgcgaacgaggagaaggagatttgacagtgccttggccgtcgacacaatccgccaacacatttgatcattaccagcttctgcaatatgctctagagagcctggtttgtacaaataaagggagaacaggcagatttttgtacagcctgatggcatagcgttagccattgtatcatatacaaggactggcccgagcgaatacgctcctggagtccttttgcacaacgagagcaccacaggatgcattcgtttgtgattgtctgcaatagaaattgcgatgcttccaaattttccagaccgccagcg

SEQ ID NO: 36250 - DNA, 822 bp, Zea mays
  unsure (1)..(822): unsure at all n locations
  Clone ID: MRT4577_133062C.1
tacaccgntgtcgacggttttcatgcgccccttcggaggctgcggcgccccacccctggcaccgccaacgtccgccgcaaccccgtccctttcccgggccccgccgacaatgcttcaccaccgtcgaccaactacgcccttggacacaaggccacatcttcaccgcctgtgtcatctccgccacatcgtgctcgacaaccccttcgcctaacgtcgagcagcagcctggcccgcttgtcgccgcccactgccgtgcgtggctcgacggttccgctggaggtgaacccatcatctggcgcaacaacgtcgccaatgagcaggtgcaacctgtcgcggctactgacgaccttgaggaggaaggcgagaacctgcctgggcttgcgctccgtctcctgcactcgacgccacatggtggcgacacgatcgtcaatggtgcgctggtcctgcttgaggctcaccacttccgtggaaaccatggccacgtcctccctgccggcagatgtcgtgccctttctcttgccaccggcgccagcgttgctgccgcgtcacctgatatcgtgacggaggtgggtctggccgtgcaggaacgacacgtgtgtgaactcccactggcattagtatgatctgcgtgcttctgaattgttgacgtcacactttctgtctatcctgattcgagtattcgaccagaatttaccacccaacaagctaattgagttcaacttcttgctccaagattccacagttaagttgcttcggcaggatggccaaacagaagctttagacatgtgatactgcaaacacattgggtgtctttgaagattg

SEQ ID NO: 36251 - DNA, 306 bp, Zea mays
  Clone ID: MRT4577_133063C.1
ctcaacaaaacctggaaatgtcacattcttacatgtggatgggcctcatacagcctccaaacaactttattcacggatatatgactacaaaagcacgaataacacagggtccaccaggcaaggatgctaaataggctgccgcactgtctgaccaagtaagctgctctagcggcagcagtctgtggagatagcccaaggtgaccgggttaggctcatggcgagcgtgtaaaggcactaacccacgcccttgtaccaaagaacaccgcttactctactgtctagaacgaatgggactagccaccgctc

SEQ ID NO: 36252 - DNA, 395 bp, Zea mays
  Clone ID: MRT4577_133064C.1
agcaaacgcaattttgttaaatttatcatatacgtcagggaataggatccttccctaacaaaaactttaaggtttgctcatttttcttcccttcgacaggcaaacgcatacatgtgccatctctcaggaaacgaaagagcgggcaaatacggagggagaagtgctacaacgtgatagagcccaacaccattggggctgatggctgcctatgacctgatctggttggttgacaagccacgaccgcgccttaaaaccggggctgattcattaagagctgggcataccctgctccgagggcggggacgccctgggccgtttgaggaagctcgccagcgttttctgttgtttcgaggggcttggccagtaggccctttgggaaacctacagcggttttc

SEQ ID NO: 36253 - DNA, 732 bp, Zea mays
  unsure (1)..(732): unsure at all n locations
  Clone ID: MRT4577_133065C.1
ccggccgggaccgcgggggcgtgtccgcttgcatcctcctccctcccccgtcccgtcccgtctccaccctccacctcctctcgcgtccgccccgccgctcgcggatgcgccggcgcgctcccacccccaaaccctagcctcgatcccgatgggcacgccccgcgcggggtccccggcgtccccggtcaccggcgaccactacctcgacctgctcgtccgcttcgtggcgcgcaacgcgggcgcgctgctcgacggcaccgtcaccctccgcctccaccccgtcggactccactacgtcgcctcccgcctcgaggcgctccgggagctcgaggccgtgggcgccggcgccccagtcgactacctccgcgcctacgtcgcggaccttggcgaccaccgagcgctcgagcagctacggcggatcctgcgcctcctcacctcgctcaaggtcgtcgccccggggccccgccgcgaccccgcgccgctctcgatcctgcctttcgcgcgcctgcgcgtgctcgagctgcggggctgcgacctctccacctcggccgccaggggccttctcgagctccgacacaccctcgagaagctcgtctgtttcaattctacggtgcgtttatgccacccgacgtacaatttcctttggaattcggtgtttgcggcaattcgctgtgtgaccacaggccttactcatngattatgatcctncactaccatgagctattctgaacg

SEQ ID NO: 36254 - DNA, 134 bp, Zea mays
  Clone ID: MRT4577_133066C.1
tttcatatgctgtacctgtagttacgggcactgattctgccgttggcgggaggaataagaagattaagtgtatagggttgaagcttgatgacgcccactctaagtcttccgctaagtctcattgccctccggct

SEQ ID NO: 36255 - DNA, 181 bp, Zea mays
  Clone ID: MRT4577_133067C.1
ggaccagggaggggcctcaacaacccggtgaagggttggttcatttcttgtgttttggggaccccccccggtacataaattaacaacgggggcctacccatatctgccatcgagttgtccctcgcgccataagctttcccaagccagcggcgaccatgatctggccggacaccattcgcac

SEQ ID NO: 36256 - DNA, 328 bp, Zea mays
  Clone ID: MRT4577_133068C.1
cccacacccacagtcattgcacatagctgtatgaggactgtatgttgctgggcggtgggtggagaagtttgttgagcactgtgctgcccggttcgcattcaggacactggctgctaacattgaatattttactgctggaatgctacaccgacgtcccgtacaggccctgattgttaactctgcattgctgatacaccaccttcctgatgaaagtgtctcaattatgaaccaacacgatcgacttttctatatggcgaacgatcttctaccaaaactcgttacccttggggagcatgtctcaaatactaacacttcctcattctattcc

SEQ ID NO: 36257 - DNA, 395 bp, Zea mays
  unsure (1)..(395): unsure at all n locations
  Clone ID: MRT4577_13306C.1
ctggcaggaagcaaaatgaaaattcaatcgtagacatcagaaaacacattgaacgaacatgacaggatggatatgatgccacagatcgaaaaaccagttcaaagtgacacgaattgcaacaaacgacaacacctatcaaactacacacgggcaactcccagttcgtcgacacacaaagtataccacaactgtatgctagtccaaacctatagacatcactaagcttgcaaaatacgggcctcctggagtgcttcctgcaggtgctttacagcactgtcatagtacacaaagcccatgaaccaaaactcgtgattatcaatcgagaccacctggatgtatttctcagctgcgtntgttctgctcgttgaaggattaacggacctcagctgggctag

SEQ ID NO: 36258 - DNA, 279 bp, Zea mays
  unsure (1)..(279): unsure at all n locations
  Clone ID: MRT4577_133070C.1
tttttttttttttttttttttttttgggttttgtggtttttttttggttncccccatcataattacaaaaccaatttattcgaaccatgccccttgatcgtttaaaggacaaatcgatggtgatttggggtgtcaaaaagaacgtgggttaccccataaggtggtttgttttttattcaggcccaacgacttattcataagggcaattttttttcccttttttggacccggagtttttaaaaaaaccgttgccttattgttaaaaaggggttttttggg

SEQ ID NO: 36259 - DNA, 582 bp, Zea mays
  Clone ID: MRT4577_133071C.1
atacttcctgcactacgccgaacctacacgagagagattaccatcgcacacacacgatgagagatagtgaactccctccatgccggtctgggcctgatgctcctcgtcctccgcatccaccgccagaatgccgtgatcgtgctcactctgtagaaggccacccggggtatcgcgtacccggactgcctccgggtgaagctggcctgcgaccaactggaacgtgatatcgtgaagactccggcgacaaaagggctcagaaggcacgccgtgagcgccatctccaggtatgatcagttccatgaggttatgactgctcgcgtactcacgtacaccatcactttgaggaccaacgattctctgtcgccgatcacctcgccacactgcatactaaggaacaagctcgccaagacggccaggggcgcctagaggaaaaactccagactctccttgacactacaggctcattttaccaagtctacgctgctagatagacgccctgccctaaaagaacctgatgtagatgctgaacaaccagctaccagaacaccctttaaggtattgcagcaacgacaactgcaatga

SEQ ID NO: 36260 - DNA, 702 bp, Zea mays
  Clone ID: MRT4577_133072C.1
gccggccgttccgagaagtgctcttccctaaactgtatcgggttttcggaagctagtgaatccctagccattcacctcggtagtgtctaagggtctagctaaccatggcgacatgggatacacaacttgtgggtacagtgtacaacctctgtagagtgtaaaactggtatactagccgagctcacggtcatgagcagctcaggactctcgcatgattaatttatggaacttaaattcaatttgtcatttgtattgcatgggattatttattaattttgttctattattatttaatatggtttggtatttaattacatttagtaactgctaataaaactttgtccaacttattaaaagcaatgctcagctttaactcctattgttgatcggctttacacatcacatgaactctcacctttggtgagttcatgccatattattccccataacttattgagcgatgaacatgtgtgagctcacccttgctgtctcacacccccacatgagaagaacaggtggttcaagaggagccacgcaacgaggagttcgattcgatctaggtggcgtctcccagttgactgtggcaccaaggatggactttagttcgatctatatttatcttttattttgtaaagacttccgctatgtaataagtactctgattatattgtgacatttatctctatacactctgttattata

SEQ ID NO: 36261 - DNA, 334 bp, Zea mays
  Clone ID: MRT4577_133073C.1
gaggaatttaaagaagccttggctgattgttaagagaagccagaatttattcctggagagcaaggtgtaatacaagtagctggtcattcagatgcagttacagttgtgacacggatagtaggttgagcatgtctgaaaactacagtatgctgcattgtgaactggtcaagacatcaaattgtcaaacatcgagacactcattgcataatggtacttcttgagcttccccttgctcacaagcacaaaatgaccaatattccaggtgatgctaatcgctttgcgatatatcatattatacagagcttatactaaggtgcactatagactattatta

SEQ ID NO: 36262 - DNA, 780 bp, Zea mays
  Clone ID: MRT4577_133074C.1
attgggtacctcgaggccggccgggatagcgtcgtagtcctagtcaccgcgttcgcttcccgagcacgcaaccatggctcgactgtcagccaccgccgcgctcctcctcctcgtcctctccctcctcgccgtcgcgcactgcggtgccctcgcagtcgcagcaggaggctaccaccgccccacagacgacagagagcatgggcatgaagcggcaccggttccacttccaccaccaccacgacgaggacgaggagaagaatatggcggcgaggaagcggctccgccacgctgatgagcacgacgaggacagcgacgacgaggaggatgagcaaatggaagagatggtccggcggttcaggaaggcgatcatgaggaggagattcggccacggccacggccatggacgccgttcccgcttcttccaccacatcgtccaccgccacgccgaggaggccaagaagcaggcagatgttgaagaagaggagagcggtgtcctggcctggatcaagggcctcatgaaccggttctagagctgcctcattcgagcgatccgtccactcacagtcacagccatggctgcttgcctttttactatttgccatcggccatcccgcgtgcatactgcagtgtcttggcacggctgaatttacttggtgttattagtgtgtttctatccacggtgtgtcgtcttatatacgcacttgtatcacagattcacagtacgtactaccctccttgtgtgctttcgaaaaaaaaaaaaaaaaagcggccctcgagctc

SEQ ID NO: 36263 - DNA, 420 bp, Zea mays
  Clone ID: MRT4577_133075C.1
acccacgcgtccgaccacgcgtcagctttcaattaactgggggtgagggatatatgctctgtgtagtttattattttttgtgtatgaccaaagcaatagcaaacctaaatggtccaattgatgttctgttttttggtgcatgcacactactgtataactttagggcctgtttgtttcagcttatagattatataatctgaattataatctaaattatataatccagattataatctagatatattataatatatatgtagttgtttggtagtttagattatacaaatgtagattattcacaaagacaacaatacccttattgcttatttaaggtgagaaaaaaaggatgtcatatattgtaatttctatttacattaccatgggtagtaggtcttttgccaaaataatctcaaataagct

SEQ ID NO: 36264 - DNA, 1164 bp, Zea mays
  Clone ID: MRT4577_133076C.1
cattgggaccctcgaggccggccgggattgcgtcgtagtcgtagtcaccgcgttcgcatcccgagcacgcaaccatggctcgactgtcagccaccgccgcgctcctcctcgtcgtcctctccctcctcgccgtcgcgcactgcggtgtcctcgcagtcgcagcagagcacgacaccgagcccgaatcaaccgccgccgtggccgtcagcgacgacaacgtgctatccgaccccacagtccacgctgaggcgggcaccgccagcgccactgaagaggaggccatcccggcggagcagcagcagcatgggttcgaactcctccgcctgccgtctcaccggctccaccaccaccaccacctctggttgaaacgccaccacgggatctaccgtgacgcgtcgcgcaagttcccgagccggacccggatcgctccctcccggacagcgacggagagggggaggtggctattacaagcgagcagccgtcgccgttcaccgacgccgacgggcacgacgacgagagctcggcggcagtcagggcgtggaagcacgagatgctgcggaggtggttccgcttccacttccaccacgacatgcgccgccaccgtctccaccacgtccaacacgaggaggaggaggaggaggctaccaccgccccacagacgacagagagcatgggcatgaagcggcaccggttccacttccaccaccaccacgacgaggacgaggagaagaatatggcggcgaggaagcggctccgccacgctgatgagcacgacgaggacagcgacgacgaggaggatgagcaaatggaagagatggtccggcggttcaggaaggcgatcatgaggaggagattcggccacggccacggccatggacgccgttcccgcttcttccaccacatcgtccaccgccacgccgaggaggccaagaagcaggcagatgttgaagaagaggagagcggtgtcctggcctggatcaagggcctcatgaaccggttctagagctgcctcattcgagcgatccgtccactcacagtcacagccatggctgcttgcctttttactatgagaacgtatcttgtgcgcaaggagcgttggtgctcccatgagcaaaatcaaaaaagaaaacatcaatcaaaaaaaaaaaaaaaaaacccgcggcc

SEQ ID NO: 36265 - DNA, 730 bp, Zea mays
  Clone ID: MRT4577_133077C.1
tacatcgatagcgtcgtagtcctagtcaccgtgttcgcttcccgagcacgcaaccatggctcgactgtcagccaccgccgcgctcctcctcctcgtcctctccctcctcgccgtcgcgcactgcggtgccctcgcagtcgcagcagagcacgacaccgagcccgaggaagcggctccgccacgctgatgagcacgacgaggacagcgacgacgaggaggatgagcaaatggaagagatggtccggcggttcaggaaggcgatcatgaggaggagattcggccacggccacggccatggacgccgttcccgcttcttccaccacatcgtccaccgccacgccgaggaggccaagaagcaggcagatgttgaagaagaggagagcggtgtcctggcctggatcaagggcctcatgaaccggttctagagctgcctcattcgagcgatccgtccactcacagtcacagccatggctgcttgcctttttactatctatttgccatcggccatcccgcgtgcatactgcagtgtcttggcacggctgaatttacttggtgttattagtgtgtttctatccacggtgtgtcgtcttatatacgcacttgtattgctaagggctagtttgagagtcataaaaccgaaggggattgtaggagcacaaatacttttcttattaattttaaataagaaggggattttcttcagaaaaaaaaaaaaaaaaaatttgcggcc

SEQ ID NO: 36266 - DNA, 429 bp, Zea mays
  Clone ID: MRT4577_133078C.1
attccatcacactcgtcctggcgattattttcccacaacgtctcctcgactccgatgaaggcgcagctggatagttacacatgcgcgagatccgctgccatcagagccccccctatctaggccaatggctctgtcgagacccaagccccaccttcgcttgttctcatcctcatttccctctatatactgcactgccgccagccccgatataatggcgtccaaaggtgtgatacaacatcgcgaggtggaagatatgaactcaccaatcatctctgcgagagaaagtagtgcactgacacatgttgctacttatagataagtgacatggtggtgagccatcctcacaccaagctatgagatgtaagtgcactttgagcccatcgatctcgctgccaccgatactcctgaaagaccctattccattttggc

SEQ ID NO: 36267 - DNA, 552 bp, Zea mays
  Clone ID: MRT4577_133079C.1
gccggccgggccgggatatcactgtgttactcctatcctcagctctatctactccacagccgacaacaacccgatagacatgatgagggtgttgtgcgttgtcctctttctcctgattctcgttgcgagtgacacatctacacatattagggggatctgcagtggcaacccaacgccaacgtctcatctacaggcgctggggtatctggctcctccggttcacctgctcaccctccgggtgcatctacccactcgccggtgccacctgccgacgccggccctacctgccaccgccaggaccatgtaacaccagcaagatcattagcaggatgaggcaagccaatacccaacgcaaccaccacgaggacgtgctgatccccaacaacacccatggccataccaacaagcacatcgaagcccatgccaggtgcatggaatatgaggtgtttggcagcactccgatctggggacaacgcgtcaagtcctagaagcatgagtgcagcgcgacagagacgccctactgctcgtctcagtgacaaatggtgactccat

SEQ ID NO: 36268 - DNA, 608 bp, Zea mays
  unsure (1)..(608): unsure at all n locations
  Clone ID: MRT4577_13307C.1
ctatacccacttggctgatcaaanagnaggnagaacaatgcacgtgaattaggatggacagggatctcaattccggcccaaggttgcacccatctatttttttttcagccaaagccatcgtatttggagagcccatccagcaacctgaaggtttggagtaccaagcccgcccagattgataggtctggtcacctccccaagctaccaaacaaatgtccctgtttgtctcttttcttcctgtccacaagaaagctcttctgattttatcaatcttcttgatcacccatttaggcacgttcaatgcaataagaagataaaccgggatagctgacaacacaaatcgaaccatggcagtccttcctgccaagtttaataagtgtgccttccaaccggggagtggatccactatcttatcaatccattgcatgagatcacttttcctcaattttttgtttgaaagtggcagtcccagataattgcatggaaaaatagaaatttggcaactctgcacctcttgataagcacattgttctctatgttttcaattgcaaatgttcagttagcaaattcaatacttgaagaaaggctgaaagataaagcaggttctt

SEQ ID NO: 36269 - DNA, 587 bp, Zea mays
  Clone ID: MRT4577_133080C.1
tcgtaaattcagccgtgccaatacactgcagtatgcacgcgggatggccgatggcaaatagtaaaagacaccgtatcttatgctcatgggagcaccaacgctccttgcgcacaagatacgttctcatagtaaaaaggcaagcagccatggctgtgactgtgagtggacggatcgctcgaatgaggcagctctagaaccggttcatgaggcccttgatccaggccaggacaccgctctcctcttcttcaacatctgcctgcttcttggcctcctcggcgtggcggtggacgatgtggtggaagaagcgggaacggcgtccatggccgtggccgtggccgaatctcctcctcatgatcgccttcctgaaccgccggaccatctcttccatttgctcatcctcctcgtcgtcgctgtcctcgtcgtgctcatcagcgtggcggagccgcttcctcgccgccatattcttctcctcgtcctcgtcgtggtggtggtggaagtggaaccggtgccgcttcatgcccatgctctctgtcgtctgtggggcggtggtagcctcctcctcctcctcctcgtgttggacgtggtgg

SEQ ID NO: 36270 - DNA, 1219 bp, Zea mays
  Clone ID: MRT4577_133081C.1
caggtgaaaatgacgtcggtgcgaaccctgttgcttaattttgatcttggcttcttgtgctgatgtatgccgtgtgtttgtttttgataaccgtaagtgtcgcggtgtgtgtgaatggagggcagtttatttttctacggagggtataatcggttctcggtgactgacgaatcactaccaaacagaacatcaacatagaataaaaaaaaaaaaatgcaaccgccccatacggccatactttactgtagcctccagtaagccgtttgactttcagctccgcggtcacctcaccaccacctcatgcactgtgggtcccgcaacatgcctacaaatgcagaagctgacctccgcgccccggcatagcgtcgtagtcctagtcaccgcgttcgcttcccgagcacgcaaccatggctcgactgtcagccaccgccgcgctcctcctcctcgtcctctccctcctcgccgtcgcgcactgcggtgccctcgcagtcgcagcagagcacgacaccgagcccgaatcaaccgccgccgtggccgtcagcgacgacaacgtgctatccgaccccacggtccacgctgaggcgggcaccgccagcgccactgaagaggaggctaccaccgccccagagacgacagggagcatgggcatgaagcggcaccggttccacttccaccaccacgacgacgaggacgaggagaagaatatggcggcgaggaagcggctccgccacgctgatgagcacgacgaggacagcgacgacgaggaggatgagcaagtggaagagatggtccggcggttcaggaaggcgatcatgaggaggaggttcggccacggccacggccatggacgccgttcccgcttcttccaccacatccaccgccacgccgaggaggccaagaagcaggcagatgtagaagaagaggagagcggtgtcctggcctggatcaagggcctcatgaaccggttctagagctgcctcattcgagcgatccgtccactcacagtcacagccatggctgcctgcctttttactatttgccatcggccatcccgcgtgcatactgcagtgtcttggcacggctgaatttacttggtgttattagtgtggttctatccacggtgtgtcgtcttatatacgcacttgtatcacagattcacagtacgtactacctgcttgtgtgcttggcaaaaaaaaaaaaaaaaaaggcccctagggcc

SEQ ID NO: 36271 - DNA, 1657 bp, Zea mays
  unsure (1)..(1657): unsure at all n locations
  Clone ID: MRT4577_133082C.1
cattgggtacctcgaggccggccggatagcgtctccgtcggtactcggtagtcgtagtcaccgcgttcgcttcccgagcacgcaaccatggctcgactgtcagccaccgccgcgctcctcctcgtcgtcctctccctcctcgccgtcgcgcactgcggtgccctcgcagtcgcagcagagcacgacaccgagcccgaatcaaccgccgccgtggccgtcagcgacgacaacgtgctatccgaccccacggtccacgctgaggcgggcaccgccagcgccactgaagaggaggccatcccggcgcagcagcagcagcatgggttcgaactcctccgcctgccgtctcaccggctccaccaccaccaccacctctggttgaaacgccaccacgggatctaccgtgacgcgtcgcacaagttcccttgttctggccacggcgcgaggcgcgagcaagcagtgagccaccttgccatcttgccagcgtccgcagaggtggccagggaggcgggggaggagatgcccgtggccgagccggacccggatcgctctctcccggacagcgatggagagggggaggtggctattacaagcgagcagccgtcgccgttcgccgacgccgacgggcacgacgacgagagcgcggcggcagtcagggcgtggaagcacgagatgctgcggaggtggttccgcttccacttccaccacgacatgcgccgccaccgtctccaccacgtccaacacgaggaggaggaggaggaggctaccaccgccccacagacgacagagagcatgggcatgaagcggcaccggttccacttccaccaccaccacgacgaggacgaggagaagaatatggcggcgaggaagcggctccgccacgctgatgagcacgacgaggacagcgacgacgaggaggatgagcaaatggaagagatggtccggcggttcaggaaggcgatcatgaggaggagattcggccacggccacggccatggacgccgttcccgcttcttccaccacatcgtccaccgccacgccgaggaggccaagaagcaggcagatgttgaagaagaggagagcggtgtcctggcctggatcaagggcctcatgaaccggttctagagctgcctcattcgagcgatccgtccactcacagtcacagccatggctgcttgcctttttactatgtcttttactatttgccatcggccatcccgcgtgcatactgcagtgtcttggcacggctgaatttacttggtgttattagtgtgtttctatccacggtgtgtcgtcttatatacgcacttgtattgctaagggctagtttgagagtcataaaaccgaaggggattgtaggagcacaaatacttttcttattaattttaaataagaaggggattttcttcactccaatttcctccggtattttagctcccaaactgctagccctaagagttccaaaaccatctcctctcaactctgatgctagatgtttgttttgcctgccanaaaaaaaaaaaaaaaaaaaaaaaaaaaaaaaaaaaaaaaaaaaaggggaaaacttatcgncgataacacctccgataaacccgatttcctgtttatcgctgggctccgatattttactatcggccaaaaaatcggcccattcgaaaaa

SEQ ID NO: 36272 - DNA, 1065 bp, Zea mays
  Clone ID: MRT4577_133083C.1
ccggccgggatagcgtcgtagtcctagtcaccgcgttcgcttcccgagcacgcaaccatggctcgactgtcagccaccgccgcgctcctcctcctcgtcctctccctcctcgccgtcgcgcacggcggtgccctcgcagtcgcagcagagcacgacaccgagcccgaatcaaccgccgccgtggccgtcagcgacgacaacgtgctatccgaccccacggtccacgctgaggcgggcaccgccagcgccactgaagaggaggctaccaccgccccacagacgacagagagcatgggcatgaagcggcaccggttccacttccaccaccaccacgacgaggacgaggagaagaatatggcggcgaggaagcggctccgccacgctgatgagcacgacgaggacagcgacgacgaggaggatgagcaaatggaagagatggtccggcggttcaggaaggcgatcatgaggaggagattcggccacggccacggccatggacgccgttcccgcttcttccaccacatcgtccaccgccacgccgaggaggccaagaagcaggcagatgttgaagaagaggagagcggtgtcctggcctggatcaagggcctcatgaaccggttctagagctgcctcattcgagcgatccgtccactcacagtcacagccatggctgcttgcctttttactatgagaacgtatcttgtgctcatgggagcagcagagctccttgctcataagatacggtgtcttttactatttgccatcggccatcccgcgtgcatactgcagtgtcttggcacggctgaatttacttggtgttattagtgtgtttctatccacggtgtgtcgtcttatatacgcacttgtattgctaagggctagtttgagagtcataaaaccgaaggggattgtaggagcacaaatacttttcttattaattttaaataagaaggggattttcttcactccaatttcctccggtattttagctcccaaactgctagccctaagagttccaaaaccatctcttctcaactctgatgctagatgtttgttttgcctgcc

SEQ ID NO: 36273 - DNA, 744 bp, Zea mays
  unsure (1)..(744): unsure at all n locations
  Clone ID: MRT4577_133084C.1
tttcgaaagcgtcgtagtcctagtcaccgcgttcgcttcccgagcacgcaaccatggctcgactgtcagccaccgccgcgctcctcctcctcgtcctctccctcctcgccgtcgcgcactgcggtgccctcgcagtcgcagcagagcacgacaccgagcccgaatcaaccgccgccgtggccgtcagcgacgacaacgtgctatccgaccccacggtccacgctgaggcgggcaccgccagcgccactgaagaggaggccatcccggcggttcaggaaggcgatcatgaggaggaggttcggccacggccacggccatggacgccgttcccgcttcttccaccacatccaccgccacgccgaggaggccaagaagcaggcagatgtagaagaagaggagagcggtgtcctggcctggatcaagggcctcatgaaccggttctagagctgcctcattcgagcgatccgtccactcacagtcacagccatggctgcctgccggtttttactatttgccatcggccatcccgcgtgcatactgcagtgtcttggacggctgaatttacttggtgttattagtgtgtttctatccacggtgtgtcgtcttatatacgcacttgtatcacagattcacagtacgtactacctgcttgtgtgcttgacattgtgttgtttcatgtaattctgtgcagttatatatgtgccttttgttcttccaaaaaaaaaaaaaaaaaaggggncggcc

SEQ ID NO: 36274 - DNA, 524 bp, Zea mays
  Clone ID: MRT4577_133085C.1
aattcggcacgaggcgcggtgggcggagtaccttgcgagctccgccgtcctgccgcacctcttctcccacccctatgtccgcgcgcacctccagcaaaagttctaccgccgcttcgtcgattctgatttttctgttggaggaatgtcctcaaccacatctattcagccctcagcatcttcaggtggtgcatctacttcagctgatgagaatgcaaggcctcctgattcaggcactaattcttctggaccagcacgaagcatattgtctctacagttggaccagcggtcattacatttttctgttagtgcttggtataagggatatcggttgtcacttcttggcacaacatgtactacaggctatgctttgtttgctttgtacaggctaccccgagcagggaacatgcaggctgttcaggtgtggtgtcaccatgtaactgcatcaaaggattttataccattgatgtcctggcttatggtgtctacgtgcggactgggcttggggcgtgggtggggggcctgga

SEQ ID NO: 36275 - DNA, 848 bp, Zea mays
  unsure (1)..(848): unsure at all n locations
  Clone ID: MRT4577_133086C.1
tcgagggccggccggggcccggggaaaaaagtcaaaaaaaaaacagaaaattctgcagtcacctctcatcttccgttcgttccggatcacgagtctccaaacccaaaccccagaggaggcaggaggatccagcgcggcgatgggggaggcggacgcgagcaccggcggcggggatccgcagaagctgaagcggatcgcggcgggagcgtacgactacgagaacgacgcgcggtgggcggggtactggtccaacgtcctcgtcccgccccacctcgcctcccgccccgacgtcgtcgatcacttcaagcgcaagttttaccagagatacatcgaccctgatttggtggttgagccaatgtcttccacaagttcgactcaatccaacagatcagcagcaagttcttcatctacaccatccagtgagaattcccgagctcatgacacaggatctagtgtgagatcagctggtgcatctcaaccaccaccaacagaaaggacaggaaactctttacggtttgatggacgaaccatacatttctctatcaatggcttgggtattgattgttgctagtcttggaatccttccaattctaccgaaagatgtcgcaagcaaagcatatanngactttcgttgctaggaacaatatgctcgtcagcatattctttatactgcacttatgggaaaccaagagcatggaacatgcctgcaattcagccttggctgcagtctatattgtagccaagncttggnttcatttgatggtctctcttatgatgttcacctcaatgtaacgctttaagattgntctacttcctgtgctttgctggncacttgatcatgttgctag

SEQ ID NO: 36276 - DNA, 345 bp, Zea mays
  Clone ID: MRT4577_133087C.1
tggcgccgcgagaagagcagaccggctacggagagcgtgacggccgcgcccactctgaggaaaagttggggcaagtccttggcgtccccggcgctcggcccaccaacgccgctgcttgtcgtcggtcacaaaaaggcgtccatttgcgccacgagaggagcccggagccgtgccaaattcaaataatttgggactctaacgagaccacaaggtagtggcgaagaatctgttcttggagggataaattttttgcagaaaaccagaaagcgcgtcagggaacgcgagctccggtacctgcaagtggccggctataccgccatggcgtggaaccgaacagactgggcg

SEQ ID NO: 36277 - DNA, 1391 bp, Zea mays
  Clone ID: MRT4577_133088C.1
ccgggtacccttgccaaggaaatttcagaggcggaattgagatagaggagggagtgggaagggagacagggaggggtcagtcgtcttcctttgtccccgtgctgctcctttgcttcggagtcttgccaagcctagattcgaggagagggctccctctctttccttgcttggcctgcatcggaaggtgcgattggcgctctctgtcctacagtgcaggccgaaaattattttacgcaggattctgatttttctgttggaggaatgtcctcaaccacatctattcagccctcagcatcttcaggtggtgcatctacttcagctgatgagaatgcaaggcctcctgattcaggcactaattcttctggaccagcacgaagcatattgtctctacagttggaccagcggtcattacatttttctgttagtgcttgggttcttattgttgccttgattggcatctttccattggcaccacattcccttcagtataagggatatcggttgtcacttcttggcacaacatgtactacaggctatgctttgtttgctttgtacaggctaccccgagcagggaacatgcaggctgttcaggtgtggtgtcaccatgtaactgcatcaaaggattttataccattcatgtactgccttatgttttctacatccaaactgcacttgaagcttgttttggtacctgtaatttgttgggcacttgaacatgtcgctcgatttctacgtcgccattttactagctcatctttgtacaggacatacttggagcaaccttgtacatgggttgagacaaacacaaatgcagtccagtttctacgttcaaatgcagagattttgacgggctttcttttgatcctatccctgttctcgcgacagcgaaatcttatgcaaacattcatgtattggcagttgctgaagctcatgtaccattctcccttcactgccgcttatcatagagctatctggctaaaaattgggcggacaattaacccttatatccaccgttacaccccttttcttcatgacccgataaatgctggcatgagatggtggtttaggtaggttgaatgcagcactgtcagtcatgtaaagagatgcaagtatgtttatggtattattttactccaaagagaatctttgagaaaactgctgcttgggagtggtgtgattagtcccttgtgtggctttgagctgatgacaatttagtagttagcatgatcagtaactcttaactcttgtaggcttgtagctagagctagtcgagatcttagcctgtttggcatgaactgaagttaggtggggaggttattattgtgaccgaattgttttgatttttctgactattggctattgctgaccacaaaaaaaaaaaaaaagcggcc

SEQ ID NO: 36278 - DNA, 586 bp, Zea mays
  Clone ID: MRT4577_133089C.1
ccggccgggatagcgtcgtagtcctagtcaccgcgttcgcttcccgagcacgcaaccatggctcgactgtcagccaccgccgcgctcctcctcctcgtcctctccctcctcgccgtcgcgcactgcggtgccctcgcagtcgcagcagagcacgacaccgagcccgaggaagcagctccgccacgctgatgagcacgacgaggacagcgacgacgaggaggatgagcaagtggaagagatggtccggcggttcaggaaggcgatcatgaggaggaggttcggccacggccacggccatggacgccgttcccgcttcttccaccacatccaccgccacgccgaggaggccaagaagcaggcagatgttgaagaagaggagatcggtgtcctggcctggatcaagggcctcatgaaccggttctagagctgcctcattcgagcgatccgtccactcacagtcacagccatggctgcttgcctttttactatttgccatcggccatcccgcgtgcatactgcaggcacggctgaatttacttggtgttattagtgtgtttctaccaaaaaaaaaaaaaaaaaagcggcc

SEQ ID NO: 36279 - DNA, 485 bp, Zea mays
  Clone ID: MRT4577_13308C.1
cgtaggatgcccgcgtgcgtatgctcggacttcggctggggaaaaaatcatggatctcaaatcaccggcaaatggtaccccacgttcgcacgacaagcgcaccaacaaagaaactcagctcgagttgacgttggtggttgagaccgagatgtcaggcgcttctagtagtagtgcagtggtcgtcacgacgttggtgcatggtgatgacttgtatgcagtccgaggtgaacttcctcgggaggctttcgcatcccaatctggtgaggctgctggggtactgctgggaggacaaggagctcctgctggtgtacgagtacatggccaagggcagtctggagaaccacctcttcggaagcgagccacgcaaaggcggcggaggagccgtgcagccgctgccgtggagcctccggctgcgcatcgtcaccggcgccgcccgcgggctggccttcctgcactcgtcggagaggcacgttatctaccgggac

SEQ ID NO: 36280 - DNA, 428 bp, Zea mays
  Clone ID: MRT4577_133090C.1
ctgcctgcagcgcgtcagcagcagagacagtcgtcttcagctattaaccagcggcggcgggtccaaggcatgggctggcaagttcaagcccaccctcgacaaggtggagttcctctacgacggccaggggttcatgtcgatgcgcctgagcaggacggaggcccgcctcgcgttcttcgacgtcgctggcagcgtcctgcactgctggaccatgcatgcccaaaaattaaagacgacgacgacgacgaccgctgctgctgctgggcactaaattaagctttgctgggtacgatgagttgatgatgcaattaattatttggttttgtcgtcttttcgtgcgtgagagggaagcaataataattaattgctgctgcttctgttgttgtgtgcacatgcatgtgagggtgtcaagtatgttcagcctcttg

SEQ ID NO: 36281 - DNA, 313 bp, Zea mays
  Clone ID: MRT4577_133092C.1
attcggctcgagctcatctaccaggcaattcctgctgcaatatagctatggataacagcggtaccgacacaggcgccataaacgacaataacgcagtcatgatgaacgcctcgtagttcttgcattcgatacagcatggactagcgaggtagcaagcaacatacgaggccaactttattggaaggactttttgcaggataatgactgtgagcatggctctcgctgacctgctcttgcttcaatcgcggctgccgcactcttggcagttcgggtacccctaagattctgtcactcccgatggctggtcgcatac

SEQ ID NO: 36282 - DNA, 552 bp, Zea mays
  unsure (1)..(552): unsure at all n locations
  Clone ID: MRT4577_133093C.1
aaaaaaaaaaaaaaaagaaggagagnaaaaaaagggaaaaaaaaaaaaaaaagtttatttcnagatttgtggggggcgcacaaacacttgtgatagcttttgtcgatactcccatatgaatacataggcaatcaatctggtagtcacaacggcaatgaatcgtgtaatgtcaatgcacaacattgtggagggcactgaccacatcatgcatgttacttgtatgggagggtcttaaggtctaaaagaagcaaggaatgaacctctggcggtactcgacttatgtctgactaccatgagcggtcttatcttgggcggcactagagcatctctatctctacttcagacatgacaatggctactgctgagaagaagttgctggtgacgaacccttttaccatcttttctttcgttatttcgacggcaaccttaacctgcttgattgcccctcttacgcgatatgggtcatcgagtgatcgcattgtaaccacaccatcgttgaccctgataagctaaaccaagtggattgctaaccttattgaatcctggctgctg

SEQ ID NO: 36283 - DNA, 683 bp, Zea mays
  unsure (1)..(683): unsure at all n locations
  Clone ID: MRT4577_133094C.1
agattcgttcgaatgccggagctcgtcgaggacgaccgacgacgcacgcagcagatcgcggagcactgcaaattctgtcccctgaactgtcccatggcagcaccagagttttcccgacgaagacaatgtgacatggcagaagctcgcccagaaggcggacaggtaccatgagatgtctgagagtcatgacagaaggtacccaggactgctgactcgaaggagctcactggggaggagcgaaacctcctgtctggtgcatacaagaacgccattggagcccgccgtgcctcatggcgcatcatctcctccatccagcagaaagaggaaggccgacgctatgacgaccgaccaacactcctctaggattatcgcgccaagactgaaactgagcctggnccgatctgtgatggcatcctcaagctgcttgacacccatcttgtgccgtcttccactgcccccgagacaacggtcttctatctctggatgacgggcgattactacacatacctcgctgagttcacgactggaggtgagagatcggactctgctgaaaacacgatgatgcgatacccggttgcccatgacattgctctaggtgagcttgctccaactcaccctattaggattggactgcgacttaacttctcaatgtgctactatgagactctgaacgtccctgatca

SEQ ID NO: 36284 - DNA, 1025 bp, Zea mays
  Clone ID: MRT4577_133095C.1
cattggctccctcgcgtccggccggggctgcagcctgactgtctgttttcagcacccgcaccacctgactgtctgttcgcagcacccggacctgtgtcaatggccgctgcagccgccgctccagcatctgtggcgccgtcctcgcccaaggccgccggcgacaacaggaagacggtggtgtccgtggacgcgtcggagctggagaagcacgtcctagcggtggacgacagctctgtggaccgtgccgtgatcgccaggatcctgcgtggctccaggtacaaggtgaccgccgtggagtcagcgacgcgcgcgctggagctgctcgcgctaggcctgctccccgacgtcagcatgatcatcaccgactactggatgcccgggatgactgggtacgagctgctcaaacgcgtcaaggagtcggcggcgctcagaggcatccccgtcgtcatcatgtcatcggagaacgtgtccacccgtatcacccgctgcctggaggagggcgccgagggcttcctcctcaagcccgtccgccccgccgacgtctcccgcctctgcagccggatccggtgactgcgtgtggtgctatgttaggagctaggatcctcaaccaaaaaaaaaaagattcctcttctttctttctttctctcctgcttggacatagatcttcaaacaaggagctaacatttggggggagactttttagctttagggatctcaacaagttgttcggaacgggggggatggagcacagcgttggctgttcttttctccattcctcttaataacatcaggtgtcaatgtcatgcacgatctccttcctccccatgaccatttcatccagtgacctcatatgatcctgctgccgaggatgtcagtgtagtaggttgtgcgaatccaatcggaccagagattgttattcctcttaaaaaagctgttgttgtgtaatgcgactagtacggtggtgtaattgcaaatcgatttattattattatatattacaaatataaattactagtagagaggcg

SEQ ID NO: 36285 - DNA, 817 bp, Zea mays
  Clone ID: MRT4577_133096C.1
ttgggtacctcgaggccggccggggccgcactgtctgtttgcagcacccgcaccacctgactgtctgtttgcagcagccgcacctgtgtcccgtccgtctctgcaatggccgctgccgcaccggctccagcatctgtggcgccgtcctctgcgcccaaggccaccggcgacagcaggaagacggtggtgtccgtggacgcgtcagagctggagaagcacgtgctggcggtggacgacagctccgtggaccgtgccgtgattgctaggatcctgcgtggctccaggtacagggtgaccgccgtggagtcggcgacacgagcgttggagctgctcgcgctgggcctgcttcccgacgtcagtatgatcatcaccgactactggatgcccgggatgaccgggtacgagctgctcaagtgcgtcaaggagtcggcggcgctaaggggcattcccgtcgtcatcatgtcgtcggagaacgtgcccacccgtatcacccgctgcctggaggaaggcgccgagggcttcctcctcaagcccgtccgccccgccgacgtctcccgcctctgcagccggatccggtgactgcgtgtggtgctatgttaggagctaggatcctcaaccaaaaaaaaaagattcctcttctttctttctttctctcctgcttggacatagatcttcaaacaaggagctaacatttggggggagactttttagctttagggatctcaacaagctgttcggaacgggggggatggagcacagcgttggctgttcttttctccattcttcttaataacatcaggtgtcaatgtcatgcacg

SEQ ID NO: 36286 - DNA, 820 bp, Zea mays
  Clone ID: MRT4577_133097C.1
cccgcgggccgggccggggctgcagcctgactgtctgttttcagcacccgcaccacctgactgtctgtttgcagtagccgcacctgtgtcccgtccgtccctgcaatggccgccgccgctgccgctccaacctctgtggtgccgtcgccgtctcctgcgcccaaagccagcgacagcaggaagacggtggtgcccgtggacgcttcggagctggagaagcacgtgctggcagtggacgacagctccgtggaccgtgccgtgatcgccaggatcctccgtggctctaggtacaaggtgaccgctgtggagtcggcgacgcgagcgttagagctgctcgcgctgggcctgctccccgacgtcagcatgatcatcaccgactactggatgcccggaatgaccgggtacgagctgctcaagcgcgtcaaggagtcggcggcgctcagaggcatccctgtcgtcatcatgtcgtcggagaacgtgcccacccgcatcacccgctgcctggaggagggcgccgagggcttcctcctcaagcccgtccgccccgccgacgtctcccgcctctgcagccggatccggtgactgcgtgtggtgctatgttaggagctaggatcctcaacaaaaaaaaaaaaaatcctcttctttctttctctcttgcttggacatagatcttcaaacaaggagctaacatttggggggagactttttagctttagggatctcaacaagttgttcggaacggggggctgttcttttctccattcttcttaataacatcaggtgtcaatgtcatgagaaaaaaaaaaaaaaaaaagcggcc

SEQ ID NO: 36287 - DNA, 377 bp, Zea mays
  Clone ID: MRT4577_133098C.1
acgcttgtaattactcgacaatggagatagaagggcgatgaatactggagaatcgttagactttaaagggcgggattggtctattctatctcgccctgggagagacatcacatcacacttagctgtgggctaagccaagtgctcggactgcgccaggaggaacatgaaacgccaggcagtttttaaaggtcttcaggtgtccatctagtgctagaacagcaagtgtgtctaccatagcgcatgccctggacaggttaacaagtcctgcgctttgagacacccgcttgccatccacgccaactgcgaggacctggagctctagtaggaatgcttatggcagcatcatacacatgagagccagtgtgctggtgctcttg

SEQ ID NO: 36288 - DNA, 261 bp, Zea mays
  Clone ID: MRT4577_133099C.1
atattttttttttttttttttttaaaaaaacgtggtatttaaaaaaaatggcggttcacaaaccacacatctaccatcacacacctctaactacacaaaaccctttacccccaaactaaccaactcaacacccacattttaattcccaacaaaaaaattcaaacacccacatatacaacatttattcaccctttttctcccccaacaaatttccaaccccaaattccagacccttccctttactcctgtgaatcaacccct

SEQ ID NO: 36289 - DNA, 665 bp, Zea mays
  Clone ID: MRT4577_13309C.1
tctcccaacccagctcgctcgtcccagctgatgcagggcgagcacctagtagcgacctgctcgatcatcagtgtagagtgtcggtaggtgtctgtctctcttggtggctggttgcaacgtgtccggcgagccctacacgctgcacaccaacgtgttcacgcgggggcaggggcagcgggggcggggggtccgcctctggttcgaccccaccgccgacttccacacctactccatcctctggaaccccaagcacgtcatcttcatggtggacgacatgcccatcagggacttccgcaacctggagagcaagggggtggcgttccccaagagccagccgatgcggctctactccagcctgtggaacgcggacgactgggcgacgcagggcgggcgcgtcaagacggactggtcccacgcccccttctccgcctcctaccgcgggttcaaggccgacgcctgcgtcgccgtcgcgggcggccggacccgctgcggcgccaccgtcggcaccgagggcaccggcgcccccgcctccgccgccggcgccggggactggtacaaccaggagctggacctcaccctgcagcagcggatgcgctgggtgcagcgcaagtacatgatctacaactactgcaccgaccccaagcgctaccagcagggcctccccg

SEQ ID NO: 36290 - DNA, 504 bp, Zea mays
  unsure (1)..(504): unsure at all n locations
  Clone ID: MRT4577_1330C.1
gagcataaacatgcttctatgtattttatagattgnnnnngtcgagaggttacaaggatttataagagagactaagcnnnnnnnnnnnnnnnnnnnnnnnctcaggtaacaagccgagatgtagctaagaaagaggggaaacccaggcaacaagcaagggaagaatcccaggcaagccagcagacaaaatacagtcagcgggcattaaatataagcaaacatgctaacagcaataatttcctctggcactgcacaatacacaagtgacaaaactgagatgctnnnnnnnnnnnnnnnnnnnnnngccttcgccatcatggccaataatgagagatgtgnnnnnnggcatcctcgtaagctccagtataggacccatgttacccaaactaggaatcatatactgctcagatatctcactccacccatcaaccatttcccagatatgcaggtttctgctgtcttcaatagctacaatgtaatttggttcaaatatcagaatctcgt

SEQ ID NO: 36291 - DNA, 148 bp, Zea mays
  Clone ID: MRT4577_133100C.1
cccgggtctgaccccgcgtccgttttggttcagttcaagtgggtcccgtgcgtgtacagcggcgtgatcatcgccttccgggtggacctgggctccattccgttctacttcgtggtgctgctcgtgttcgtggacggtgacggtgacc

SEQ ID NO: 36292 - DNA, 326 bp, Zea mays
  Clone ID: MRT4577_133101C.1
cccgttcttctgatccttgctggtggttctggtaactgatgtcagaaaaaaggttgtcgtgggatatgcttcatcactgatatattgacaatagtcactccgcccaacatggctgattcttctacttctgtagtagtgagctttcaatcttgcacacctcagcgtaaactatttttataggaatgcataaactgcttggtcttgctgaatgtaaattgactcacgattgattgatataatcaaaccaaaactgcaccagttatctgtctgtatatagtaaactatcgaacttaactactatttttttattaactccaatttcttga

SEQ ID NO: 36293 - DNA, 353 bp, Zea mays
  Clone ID: MRT4577_133102C.1
cccacaagtccgcccacgcgtccgcggacgcgtgggtttgtatatccaagccactaaacctgaccaaacagttcacagtcaaatactgagtatagcatatataaaatgttggttgcctgatcagtgtaaaagaatgctgcaaatgcgtgtgatcgataatatcagctctcttcgggggctatggttgcctgatcagtgtaaaagaatgctgcaaatgcttgtgatcgataatagcagctctcgtcgggggctatggatagcaatacaaagcgttctctgccctgtgacaacgtgggagaacgaattttacctccggccttaatctgtaatataacatctcacccagctgtggt

SEQ ID NO: 36294 - DNA, 323 bp, Zea mays
  unsure (1)..(323): unsure at all n locations
  Clone ID: MRT4577_133103C.1
cgttgctgtcgccgtgctgtcgccgtgctgcgccgtgctgtcggcggcctttatctttatttccctgatcactcgttggattgaaccgatacaaccacaaattttcctttgatattttcatctcactttccattttccaagaatgcaacaaataaaatccacccgtgaagaacccctgctgagttcatgtagcaagaaataggttctatgcactgncttcccctacatcgctccatcctggacgacggnctcgcccaaatccaaggacatggaatcgaaattcagtaggaaggggactgagccgagcagactggaggctgacc

SEQ ID NO: 36295 - DNA, 176 bp, Zea mays
  unsure (1)..(176): unsure at all n locations
  Clone ID: MRT4577_133104C.1
gggggaaaaaggcctctatntaatatctatccgaggggcgatacgaccaccgaacagcaggggttatttactccaccactacaggtccatttatttactcgcantgtannattcccgntcggttctgggggggggggcgggcntttngttcatgcgcttttttgggtgggccgcgg

SEQ ID NO: 36296 - DNA, 350 bp, Zea mays
  Clone ID: MRT4577_133105C.1
gtttcggcggttggcgacaccatgagctccacggcgtgcggcttcctgggaggcggtaccaagacgagcgggacagaaactatcggccttggcgtggtgcacgacgggtgggtgatacttaaggcaagccggacctcgatattgtgccgctgaatgacggatacccggtgactgcggattatgttcctaaccatgatctaatttttgttaacattgcagctcagactcaccacatcggatgataatatataagctagggggtctttcctttccttgtcctataacttgtactacatatatatacgactatacatcttggtcatgacgcagaatggacttgtgaagtgtca

SEQ ID NO: 36297 - DNA, 310 bp, Zea mays
  Clone ID: MRT4577_133106C.1
ggggctaaaaaaacttagggctaaaatttaacatccccaagcagaaactggtttcgggtccagcaaactaatttacattcagatgggcaactgggcccccggcttttttttacagggtttttgcaagtaatccctttgcttttaaaaattaaaataccccgacctgccaggccccggggcaaaaaccaaccttttaaaatttaaaaatgggaagggccaagttccttagccccaatttgggcgatgatgttagaggtttttgcttgataagggccatgcattgcatgagcagctccatgatgctgcctgg

SEQ ID NO: 36298 - DNA, 431 bp, Zea mays
  Clone ID: MRT4577_133107C.1
tggggagggacgcgtacgcctactctttttaaacaaaacataatattggttattcattcttaggtgtactccattggggggtggattcagaagggcggggagaactaaatcactttatactaaataacggacacaatatacctgccgctggtctaaggacttatagactaccatcacatcccagttactctcttcggactctaatcgaccatggtcaaaataggcacgtctacacacacgattaacacaccgtatagaaatacgtcactagaacacttaacactgggatgaagatcgggattaacaacaaataaatgataagacgtccaacattcgtaaacccacctatactttgatatgcttcgatcatctctccagaaaacactcaactatttagagctggataacttataatattaacttatccatta

SEQ ID NO: 36299 - DNA, 445 bp, Zea mays
  unsure (1)..(445): unsure at all n locations
  Clone ID: MRT4577_133108C.1
cccacgcgtgcgccgaacgtggccttacatcgcaccttcaaccgaacaagcaaccgataatacatcggggttgataaggagcttcatatatgatcaccagtttgtggacgagctattgacctacaaagagatctacaacgagctccagaacgaggtcctggggaagggggagacacagagggctacccatggggacattgatgccaacatatgcgccaatgcatgcgacgacgaaggcgaggacgacacagttgataacgcagctgataatgtggacacatttggtgaaccatagcaaccacattagcacactaaattagacaagaaatactttaaaaaatacatcaaanatatcactgataatctgacatgctgagaaagagccagagaaaaaaatgatgtcaaaaaggcagccaagggtgcaaccaacaagctgaataacctg

SEQ ID NO: 36300 - DNA, 356 bp, Zea mays
  Clone ID: MRT4577_133109C.1
ggggctcctttttgggggggggcaacaaaaaactttaattcctgaaaaaacccctccctccctaggaaatttattcagggggctaaatttttatttcacaatcggcaaaaagggcaagccccggggggattttaaacccccggggaaggggaatccccctttaaaaaaaaactggccggggttgggcccccttttttttcaacgaaaccgggggcaaaaattgggccgggggaacccaacccttgttttggggggcaaagttgaaaaccgaggccagcggggccccccagaccagggggggccccagcccgacctaaaaaattttgagggccttggccctttaaaacggccccaaa

SEQ ID NO: 36301 - DNA, 392 bp, Zea mays
  Clone ID: MRT4577_13310C.1
acatggaacaactttttttttgatggggaggacgagtataatacagacacgagacacgacgaacacgaacagcgcgcggcggcagactacgtacaccgtacacgtaccaacagggtgaggaataaccgggcgctactgcatggagcactcggcggggaggccctgctggtagcgcttggggtcggtgcagtagttgtagatcatgtacttgcgctgcacccagcgcatccgctgctgcagggtgaggtccagctcctggttgtaccagtccccggcgccggcggcggaagcgggggcgccggtgccctcggtgccgacggtggcgccgcagcgggtccggccgtccgcgacggggacgcaagcgtttgccttgaacccgcggtaggaggcgg

SEQ ID NO: 36302 - DNA, 252 bp, Zea mays
  Clone ID: MRT4577_133110C.1
atggcgctttcccccctcctccttgcggaaaggcgacgcaggggcgtatgtaaaaaagccgagtctgtccctgatcgccctctcgccctgtgcagaggctcgggggctgctctcgcaaacccggctccggccaaaccgttgacagcgtcaacataccagcccgagaacttgggacccgactgtacacctgggctacggccagctcgcatgagggaacaaccagaccagccgaagcattacgcaaggcattaa

SEQ ID NO: 36303 - DNA, 379 bp, Zea mays
  Clone ID: MRT4577_133111C.1
ggggagaataattcatccacaaatggatgataacaatggatgaagcttttcctttaggtctttgcagcggatgggaaagcaaatcaagacacgggcaaagggcgggccggggccttcacatcaccaagtggccctctgcaatggcaacgataccaaggttgcagaggctggcatcgctgcgcgcaccgaagcaacatcctctccccaggcacttctcgtcgacactcacttccagggcctgcaaggcactgacctccagggggtgggagctgcctgcacacgacctaagcagtacaagatctggtaattgatcgagattcacgcgggacaccttgtctcaccggaagggaaagctcgacggcagggccagccgtgggag

SEQ ID NO: 36304 - DNA, 255 bp, Zea mays
  Clone ID: MRT4577_133112C.1
ttctctatagaggacccaccgcgctcggggcgggctatgaagagatagatactcgtaggtctgtattgctctcggggcgtcgttagcacactgcccttatggccctactcgcctttgaggacttctccgacactgcggttaggctttaagggtagactctacctcttccaaatctggtgcttgagcgtgagggagactactgagatgggcgtcgacaagcaggaggactccaatgagagggagaaaatccacgcc

SEQ ID NO: 36305 - DNA, 580 bp, Zea mays
  Clone ID: MRT4577_133113C.1
ggtgttgcacgccggctgctccttcccctcatcggacctctcggctggccgcctgatctccttgagcagcgccacgacgtccttcatcgccggccggtcttccgccctgtgggcgatgcagagcatggcgaccgagaacacctgcagcatctcctgcacctgcgcctccggcttcccccgcagacgcgggtccaggagctccgccgtggcccgcttggcgcgcacgtgctcccgcacccactgcaccaggtgcgtgccgcccggcaacgtcgggtccagcgggtgcctccccgtcaggatctccagcaccaccacgccgaagctgtacacgtcgctcttctccgtgatccgttgcatggacgcgtactctggcgcgatgtagccatatgagccggcaatgcgcggcgccttggacgagtcgagcttggcggagccggacgcgacggctccggacaggacgcgggcgaggccaaagtcggcgaggtacggctcgttccgggggccgaggaggacgttcatggccttgatgtcgccgtgcaggatggccggcaggcagtcgtggtggaggtacgccacggcg

SEQ ID NO: 36306 - DNA, 457 bp, Zea mays
  Clone ID: MRT4577_133114C.1
acgtaagctcggaattcggctcgagctgacgggcagcagagagatcgtaaccgcaccgacaccagtgttcggccgctctacgttagcaggaggccccgctctttgtgtccactacgattggggctgctcgccgccagcgagcacccatcggtccccgaactaatacacctctggtcccgatcgagcagccacagaatgacacctgcggcactactacacgggccagaggaagaacccgacaaccggacactagaacgctcaatggcctatgtctgctatgagagagattggtcctccagacgtacaagaacaagctcctgttgatcgatctgtctctctgcactgaaaacacgggccccgcagacctcgccggcaacgagcacattcctttgggcgggcgagctgctgcctgctgggagctgacggtggtccgagcacgacagggcgggtgcgtgta

SEQ ID NO: 36307 - DNA, 353 bp, Zea mays
  unsure (1)..(353): unsure at all n locations
  Clone ID: MRT4577_133115C.1
ttcgtccgacgcgtccggcgccgtgtgggccgcgcgctcgcaggctgaagtgtggactacccgtcnnncactctatcctgtactccacggtgagcgagaccagaacaccggcccggccgctcgtaatcactcccataagaatgtggaacctacatacacctgttgtcgggaccggtgcacgccggatcttttatcggcggatacaccgtgagcaggcgtgatggtgcttgataccccgttttcgtgcggcttgatgctaattcgatttgagggtgagggatcaagaacgacctcgttctttatttatttctttattggaacgagtatgatgaatcattgaaaaactcttgaat

SEQ ID NO: 36308 - DNA, 125 bp, Zea mays
  Clone ID: MRT4577_133116C.1
cgcaaaccctatccccggctcgttggatcaggtgagacctcggctttacgccacgaggagcagcggtggcgcccgctgcgtcgatacggagtctatcgcgacctaccgggagaacctgtctctgc

SEQ ID NO: 36309 - DNA, 425 bp, Zea mays
  Clone ID: MRT4577_133117C.1
gggtcgctaaataatagcagggagttgttaagcaagtttatctcttatcagttggggcagaccctggtctataaaggggaagcagtagcatgtaactaggcatcgaaggaaatacaatctccctggggggcgattacctcggtcaccctggctgacggggaacttgctcctgcttcttcctttcgcttttctccaccatacacgctcaggtccctgtcccaggctgggctggtcctctattcgcccttacgcactcctagaaggcccaggcgtatcacgggatcctctttttcctcggcaagggccccatcagctggcagtctgttgggcctgaaagcgtcttctcggagtcggcactggttgctcacgtctcggcgaactcgagccggtggctaggggcgtaacactcttgtggaatttgcata

SEQ ID NO: 36310 - DNA, 507 bp, Zea mays
  Clone ID: MRT4577_133118C.1
accctcgaggccgtccgggaaaccccacagcccacaggcgaccctgcaattgcaagcaaaacctgcctgccaccgccgcctctgcccctctgagtctctgacgcagcctgagcgtggtgacgcaggcaggaatgggtcccgactcccgacggatcagggaaatccccggcgagcagaacagcaatggagcgtcatcgaccggtcagtcggtcacgggcggagtttaaacgccacggagcagcggcggagagacgacgacagcacagtacgcggtgagcccgagtagtccatctccatccgtcgtccctgcagttgccgctgttcctctgcggcgctggccgccggccagcgccattgatcagtgtaattattactagctcgccagcgttgacttgacaggcctgaaatccgtccacctcgttaaaaaaaaaaaaaaaaaagcggcctcactcacgctaacggatgattgtgaccaggaaaaaaaaaaaaaaaaaaactcgagcccgg

SEQ ID NO: 36311 - DNA, 888 bp, Zea mays
  Clone ID: MRT4577_133119C.1
ctcgaggccggccgggagaatcagtttcacgatccctcctcatcaaccacacttccattctcttctctgttctcaccgtgcaggcgtagtgcgtagtgtgcagaggccaggacagaaaagagaggcagcgcagttcactactacatccatccaaccacgccgtcttccttccgctgcgagggcttccgctgcagcgcgatcgccgcattccaccctcttccttcctggaacagcagggctttggcactcgactcctccaccacagctccaaccaaagcaaagcggttttcaagcttgccagtgtcagtgcaatggtgactagcaaatcctcgtggagccaggttgtaaaaaataccaggccgacaaacctgtccgttgctgcaagaaacctccaaccacaggaccttggagccgtgatatttggttgcacaaacagtaccattcaagagtgtcactcacggcaactttttggcttgccaagaacacatatttcgtatgtacaaaacattaaggaaggactacctctcttcctcttcaattatgatgatcgaagattgtatggtatttacgaagcttcagggaatggaaagttctgtcctgaatcaaatgcatggtcacaagatagcaagggcaaaacaagctatcctgcccaggttgcaatgcgggtaaaggtgtggtgttttccgctagcagagaatcagttcagaaatgcaattatagccaattactaccagaaaattcccggtgtccctggccagaagcttcattttttcaagtttgaattggatcatgctcaaacacgtgttttgatggatatgtttactccttctccttctcccaacagtttctggacgccccctgctgcagcaccagctgacgagcatgcga

SEQ ID NO: 36312 - DNA, 1065 bp, Zea mays
  Clone ID: MRT4577_13311C.1
agcacagctaattctttcatcagagaatcaaacagtctaccccagtttcatcggacgtccagggaggaatctccagttattagagactcacttgcagattgaactcctaattctctaccccagtttccgcacgcgaactggccaggaaacgatgccattgctgcacatctgaaaaaccgagccattgcatacaagttcatctccgcatattaattacagggccctaaagaagaggaagaaaatggtgataccaatgttgacatggacattatcgtcggcttttacatagaaatcagcgtcccacattgtaagagcagtcgaaagaaacatctgaaccttcatagggagccctccatagccttccacgtgattaattctcaagatatcaccgtattcttcatcctccatatcaattgcatggtcgacctcattttccaggtttggatttgcactgcgtccaacaacaaaacggataacaacgcccttgtcttccaatcttcgcaactgatcaccctgtggcatccacgtctgccttattgaatctctccgcttccggttagcaagagtggtgaaaacgcccatgacaaaagacatcctacgccgcgcggttccctggtcgccctccgagtcgcccggtgacatgccctggctcatcgcctgggcggctctagccgcagccaggcgcatctcgatgtcggatatcgtcttgtccaacgccatgacgacttcgcgagtctgtgacgcttggttcaacacggccctcgagtggtcagggccagccttgtctgggcaaccgggatgaggctcaggaacaggccagtacctgttgacgacgccgacgccgacgaggaagcaggcggcgcagagcgcggccacgcaccgcgtgggcacccgcgccggcgaagacttgtgcggcctcagcgccgccgcggccatcatcgtggctggccacctcggatgcctcctcggtagtcgttcgaaagggaggggagggggaaagcgaaggctccgtccgcccccccagggccaggtccgcgtgagagctctcccggccggcctcgaggt

SEQ ID NO: 36313 - DNA, 684 bp, Zea mays
  unsure (1)..(684): unsure at all n locations
  Clone ID: MRT4577_133120C.1
gtcggagccgccgcccgtcctccatcctcctgcacggcaggggcagccacacttgttggttcgtctccctctaccctctcccgtgtggcggcgggggatatcatctatgatggggtggctgcggctccactccctcttctcccctctccggaggatgtgggtgagggcgcattccgagcgccggaaccggagggggatgcgcatcctgtacaaggacgtgcagtcctgccaggacgaggacgtgcgcgtgctctggtccatcctcatcgactcccaccgccgccgccaccaccacccggacggcctcgacctcgagctctgaagaagaatctcatcagcgcgatggcgtgcacgtgggatcgatatgtgatcaagagagcacagcactggccttccattatattccttcagaaaagaaaaagaactcagagactgagagaggtgtttaattctatgcttttgtgtgctgctgatttccttttctttttcttttcttctttttttattgcacctatgttctgggcttgaaaaaaacgagtgtgagggtgagctctctgtacatagacacgcacacttgctcaagtgccttacccttcaattctaccgtacgtccgtacgagctgtgcgnaaacggcaccttccctggacctctgtaatcctacaatgcagaagaagtatgaactc

SEQ ID NO: 36314 - DNA, 814 bp, Zea mays
  Clone ID: MRT4577_133121C.1
cattgggtacctcgaggccggccgggataggagtcggagccgccgcccgtcctccatcctcctgcacggcaggggcagccacacttgttggttcctctccctctaccctctcccgtgtggcggcgggggatatcatctatgatggggtggctgcggctccactccctcttctcccctctccggaggatgtgggtgagggcgcattccgagcgccggaaccggagggggatgcgcatcctgtacaaggacgtgcagtcctgccaggacgaggacgtgcgcgtgctctggtccatcctcatcgactcccaccgccaccaccaccaccacccggccgtcctcgacctcgagctctgaagaagaatctcatcagcgcgatggcgtgcacgtacgtatttatgcacgtgggatcgatatgtgatcaagagagcacagcactggccttccattattccttcagaaaaagaaaaaaaggactcgaggttgaagaagaagaagaagaagaagaagatagactgagagagaggtgtttaattctatgcttttgtgtgctgctgttttccttttcttttctttttttttttgcacctttgttctgggcttgaaaaaactgagtgtgaggttgagctctctgtacatagacacacacttgctcaagtgccttaccttcaattctaccgtgcgtactgtacacttgtggtctttgtgtatttgcattgcgtgtatctcggatggaagcctgctctggttgttaggctagtggatctgcctctgcttttctttcttcttcttaccatcatcttttgtttagaatgct

SEQ ID NO: 36315 - DNA, 713 bp, Zea mays
  Clone ID: MRT4577_133122C.1
cctcgaggccggccggggcgaatgcttgcatagcggtcgttgccctaaaattcgtgtgacctgtggagatgcctaaagaaccctagtcacacggaacactcagtgcctgcacgcacgagcgaattaccaggcgtttgcgatgggcggagaggccacgaatgccggcggcgggggtatccgcgcgcggatggagcactacctttacagtggcgagaagaagcacgtcgtcgccggcatcgccatcttcgctgccgtcttcggcgtcccatggtacttcatgacgcgaggggcaaagcatcaatctcaccaagattacatggaaaaggctaacaaggcgagatcagagaggctttcttctggacagtcatctgcactaaaagaatgaatgttgtattgcctattctggtccctgaccttcagagcttgtcatagatcatacactgtattgatttgcactcaacggatttgatctgttgttaaataagcaggttatctttctttctaatatcagttgtggaaacgaggtacgttccaagaattttgtctactggtgatctttttttgggtctaatgagcctattaccgtatcttcaagttgcaggtcactagacatgtatttgttctaaggaatctgtgtttaaggtcgacttggtcaaggatattatgaaatgcatgtttgcagtaaaaaaaaaaaaaaaaaagcggccagggcc

SEQ ID NO: 36316 - DNA, 928 bp, Zea mays
  Clone ID: MRT4577_133123C.1
tcggtaaagagcgcagcccctgatagtgtatggctacccgctctgctctgctctcggctgccgcctatttcccttccctctccgggcgctttgcataggagtcggagccgccgcccgtcctccatcctcctgcacggcaggggcagccacacttgttggttcctctccctctaccctctcccgtgtggcggcgggggatatcatctatgatggggtggctgcggctccactccctcttctcccctctccggaggatgtgggtgagggcgcattccgagcgccggaaccggagggggatgcgcatcctgtacaaggacgtgcagtcctgccaggacgaggacgtgcgcgtgctctggtccatcctcatcgactcccaccgccaccaccaccaccacccggccgtcctcgacctcgagctctgaagaagaatctcatcagcgcgatggcgtgcacgtacgtacgtatttatgcacgtgggatcgatatgtgatcaagagagcacagcactggccttccattattccttcagaaaaagaaaatggactcagaggttgaagaaggagaagagagactgggaggtgtttaattctatgcttctgtgtgctgctgttttccttttcttttcctttcttttttttgcacctttgttctgggcttgaaaaaacgagtgtgaggttgagctctctgtacatagacacacacggacatttgctcaagtgccttaccttcaattctaccgtactgtacacttgtgttctttgtgtatttgcatcgcgtgtatctcggatgcatggaagcctggttgttaggctagtgtatctgcccctgccttttttttgttggtgttacatcatctttttttttaattgcctgtccatttctgcttggtgggtgccaaaaaaaaaaaaaaagcggcctcgagctcagc

SEQ ID NO: 36317 - DNA, 403 bp, Zea mays
  Clone ID: MRT4577_133124C.1
cgtcagagcaggtcatgcggctttgagtgttgggtccaagatctatattatcggaggagttggtgacaagcaatactacagcgacgtttgggttctcgatgtcaccaaccgttcgtggagtcagctcgaggtgagcggtcagcgaccgcagggaaggttttcccacaccgcggtagtcatgaacactgacatcgcaatctatggaggatgcggcgaaaacgagcgtcccctgaacgagcttctcattctgcaattgcgctccaagcatccgaacggacgctacaacatttcgatgtgcaaggttctgagcaaccaatggagccaagagaggaggaagtttctcagatcagagactaaagatacaggtgtgagcaatggagaaacggtgcagaaacgtcgagac

SEQ ID NO: 36318 - DNA, 302 bp, Zea mays
  Clone ID: MRT4577_133125C.1
ctcagatcgcggtcttcactacttttacactggtgctaagcacaccatcatccaccatggtgtggagaccacaaacatccttctggatgagaactgggatgccaaggtttcagatttccgtgtgtccaagactggcctatttatggtccatacttatgtgagcacaggtggcacaggcagcatcagcttcctctatcctgactactttgagatgctgccgctcacagatcaggctgatgtatactctttcggtgttgagctgattgaggacctctgcgcaccggctgtgcttgaaccctact

SEQ ID NO: 36319 - DNA, 769 bp, Zea mays
  Clone ID: MRT4577_133126C.1
tccgggatctctgtcgatttcccgccctgtacttgcgcccgccgccttaaaccctagttatcactcccctccccgcttcatctcccccgatgcagatggagccctgcgatatcgaggacatgctggttccgctggtaggtgcgaccctggatatgggtttttgctgcacgctttcgcaggctgatcttgttgaagcaaaaaagagagctactgacttgacgaaagctattagtgaagatccaaaacttggcatctgtaactctctctgctgacaataacccactcttttcttctaatctgattttccacaaacaattctcagctgccgctcactctcctgactaccacggtgcttgcattcactgactacgctgttgaacagccattcgagggccactgaaatgcatcttgattctgaaaataaagactaccacctgaatgttccattagacaacgaaaatgtcaaagctgatgaccacaaacagaaaagccaagaacaggtacctcgctagtcaccttcaaaatctagtccggattcctggaagagcaaggatgacgatgattctgatgaggaccagactgatgactctgatgacgacgagacggacgattctgatgaggcattatcttctgtagcaggcaatgacgattcaagtgatgcatacgataccagtgacgatgaggatggagacactccaactcctaagaagcctgatgtatgcaagtagagagctgctgtaagtaccgcgctgattactcctctatctga

SEQ ID NO: 36320 - DNA, 610 bp, Zea mays
  Clone ID: MRT4577_133127C.1
tcctcacgcgtccgctccgtctaccctctcggggggggcggcgggggatatcatgtatgatggggtggctgcggctccactccctcttctcccctctccggaggatgtgggtgagggcgcattccgagcgccggaaccggagggggatgcgcatcctgtacaaggacgtgcagtcctgccaggacgaggacgtgcgcgtgctctggtccatcctcatcgactcccaccgtcgtcaccaccaccacccgggcgtcctcgacctcgagctctgaagaagaatctcatctgcgcgatggcgtgccgcgtgcacgtacgtatttatgcacgtgggttcgatatgtgatcaagagagcacagcactgcccttccattatattccttcagaaaaaagaaaaaaggaggactcagaggttgaagaagaagaagagagtctgagagaggggcttaattctatgcttttgtgtgctgctgctttcctttttcttttctttttttgcacctttgttctgtgctagaaaaaacgagcgtgaggttgagctctctgtacatagacacacacgcacacttgctcaagtgccttacctttaattttaccgtacgtactgtacac

SEQ ID NO: 36321 - DNA, 1118 bp, Zea mays
  Clone ID: MRT4577_133128C.1
cattgggtacctcgaggccggccgggttaaattatgattactcgtggcgatcttctgtgttcgaaaaaaaaaaaaactgctgccgagtagtttgtttgctacttctgtatctaggcgagtcaggacatgaggttgcttatgacgtgaacttatagagttgtcttggctacgtgttttcatctggccctaagctggtttgcccgagtggttaagggggaagacataggagtcggagccgccgcccgtcctccgatccatcctcctgcacggcaggggcagccacacttgttagttcctctccctctcccgtgtggcggcgggggattatcatatatgatggggtggctgcggctccactccctcttctcccctctccggaggatgtgggtgagggcgcattccgagcgccggaaccggagggggatgcgcatcctgtacaaggacgtgcagtcctgccaggacgaggacgtgcgcatgctctggtccatcctcatcgactcccaccgccgccaccaccaccacccggccgtcctcgacctcgagctctgaacaagaatctcatcagcgcgatggcgtgctgtgcacgtacgtatatttatgcacgtgggatcgatatgtgatcaagagagcacaccactggccttccattatattccttcagaaaaagaaaaaaaaggaggactcagaggttgaagaagaagagagactgagagagaggtgtttaattttatgcttttgtgtgctgctgtttcccttttttttttttgcacctttgttctgtgcttgaaaaaacgagcgtgaggttgagctctctgtacatagacacacacgcacacttgctcaagtgccttaccttcaattctaccgtacgtactgtacagtgtacaccttgtgttctttgtgtattttcattgcgtgtatctcggatggaagcctgattgttaggctagtgtatcagcccctgcctttttttgttgttgttgttacaccatctttttttttttagattgcctgtccattttctgcttgatgggtgccctgacgacgacgcgtccccggccgctcgcgcacggatggccgtgtgctcatgtacatatcgatcgatgcttctatgtaat

SEQ ID NO: 36322 - DNA, 590 bp, Zea mays
  Clone ID: MRT4577_133129C.1
attgcgccgtcgctcctctcaaacccggctgctcaaaaccctagagctctctcctgctctcctccgccgccggagcgagctccccatcttcgtccggcaaccatggggacccacatcagcaagaagaagttcgtcagcgacggtgatttctacgcccagctcaatgagatgctgacgcgcaagctgccggaggatggatactctggcgcgtcaggtgcgcgtcacgaccgatgcgcacgtgagatcatcatccgcgtcacgaccacgcagaacgtgttcagcaagtacaggcgctcaggatcaggaagcttacctccgccgaccaaaagaggatcaacttccctgagaatggccgcgagctttacgcctagaagggcgccaaccgtgggatctgagccatctggcaggccgagtccctccgttacgagctcctcggatgccttgccgccccgcaggacttgctatgcgagaacgtcggtatcgttactggagatcgccgcccggtgacgagaggcgatgaagatgcccaatgtcagaacaccaattagctaccgcctggagtcctaggatgagtacatgatctcatctga

SEQ ID NO: 36323 - DNA, 131 bp, Zea mays
  Clone ID: MRT4577_13312C.1
gaggcgtacaatgtgctttacctttcggaagaatactcacccctgggggatgttgtagccatgaactggctgagctgacgagggcctctttgaagttcacggctatgaacccgaagggacgcatatcgacc

SEQ ID NO: 36324 - DNA, 276 bp, Zea mays
  Clone ID: MRT4577_133130C.1
tgttcttctccaggtgtaatcaggacgaaaataatatcattgggagggatgaaaaaaaaaaaaaaaaaaaaaaaaaaaaaaaaaaaaaaaaaaaaaaaaaaaaaaaaaaaaaaaaaaaaaaaaaaaaaaaaaaaaaaaaaaaaggggcgcccccgttctaagggaacccaagctttccgttcccgcgtccttggcacacgaaaaaatcttttttttttaggcgccccctaaattccatgttcccttggcccgggggttcaccaaccgctcgcccct

SEQ ID NO: 36325 - DNA, 1539 bp, Zea mays
  Clone ID: MRT4577_133131C.1
ccgggaccctcacttcccctactgcgcgtctcgtctgcactaggattggattgaatccagaaccctctcctgcagcctgcaggttgtcgtcgccctcttcctcctccttcgctgttgctgttgcttccgcttccgcttccgccgccgccaccgccgcggaaatcaaactaatctggtaacggaaaatctctcctcttccacttcctcgccacacacaatacttatcctgtgtgtcattcccctccccttcgtccgggatcttgctacttcttctttgcttagatcgagaccacaccgttccagagagatcccccaaacaaaaaaagagcacgggatcgaaatggagctcgacggcaagtacagcaaggaccagagcctcaaatgcgaatgcctcctcttcgacctcgatgacacactatacccgttcaactccggcattgctgccgacataaagaagaacatccaagactatatggtgcacaagctcggcgttgacgaggccataagcttggacctatgcgtcctcctctacaagcagtacggaaccaccatggctggcttgagggctgttgggtaccagtttgattacgatgactaccacagctttgttcatgggaggttgtcttatgacaaaatcaagcctgatcctgtgcttaggaacatcctcctcagcttacccattcgcaaacttgtgttcacaaacggtgacagaacacatgcttcaagggccctcaagaggcttggcattgaggattgtttcgaaggagtcgtgtgctttgagacactgaacccgacatctcctcctcctcctgtcccagctcaggaacttgaaatctttgatctaatgaagcatctggctcatccacagcccgcggtgcagctaccaaaatcacctatcctatgcaaaccgtcaagggaggccatgctgcaggctctcaaggtcgcctccattaatccacagacaactatattgttcgatgacagcttcaggaacattgaagctgcaaagcaaattggaatgtgtactgtcctggttggaacatctgagcggaaaaagggtgctgaccatgccttggaaagcctccacaacatgaaggaagcactgccggagctgtgggaggaagctgagaaggatgaagatgtgaggaattcgagcaaagccggaatcgagacatctgtgatcgcgtaatcttttttgttccttggttacaaatgtagccccttctgttttccttggaggacaacacgaggtggtggtgtatgaaaaaagaggagacctcctcaaggggtgggggggactgactgatactacgaccactgatgttacaccccgtaaactattactatccaataagaatgttttcttcttcaactatctaggatggtcattttgttggtgtttagttaaagcagctatccaatatttttttggatccaaatgtgtatgtcctcgctacttggttcttcatgcttatgaatgtggagtgatgatgtcctgttgtccttggattcaccatttacttcattatatatgacaac

SEQ ID NO: 36326 - DNA, 249 bp, Zea mays
  Clone ID: MRT4577_133132C.1
ggggggaaaaaatttttttccctcaaattcgggggggtacccccgccaacataattatagctggggggtgtctggggttttactggtgttttttcccaaggggtggccttttatgggccatgccggggccaaaaaaaaattttttctttaaagatgggtgcccccggtggggggtttaaaaacattccaccttttttggggaaccctttgggcttccctttgggtttgggcatataaccatgggttttt

SEQ ID NO: 36327 - DNA, 1188 bp, Zea mays
  Clone ID: MRT4577_133133C.1
gcttttgtggagctccaaaatcaaaagatggatagagatgatggaggtttcatgaaatttccgtcaaggtatacagttgctaagagcaaacaagaaacaacacctgaaacagctggtttggatctgtatgatggaaggtggcttcctggtagtggccgtaggggtcgtggacgtggaagtagaggaggtagcaggggaggcagaggtcgaagtcgaggtggaaggatcccaagaggtgttagcagctcatcaaggatcgagttcaagggtggtattgttgcttctgataaagcgccaaggaagaatgtacgccgagggcgtggtcgtggtcgtggtcgtagacgtggacgtcgaactgtgaggcctcggcagccatctgttggcagagccagatcaattccaaaggaaaatttgttgggaagctttagcatgcttagcagctcaaaggctgctaccattgaggagtctccacgaagctctggcgcagacgagtggggcttggagaccagaacgacatacactgaatgtgatgagaacagctctggatcacagtcagaagataacgaggaaaatggccagcccatggatgatgattatgaagatcaagttccagattactcaataggctattctaccggctcgaggcaccatgtaatgatgtccatgatggaccatgatagtgacgaggaggatgaagatgctgaaggtgatgagaatgtggaagaagatgcagaccttgcagttgacgatgccgatgttgagatggacgaagatgatgaaattggtgatgatggagaggatggtggcgttggaggggagatgaatgcggatgaggatccggatgctacttcatattcatccgattacagcgactaagaaagcagaaataagggaaccttatcccagattcctccctcggcatggaatgcatgtagtaccgagtaggcattcccccccgttgtgagccaaaagggagcttagatgcttaggttcgaaggagcgaggaactgttttttaggcaccgcaggttttaatagaatttctgacgcattcgacgaagtgtttggttgtaccgtggtagttgtgttactggggaattccccgagttattatacaatgtgttaagacaaaatactgtcatatcgcatctggttgccatgcgtctaactggttcacggttttaccgtt

SEQ ID NO: 36328 - DNA, 769 bp, Zea mays
  unsure (1)..(769): unsure at all n locations
  Clone ID: MRT4577_133134C.1
gcgttctttccaagnatcattcacattcggcaggcagggggacaccagcactccagcagtaagcgtcgagcgaccgaagaccatggcggacgccggcagcagtgccgccgcgaggagggccccatcgtcgtcctcgcccggggggtgcgcgcccgcgcttgggcggctggtgcggaagctgcggcggcagagcaggctgctgtgcgcggccacgggcggggcgcgccacgccgccgccgccgcgtcgtcgtccgcgcgctgccgccaccaccaccaccaccagtacgacccgctgagctacgcgcgcaacttcgacttcggcaccgcgctggagggcaacgaggcccactgctccttcgcctcccgcttcgtgctcgcagcccccgccgcgcggcaggcgcagtagtagatcagaggcggccgaggccagggtcgtaggtgccagtgccaccccgacgtcggatggaacgcacccgcttcgggagctggctttgcgtgcgtgcaagcgctggtggcgcgtcagccattggctgtagtagctgatagctaggtagtcttgtagaagaagtatcatcaattagtaatcttgtagctgtgtgagtatgttcatatgctgagaggtggcgatggcttgtaatcaaggatctgccgccgtacgtcccttgacgactcctcttcccgtggtcggaggatgagggatcggccaagaggaaatgtttccattccgaaagcttacacgcctaatgctgcttcatccacaacaaagaat

SEQ ID NO: 36329 - DNA, 622 bp, Zea mays
  unsure (1)..(622): unsure at all n locations
  Clone ID: MRT4577_133135C.1
tttgtaggcttacgtagaacgagtttactatggttgactaaggacgtaatcgtttgggaattgggattggatgcttccataagtatttcgttgactatagtaaggacgtacgtagtcagtctgagctgcagcctctagcaaagcaagactccatcgtcgtgactttgtttcgctagttcagtttgtaaactttgactcatatctcccacccaacccaaatcacctattgattctaaatctaaatccaaatcctcacaaccctattgccgattggttctaacacacaaccttgacttagcaatatttcagtccatgcattgcatccgtgacttgtgttgagcaccgtttgtggtattgggtaaaactgtctggccccgaggaccggacggtccggcctgcggatgatccacccttaggcgcagacgacgcacaattacatcagaatagacataactaatcccttttctacgcgtgtttatctctttaaaatcgcgactgctgttggaaaacagctaggaacgggtctagacctctacctatataaatgaagggatacaaccaattgcaaacaccaacaatcgaaccaaaatcgatatatncttccgttctttacctttttcct

SEQ ID NO: 36330 - DNA, 264 bp, Zea mays
  Clone ID: MRT4577_133136C.1
accggtctcggaatcccgctcgacgccacgcgtccgcggactcgtgggctgacgcgttttcctttagctcaatgacggaagggtcataggagtggttccatctactggttaactggagcgttcgctatggcgataggcgtcataaggagaacgttttttgccatacactagcgttcttaacttctactaactttctctgtagtttctcttccttttgtcctgtctcatctcatttgtctcatctttatttacatttttatatca

SEQ ID NO: 36331 - DNA, 620 bp, Zea mays
  Clone ID: MRT4577_133137C.1
atcacctttcgaggcgaggtcgccgcgtagactgatacactttctacacctttaagtagacaaggacagacacctacgtcatagacgcgatagactgaccgtgtaacccatccactgttctacttaggataggggatcagttatcctgagttccagattctctaaagaggaacgggccccaaacatctggccttatatgtcatcttatgacgacgacatgagctgcgaggaactacttcacccagagcgcttcgtccccttcaatgactgttcgatgaggaatcactagcgctggtagagaacacagtcgcgcattattgtgaatgctccagcaatacttattgggcacaacctacatagctgattctgtgatcgtcgaatgatatccgctggtgtcttaaaacaatgcagatgctcccatggagcgatcgaagctgtgaatacacactccggattccgaggtcaaatgagacatcttatgcgatgctggatcaggcattgttgaatgctatccccctacaatcgatgatgaggaagtttcatacttgcgtgggtatcacactgctagtgaagatatatatttccttacatgaggtgtgaccgatgcttttaaggactac

SEQ ID NO: 36332 - DNA, 155 bp, Zea mays
  Clone ID: MRT4577_133138C.1
tcattctgacaatactcacctatagcatatttcttcaccgacttttcgaaagcatattattcgacgtaggcgatcactcacctgggggaccgatctatttcactcaactatatcccttcaggtcacgaaagcatgaatgatcttgatcgcaaggc

SEQ ID NO: 36333 - DNA, 193 bp, Zea mays
  Clone ID: MRT4577_133139C.1
ggctatcaactccccttcgttgtctcaccggctgtcctcagatatacagggatctactagcacagcataatttagctttgctacgtaactcttgcgggttattggatttgagcagcacagctccgggaaacaatcccataaggtatataatctcttttattccgaaaagaatattttcaacatacagataatg

SEQ ID NO: 36334 - DNA, 706 bp, Zea mays
  Clone ID: MRT4577_13313C.1
cggccgggatctagttctcacagcgacacccagcgaccccagttatcctatcccagccaccgactcctccgtccacccatctactccacacctagccgactagtttatctcagccctattcaaaatggttgccaaaatcatcaacctggccatgcgcggcctccagttcttctgggctctcctcatcatggcactcatcggaaacatgattgcaacttcgtacgctggcaacccttcgattgtcaactactcgatgtttgtttcggtcttcagcatgctgtcgctcttctacctcatcccagccagcatcaaggagtcgttcatgattcaccctcttcttgtcttttgtcttgatgtcctgaacgccatcttctacttctgcggtgccgtcgccatgtcggcctaccttggtgtccacagctgcggtaacagctcatacacccacagcaactccatcaccaacggctcccccaacacctccaagcgctgccatgaggcccaggcctcgactgccttcctctggatcggctttgccgcctttgttgtctctgccgtcttcgctggtctccagggccgtagctccggcgttaacatgccgcggggtgccggtggcatcagaaagggacctgccatgagcccaggtttaagcgacctactgcagaaagttcttttctcgaaacgaaccaccgactcccctgaatgttgc

SEQ ID NO: 36335 - DNA, 430 bp, Zea mays
  unsure (1)..(430): unsure at all n locations
  Clone ID: MRT4577_133140C.1
gacactcaatccttgaatgctaaattttatacttaactccatgctcaccagatcccggactacaatggcatggctaacaactcgaatgatcctaacaaccttaccacttcctataaagacattaacaaggatctaagcgtacattttaagaacacactgtagactgcctatgcacttggccagttggctttgaccaatgctatgctataccttgaggatgttattgctcacatgcaggcatttccattgcacagatactactgttgtgttcgtcgcacctggcacactaagaatgatcactccaataggcanggtccaatacatgattaaatgagaacaatgtcatcctgcatttgatgaacaatgctgatactcacgatgatgtgcatagctaagatcttgacatgctctatattttacacgttcatgt

SEQ ID NO: 36336 - DNA, 193 bp, Zea mays
  Clone ID: MRT4577_133141C.1
ctaggtacaaacatccaatctggcacaaagtgacctaaacagacagtgtccacgaccgtaccacactaaacgacgatacaatcaatcggggccgatctgaaattcttcataataacctgtatggcacgcaaggcgtgcaatgcagtggaggatcaatccagaccatgactaccaatcacttttaactgcaata

SEQ ID NO: 36337 - DNA, 1378 bp, Zea mays
  Clone ID: MRT4577_133142C.1
tcgaagccggccgggccgggattcgcagtagcagataaggcgcgttgcggccgtgcaagaggctgcggttctcgctcaggctcactgctcagtgctcactgctcactagctaaaaacatctcctttcttatccatggagacggcagcgctcacctcccactccctgcagcgcccagcagcagcagcagctgctcccgcgcatggccagcggcggagggtcggagcggcgggcctgcggcaccggcagccgcgcgccggcggcaggatccgggccctgccttcggcggaggtcatcagcgagatcctgagccccaagctggtgcccggctcgcccgccgacaccggcgacgtctcctcgctcgtcccggtcagtgccctgatgctgctcttctacttcgtgtccaactgggtggtgcccgagctgctcctgaagggcctcaaggagcccaagcccgaggacgaagcgtccacgtccttcgccgcgtccgcggacaacgccgccgccgctggcccagcggacgacggcggcgcccgtaagatccgcctcaaggtcaagaagaagaagaacgggaaagcgaccatcgtcaaggtctaggtaggtaacaggggagcgcacgcatatggagcgtgcgagggcgtctccgacgtcatgataagttattaccaagtctccatcagaacatcgaaggagaaacactagtctactgattactgccagggtgatcttctgatcgccatgaaagctacagtgcttatttacaccaccttcatggatgatgaatgttactgacggctctcaaacggctgctgctgcatgtttgtagtgatgtgtgctcccttttcagtgacactcttcagaagtttgaggatgatttcaacctcttaaactggtggcatgagcataaactaacctttgctgttctctcaatattagctagagatgttatttcagttcctgtttcaacagtatcttctgagtctgctttcagtctttgtggcaggatcatcgaggaacgacgacgacgattagccccaaaaatggttgagatgctcctttgcatcaaggactgggagctaggtgatgcaagagctcaacactctgcccaggacaaagaattagaagatgcattcgaaggaatgtatcttgatgaggtggatgaacttaagacttagggtattaagactgtatctgtaattctctatcttcatgtttcatccatgtaatatgtagtcattaatcatcaacagcgaacattatatatgagctgggactgtactcttttcctttttagggttttctcacgaggtgtgagtttttacctagaaaggtttttaacgaggcagtcattgcacaaacagctcttttatatttaattct

SEQ ID NO: 36338 - DNA, 427 bp, Zea mays
  Clone ID: MRT4577_133143C.1
aaaaaaccctaaacctaacccccctaacccttctaacccccccaatcttaaaaaaaaaaaatcccgggggggggggccttccaaacccaaaaagagatggggtagctgaaaaacccggggggcttttggaacaaaccctggggggggggctcctaaggggcccccaacggaccatcctggggggagagggtaatttttgaccccctgccaaggggccccccaaaggtatcacgggcaacagggaaggacccaccagcctgagactcccacacgaacgggtaaaaaaaatggggctaaggggaaacaacaaccctttttgaaacagggggggcagagtaaaaaccgaccccaaacgggccaataagggacacataagccccagcggcaggggcctccaaaaattccttcgggcctgaccgcccaaggg

SEQ ID NO: 36339 - DNA, 529 bp, Zea mays
  Clone ID: MRT4577_133144C.1
cctcgagccggccggaaaacaccttctcgacgcgcctcagaaagttcggaatcgtcgagcacggccgcctcccatctcggcctcccgtcgccaaatgcaatatcatgacaagtgtgaaggcaggaccaagctaaccaaaccactgcccttcactaattcgatgaacagatccagctgagctctatcatctctgaaagtataccgagccacaacatatgcccatctgtctcagcttatgagaggagattaggcacaaggaactacatgacccgaagccgtttgcgacccttctgtgtctgatagaggtgaaatcaatggaccaagaaaggataccccgcgtctgtgctaatgctcctgatgacaaaagaagcaagaacgtcctgaatgatctcatgatgcgccgggaatcagctgttgtcttcatagactgctgctgctcccatcgagcgtgtgaagctgcttattctcaagctgaatgagatgattatccctggtcagatatcatagacgaacaatgtgattgtggact

SEQ ID NO: 36340 - DNA, 276 bp, Zea mays
  Clone ID: MRT4577_133145C.1
aactggaatggagtggttattatcacaaaatgaccttaaaagtcaagtagtgcctaggtccagtttactggaatgcactgtctagcatcacaagacgacctgaaaattttcttaggtgtacggtgcataggcagttggtagtctttaggctctttgaggtgcccgaagggagtctattgatctgatcatcctctatggtgaccgaacatagacagttagcccaccttgtattaaaagtttgccgaacttaaatatttaatttgtatgatgtgggct

SEQ ID NO: 36341 - DNA, 206 bp, Zea mays
  Clone ID: MRT4577_133146C.1
gtcagagtcaccattcgcttagatccacacgggttggtttcagtcgaatctaccgttttgctaaatgattatcaaacgaatggatgttctactgaccatatggaatgtggatagcacttgtgatgagatttgtcacaagtctagaacgtgtaaggtctatccagcggcattaactgccgatcttctttgactatatggtgcaatga

SEQ ID NO: 36342 - DNA, 549 bp, Zea mays
  Clone ID: MRT4577_133147C.1
gcatcaaatagtttccaagcaattcctataaacttaatgcacatttgactagacttaagtgtataaaagtctttttaaaaatacaatgaaggggtaaatacatcggggcttgcctttgttgcggagacggaggtctaaatccctctattaaaccccagttagatggctccatccacttgatgagcaggcattggagtagagtcctctttagcaaccacttcatcttgaatcttcgctctttattttgggagctctacaggaaatgacatgaacatgaatgcttatgcttatgttgtttgcaaataaaatactataaaacatcacaagactatacttcttctcaattccacatgagggctcgacatactcccctactaggagttgttcctctataatcactctttatctttgtttcaatggctaccagctgaccccaaacagatctcaagttgaacaccaacttgaggtgaaaacacaaaaactcaaattcaggtaactgaaaaagaattgaaccgaattcagtttcagatactgaaactttacataatc

SEQ ID NO: 36343 - DNA, 229 bp, Zea mays
  Clone ID: MRT4577_133148C.1
gcacgagagaaggccggccgccccggcaaggcggccaagacgtcggccaaggccacgccagcgaagaaggcgccggtggccaagaagcccgcggccgccgccaacaacgcgccggtagccaacaaggccgctccggcgaacaaggcggctgccactgcccgaaaagcgccgtctcggaaggccaacaagtagaggacgggtaggcgtcggacaaatgtagggtttggtt

SEQ ID NO: 36344 - DNA, 797 bp, Zea mays
  Clone ID: MRT4577_133149C.1
cattgggtacctcgaggccggccgggcttctctctcctcagtcagttcctcctactcccgatccattcgcagagggcagcagccacctcctctccccgcggccgagctcgcgcctcgcccgccgcctgaactcgtcttgcctgcggccgatctcccccctccgttcgccgcgccgcaacccggagaggagaccgcgctcggtcgagcaccccctggggcagcgtcctcgcgaccagctccggcgcggcgtccgccctcagcagcccgggtgtccccgggaacgtctccggcgcggccggcacacagctcgacaggcttttcagttcagtgcagtgtaccaagattctctgttaatttgtgtatgagatcagttaactgataaagacatgtgaagaaccagtgatcagtaatctgtacgcttcagattgtagtatccttgagatggatggaagagaatcaggcttatggtaaatcctggtgaatattcatgggaggtcagcaagttctggcctgactaagactagtaaaaatacggtgcttcatctcagatcatcaatggtgagaatgaggttcccgaaacgttatataatagtattgttgacattcatctgcacaaatgtttgctacattgagcgtgtgggtttctcaattacctatactgttgcagctgatgccatcggtgtgaatcaagccaacaagggcatgatactctctatgttctattatgggtatgttttatcacagattcctggtggatgggcagcacagagaaaaggaggtagacgtgtcctgctact

SEQ ID NO: 36345 - DNA, 522 bp, Zea mays
  unsure (1)..(522): unsure at all n locations
  Clone ID: MRT4577_13314C.1
cgaggctggccgggacaagctcgacacccacccagctcgctcgtcccatctgatcagggcgagcacctaggagcgccctgcgcgatcactcactgtagagtgtggggaggggtctgtctctcttggggggtgggtgcaacgggcatggggacgtcctctcctggggtgcccttgctgctgctgtgcctgggcgtgctggggtcctgctccttcncggggggcagctggggccangagctggacatcacgtggggcgacgggcggggcaagggccttgacaacgggcgggtgctgacgctgtcnctggaccggacgtgcggctccggggtccagtgcccggacgaggacctgtgcggcaagatcgacatgcagctgcggggtgggccnngcaactccgccgggaccgggaccggctactaccgtggcgggcaggggcgggcgcaccacgagatcgacttcgagttcctgggcaacgggtgcggggagccctacacgctggacaccaacgtgggcacgcggggg

SEQ ID NO: 36346 - DNA, 1601 bp, Zea mays
  Clone ID: MRT4577_133150C.1
ccacgcgtgcgcggccagaccccgaccgcccgggtccggccgtgcagctctgtgctcgccattgccctcggttgcctgccctcggtgatctgtggcagcggctggtgcccgtcaccgctccccccgctgcctcgccttgcggtaaaaagaacagataaaattggtgattattctggttcatcgaagtggggaaagaaacctgttagtctagatgacgaccgcaggagtacatatgatcagcactattcacgtaatatctttctcggtattcggctcgaggacgagaggaaactactggtgccagtaggggttcagcagccacatgcatatgctaggagcttggcacgatttgcatcaaaattgggcccagttggctgggatgtggcagcaaatcgtatcagaagggcactcccccctgggacaagtttcggcccaggatgggttgtagatggtgaaccacctcaaaactctcagtgggctcctgcagcatcgactaatccctcctctgagcccactgctccacccaatatgccatccaagaatgatgtactcgatcacaagtctggaccgtcttctaatggggatgttactgctgaggagcatttaattagaactcaaacagtggcttctacatcagcaagctttgataagagctctgacatttccagtaaagtaaccaagcttgagaacggagttaccgagtcatgtggtggtacggacaatacgggatcatcagcgcctccaatgcagcaacacagccacaatcgagaaatccactctaacatcaatggctttgctgctatgtcgaacgccatgagtcagtacgcggggcaagggttatttggatcaggcattcatatgacacacgcccaagtgcttgggatgttttctggcatgaatggcaaagtcaatggctatatccataggcacccagtaactgctgatagtcttaaaacagcaggacagaacggagatgttggaaaggccactgtgaaccccgtgcaaggcgcaggtcaggatccaaagaccgcgaccgaaaatagctctgctcacccaggcttgaattccagagcccagtcatcaggttcctcgcctaggggaaagctggcaaatccgaagcaccctgatctggctttgcagctatgagcgcggtagtaggcattgacatagtttggtttagtactgtggtctgcgacagaggcatgagctcctcgacactgctcctccgggcctaattctcaagcttccggcactctgatagacatttgtagcttgccaagccgttgaagaggtaacagatggttggattgttgtcagagaataataacgcaaagcagcggttgcaggaggcggcggcggaacaccatgtaggccccccattttaatcatttgacccccagtgagtttgttgtaaaagggtagggtagcttctgtacaggttctaatcttattggagatgacagtgtttcggatgaggcggccgccgattagtaacttctataggaggaagtatacaggcgaaaaaggcagtgaataattgtgccttttgaaatgttcgaacggccgattggcggcatgttgctgttgttttgtttcttgtg

SEQ ID NO: 36347 - DNA, 334 bp, Zea mays
  Clone ID: MRT4577_133151C.1
cccctctcgcttcaccaaggtggaccccccattgtatggtgccggcaaatcctctttgttgacgcctatccattatccccaccaaattctcccaatgatccctcaacgctatcccaataaaatattcggcgacgctcttacatcactaacccctgcccccttcacatgtcccaaacctactagccatgctcaccgtaccaccatactcttccattagcgcccgaggggatcactaatcaccccctttcttcttacatctgcacacaccaccatccactcccaactataaactctccaactcctgcccttatatctaacctcaatgagctttcaa

SEQ ID NO: 36348 - DNA, 922 bp, Zea mays
  unsure (1)..(922): unsure at all n locations
  Clone ID: MRT4577_133152C.1
cccgtccaggcccagggtgtgtgtgtgctgctaaaccaccaaggtcgaagtatcccttactgcttggtatacgtacgagtagcgtgtccctgtccattgtacgtacgtcgatggctgaggaggtgccaacgacgccgccgccggcaccattgtacgtcgatggctgtccgggatgcgccatggaccggaagaaggcggccaacaagggcatcccctacaaggagttcttcttcgtcgccgtcaccaccattgcctcggctttgccaatatcgtccctgtttcccttcttgtatttcatgatcgaagatctacacgtggccaaaaaagaacaagatattggactgtacgctggttttcttggtgcatcttactttgtcggtcgatttttggtctcgttcttctggggtgtggtggctgatcgtgtcggaaggaagcccatcattatattttcagtcgcttcagtggttgtattcaacacactgtttggattaagtgtacaatattggatggccatcaccacaagattgcttctaggtgctctcaatggcatgcttgcaccaataaaggcttactcaatcgagatttgtcgacctgagcaccatgctcttgggttatcagttgtaagcacggcttggggcctaagtcttattgttggcccgtccattggaggctacttggcgcagcctgcacgggcatatccaaacgtattctctgaggaatcgattnttgggaggttcccgtatctgctgccatgcctaagtatctccattttttctgctgtcggtctaggtagctgcatatggttacccgagacactccttaacctaagaatttagacaccgaatttaaatgtcccgaaccctaaagacctcccaaacaaaaaacttaaaagccggccagagtttatattaaaacctgccct

SEQ ID NO: 36349 - DNA, 728 bp, Zea mays
  unsure (1)..(728): unsure at all n locations
  Clone ID: MRT4577_133153C.1
gccggccgggctccggagcgggtgcagtgtgcagcagtaggactgccgactcgccattgcatcgggggcccagctcgccctgggctctcgcaaccagtggcctctggccatgagtcagcagctgcgtgtggccatggaggacgccggcgagggaggcagaggggagtacaccaaggacggctccgtcgacctccacggcaaccccgtcctccgctccaagcgcggcggctggaccgcctgcaccttcatcgtcgtgtacgagctcttcgagcgaatggcgtactacggcgtggcggcgaacctggtggtgtacctgacggagcggctgcaccagggcaccgtccaggccgccaacaacgtcaccaactggtcgggcaccgtcttcctcacgccgctcctcggcagcatgttgagcagcgccatcctcgccgccgtggagcgggtgacggcccggcgcgggacgccgtgggtgaccgacgacctcaacgcgtcgcacctcgactggtactacgcgttcctcgccgtgctggctgcggccaacctgtgcgccttcgtggcgctgagccgcgggtactcgtacagggcggaggccatcggcgtcacggcgagagtgcactcggagccggtggtggcgccgtaacaagtgctttcacatgcacggnttttagctcgtagtacgtagtacgtacgtgattgtgaccatcaactgaactcacacgcatgcagct

SEQ ID NO: 36350 - DNA, 617 bp, Zea mays
  Clone ID: MRT4577_133154C.1
ttttttttttttttttagagatgattgttgcatgtgtagacaaggggagttttgtataactctaagaagggccaggtggggccccttgctgggttacaacagttcacagtctgagtactttcttactcatgtttcgggcaggaactattgtgatcgacggtgtgcttcctgggacactctcctggcccactggtgtcttctacctttttacatgtccagcaaaccatgttaagttcggtggtgagtttttcttggcagcgttccccgaccacgacatggtgctcggcgcacgtgattagcctgttacaaggggcgtctgtgatgtataactcttgcaacatggtcccgcattttggacaccccatgtcggtttcccaccacagccggttagtcaacgcgacgaagcccatcagacaagccatgtaccacaacaatgcaatcacgttcatggcgctgcgaacaggaccttggttggggacttgggagggaggtttcggtggctgtacgcttgctgcgaccacagtcgattactgggtgcgcgggctgatcgaagcgaacgacgggccacgggctcgaaaccaggctgacagtgggcaactagcgaaggcggagttggg

SEQ ID NO: 36351 - DNA, 583 bp, Zea mays
  Clone ID: MRT4577_133155C.1
ggccgcttttttttttttttttttcttttttttttttttttttttttttttttttttttttttttttttttttttttttttttttttttttttttttttttttaagggggcccgaaaagaaatgggctaaccaagcttaaaaagggccccggggaaccaacaccccgacgactgggctccaaaaaacaacaaggcccccccccagaagaggggccattttaaaaaaaaccccccgcgagggcccgggccccgaaattccttacccaaaaaacccaaaggcaaggggggggaaaaaaggacaggcttttgaccagggggcccaacaaaaaaacccccaactttcaggaaaagagagcgggtttgcttgggggccaactaacaccaggccccggcttataattggtccccctacttttttccagggggggggtttcctttcacggaaaaatccggggccctagggaaaaaaaaattggtctttgcagaaaaagggaaatgcttataaaaaccctggctccaataaaaagaaacccgggaagcaaaaaaagagccctcccgattgaatgccctgcatgggaggggg

SEQ ID NO: 36352 - DNA, 1863 bp, Zea mays
  Clone ID: MRT4577_133156C.1
gcgggtgcagtgtgcagcagcaggactgccgactcgccattgcatcggcccagctcgccctgggctctcgccaccagtggcctctggtcatgagtcagcagctgcgtgtggccatggaggacgccgtcgccggcgagggaggcagaggggagtacaccaaggacggctccgtcgacctccacggcaaccccgtcctccgctccaagcgcggcggctggaccgcctgcaccttcatcgtcgtgtacgagctcttcgagcgaatggcgtactacggcgtggcggcgaacctggtggtgtacctgacggagcggctgcaccagggcaccgtccaggccgccaacaacgtcaccaactggtcgggcaccgtcttcctcacgccgctcctcggggccttcgtcgccgacgcctaccttggccgctactggaccttcgtcgccggctctgccgtctacctaatgggaatgctgctgctgacgctggcggtctccgtgccggcactgaagccgcctccctgcgaccccggcgccggcgccacctgcccgcgcgcgtcggcgctgcagctgggcgtctacttcggggggctgtacaccatcgcgctgggacacggtggcacgaagcccaacatctcgaccatcggcgccgaccagttcgacgaattccacccggcagagcggctgcggaagctctccttcttcaactggtggatgttcaccgtgttcacgggcatcctcttctccaccaccgtgctggtgtacctccaggacaacgtgagctggtcgtgggggtacggcgtgcccacgctggcgctcgcggcctcggtcgccgtcttcctcgccggcacgccgctgtaccggcacacgcgtccgcatgttcgtgccgtgcgcggtgatggcgcaggtgggcacgctgttcgtgaagcagggcgtgacgctggaccgccgcgtcgggcgcggctcgttccgggtgcctcccgccagcctcggcgcggtggtgacgctgacgatgctcgtctgcgtggcggtctacgaccgggccctcgtccccgccgtccgaaggcgcaccgagaacccgcgcgggatcacgctgctgcagcgcatcggcgccgggctggtcctccaggtggcgacgatggcggcgacggcggcggtggagagccggaggctgagcttcgcgagcaggagccacggcgccacggcaggcggcgagctgccgctgaccatcttcgtcctgctcccgcagttcgtgctgatgggcgccgccgacgcgttcctggtggtggggcagatagagttcttctacgaccaggcacccgagagcatgaagagcctcggcacggccatgtccctgacggcgtacggcgtcggcagcatgttgagcagcgccatcctcgccgccgtggagcgggtgacggcccggcgcgggacgccgtgggtgaccgacgacctcaacgcgtcgcacctcgactggtactacgcgttcctcgccgtgctggctgcggccaacctgggcgccttcgtggcgctgagccgcgggtactcgtacagggcggaggccatcggcgtcacggcgagagtgcactcggagccggtggtggcgccgtaacaagtgcttccacatgcacggtttttagctcgtagtacgtagtacgtacgtgattgtgaccatcaactgaactcaccacgcatgcagctagcggagcaagtacgttcttcagacagattcgcatggtgcatctgtagcatgcagtgactggcattcaaaaatacagtagtttcatcgtgacgatcgctagcattcaaaaattgaagcagtgcacatgtagaagtgtcgttgccaaatgccaaagcccttatccaatttttt

SEQ ID NO: 36353 - DNA, 180 bp, Zea mays
  Clone ID: MRT4577_133157C.1
ggggaaggaaaatttgtttttaaaataataaaaaggctcccttatttaaaaaatttggggaaaaaaagttcggaggggctaaaaaagtttaaaatttccttttggggcccaccaaacccatgactaaggccagggatgaacttccaaggatttaaaagggtaaaagccattttcaaaaac

SEQ ID NO: 36354 - DNA, 562 bp, Zea mays
  Clone ID: MRT4577_133159C.1
ttttttttttttttttataacaacatatttttatttctaaaactgaagtttattacatagaaagagttacatttattaccaagtcctgatatactcaaagtgcaaaacttattacaatagcaggaaggtaggaaccctccaaagcttatacacaagcctaactaatcctactctagaactagaaacaccctccagcctcaggaacacctcgagtacttcttatcaccatccaagattcctatgctcgcgtgaagttgcttggagaaaacacaggttgttcggtccttggtgaagctgcccacggctccggtacgcggtggctcggtcatgttccaggcaccacaaagtagtagaattggaaataacaacactgtgtgtttcactggtgaatggagagtatagaacaggcacaacccggacaaacacctgtttgcgttgatctggccaaggcgaggtgggcaaatctggtgctacggtcaccactggtagaccatcacatgcaaactctaggactaggcagacttagcggctggggagaggagctttggcttgcctcgcgccg

SEQ ID NO: 36355 - DNA, 461 bp, Zea mays
  Clone ID: MRT4577_13315C.1
cagatcgctcgtcccatctgatcaggtcgagcacctagtagcgacctgctcgatcatcagtggggagtgtcggtaggagtgtgtctctcttggtggctgtttgcaacggtcatggcaacgtcctctcgtacggtgcccttgctgctgctgtgcctgggcgtgctggtgtcctgctccttctccgggggcagcttggaccacgagctggacatcacgtggggcaacaggcggggcaaggtccttgacaacgggcgggtgatgacgctgttgctggacctgacgttcggctccgggttccagtcccggcacgagtacctgttcggcaagatcgacatgcagatggaggtggtgccgggcaactccgccggcaccgtcaccggctactacctgtcgtactagggcggcgcgcacgacgagatccactacgagttcctgggcaacgtgttcggcgagccctacac

SEQ ID NO: 36356 - DNA, 221 bp, Zea mays
  Clone ID: MRT4577_133160C.1
ttgggggggttttttttaagataaatgccgatacgcacaaaaagttcaacaggagaggaaacttgcaaaacggataacgacgagacaagctggcaattgaagctcggcagtgcatatagacagtcggaaacaccgggcgttgaaaagaaaaggaatcggctgacaaaatgtggggaaataatccctgttacaaaatacataaacccttctactgggttggg

SEQ ID NO: 36357 - DNA, 594 bp, Zea mays
  Clone ID: MRT4577_133161C.1
aacaaaagcttttccttccaattttttaatttcatcaataacaaattggggggtacccccaaaatgggggacataacatagcccacctattttaataaaaaaaaaaaagggaaaaaaaacccaaaaacccctccctccaaaggccctatccttccggccttggccactaacaaaaaaatgaatttatttgaacaaaaaaatttgaagttttttttgggggccgttttgccccacttcgcaagcctaaactcaaaaaaaaaaccccccccccttttacggttttttggggccccctgtccggggaaaaaaaattatactatgggctgcaattcaaaccaaaaaccctgttcggctttaaattttggggaggaggcaacaactttttcgaaggaaaatccaaaacccggacccggacccaatcttggtaaaacaggacctttattttttcagccccaactgcaaaaattgggagcaagggccccccaaatctcagttcagggatcattttttttttccaccataaacatggacaatttgccaaaaaaaccccctttcctttggttaaatccacaaggagaaaaaatcctggcttaa

SEQ ID NO: 36358 - DNA, 661 bp, Zea mays
  Clone ID: MRT4577_133162C.1
gaaagagttacatttattacaagtcctgatatactcaaagtgcaaaacttattacaatagcaggaaggtaggaaccctccaaagcttatacacaagcctaactaatcctactctagaactagaaacaccctccagcctcaggaacacctcgagtacttcttatcacctttgttgcagagacggaattctagatccctctatccaatacccagttagctggctccttcacttatcagcagccactggagtagactcctcctttcaacaccacttcatctggagtcttcacccttatgttgggagctcatccaagattcctatgctcgcgtgaagttgcttggagaaaacacaggttgttcggtccttggtgaagctgcccacggctccggtacgcggtggctcggtcatgttccaggcaccacaaagtagtagaattggaaataacaacactgtgtgtttcactggtgaatggagagtatagaacaggcacaacccggacaaacacctgtttgcgttgatctggccaaggcgaggtgggcaaatctggtgctacggtcaccactggtagaccatcacatgcaaactctaggactaggcagacttagcggctggggagaggagctttggcttgcaacatagtccatagagacaccaaagaagc

SEQ ID NO: 36359 - DNA, 1050 bp, Zea mays
  Clone ID: MRT4577_133163C.1
cattgggtacctcgaggccggccgggctcgtctgtgcccccagccgcaacacagcgcagacggcggcggctgctagcctgcaacgaacaaaccagcgagcgagcgggcggaggaggagatgccgggaaaggggcagcggcggagggagaagaacttccgggcggcgcacggcggggtaccgtgcctgcccccgccgccaaagcagagggagctcgaggccatcccgactaaactccgccgcctcatcgccttccagaacaagcacaacgccaatgctgacgcgtcctcaggaggtgctcccaagaagcaagacgatgggttaaggaagaacaagctagcaacagacaaggcaaaggacaagaaaaccaagaagcaggcattggtggttcctgctgatagcaaagcatcagatattaaaggtaatgataaacgttcagctgccaatgaggatgtgaatgcagagggaagtaaggggaagagaaagaggggaaatgttaaggaccttcgtttcgaggaactggacaagaacatctcagcctcgaagaagcagaggaggaagcagcacctggatgagaagaaaaagaagcgcaaggacaataagacagaaactctaccagactttcctgggcgcgagaaagtcaaatttggtgaagttgttgtggctccaccaaaattgtcattcccgaaggtgaagagtgcttcagatgcttctcgcgagatgctgaggaaagaggcaattgagaattacagatatatcaaaggctggacatcgaggcctggactgcagcttccaacgctagcagaatcacaatagatattttctctgtttatcgttgtcaaacttactctgtttatatcagagaagtttagagtatcaattgtgtaatttgtactctcatgtaggcaattccgaacaaatattcctgtctggatttcctctcttcttttgtgtgtttgtttttccaattggatcattgttgtgctcttgccaatagggtattatgtgattaagaaagaaaatgctgactgtttgatcagtggcttggattt

SEQ ID NO: 36360 - DNA, 1485 bp, Zea mays
  Clone ID: MRT4577_133164C.1
gtagagctgctctggggtggaggccggaaaacgccgcagcggcactgcggtagcagcatcgcgcggcaagctcacctcatccctctttcaccccacctctgcaattgcaagcaaagctccggcctccggatcaggatcacactgaccaccgcgagcgcgtgccggcgtccagtggttacgtcgagggagcctaggctagcgaggaacaagcagccaccagcccgccacgatgctcgtgaggagcgcctccacgccggtcctcggcgcgctgcacccttccggctgccactcgccggcggtctcctccccggccgtgcacttcgccgagtctccggcgtcggccgcctaccacgcgccgcccatctcctgccacctgggcgggcccgggtccgggtccgaccacgagcgctcgcgcagccgcggcgccggcgccggcatgcgccgcacgtgctccgaggacaacctcgcgtctctggccggcgggcgcgcggacgaccacgaccaccaccaccttctcctcccgccgtccggcaagggcgcgccacgggcgcggccggtgccgctcgagaccatccagtcgttcaggggcccgcatgcgtccaccgacgacgaagaggaggaagacgacgacgacgaagacgcgtacgaggtggagcgggagctgcgcttcggccagttcagctttgccggcggcgcctactcgcaggagcacccgctgttcctggccaggggcctcggcatcgaccgcctcggctcgggcctcctcagcgccgacggcggcggcggcgttcggcggcagcgacggcagcgggagcggcggcggcggcgggaatttggtgacgtcggggaacggaggggaccgctccggcatcgagacgcactacaagaagatgatcgaggaggacccctgcaacggcctctttctcaggaactacgcacagttcctgtaccaggtgaaaggggactacaggagggcagacgagtactactcccgcgcgatcctcgccgaccccgacgacggcgagctcctgtcggagtacgccaagctggtctgggaggtgcaccgcgacgaggaccgcgcctccagctacttcgagcgggcggccaaggcgtccccgcagaacagccacgtgctcgccgcgcacgccgcgttcctgtgggacacggacgacgaggagggcggcgccgacgcgctcagctacgcggccttcgctcagccggcgcactcgtctctggcttcggcgacggcaacaacctgaactctctcgccatctcacgagtctcgagagcggttcctccgcagtcgaaatggagcgtgacagtggcctctgctcgtctctgtctgtagtagcataccaataatactactcgcgaactctctttctgagcaaacagattccatagcgccgtgtagccacgcgatgattttgcgagcgagttcgtctactagtactaaaaaaaaaaaaaaaaaaaaactcgagagta

SEQ ID NO: 36361 - DNA, 320 bp, Zea mays
  unsure (1)..(320): unsure at all n locations
  Clone ID: MRT4577_133165C.1
gcggcggctcagtcctccaccgattcgatggctccgacacctccgacgacgtcctcgtcgactcgttatagaccgnagntacggttggatattatgagattggatgtgttctgtagataaagttttttatagtgaaaaaatattgtttttgattttgtatatatttaatatttantattaaaaaaaaaaataattataaaaaatattaatataaatattattttatttttatttttattttttttttttatatataattttatanntaaataaaaaaaataaaaattatataattatttttttttttattttttttttta

SEQ ID NO: 36362 - DNA, 459 bp, Zea mays
  Clone ID: MRT4577_133166C.1
tctattaaaaaaacattatggtcagcaatgaaagatagtaaaagatagaaaaagaagtgattccccaaaacgatggttcagctaactgcgcaattcctagatgtttgtacttgccgcaacaaggacttgttcaattttttttactcagcgatgcttagaaactggagcagcaaaagtaagaaggttgggtagcaaaccgttgattatttaattaattgcaacagtacgtatatacttttgaagttttgatgtcttgaaaggttcaccttaacaacatagagtaaagtgagattgtttccccccaaaaaaatgtctactgttcatagattttaaaattaggtatgcaggtcattctacaatgccatagaaggatctaatggtaaaactaccatgggaaaatggctactataaccctgaccttgaattttaacctgttaacagaaccattattttttaaag

SEQ ID NO: 36363 - DNA, 669 bp, Zea mays
  Clone ID: MRT4577_133167C.1
gccggccggccggcccgtcattctcatcacactcgatcgcagtttgcagaaagctagaagacacaagaacatggcgtccaagcgactcctcgtgctagtagctctcctgctcgccgccgttttccttgccgtctcagcagcagctaacgacgaccaagcccaaccgaggaaggacgacggcggcgagaacaaagccgacgtgcaggactaccgtggcggcggcggcggctggcgcggtgggggtggctaccccggccgtggctacccgggcgggggcggctaccctggcggcggccgcggcggttactgcaggtgggggtgctgcaaccgcgggtactatggcggctgccggtgctgctcgcgcgccgacgaggtcccggagcccatgtaccgcccggagcccaccgaggtccacaactgaagccaagccacacatcgatctacaaagatgcatggacgacgactcttatcgtagctaattaataagcactgcatccatgtccacaatagctagggccctagccctactatacgtcgtcagcagaaagtctggttttgatttcaataataagatgcacctatatgtgtgtgttatatgaaaaaaaaaaaaaaaaaaaaaaaaaaaaaaaaaaaaaaaaaaaagggcggcgggccgcgggtaccaactag

SEQ ID NO: 36364 - DNA, 150 bp, Zea mays
  Clone ID: MRT4577_133168C.1
agtgtcatatagcagcactcggcaaagcatactttgccgagtgtcataactgaacactcagcaaagcatatttttattttttttattttttgcaaccaaactttttgtggtgtggccctagcctatgtgtatctacatgtatctgcagaa

SEQ ID NO: 36365 - DNA, 1028 bp, Zea mays
  unsure (1)..(1028): unsure at all n locations
  Clone ID: MRT4577_133169C.1
ctcgagggcggccgggccgggggaccaaactcgatcgcagttgatccagtacacaattgcagagagctagaagacacaagaccatggcgtccaagcgactcctcgtgctagctctcctgctcgccgccgttttccttgccgtctcaggagcagctaacgacgaccaagcccaaccgaggaaggacggcggcgagaacaaagccgacgtgcaggactaccgtggcggcggcggcggctggcgcggtgggggtggctaccccggccgtggctacccgggcgggggcggctaccctggcggcggccgcggcggttactgcaggtgggggtgctgcaaccgcgggtactatggcggctgccggtgctgctcgcgcgccgacgaggtcccggagcccatgtaccgcccggagcccaccgaggtccacaactgaagccgagccacacatcgatctacaaagatgcatggacgacgactcttatcttagctaattaataagcactacatccatgcatgtccacaatagggccctagccctactatactatacgtcgtcagcagaaagtctggttttgatttcaataataagatgcacctatatgtgtgtgttacatgtacgccgttgtcttaattactgtgtggtgattggactcactagtagctattgtcgtcgtgttgtcgtctctcggtgagtcggtagcgttacttgctcttggaccaaatgctgcgtttaatctgtaaaactaccaaattatactagacacgtgttgcgtttaaaaaaaaaaaaaaaaaaaaaaaaaaaagctcgtgcgcggcccgctcgctccccctccttctttactccctctcctcctctcgctttccttttccccctcccccttttttccccccctttcctttttttccttcccttccttcccttttctttcccccctcttaccccccccccatccccttctttttgggcggccgcccttnttttttttttttttccactaatgttgaacaggtaaagtaaataatcntaattgct

SEQ ID NO: 36366 - DNA, 498 bp, Zea mays
  unsure (1)..(498): unsure at all n locations
  Clone ID: MRT4577_13316C.1
ttgcttggtccctagtggtgggggggggtgggtggtaagttcgttcccnanngggggggggnnnnnnnnggcgnnngggggcgtaattcaaaaaaaaaaaaaaaaaaggggggccgcccttttttttttttttttttggggcgccctccgtttgggttcttgacatgggggggggcgggggggggctttcttcttgccctggcgaaattttttgtccaatgcccgggttgggggaaatccttggccggggaggggggaaggggcctcttccaaaaaagggtttcttgtgaaccacgggggccccccgatggggcctctggttcagaagcaaagcctcggggttgggccggtggtaaagaccccgggcgggggccccggcgaacgggttgcgggcggcgccgtggccatggcctcgcttggtctactatttgggttcgtccccggcgggccaggtggcggggctgcccccccggggcctggggttgctcttgggggggg

SEQ ID NO: 36367 - DNA, 700 bp, Zea mays
  unsure (1)..(700): unsure at all n locations
  Clone ID: MRT4577_133170C.1
actacgtgtccgcccacgcgtccgcccacgcgtccggttctagatcgcgagcggccgttctttttttttttttacgcaattttttttttagtataatttggtagttttacagattaaacgcagcatttggtccaagagcaagtactacgctacaccgactcaccgagagacgacaacacgacgacaatagctactagtgagtccaatcaccacacagtaattaagacaacggcgtacatataacacacacatataggtgcatcttattattgaaatcaaaaccagactttctgctgacgacgtatagtagggctagggccctagctattgtggacatggatgcagtgcttattaattagctacgataagagtcgtcgtccatgcatctttgtagatcgatgtgtggcttggcttcagttgtggacctcggtgggctccgggcggtacatgggctccgggacctcgtcggcgcgcgagcagcaccggcagccgccatagtacccgcggttgcagcacccccacctgcagtaaccgccgcggccgccgccagggtagccgcccccgcccgggtagccacggccggggtagccacccccaccgngccagccgccgccgccgccacggtagtcctgcacgtcggctttgttctcgccgccgtcgtccttcctcggttgggcttggtcgtcgttagctgctgctg

SEQ ID NO: 36368 - DNA, 1100 bp, Zea mays
  Clone ID: MRT4577_133171C.1
ttttgctttaaaaaaaaaaaaaaaaaaaaaaaaaaaaaaaaaaaaaaaaaaaaaaaaaaaaaaaaaaaccagtcgcgatcctttcccagattaccgactttgattagactgtttgtccaagcgactcctcgtgctagtagctctcctgctcgccgccgcgtgtccgcgccggctcacactcgatcgcagttgatccagtacacaattgcagagagctagaagacacaagaacatggcgtccaagcgactcctcgtgctagtagctctcctgctcgccgccgttttccttgccgtctcaggagcagctaacgacgaccaagcccaaccgaggaaggacggcggcgagaacaaagccgacgtgcaggactaccgtggcggcggcggcggctggcgcggtgggggtggctaccccggcgggggcggctaccccggccgtggctaccccggcgggggcggctaccctggcggcggccgcggcggttactgcaggtgggggtgctgcaaccgcgggtactatggcggctgccggtgctgctcgcgcgccgacgaggtcccggagcccatgtaccgcccggagcccaccgaggtccacaactgaagccgagccacacatcgatctacaaagatgcatggacgacgactcttatcgtagctaattaataagcactacatccatgtccacaatagggccctagccctactatacgtcgtcagcagaaagtctggtttttatttgaataataagatgcacctatatgtgcgtgttatatgtacgctgttgtcttaattactgtgtggtgattggactcactagtagctattgtcgtcgtgttgtcgtctctcggtgagtcggtgtagcgtagtacttgctcttggaccaaatgctgcgtttaatctgtaaaactaccttataaaaaaagaaattatactagacaagaaaaaaaaaaaaaaaaagcccgccgaaccccgcccgaagtcaccgagctgagctccaaagtctagcagctacaggtccccctatccctactatactatacgtcgtcagcagaaagtctgcttttgatttccataataagatgcacccatatgtgtgtgtttct

SEQ ID NO: 36369 - DNA, 316 bp, Zea mays
  Clone ID: MRT4577_133172C.1
tgagcgacggcatcattggtgtcgggtcatcggggacggtgtactgtgtgaagatgtcgtacggggatgtcattgtggtgaagtagctgtggcaaccgtcggcgcagtaggagggtggagctcaggcgccggaggagccatcaaagcggaaggacgtggcagtcgcggacgacggcaacaggagcatgtacgccgtggtggtggtgctgggtcacctccggcaccgtaacatcgtccggctgttggggtggtgcatcgacggcgatgcgacgctgctgctctacgagtacatgtcgtacggcagcctggacgagct

SEQ ID NO: 36370 - DNA, 117 bp, Zea mays
  Clone ID: MRT4577_133173C.1
gtcatccaagcaggcgactcatgctggggtccctgtgccggtcacgagcagtttcaggatatgccctaccaaccgttcagcaatgtatatcgactaggaaaggttgctgactggact

SEQ ID NO: 36371 - DNA, 360 bp, Zea mays
  Clone ID: MRT4577_133174C.1
gcgcgaacgcgaggacggacaccagggctgacgcgtacgtttcgagcattcagaagacgggatgtcttactgctagccagtacatgacgacaattgttctgatgctattaccagtgcgcgaccttgttgcctactttgagaaacaaccaaatgttttatttattcaactgtgttcatttgattttagtgccattattccacagctcctcccacctgttagttgaatgggtcgcgtacacgttccgccgcggcgccacgcacggcctgagggggccccggccttcgctggcggcgacacccttaagattgcgaacaaggggggccgcggggccaaggaacaacaacaaggccccccgcggg

SEQ ID NO: 36372 - DNA, 330 bp, Zea mays
  unsure (1)..(330): unsure at all n locations
  Clone ID: MRT4577_133175C.1
gggcagccccaggacccccccccacgccggaccagccccagacccccacgcgagccgcccgccccaccccgacgccggcgccaccacaccccgcggcacggacgaccaccaccgcccccggcacaaccgcccacagcagacccacggnacangaaccgcacacgagccacgcaagacgagcggaaccgaccgccaagcgacgccgaccgacgaagcnaaaacggaggaaccaaccaagcgccagcacgcaagacgcacaccaagcggccgccaaccaacaacacgaacaaagcacaaccccaggcaagccccggagcaacagccaccaca

SEQ ID NO: 36373 - DNA, 384 bp, Zea mays
  Clone ID: MRT4577_133176C.1
ctagccgctgcgggtctgcctgcaccgcgtcgcgtggccactgcaccgacccgccacagccccactagcctgactccaccgccaccctaggtataacctctatttccgcatcatggtcgtagatcacgtaacccagttaggcgtctcccgttcgaaagagatacggtgtagatatgcagatctttgcatatctacaaatgtatcagtttcgaattgtccacattttttggacagcctgcggttgcgtagatggtgttagtttccatgctctactccggtccgagaaagagtttcggcgtcacctccctgttgttctccggacagtacactctctctgccaggacgtgtattcggagaacagtggtgaggtgtttctgaaatttt

SEQ ID NO: 36374 - DNA, 481 bp, Zea mays
  unsure (1)..(481): unsure at all n locations
  Clone ID: MRT4577_133177C.1
gcctgcaggtaccggtccggnnattattcccgggtcgacgagctcactagtcggcggccgccctttttttttttttttttttttttttttttttttttttttttttttttttttttttgttggtttttgaaaattttttaatatttttttttttcgggggccgggggttaaaaaatggggcggaaccgggggggccggaaaaaatttgcccactaaaaccacggcttttgggaggcttttttgttttgtaaaaaatttcgaaaagacactctgttgaatgttgtcttttaacaaaaaaagctttttttattttgtggaagggggggcatccctttgcccaatggggaattgggttgggggaacccgggggccctctagggccccggggcaaaaaaccccgaaaatattgtgggaaagaaacccctggggcctaaattggggttttataagcgaggctattgacatttttttttctttttgg

SEQ ID NO: 36375 - DNA, 464 bp, Zea mays
  unsure (1)..(464): unsure at all n locations
  Clone ID: MRT4577_133178C.1
ctcgagnctctgccggatgcgattttttcccctctcttcgttcactctatctgcgctctcncgtcttcttcctcgccttacaccttctgacatttgcgattcatttaccgtaccgtgacgacgaccgccgccctccggcctccgggtcgcccccccccccccccccccctggattcaagcccgcgccaccgcgtctccggaccgnctcggagatctgctgctgggggaggggcatataatatcatgaagtgtatagaagaggttccttttttttgtgcgtgtataatggaggaagtggaggaggcgaacagggaagncgtggagagctgccgaagggtgctagaattgatgttccatntcgatgaacacgcacaggttaggagcatagatttggggacggacgaaaaatgcaccaaggttaagaaggaggattccaatgatcacaatggaggagagggaacaaa

SEQ ID NO: 36376 - DNA, 273 bp, Zea mays
  unsure (1)..(273): unsure at all n locations
  Clone ID: MRT4577_133179C.1
ggttaagcaagtaaatgagaaggcagtagccatgtcagtcatgagtcctcgtgctactgtagttatacagctgcgagtcacagcgnttaattacgtgagtcaactctgtgtcgttactgcaggcccgcaccatttccctccgctgatgcagccgccgacgtcgtcgttcttcgagttatacatcggnccatcgcctatgtagatggcgtccgaaggaggcacgggtcagcagatggctggcatggcgccgacaagcagcccgccggtgagttc

SEQ ID NO: 36377 - DNA, 632 bp, Zea mays
  unsure (1)..(632): unsure at all n locations
  Clone ID: MRT4577_13317C.1
ctggccgggacaagctcgacacccacccagctcgctcgtcccatctgatcaggtcgagcacctaggagcgacctgctcgatcatcangtagagtgtcgggaggggtctgtctctcttggggggtgggtgcaacgggcatggggacgtcgtctcgtcgggtgcccttgctgctgctgtgcctgggcgtgctggggtcctgctccttcncggggggcagcgtgggccaggagctggacatcacgtggggcgacgggcggggcaagggccttgacaacgggcgggtgctgacgctgtcnctggaccgcacggccggctccggggtccagtgccggcacgaggacctgtgcgggaagatcgacatgcagctgcggctggggccgngcaactccgccggcaccggcaccgcctactacctgtgcgggcagggcggcgcgcacgacgagatcgacttcgagtgcctgggcaacgtggccggcgagccctacacgctgcacaccaacgtgtgcacgcgggggcaggggcagcgggagcancanttccggctctgggtcgaccccaccggcgacttccacacctactccatcctgtggaaccccaagcacgtgatcttcatggggggcgacatgcccatc

SEQ ID NO: 36378 - DNA, 548 bp, Zea mays
  Clone ID: MRT4577_133180C.1
ataaaaaaaaaaaaaaaaaaaaaaaaaaaaaaaaaaaaaaaaaaaaaaaaaaaattgttgttcctgcggccgcgcacccctccggggggactaattctggaagttcttccatcccgctgggcgcgcctctaccagccttcttttagggggcccccaattccccctttatggggacgtcttataacaatattagctgcgccgttttttaacaacgtggacggctgaaaaaaaccctggtgtcacccaaattaatctccttgcaaaacatccttttttcaccaggtggcttaataacgaagaggcccccaccgatcgtccttaccaacagttccgcctccttgatggaaaatggcccccccctgtggcgcctcattaaccgcgggggttgtggtggttacccgcagggtgaccactacatttggcagcctcctagcgcccgcttcttttgttttcttccctttctttcccgccacgttcggctgttttccccgagaagttataaatggggggcttcttttggggctcctatttagtgttttacggctcct

SEQ ID NO: 36379 - DNA, 1156 bp, Zea mays
  Clone ID: MRT4577_133181C.1
ggccgggagggcgaggcggcagggcctctccgctcctgctcctgcagtcctgctctctctctctctctcggcgtcgattgggcgaccgccgccgcctcccccaggtcttcgctgggcccgtcgccggcgacgagcacccaccaggttcggaaacattgctgacgttcacctgtaccacagtagttcagtcgagtagctgtcggactcggaacacacatgccggcgatggcaactgctcctgtgaaattctctgtggctacgaactccccatgtgtccagcctagcttgcccctgaggcgtacacctgccgccatctccttcccttgtcgtccatggtcagccgcaatgaactcatgtactggattgttgaggcgctctgacgtggttgcagccgcggggcaccacaagttgatgggatctttgaccactaacgagggactcaggtttggggtggttgtggcacggttcaatgaggtcgtgacaaatttgttactacagggtgccctggaaactttcgagcgatactctgttaaagaagaaaatataacagttgttagtgttcccggaagctttgaggttcctataacagcacaaaagcttgggaaatctggaaaatttgatgcaattctgtgcattggagctgtgattagaggtgacacaacccactatgatgctgttgcaaactcagctgcatcaggtgtactcaatgctggattatctgctggtgttccttgtgtatttggtgttctaacctgtgaagacatggatcaggcgctaaaccgcgctggtggcaaggctggaaacaagggtgctgaagctgctcttactgccattgaaatggcctttttgttccggcatcacttaggctgacgcttttgggtattttggtttctatacacgaggcaagacatcattttttcctatcaaaagttttggctaataaagcttttccgccgcggctagtataattattttcaattttgttagtccggtgctgattccccctttctttttatgagatttgaaaagctaacgagacatgtttgtaaacctggcccaatgaataattgtccccatgaacaaaatatggtcatgaataaggttgcccaaaaaaaaaaaaaaaaaaaaaaaaaaaaaaaaaaaaaaaaccaaacac

SEQ ID NO: 36380 - DNA, 273 bp, Zea mays
  Clone ID: MRT4577_133182C.1
gacagacgatggctgtgaatgtgagaaccatgtggtcgtcgatgcgggcacaggttgcgatggttgtggcgttggtgttcttggtgagcggcgcatggtgcagtcgtcgcacagtcggtccatgcaagaagatcacggtcatctatggcaaggactggctggacgctaaggcgacatggtatggcacgcgcacgggtgcatgtcccaactataaccgtgggggccgcagatacaatgacgtgaagaggcccttcttctttaacatgggcgcat

SEQ ID NO: 36381 - DNA, 1067 bp, Zea mays
  Clone ID: MRT4577_133183C.1
ttgggtacctcgaggccggccgggcccgggatacacaaaacaaaaacagagtagatagttcttgaaacttaaatcttcgccgttccactctcccccagcgatctgctcgtttccttgcaacttgcaacctcggtgctgctgatgacgctcgcgatgagcacactcgcctgccaccgcccactcccctccaaaggaggccgtggcatgtgcggcgaagaacacaaagaggaaacggagaagttctccgaacgagtccaaggatttgctgctggtgctccgaggagtgctgttcttcaggcttgcactctcacgtcaggcttgctgcttgccggagggcttctgcttcgcgaggcatcacacctagcatcaataaatggatggccaattgctgaccctacagatgtgtcaatcagttttgaaactcggcatcttgagttggttgcgggacttgtcatagtaatctcctctgcccggtacatcctgctacaaacatggccagatttcagagattccagtgaatctgcaaatagacaaatccttgcatcgctagagcctctggactacattgtcgttgcttgtctcccggggataagtgaggagttgctgtttcgaggggcgatgatgcctaccttgggattgaactggattagcgcccttattattggaaccgtttttggtgttcttcacttgggcaatggcaggaaatattcgtttgcaatctgggcaacatttgttggctttgcctatggtatgggaaccatagcttcctcgagcattgtagttccaatagcttctcactccataaacaatattatcggaggtttactttggcgccttaccaagaactcgcaaaagtagatatacataataccctcaacagtcatccctgttcagtttagactttttagtccttgatccttacaaggttgtcgtcagtattagtgtcgcatgattggttcacccaggtattttcagtagcttgcagtcagggttcattggcaataatagcaaaatgaggacgggactgctgtaaatttgtctggtgcggcaaaaggtggaaccatcgt

SEQ ID NO: 36382 - DNA, 272 bp, Zea mays
  Clone ID: MRT4577_133184C.1
aggggccaatcgggaaaccacgagaacctgttgttactgtccaaaacacaaatatttcccatcccccttttttaaaaccaaccctttcccttcaatgaaaaacaatttttttgaaataaaaaaaagcccacccaatataaattgtcttaggccctattattgaaaaaaaaactaagtaaacctttttcaaggaaacatgcaacaggcgggggttatactatccccccgtaaaaaaaattgactttccttataaataacccctattgggaaaa

SEQ ID NO: 36383 - DNA, 967 bp, Zea mays
  Clone ID: MRT4577_133185C.1
gccggccgggctaaaaaaaaatcttcgccgttccactctcccccagcgatctgctcgtttccttgcaacttgcaacctcggtgctgctgatgacgctcgcgatgagcacactcgcctgccaccgcccactcccctccaaaggttggaaatggaaactgcgaacctcggttgctacatggaaacatatgcggcctgggcgacgtaacgaggccgtggcatgcgcggcgaagaacacaaagaggaaacggagaagttctccgaacgagtcgaaggatttgctgctggtgctccgaggagtgctgttcttcaggcttgcactctcacgtcaggcttgctgcttgccggagggcttctgcttcgcgaggcatcacacctagcatcaataaatggatggccaattgctgaccctacagatgtgtcattcagttttgaaacctggcatcttgagttggttgcgggacttgtcatagtaatctcctctacccggtacatcctgctacaaacatggccagatttcagagattccagtgaatctgcaaatagacaaatcctcgcatcgctggagcctctggactacatcgtcgttgcttgtctcccggggataagtgaggagttgctgtttcgaggggcgatgatgcctaccttgggattgaactggattagcgcccttattattggaaccgtttttggtgttcttcacttgggcaatggcaggaaatattcgtttgcaatctgtaaatttgtctggtgcggcaaaaggtggaaccatcgtacgagagtgttacttgcattctgtgcggtaatctacagagtagtgttcggtaaaagcaaataaaattccaaatgtgaggatgcctctagaatcaattttagaattttgttttcacggcacatgacaaaacggaaaggacactttgctacatatgcaatacacattgagactaaggctgtctccagcaacgtcctc

SEQ ID NO: 36384 - DNA, 834 bp, Zea mays
  Clone ID: MRT4577_133186C.1
gctgtggtggccgtggcaccggaggtggtgcctcctctcaaggccgtggtgaaggactcgtgcgtcgatgctgacagcgacgagattggggctgtgaagccgcccaaggagcacgcagcagtcgccgcgcaccagttccggtggctggtgtctcaggtaagctaccctaagctcggggatttgtgttcgttagtcattccatgtgccctgacaaccttagatcattggtcaccagaagttaaggtacagggaatggtaagctttgtacacatagcgaagaatgtgaaagcaacggaattaagtttgtatgaagatgccatacttgatgcgtgctgtcagaacattcctgcagatgatgagttatggtaccaggttattgaggtatctgtgatgttgctgacattcacccagcggagcaatcctcgtagcccctggtatgatcgaatgcttagtgagatgttgggccacctggaacggcagccactaaataaagagcgtcgtgttgcatggttgacccttattgggccagtttttgatgctatgggcctcttcctgttggcacattttcgccgccttttctcactgtttttccaatggatgcacactgatgataataagacagttcttctgactttaaagcaaatacatgccattatcaagcttacctggatcaggaagtcaccttatactttgaggctggtggacgagcttgttctattatataaagaatcagccacaaggagcaaccgtgaaatcatgcgagatcatatcctggagatacttgtactgcttcagaactgcaagggacatcaatttgaggaagcttggaagaaa

SEQ ID NO: 36385 - DNA, 822 bp, Zea mays
  unsure (1)..(822): unsure at all n locations
  Clone ID: MRT4577_133187C.1
ggccgggactctccccagcgatctgctcgtttccttgcttcttgcaacctcggtgctgctgatgacgctcgcgatgagcacactcgcctgccaccgcccactcccctccaaaggttggaaatggaaactgcgaacctcggttgctacatggaaacatatgcggcctgggcgacgtaacgaggccgtggcatgcgcggcgaagaacacaaagaggaaacggagaagttctccgaacgagtcgaaggatttgctgctggtaagtgaggaagctgcttcgggcagtggaggaagtgctcctggcacaagcctcgagaccaacggcgaggatgctgctactgacgatgagatttcaggtgctccgaggagtgctgttcttcaggcttgcactctcacgtcaggcttgctgcttgccggagggcttctgcttcgcgaggcatcacacctagcatcaataaatggatggccaattgctgaccctacagatgtgtcattcagttttgaaacctggcatcttgagttggttgcgggacttgtcatagtaatctcctctacccggtacatcctgctacaaacatggccagatttcagagattccagtgaatctgcaaatagacaagtatgtagattccagtgcatcctttgcagaattatctttccagttgtctctttttgttggagctatcggtttcacagtttaacatggtgatgaagaacatagctctaacgtctcacggagggtcagcgtaatgagaagcattatgttgntaaacactgaaagatgtagntggttgtatgttctactcttttaccctaatgaaacat

SEQ ID NO: 36386 - DNA, 1322 bp, Zea mays
  Clone ID: MRT4577_133188C.1
ccggccgggaaaaaatctacccatgaccgccaccgctcgacatctcccctcctctctcgtctcgcttccggcttgttttccaccacacagaacaaaaaacagagtagatagttcttgaaactgaaatcttcgccgttccactctcccccagcgatctgctcgtttccttgcaactagcaacctcggtgctgcggatgacgctcgcgatgagcgcactcgcctgccaccgcccactccccttcaaaggttggaaatggaaactgcgaacctcggttgctacatggaaacatatgcggcctggccgacgtaacgaggccgtagcatttgcggcgaagaacacaaagaggaaacggagaagttctccgaacgagtcgaaggatttgctgttggtaagtgaggaagctgcttcgggcagtggaggaagtgctggcacaagcctcgagaccaacggcgaggatgttgctactgacgatgagatttcaggtgctccgaggagtgctgttcttcaggcttgcactctcacgtcaggcttgctgcttgccggagggcttctgcttcgcgaggcatcacacctagcatcaataaatggatggccaattgctgaccctacagatgtgtcattcagttttgaaacctggcatcttgagttggttgcgggacttgtcatagtaatctcctctgcccggtacatcctgctacaaacatggccagatttcagagattccagtgaatctgcaaatagacaaatcctcgcatcgctagagcctctggactacattgtcgttgcttgtctcccggggataagtgaggagttgctgtttcgaggggcgatgatgcctaccttgggattgaactggattagcgcccttattattggaaccgtttttggtgttcttcacttgggcaatggcaggaaatattcgtttgcaatctgggcaacatttgttggctttgcctatggtatgggaaccatagcttcctcgagcattgtagttccaatagcttctcactccataaacaatattatcggaggtttactttggcgccttaccaagaactcgcaaaagtagatatacataataccctcaacagtcatccctgttcagtttagactttttagtccttaatgcttacaaggttgtcgtcagtattagtgtcgcatgattggttcacccatgtattttcaatagcaaaatgaggacgggactgccgtaaaatcaggacttgcttcatttttctgtgtcaatgtgtccctgtaaatgaattatggagatttatatttcatagcaggtataaaataaaatttaaccgtggggccaaac

SEQ ID NO: 36387 - DNA, 189 bp, Zea mays
  Clone ID: MRT4577_133189C.1
tgtaactacaacttacgcctaaacagggcaggaatgagctgccgcctgggctggatgaactatattcaacctggcctcaagcatggccgaatgtcaacacaagaagagcgcattatcattgagctccatgctcggggggggaacaggtgaccctaggatagaaaggtggctgtcagggcgcacagacaa

SEQ ID NO: 36388 - DNA, 1493 bp, Zea mays
  Clone ID: MRT4577_13318C.1
ctcgatcatctcgctccagctcatccgatcgagcaccttgcaaacctgcttgattgattgtttgatcctatttcaagctagtcattagtgtactctcgtgtctcttggttggttggttaggctgtagttgagtgaggagttctcgagtgatcgaccactactcacggtcatggcgtctcgtcgtgtgtccctgctgctgggcgtactgctgtcatactccgccgccgtcgccgtcgccgtggcggcggccaacttcaaccaggagttcgacatcacgtggggcgacggtcgtggcaagatccaggacaacgggcagctgctgacgctgacgctggaccggacctccgggtccgggttccagtccaggcacgagtacctcttcggcaagatcgacatgcagctgaagctggtccccggcaactcggccggcaccgtcaccgcctactacctgtcgtcgcagggcaacacccacgatgagatcgacttcgagttcctcggcaacgtctccggcgagccctacacgctgcacaccaacgtgttcacccagggccagggacagagggagcagcagttccgcctctggtttgatcccaccaaggacttccatacctactccatcctctggaaccccaagcacgtcatcttcatggtggacgagatgccgatcagggacttccggaacctggagagcaagggggtggcgttccccaagaaccagccgatgcggctctactccagcctgtggaacgcggacgactgggcgacgcagggcgggcgcgtcaagacggactggtcccacgcccccttctccgcctcctaccgcgggttcaaggccgacgcctgcgtcgccgtcgcgggcggccggacccgctgcggcgccaccgtcggcaccgagggcaccggcgcccccgcctccgccgccggcgccggggactggtacaaccaggagctggacctcaccctgcagcagcggatgcgctgggtgcagcgcaagtacatgatctacaactactgcaccgaccccaagcgctaccagcagggcctccccgccgagtgctccatgcagtagcgcccggttattcctcgcccgtccaacaatggcgcgcgcgcgcgtgtgtgtgcatgtggtccgctctactgctaccgctacgacgatcggtgtcgatcaccggatcaagcaagacgaaaggcatcgaaacatggtagataaataaggacttggccctgcgttgtgtggtggtaagaaattcttctgcctgtgttcttgtagagcctactcgtacgtcctcgcccaccctgtccgtacgtacgtgtacgtagtctgccgccgcgcgctgttcgtgttcgtcgtgtctcgtgtctgtattatactcgtcctccccatcaaaaaaaaaagttgttccatgtacgtgtgcactgccgagtgatgtttggctggacgtgatcgtgattatactcgtcctccctcataaaaaaaacgttgttccatgcaa

SEQ ID NO: 36389 - DNA, 972 bp, Zea mays
  Clone ID: MRT4577_133190C.1
taccctcgggcctgccgggaaatcttcgccgttccctctcccccagcgatctgctcgtttccttgcaacttgcaacctcggtgctgctgatgacgctcgcgatgagcacactcgcctgccaccgcccactcccctccaaaggttggaaatggaaactgcgaacctcggttgctacatggaaacatatgcggcctgggcgacgtaacgaggccgtggcatgcgcggcgaagaacacaaagaggaaacggagaagttctccgaacgagtcgaaggatttgctgctggtgctccgaggagtgctgttcttcaggcttgcactctcacgtcaggcttgctgcttgccggagggcttctgcttcgcgaggcatcacacctagcatcaataaatggatggccaattgctgaccctacagatgtgtcattcagttttgaaacctggcatcttgagttggttgcgggacttgtcatagtaatctcctctacccggtacatcctgctacaaacatggccagatttcagagattccagtgaatctgcaaatagacaagtatgtagattccagtgcatcctttgcagaattatctttccagtcgtctctttttgttggagctatcggtttcacagtttaacatggtgatgaagaacatagctctaacgtctcacggaggttcagcgtaatgagaagcattatgttgttaaacactgaaagatgtagttgtttgtatgttctactcttttaccctaatgaaacataaattttggtttattataggttgattactcttataatagacagaggggtccggcggtggtcatagtatcatacttctataaaccaaccccgagtccttgcctacatatgtaccccccttgtcttctcctgacatcaattctggactccaacctcgacaaggttactcagtacttttacacattgcaaatctctcacttaatcagcttatcctcatctaa

SEQ ID NO: 36390 - DNA, 263 bp, Zea mays
  Clone ID: MRT4577_133191C.1
ccatttcatccttcaaagaagcagtatcggcaagaaccgagctgaagctgccatggaattcttacaagaattacatagcgatgtctctggaagttttgtggaagagagtccagaaaaccttctagacaatgatccctcatttttctgcaggattactgatgtagttgcaactcagcttcctgaaagcacgtcactacgcttagcagatgtcctctggaattctcagattcctcgtttgatctgtatgacatatggactagttg

SEQ ID NO: 36391 - DNA, 186 bp, Zea mays
  Clone ID: MRT4577_133192C.1
gcagccacgcgatcttattcatggttacagaggttgcacgagctaaagtgttcagtttctgcccaggttagaagcgctaagaactaggctgtgatctctgtgtcttcttgcggctcggtgctgcgggtggtgctgttcttgctggggggggtggcggtgcctcttccccttgcggggggggggggg

SEQ ID NO: 36392 - DNA, 425 bp, Zea mays
  Clone ID: MRT4577_133193C.1
cacacaacaaaaaatccatggggggaggcaccatacaagttcactaccatagtgtttacatcaatcaacaagcgcacctttcagggccctaataaaataacaaaacacggcatttgggtcatcagtataatatcaaccgggagacatgggtatagatcgccgattctttctctgggtacagcatggggtgacacaaaccgattggaccgttccattatcacatgcgggtaacacacacacacacacaccttatttaccgggtcgcataggtccatctccggaggggtaatagcacgctggatgagtggttggttaatcacaagaatatcggacccaacaccagcgtgttggtggcgagcgtccttgtaggatcattcagcggcagcccaccaagtgtcattgaatgggttttccacccgggctcc

SEQ ID NO: 36393 - DNA, 307 bp, Zea mays
  unsure (1)..(307): unsure at all n locations
  Clone ID: MRT4577_133194C.1
tgttggtgtggtgcaggttgtggagttggagatggagttggggcctgctgatgcaaataagatgactatggatcgagagacgtcataggactgcgtcgaccgcctcgagatcgccgagcgcctctcagagcacggtcagcgcntatactatcgtgatccctacgggcatgcttggaagagtctggcaccaagccacagcagagggataggtcatcggcagatatgggccttcggtgtcccgcgcattgaacgactacgggaagaggccgaggccactagatgacctaccacccggcacggccgagct

SEQ ID NO: 36394 - DNA, 552 bp, Zea mays
  Clone ID: MRT4577_133195C.1
cggctgtttagaccgtgagggcgaggctgcgcctgcgcgcgagcgagcggtggccgaggggctgtgcggcggcgggcagccggctggggcactcgcgtaggtgcatgtagtactcgcgcagcggctcaagcacgcacggggcttgctttggcggtgctgctgctaggcgctcgacgccggcggctcgtcacctcggcggtgcgctggtgctggcgtgctgctgctaggcgctagcaggggcgcgagggtgctgtgttgctgctcggcgccttagagattgaagtgactcaggtgaggaacagaggattaagttgctcctttgttgtcgacagattaattcagcacggcgctgcagaagggagcaaacaaagggagatgaagctcagagtcgtgtgcaggaagctgtatgactatgtgcggtatgacctcaaggagatagccttcccgtcgtcactgccggaccctcctcacatcaagaagcggcccaagctctcatggcatgaacgctggtgcatcctcaaggaggccacccggctgtacggcgcgtcatgg

SEQ ID NO: 36395 - DNA, 287 bp, Zea mays
  Clone ID: MRT4577_133196C.1
agctgattaataataacaaagccacatacacacgggcgaccaaagaaaggccggacaagcccaagccccctaatcacagcggaccgacggcgagcatcgaacgatcatatactaagcaagcagacggacgaccccatcaaagagcggaagagcaaaaagcgccgaggacttgcgagcaacccgcaacctcgacaatagctctgcggccagacgcaaaaaccgggacggcatcccaatctgacaactccaagaccgcaacgagagggcgaccacggcaaatctgaccg

SEQ ID NO: 36396 - DNA, 384 bp, Zea mays
  Clone ID: MRT4577_133197C.1
caacagggacacacttgaccagcgactggtagcacaagatctgtcagggctgaaccacaatggccggggtttattgtgttccatagtacatcattcaatgtaaaaggaatcacgcatattattatgtacgcaaacaagtgtagtgtacacagcccatgcccttgggagcacctactttttaaccattgatcaatgtaggtgccagcgccacaaacaaaaccggcgttatcccacatgagttcaacttagctatctatggacttaggacattctggaatgtgaacacctagtctggtttacgtgactttatgctcttcaacaaggctgcaataaggtgcgcctttgaacgaccctgctgcttgtatttattcaacaagacttttg

SEQ ID NO: 36397 - DNA, 192 bp, Zea mays
  Clone ID: MRT4577_133198C.1
atttcggcacgagggtacgggggggggggggggagacacaacacgataccatttcccgggggcgggacttggggtaccccatgctcatcccactgactacagccacccaccatcccagtgccttggggggcgcgctcaacaaggggctccggcctgcacctagcatcaaccatgggggggggggggacatat

SEQ ID NO: 36398 - DNA, 669 bp, Zea mays
  unsure (1)..(669): unsure at all n locations
  Clone ID: MRT4577_133199C.1
ctcctttagcgtnnggtcgcggcccgnnaggtaccctcttgttgttattcctcgcgtgcggatacatcattcgtataaggacttagagacgcattcttcttagtcctgagaatctgttgtgtagagctataatctgcctatacacatttaggctggaatgaatctctagagactgtgcattgtgcgaatatcgcagcctgggtgcgatcagctaatatctgttgacttgatagtaataccttgctgttcattgcatctgacacccactcgtgctgcggatcgttagcgtacgtgaagagtgatagaatgctatcaatacctgtgttgcatatggaagtgctgaactatccgccgcttgagatatatggacagacatcaaatgagatggactctacagcgacggataccatatgacctacgttctaccgcactgtactaagagcgcattcagttaagaaatgcagtgattcttctttatatctctaactgattgcaattcaattcggctcaactcttttctaagaaaaaccaacgactagatgccgaattgacaatacatgcttgatacgatcatgagacttgcaaatcgagattcttgtattctatatatctagaatatagaacggtatactaccctcaccaatgtcgatcaatatatatgattatcgt

SEQ ID NO: 36399 - DNA, 462 bp, Zea mays
  Clone ID: MRT4577_13319C.1
tagagagctaagaatttccccatggcggcctctcttcaagctctcgcctgcgccatgctcctcctagccgtctccccgctcgcttgcacggcctccaagacgctgctgcaggacaggtgcgagagctatgcgggtggcgaccggagcagctacgactactgtgtctggacgctgcggcgcgacaacaagagcgccaccgccgacgagctgggcctcgccgtgatcgcggcgaggatggccagggcgacggccaaggccaccggggtcaagatcgcctggctgcgggccaacgagacggtcccggtgcggcgtgactgcctggccgcttgcgccagggagtacgccgccgccgtgcgccggctcgggcacgccgcgtcggccgcactggccgggaagctgcagcacgcgcagacgctgctcgcggaggccacgggcgcccccacgctctgcgacgccgcgttc

SEQ ID NO: 36400 - DNA, 324 bp, Zea mays
  Clone ID: MRT4577_1331C.1
gggaaaatgtaagatttcagtatttttgttttgctgttgatggttgttggagcagagagacggtggcggatgaagcgaatctggctcatgctggtggttcctttcatgaggttaatgaggagacgtcctgtgatgttcctgggcatcatggtattactgctcttgctaaggcgaccaacgactacgtcgctaaaggtaagcgccacggccccgccatccctatctattttagagtcgtcgagtaagtaaccgtgggtacggatggtaagaaaccacgtaattgcaccgcctgagcaaacgaagcgtgcataagagtttttgtga

SEQ ID NO: 36401 - DNA, 383 bp, Zea mays
  Clone ID: MRT4577_133200C.1
ctttgggctgatttatgtgcttgtttatgtgcttgtggatgtgcgggaaaccacaacaaaaaataaaaaaaaataatacaacagggaaggccccaaatcaaaataatgaaactcataatatatcaaaatcaacaacatacgccaatatttaataagaataagtacaaatcagacattaacgacggtatcctacgtaaatattgaaactctcaagaagctttaaacttcaaactcccatcgctagctcgatgtcgtcacagatcacagtttcgagttcatactgccatctattcgcactaataattctagctacatggactttgcctcactcatataccgatagaccgaaccctgtaccttaccactacccgtcttcaaagcaa

SEQ ID NO: 36402 - DNA, 816 bp, Zea mays
  Clone ID: MRT4577_133201C.1
ggcaggtctgagagcactgggcggcctgccagagctcacctacctcgcgctgtcgttgaagcctcgttcgctgaacagctcatcatgcaaggctacggtagctgatgttgttgccgcagatggcttcttcctcaagttgagatcgctcaagctgtatggctggatggtccagttggtgcccagcgaggactcggcaagtgtttcgctcagcatctggaatgaaggagcggagggttccacgagagactgcaccgccgggagggtagcacctgctatcatgccagacctcatacatctggagttcaatgtccctatcgcagccttgtataagataacaaataatggatgcagctgttacagcctcggctgggagtgcctcccttcgctacacaaaatcaaggcgcttgtcgactatgacggcacctacactgctgatttcgagaagccagtggctgagatgatgcaggcagcaaaacttcatcccaaccaacccataattgagatggttactcaattataagaagcctggaaaactgccatttaatactggttttagcaaccggatgaaaaggccgctaatttccccctagatatattccatttccttgcttttcgacagcttggtgttgtatgtcaaattattaagcagctttgtaataagactgtgtggtgcccctttaggcgcatgatgcttgttcctaaacaaacatgaagtaatctcttggtattgtatgtcttggaaatttacacatctcttggtattgtagagtgtaaacagcagattggttcaattcaatacagtttagtttttgtttc

SEQ ID NO: 36403 - DNA, 267 bp, Zea mays
  unsure (1)..(267): unsure at all n locations
  Clone ID: MRT4577_133202C.1
cccactcgtccgctccttcccttctcggttcgtgttcaggttctggttganttggtagatttaagagatggcggcgtcagacgttgagtaccgttgcttctttggcggcctcgcctgtgccaccgactaccactccctcaacaactccttcagcacctacttctaggtcctcgagtcgaagatcatcctgtatcggtagactcatatgtccctcgtcttctgcttcttcaccttcttcacggatgactctattcgcatctccatcta

SEQ ID NO: 36404 - DNA, 654 bp, Zea mays
  Clone ID: MRT4577_133203C.1
cctcgagccggcgggcgggttgaaaagatataccttctatctatctaaagagagagtgacaatctagctatctagcatgcatcgcgtcatgaagaaggcagcatgagatgagctggggctgatgctacgccaggtgatgtcaactccgacgacggcctcatgccgcctcttgaaggcgaatacctccacagcgccggcgctgtaaatgatcacgagggagccgggtgagtccaataggagcgattttccgcggtgaaagctgggacttactaccatgatatagagaagactatggacgagccaatgaattgtgcaaccagcgtgatgtgatatgtgcactaacgctattggtaagttcggggtggagagaaacacaaggcaatccgacggtagagaatcaatctgatagggatgagtaaggaagaataccatggagaggatgttggacaggatctaccaggaggccttgacccgcgcaaagtgcatcatgtgggtatagaggattgcgatatctcggaaagaaggcctgaaagtgcaattttgtcagtccaatcggaattggttataatttgtgtgatgatgtaacggcatacaaatttgtgagaatacacctacaagtttggtggtctgaagattcggaaaccccgaacgtat

SEQ ID NO: 36405 - DNA, 539 bp, Zea mays
  Clone ID: MRT4577_133204C.1
taaaaaaaaaaaaaaaaaaaaaaaaaagggggggggggggaaaaaaaaaaaaaaaaaaaaaaaaaaaaaaaaaaaaaaaaaaaaaaaaaaaaaaaaaaaaaaaaaaaaaaaaaaaaaaaaaaagggggggcccttttttgagaacccgggttttctttcctcgagggttcccaagtcattcgccctttttttggggggggggggggtttatttttttggggccccctttttccaccttccggggcgtggaaaaccccagcggtttccccagttgaaaccctttgggtccccctccctttttctccgcggggctttttccttttggggcccggccctttcgcctttcctacccctccccctccctttttggaaatggggcccccccctttggcggagctttccccccccgggggggggtgtttcccccccgggtgccttttttttttcctagggccttccccccccttttttgggttttttgcccttcttttttgggttttttccccggttttcccccccacgttttaaatttggccctc

SEQ ID NO: 36406 - DNA, 347 bp, Zea mays
  Clone ID: MRT4577_133205C.1
gctggtgggagagcaagagagggtgagtcggagcaagtttggaacagcccgtgcgaggtattaaccagccagccgtctgtgagctttgcgcttgacctcaacagagatccccatggactcatgcatgaaggccgacacacctcgccgacagagaggaccgctcgcgcgcttcgatgacgaggctataaaggttgcttgggcctggctcgcgacacagccacaaagatggcgaccgcatgggccaaatcgtaacatacgaacgtggcttcagcaaggataacaggaccatgctcttcaagaaggacttgtttaaggacactgtaagaaaggcagcacacgcatggaag

SEQ ID NO: 36407 - DNA, 763 bp, Zea mays
  Clone ID: MRT4577_133206C.1
ccggccgggtaggcgggcgcaagcagcagccaatggcttctcgttcgcccaccattgccctggtcctcatccttgcctgcttctcctcgccggcggcggccttcaacatcaccaggctactcggacaattctccgacttcacaacctttaacaacctcctgtctcagacgaagctcgcggaggatatcaaccgccggcagaccatcaccgtgctcgccgtggacaacggcgccgccggtggcatctcctccctcccatcagacgtccagcggaaggtgctctccatgcacgttgtcctcgactactacgacaccgccaagctggaggccatcaagaaccactccgccctgctgacgactatgttccagtcctccggccaggccaccgaccgcatgggcttcctcaacttcaccaagcgctccgacggtgtcatggtgttcggctccgctcagcccggagcgcagatgacctcccatatggtcaagtccgtcacttcccgcccgtacaacatctcagtgctgcaggtcagcgcccccatcgtgccgcccggtgtcggcggctcggcagacagcggcaagggtggcgcgccgccgccgcataagggcacggcgcccgcacccgggcccgcaacaaagggaaagaagggagctcctccgtccaaagatgaggagggccctggctcggcaccgtccgacgacgccagcgcagacgcgcctgccgatgcccctgggccggcggcgggacgcccaacggctgatggccc

SEQ ID NO: 36408 - DNA, 1060 bp, Zea mays
  Clone ID: MRT4577_133207C.1
gtactcaggtctcaggtcactgtctttctcactgaaaccaccaagccctctgcatctttaaccctccccgtcgtcacgctgacctaaccatgatttgcctcaaagccatctcatcccctctccacctcccgaccttccgccgcctcacccccacctcctccctccgcgccgccgccgccatgtcctcctcctcgtccgcggtcgccgccccgatcgagcacttcgtgctcttcaaggcccgcccggaggcggtggcctcgggcgccgcggcggcgatggtctcctcgctgcaggcgctggccacgctcgtcccgggcctggcctacatccacgcaggaccggtgctccgcctccgatccccggccgcggaggcgctgggccccacgcacctcctccacacccgctacgccaccaaggaggacctggcgtcctacgcggcgcacccggcgcacgtggccgccgtgcaggggcacgtcctccccaacgcgctcgacatcaccgccgtcgactgggtcaacgccgcgccgctcccgtcccccgtggcccccggcagcgccgtgcgcctcacgctggcgaaggtgaaggaaggggtggaggtcgcgcagctcgtggagaaggtggccgcggccacccaggccgccggggacgccaaggtgagcttcggggagaacttttccccggcgcgggccaaggggtaccagttcgggatggtggcggtgttcgacagcgtggaggagctggacgccgtggaaggggacggcaaggtggaggaggccaaggccttggtcaggccgctgctggacgaggtgatggtcctggacttcgtcgtcggagatgctccaacgcccgcgagcctctgattacaggctgcagggtctcactttcgggattctgagtgtgttgttgatgtcggaataatggatagatggactccctggtcctgcagcttttcaacttgtgatttgtgaaattgggaatgacagtgcaatgaataagaattgcttccctcgattaaggatctgttcggcacgaaataagaggtatcttcttggaaatagct

SEQ ID NO: 36409 - DNA, 620 bp, Zea mays
  Clone ID: MRT4577_133208C.1
gatttcgaaatgaccttgtttgtccaagttaaactgagaatcagctcttagtaattataggagaattgtagtactttgcttaagatttccaacaaattttggagcaccctttttggtggtctagagaccaagttacaactgtttgaactatagagtctgaatctgtctaaatttggacagcaatgtttgtttgtattaactgacttcgatacacattgaatcaccttgagatgattataaatgaattgtagacaattctattagctttctaaaaagtctaggatcacctgattcagatggctggaactccaattatgaatttttgaactgatttgtcgaattctgtccaaatctggatagaatttacgtttagtactgtttgatattttctaaaggtcgaatcttgttgtgatgataataccaaagttatagaggactttataagctttccagaaagtcctagtttatcattttaaaatgaatattttgtgagttatgagctaaacaaatagctgctgttttgctgtccaaaatcagcaagtattaaaatggttgtttagagaagtcgatgctttgctctagttgtcgtgttctatattgagtgatcagttaaatcccgt

SEQ ID NO: 36410 - DNA, 2539 bp, Zea mays
  Clone ID: MRT4577_133209C.1
atggtcgtcaccttccagcacaagatcatcctccgtcctgggtccatgttctgctttggaactatctcatctgtagcggatgaggagggaactctgcatcgcatcacggacccaccagagagaaagtcgtcctcaaagatctccgagagaatcggagcaaaacagggaaaagcgcaacctccagcgctccgggaaaggatcaccttcagcaagctaggagccgagggttcgtctacccggagaacaccgttgtctacctctccgacggaagaatggacacggatcataaggagaaaagaagtgaatgaggtcaagggtcgtcaagcagctctttctgtgcctccactctcaaaggagaacaaaaagaagatcgtcgcgacagctgctccattctaccccgatgtcctcttcatcgggggaagagtggaatcgaatcctacctccgacgatgaaccaactgcaccaggagaggaacctcttcatcgggagtctcgccgacggagtaaccgacgccaaaatattcggtggcatcacgaagccagagaacaggatccggcgcagccggtatcacgagacgaggtcttagaagtaggagaaactccggaagaacgggtcctcatagaaagaaggaactctcgacgacgtgaccgtcgacaggctcaagaacaggccgagcagggaacgaggcaacgtcgggaaaatccactctttggacgcaacctaaaccccgacttcgcccgagccatgaacacgccgagtgaagttggcggagtgttggcttggatagctgatggcctcccccagactcccgacgccgagggctatcggcagctgttcactcaggcagccaaccaccttctacccctcgctcatccaccgaacgatctacgacacgccgtcaacagtcggcgggatgcacagagctccatcaacgcttcacccactagggcaaccgaggatgtgatgaccgcgtacctgcctatcgtccttgggcaagatgcgctgcaatggttgcgacacctaccacgacactgcatcgacgactggagcgatttcagtcggcgcttcaccaccaacttccagtctctctctgacaaaccggcgcaaccatgggacctcaaatccatcaagcgccggggggacgaaactctccagtcgtacctcaaaagattccagaccatgagaaatcgtatccccgaggtcgcggaggcagcagtgatcgaggacttctaccggggatccaatgactcggccttcgtccaagccatactacaaaaggcgccaaccacttcggagcagctattccgggaagccgacctctacatcaccgccgatgaacgagccctagacctcatcggaggagcaaagcctgcaccgacagcaccgcgacgtgacatgaaccagcaacccgacaaacgttgggagaagaggcctcgtgaagaggtccacgccgccggaccgcccgcctctcacgcccgaggaggacctcgcggagacgaacgcacgctggacgacatcctcgacgcccagtgcccgtaccacaaggacatgcgccacaccctacggaactgcagagactccaagcactccgtggggaacggtcggcccttccaacctctacctcatcctccgccgcgaggaggaccaggagaaccgcgacaaccccagcagcaggaggaaggaggaggagctttcccgtgcgttgacagagaagtcaacgtcatcttcgacagacacgggtcgcaggaaagcaagagacaacaaaagctcaacgatcgtcagatactgggggcggctaccggtccacccgctccgtaccgatggtccgaacacccgatcaccttcactcgggcagatcagtggctcaacttcgaccaccctggcaagtacccgctcctcgtcgatccggtgatccgagagagcagggtaaagaaggtattagtggacggggggagcagcatcaacgtcaccttctcccggacactccaagccttgggagttcacctcaaagagctccacaagtcggacactcctttcttcggcatcgtgccgactaaaggaggatatccgctgggccacatctacatgccggacaccttcggaactctagagaactacataactgagttcctgaggttcaaggtggcgaactttgactgcggatacaacgccatcatcgggaggcctggattggcggagttcatgtccattctgcattatacatacatgatattgaagatgccaggaccataaaaaaggcatccatgatgctagggaggtagcgagagctgctgaaaaaagctcagggcccgaagggcaaatagaacccgctgaggcatctgcggaccctcccccgaagggggacgacgaaattagacaaatggtcgaagccatcatggacgaagttgtcaatcagctactaaacgaagctgcagaagtagttcttagggaagattaaatgctattgtaaaaatacttggaacatgacatgtgtaaaactttgtaactttgaatgtaatatatattctatttatggttc

SEQ ID NO: 36411 - DNA, 2343 bp, Zea mays
  Clone ID: MRT4577_13320C.1
tttttttttttttttttttttttttttttagagaactcagacagacagctaattctttcatcagagaatcaaacagtctaccccagtttcatcggacgtccagtgaggcatctccagttattagagactcacttgcagattgaactcctaattctctaccccagtttccgcacgcgaactggccaggaaacgatgccattgctgcacatctgaaaaaccgagccattgcatacaagttcatctccgcatattaattacagggccctaaagaagaggaagaaaatggtgcgacaatgatccgccaagcgccaactattggctgtcaaaagtcaaagactgtgcgtgcccttcggctccaaggccttcccaacatcgtcggtgtacctctgtcatcctctccaccggattgcagatgccagtgcagttccagtcgaaggacgccgcacatgggttcccggcctgccctttccattcgcagtctgggggagtaccacagcaaaggcttctctcatcaacatgctcaacttccaacccgatcaaccaagagccaaatgatacatcttcatttgaatacttgtgcaggatatgccggtttgctgatatgtaagttgctaaatccctggttacagcatacaactgacgtgttgcatgcctaaagtagttgttaccctcagtcccaaacttccaatggtctggctcataatacttggagtcattcttagcaacaacaggtccagatttcatgcagccaatgtacacccgaggtttcatcctgtgtcgcgccaaaatcgatctggtgataccaatgttgacatggacattatcgtcggcttttacatagaaatcagcgtcccacattgtaagagcagtcgaaaggaacatctgaaccttcatagggagccctccatagccttccacatgattaattctcaagatatcactgtattcttcatcctccatatcaattgcatggtcgacctcattttccaggtttggatttgcactgcgtccaacaacaaaacggataacaacgcccttgtcttccaatcttcgcaactgatcaccctgtggcatccacgtctgccttattgaatctctccgcttccggttagcaagagtggtgaaaacgcccatgacaaaagacatcctacgccgcgcggttccctggtcgccctccgagtccgagtcgcccggtgacatgccctggctcatcgcctgggcggctctagccgcagccaggcgcatctcgatgtcggatatcgtcttgtccaacgccatgacgacttcgcgagtctgtgacgcttggttcaacacggccctcgagtggtcagggccagccttgtctgggcaaccgggatgaggctcaggaacaggccagtacctgttgacgacgccgacgccgacgaggaagcaggcggcgcagagcgcggccacgcaccgcgtgggcacccgcgccggcgaagacttgtgcggcctcagcgccgccgcggccatcatcgtggctggccacctcggatgcctcctcggtagtcgttcgaaagggagggtaggggggaaagcgaaggctccgtccgcgcccccccaggtggccaggtccgccgtccgcgtgagagctctgccttggactgctagctgctaccgcggccaacgcagtggatcaggtcgagcacctagtagcgacctgctcgatcatcagtgtagagtgtcggtaggtgtctgtctctcttggtggctggttgcaacggtcatggcgacgtcgtctcgtcgggtgcccttgctgctgctgtgcctgggcgtgctggtgtcctgctccttcgcggcgggcagcttggaccaggagctggacatcacgtggggcgacgggcggggcaaggtccttgacaacgggcgctgggtgcagcgcaagtacatgatctacaactactgcaccgaccccaagcgctaccagcagggcctccccgccgagtgctccatgcagtagcgcccggttattcctcgcccgtccaacaatggcgcgcgcgcgcgtgtgtgtgcatgtggtccgctctactgctaccgctacgacgatcggtgtcgatcaccggatcaaggcaagacgaaaggcatcgaaacatggtagataaataaaggacttgacgatttgtaacgcagtagctggtgcgtgcgtggtgtggtggtaagaaattcttctgctgcctgtgttcttgtagcctcctcgtcctcgcccaccctgttggtacgtgtacggtgtacgtagtctgccgccgcgcgctgttcgtgttcgtcgtgtctcgtgtctgtattatactcgtcctccccatcaaaaaaaaagttgttccatgt

SEQ ID NO: 36412 - DNA, 936 bp, Zea mays
  unsure (1)..(936): unsure at all n locations
  Clone ID: MRT4577_133210C.1
aattttcatgaccctgagatgtgctcgtgctgccaccagaacgtggtccaagagagccactnccaacttggccaagatgtgctgcctgccctcgcgggatggttgtgatcagtttgagtccgtccgcaatggtcggtcacgatttcactgctgctggagatctcatgcacaccattagagtgtgtttcattttccaagttgccattactcgaactgtagttagtttgttgagcgctgacattgtcctgtttctcaacttggttttcagcacccagcccagtagcatggtcagaggctttgtgtggtgaactatataatggttggtgctgaactaacgaatcgacgttgctggcaattttgcagtgtccctgctgactgtggaggattatttcagctgtgcatggaccactcaagcgttggtgcgtccaatcgcagtgccggcacttccatagaccttgtgttggatccaagaagatgctctgctgggccgccgccgcctcctcctctactgctgatgctgctgcgttggagtcggagtcggagtcggaggactccatctccaggtccaggtccgccatcgttgtcgtcatcttcttcctcatgctctctctctccctagtgtataggagggcggaggtgtcttcctcctcctcatagtcatcctcctcggcctccatgagcagctgcggcggctcctcctcctccttgagctcccacatcggcctctccacctccatcatcttttcttttcttttcttgtgtgtttactgtaggagtaggagcaggagtgcagtcgtgtagatggagattgagatgcagcctactgcctactgcctagatgggagggaaatgggattgatggttgggtctccatggattgctttgcttcctttatacatagcactaggaggggggaggggcacctcgtgccgaatt

SEQ ID NO: 36413 - DNA, 180 bp, Zea mays
  Clone ID: MRT4577_133211C.1
caggattcaaatcgcaagttagatgtcaatgcgttatagcacaagatgaatcctgacaccttatatacctatctgaaagcagggtagcagactactggtgtcaggattcaaatcgcaagttagatctcaattcgttatagcacaagatgaatccataaagtcagaactttgcatgttaaa

SEQ ID NO: 36414 - DNA, 347 bp, Zea mays
  Clone ID: MRT4577_133212C.1
gccactcctacaagcaacatcaggaacacatttacactagaggtgctcaacctgctcggcaggtgtaaccaagactatcggggtgtctacacaacattatatcataatacaccactcgttcaagaatacgaagagctcaggatgtgcatgagatcactctgaatcaaaatacataggtccattcgttgaagatcaaatatgaaattggactatataggatgctgctacgctgacttctatatcatattcgatacggctaatcactacggatagcatttgggacaccatttatagaccacatagcaatcgccgatgtagctattcgctacctaatatgtaaagactga

SEQ ID NO: 36415 - DNA, 434 bp, Zea mays
  Clone ID: MRT4577_133213C.1
ttttcttttcatttcaattgttcattcaggacattgctgacactgacactggcacccatggtgatgcgtgacaaattattactcaatcatggccgataaatgactcaactaactagcttgccaccggctatactacagcccataattaattcagtgggggacaccgccggcagtttcatatgggcatggagtgggttgctaaaggccgcacatctgcggcagttgctgagctatattcgccgccaacagaccaccgacctggacaatttggggctgctgctgtatgatggactggaggaccaagccgaacatcggctgataccggaactgcggatccacctgcctgagctgctggcaactctgtttccggaacgactggcactgaggcgagcaatatggcgttaccgtcgggctgcactaaatccttaaaaact

SEQ ID NO: 36416 - DNA, 317 bp, Zea mays
  Clone ID: MRT4577_133214C.1
cggggatttcgtagtacctcctcgaccatccctgcaaattaccgcgatggctcccaagatcctagtcatccttgtgttcctcgccgtggactcaccggctgggtctggccgtcttccatgcgatagagatgctgtgcgactagtgcgcgtactcacaccgtcctgaagctgatgcaagacaccaaggtcgcgggcgaggttgatcaagatccgcgggctacgggactggacgtcggcgacaaagttggcctgcctctggaaggcctctaccaggataaagagcttccggcgcgggtgaatcactgtgttcgatggtg

SEQ ID NO: 36417 - DNA, 303 bp, Zea mays
  Clone ID: MRT4577_133215C.1
tgtgtttctcttgcatgaggatcatcatcctacatgggatcaccagctcctcttccacacgactcgccggggcgggatatacgaaaccatcaatattatcatccaggattcagtacatcacctgattccacatcatccgcagcttagattctaccctgcttttctgttcgcagctcaattccaatatcccaattgcatctcaattcaattcaatcaattctatcaatcgcatcctgccaggcatcatccctaccaactaggctcactacactttcactcagattcgcttttacttatccaacc

SEQ ID NO: 36418 - DNA, 1334 bp, Zea mays
  Clone ID: MRT4577_133216C.1
ccccacaaaaggggaaaaaaaggggggaggcgcaggggcggttttttttttttttttttttccacaaaaaaaaaaaccaacaggaatccccccatattcattataaatggtacatatttattaaattgaaatatagagtcctcgaaatacgttgggtactggctaaaataaccctccgcatgatttattagcaatcctgatggtgacaatggtgaagccatccagagaataatgtggatccattcatccatccagtaaattaattgccatcgccaacgccggcaagaaggggctccgtcgtctcttctgatccttcgtagattcctgatggtgacgatggtgaagccagaggatgatgtggatccatccatccacccttgcagtaaattagttgccatcgccgaaaccaacaagaaggggctctgtcgtcttcgaatccgcccatttatttaaccttttctgtgcttcctctacctctttgttccaatcagttctcaaggtggcccacactagaatagccgtctgcatgaaagttcctccaatcataccactccaaatgccctttacaccgagcttgaagacaaaaccgaggatggcgccgaggggaacaccaactatgtagtagcagccaacgttcacgtaggctacgaattcttgccacccacacccaacggcgacacctgagagaacaggttggatgccgttgaggacgagcgtgatggcaagcagtgggcagagatctgccaccgcgtttgacaccacctcaccctccgtgaagatgtagctgatgtagttgcgcaggcagaggatcacaatggcaagcaccagagatatcagtgtagagaccccggtcactacccacactgagaagtaggcagattttgggtggccggcaccaagctcattgctcactctcacactagcggcagcattgaatcccactgcgatcatgaacacccacgcattgacagtcatgcatacggacaaggcatccaatgcaagctcagggttggggagcaacccggcaatgagcaccaggacctggtagtaccaggtctcaaggcaaagcatgaccgcggacgcggcggagagcttgaagaagccccacaggcccgagaatgcctgccaggtgaacccggtccaggtgtggcggcacctgggctcgttcacgatgtacgcgaactgggcggcgacgatgacccaccagctgaggctgagcagcagggaggcccccagcaggcccatgccgaccttgtagacgacgacccagctgagtaccacgtgcagcaccagcgtgacggtgcagatgtaggcgctcgggagcacgatgctct

SEQ ID NO: 36419 - DNA, 1849 bp, Zea mays
  Clone ID: MRT4577_133217C.1
ggagatcttactggggtaaattcaatgcctttatctatttagttgtgtcatgaggagtcatcttttgtgagtggttcattactgacaagtcctgttggtgagactctgtcaacatcaatgattcaggaaatatttcttcttgctaaggatgctaaggataagcacatacaagattatgctgcatgggctatttcatttctcagaagcaggtggtcgaagaatcagaatcagattctttatgaggacaatggttctaatagaagtcctgatgatcatgatcaagcttcaagtttttctgaacaaagcttgtttggaacttaagtctctggttgagtgatctaaaatttgaaaagtctggtgatgtggtgccaataagtacagttggaacagttttaaaatgcctttccaaagctccccgattgccaactacagactggggagctattgtacggaggtgcattaaagctgaggcgcagatttctcataagttaaccaatcaggaagatcctaagatactaaaggaggcatgcttatatttgactctagctcatgctgctcacataagtccccttctgcagtttttggatgatctgactgacatactcagattccagagattagatataaatgttcagtctattttgctcaaacatttgttacacctaatgaagctattctctgattcaagattggataaattgcatgaggattttaccgaatacttgtattcccccacttcttcatacttgaattactcatctgaacagaaaagcatgctaagaatgtcgttctgggaaggcatttatacgtgcctggtggatgtttctgaagaatctggtgttttttcattcattgaaaaatgcattcagtgcttgttgcctcttttgacgctccatagtgatggtcaacctgaattcatgaaagagtggtctgttgctatcttatgtcttacaaacgcccagaaaaaatggctggatgatattttgcagattcgcagtactgccttagtcaatgaaggacatgttgatgttgcaaaaaagattatcctcagagcaagattgtgtgcaactggttgtggttcaacacatgagctgggaaatataaagacagcaatattgtgtacaaaagctgatggtgtttggtggagtgtccttgttgagatcacttcagccttaaactcagccgaaaacatcatcaaaagacagtggcttctggatgcattagacattggctgtgttacagctcacccctcaacggtgctgtgttttgttggcttgctttgtggtagctgctgcatctatatgccgcttcttcttgttaattcgataaatgtactgagcgacttgccggtcaccctgcctgcctttctctccaccatcgtttctgatgatttcaggaactctgtggcagacaggctatggctgttgactactgacatctatacttgggctgaacaattagctcacggacacgatcaacctggacatgatcgtattcatagaagtgaaactgagattgcgacttttttggccaatattctgctctctacatgcattacagtcgaggactacctgtctgttgataagcggctaaagcttgcaaatcttgaagcactctaatcaaagggagatgtgtttcttttctattttatgtatgtatttatgtacggtatcagtcatgttttaatagttgatgtccctgctgatgatccagcaatgtttttttcatgtacataattaatttaactaactcatcttatgcactgaaaacaatctattgttcaaagatagatagacctatgaaataatattgttgtgtacactcactttgtctgttcctgagctgagtg

SEQ ID NO: 36420 - DNA, 554 bp, Zea mays
  Clone ID: MRT4577_133218C.1
ggggggaacaaaaaaaggcttgttaccttgtttaaaacaaaagggggttcccttggtatgtatataaaaagaacatacttgggttcaattttaaaaacctttgggaaaaacaccaaaacggttaggggtgcctttataaaaggaaaataattttaaaaaatttttttttttgggttggatttaaccatttactggcgggagttaaaaatcattttgaaaaaaaaaaaaaaagtagcttggcaaccctaaaccatgttttggatccccacctgaataaaccttggggggggtatgctcaaggtcgcaatgcccctcctggaattcctcctcaagaaagcataaaaatagttgatccccagctttttgacaaaaaacaaatttttccgggccctgatgtttccgggcccaaaaaggtacaccacccccaactccttggccttggggataaaaaataactcgttggccatgcttgatccctcctccaacaaaatgtttgatcccagggcttaatttgtaaaaccccctgactcgaaaataacttttgaagataaaaa

SEQ ID NO: 36421 - DNA, 393 bp, Zea mays
  unsure (1)..(393): unsure at all n locations
  Clone ID: MRT4577_133219C.1
gggttgggtttttttttttttttttttttttttttttttttnnaaaaaaaaaccccccattaattttttgaccccaaatttaacatttcgttaaaaaaaaccccccccttcccattttttgaacatttttaaacaggcaagcgggttgcgtcccactttttttattgcggtccaaaaacaagttttggccttttaattaattaaggggggggccctttaaggggcttttttttttaaactgaagccaggccccccctgaaaaaaaaaatttgggtttgttgcaaatcccattacaggttccttttgtgcaacattttgcaaaaccaatttttttttttgtttttcacaaccaaaattttttcccctttcacaagccctggggtttaatttttt

SEQ ID NO: 36422 - DNA, 343 bp, Zea mays
  Clone ID: MRT4577_13321C.1
attcggctcgaggcctcgccgtcgggcaatggtttgctgccagacggggaattccagtgcgggagccgcgaacggctcaaagatggcacaaaccgtgttcacccgctctctggcagcgatgcagcatgtccaggccctgcacgtggtcatgctcaccaagcccttccttgatgcatgcaagcagatatcggctgagctcgatagatgggtaggtgctatgggcattgtcaagagtgatttcagctgctacatcacaagactggaaaacaagtatacgttagaaccatcaaaacatgaacacttgtacagcatgtgatcaggcagatgctaaaacaagcaccca

SEQ ID NO: 36423 - DNA, 343 bp, Zea mays
  Clone ID: MRT4577_133220C.1
ctccccgatgcctcctctagcaactccatacccccagcgcggcggtgccggagcgagcagagcagccggagggcctgtcggatccgccgccgtcaagatgaatgacgccgatgtatccaagcagaaggagaaggacgggcgaaaccgcgcacaagaggacgcagaaccaccaccacatcatcaacgccggcgacacccaagctaaaaaacgaagccccatcacccccgagaacagagaacgcgcgaaccgcacacattcaccctgcgcagcgcacaccgagagcaaaagacaaaaagaagacgacgtccgaacatcacatacaaaggaaaccaccggacaatc

SEQ ID NO: 36424 - DNA, 193 bp, Zea mays
  Clone ID: MRT4577_133221C.1
cggacgcgtgggcggacgcgtgggtttggatctgcttgttctcgtgtctctgcttcatctgctttcgcttcatggtactgagtactgacgctgtgaagtggaacaagtactctctcccccaaaaaggccggtagacccaaacatcttttcttgcgggctggtaaagccaaaaatttttaaatgtactcgaacg

SEQ ID NO: 36425 - DNA, 438 bp, Zea mays
  unsure (1)..(438): unsure at all n locations
  Clone ID: MRT4577_133222C.1
acaacccacaacccgagccccccaaacccgaagcagcaggagcnccccggaccnngcnnccgcccccgacaaggaaaagggaagagagcnaccacggccagcagccccccggcggcggcccgccgcagcaaggcgacccggggaaggacggcnacccgccagcggggggccgggcgggcggcnaccccccgccggcgcagggcnacccgccgcagggcgacccgcagcagggggacccacagcagggcgacccgccgcagnacgcgcagccgccnccacagcagcagcagagcagcgggcccccccccanggaaggangcnnggcggcccncngcngcngcngccnccnggacgccngcnncngacggaaccanccgngccggggccaacacggcngcaagngaagcaaccagcnnacggaagagcnggaacngggcc

SEQ ID NO: 36426 - DNA, 115 bp, Zea mays
  Clone ID: MRT4577_133223C.1
actacacaaagggaggaatcaacattgcagaacaatcaaacacacttatttacatgacatccacacggttttacataacatcccaagggttgatactagcatttccagcaatggg

SEQ ID NO: 36427 - DNA, 333 bp, Zea mays
  unsure (1)..(333): unsure at all n locations
  Clone ID: MRT4577_133224C.1
ttttatatatatttttccccctcttttttttccctggctctgtgangggtttcaaacggaaaaaacaacccacccccaagtaaaacccgaaaaatccggacccccaccataaagcaaaccaaaccttccaaaagaaaaacctataaaaacttggcgaaaataaaaacaaaaccgtaacctgagaaaaaattatatcccctcacaaatccacacaaaaaacaaaccgaaaaaaaaaaaggaaaagcctggggggcccaaaaaacgagctaacccaaaaaaaatgcgaatccccaaatgccccttttgcagagggaaaacctctccccccaacat

SEQ ID NO: 36428 - DNA, 270 bp, Zea mays
  Clone ID: MRT4577_133225C.1
tctatcaagatcgggatcaatgggttcggcaggatcggaaggctggtgggcagggtggccctgcagagtgactatgtctatctcttccccttgaacgaccctttcatcagcacttacttcattacctacattttctagtacatatcttttctctgacagtggtagctccattatatattggttaattactttaattcctgtttcttttgtttgatgattcttttcatttttttattaatttattttttgatttgatacttttcttttttt

SEQ ID NO: 36429 - DNA, 520 bp, Zea mays
  Clone ID: MRT4577_133226C.1
ttttttttttttttttttcgatagaaggagttatgtattatgtaaggaataatgatgaagggggacgaggggaggaactcgggcccagttgcatctagcttgcggtggactcgtcgtgtaacaccacgatacccttcgagtgctgggagtagcgctcaaccccgatccatactagtgttcttacacatggcagcaaggcgtgcagcgacagcgccggaagcgggacacgataatcaagcgtcgcaaggaagttggtgttctccgacggcccgcggagtcggcacgcctcactgtcgtacctcctggccgcctcctcagcagtgtcgaacgtgcctagccacagccacacgcccttatgttgatcgcggatctccgccgagtaccgccccctaggccgtctcctctgcgcgtccctgtacctcggctccgtcggcacgcccgccgtcgtcactttcctcttgccaccgtcgacaacactccccttgggcaccgtggcattgcagcacggctgatgctccac

SEQ ID NO: 36430 - DNA, 258 bp, Zea mays
  Clone ID: MRT4577_133227C.1
tgcacgcggtcgcccacgcgtccgccatctctcttctcccctcgatcaacagcaacagcggcggtcagaagcttccgtcgcgacagctcccgacctcctggcggtcttcccctctcctagtcggcgcgaatcccgaagcggaggaggaagaggggagcggagtgggggtggggcccatcagccatgagtctcaccggggtcggcctggaggcggcgctacaggcggttgggcgcggcgtcgacgcagctggagaccac

SEQ ID NO: 36431 - DNA, 143 bp, Zea mays
  Clone ID: MRT4577_133228C.1
agctagagcttgttactcgagcggtggcattaaggtggcgcggatgctttgcgaatgttactgggactaggctcgctgtgacactggccggcttgaccatcccaaattcgtagtgactagcgggctctagcgtctctgcagac

SEQ ID NO: 36432 - DNA, 159 bp, Zea mays
  unsure (1)..(159): unsure at all n locations
  Clone ID: MRT4577_133229C.1
aaaacccggggcgcgagcccgggcggagcggtcgtcggagcagatattgtaggttgaagcaaatattcaaatgagaacttttattgccgnccctgaaaaaaggttcatgtgaacatgacttgtacatgggtgtagacaatgatattggcctggcgaaat

SEQ ID NO: 36433 - DNA, 3993 bp, Zea mays
  unsure (1)..(3993): unsure at all n locations
  Clone ID: MRT4577_13322C.1
gatctgggaatctgcacggcccggagcctccagcgaccggctccaccaccatctgcgcgcgcgcgcgcgcgcgagggaccggccggcgaacggaggcgccactgagctctgagcgggtgcggccggcatggcgacggcgctggcgcggcggggcgccgcggccctggcgcggtggcgcgggatgtgctcgagctcggcttcggcgccgcggcgcgccgcggcgctgtcctcagaggagctcatgcggatggaacaagactgcagcgcgcataattaccatccaatccccatggtgttttccaaaggagaaggttcacacatagtggaccccgaaggcaacaaatacattgattttctctctgcttattctgcagtcaatcagggtcattgccatccaaaagtcctgagagctttgatagaacaggcagaaaggcttactctcagttctagagctttctacaatgataagttcccaatctttgcggaatatctgacaagcatgtttggatatgacatgatgttgccgatgaatactggtgctgaaggagttgaaactgctatcaagctggctaggaaatggggttatgagaagaaacatataccaaagaatgaggctttgcttgtctcttgctgtgggtgtttccatggccgaactcttggtgtcatttccatgagctgtgacaacgatgcaactcgtggttttggtcctttggttcctggccatcttaaagttgattttggagatattgatgggttaaagaaaatcttcgaagagcttggagatcggatttgtggttttttatttgaacctatccaaggtgaagctggggtagtaatcccaccagatggctatttgaaaggtgtcagagacttgtgttccaaacacaacgttttgatgattgctgatgagatccaaactggcatagctagaactggtaaaatgctggcatgtgactgggaaaacatacggcctgacatggtgattctaggcaaagcactcggtgctggagttgttccagtcagtgcagttcttgcagacagggatgtcatgctgtgtatcagaccaggggaacatggaagtacattcggtgggaatccgttagctagcgctgtggcagttgcatcactgaaagtggtcagagacgaaggtcttgttgaaagggctgcaaagttaggacaggagtttagggaccagttacagaaggtccagcagaaattccctcaaatcctaagagaagtgcgcgggaggggtttgctgaacgcagtggatctaaacaacgacgcgctatctcctgcttctgcatatgacatctgcatcaagttgaaggagagaggcattttagcgaaacccacacatgacactataatccgacttgctcctcccctcacaatcagtcctgaggagcttgcagaagcatccaaggcgcttagtgacgtgctggaacatgacttgccacagctgcagctgcagaagcagataaaaaagccagaatctgaggcagagaagccagtctgtgacagatgcggccgggacttgtacggatgaatgaagcctccgaacagagatgacttcattttcgtacgcacccatctcgccccagaagaaataataacagagcagaggatgccagctgcctagctacttgggttacggtaatgttatgcgacttgttgcatcgtataccaagtatatgagctattgcaaccttggtgaatatgtcaaataaatgggcagcattcacatgctcaaatatgggcagcattcaaaaaaaaaaaaaaaaaaaaaaaaaaaaaaaaaaaaaaaaaaaaaaaaaaaaaagctcgcccaccaacccagctcgttcgtcccagttgatcaggtcgagcacctagtagcgacctgctcgatcatcagtgtagagtgtcggtaggtgtctgtctctcttgggggctggttgcaacggtcatggcgacgtcgtctcgtcgggtgcccttgctgctgctgtgcctgggcgtgctggtgtcctgctccttcgcggggggcagcttggaccaggagctggacatcacgtggggcgacgggcggggcaaggtccttgacaacgggcggttgctgacgctgtcgttggaccgcacgtccggttccgggttccagtcccggcacgagtacctgttcggaaagatcgacatgcagctgcggctggtgccgggcaactccgccggcaccgtcaccgcctactacctgtcgtcgcagggcggcgcgcacgacgagatcgacttcgagttcctgggcaacgtgtccggcgagccctacacgctgcacaccaacgtgttcacgcgggggcaggggcagcgggagcagcagttccgcctctggttcgaccccaccgccgacttccacacctactccatcctctggaaccccaagcacgtcatcttcatggtggacgacatgcccatcagggacttccgcaacctggagagcaagggggtggcgttccccaagagccagccgatgcggctctactccagcctgtggaacgcggacgactgggcgacgcagggcgggcgcgtcaagacggactggtcccacgcccccttctccgcctcctaccgcgggttcaaggccgacgcctgcgtcgccgtcgcgggcggccggacccgctgcggcgccaccgtcggcaccgagggcaccggcgccgccggcgccggggactggtacaaccaggagctggaccgcacgtccggctccgggttccagtcccggcacgagtacctgttcggcaagatcgacatgcagctgcggctggtgccgggcaactccgccggcaccgtcaccgcctactacctgtcgtcgcagggcggcgcgcacgacgagatcgacttcgagttcctgggcaacgtgtccggcgagccctacacgctgcacaccaacgtgttcacgcgggggcaggggcagcgggagcagcagttccgcctctggttcgaccccaccgccgacttccacacctactccatcctctggaaccccaagcacgtcatcttcatggtggacgacatgcccatcagggacttccgcaacctggagagcaagggggtggcgttccccaagagccagccgatgcggctctactccagcctgtggaacgcggacgactgggcgacgcagggcgggcgcgtcaagacggactggtcccacgcccccttctccgcctcctaccgcgggttcaaggccgacgcttgcgtcgccgtcgcgggcggccggacccgctgcggcgccaccgtcggcaccgagggcaccggcgcccccgcctccgccgccggcgccggggactggtacaaccaggagctggacctcaccctgcagcagcggatgcgctgggtgcagcgcaagtacatgatctacaactactgcaccgaccccaagcgctaccagcagggcctccccgccgagtgctccatgcagtagcgcccggttattcctcgcccgtccaacaatggcgcgcgcgcgcgtgtgtgtgcatgtggtccgctctactgctaccgctacgacgatcggtgtcgatcaccggatcaaggcaagacgaaaggcatcgaaacatggtagataaataaaggacttgacgatttgtaacgcagtagctggtgcgtgcgtggtgtggtggtaagaaattcttctgctgcctgtgttcttgtagcctcctcgtcctcgcccaccctgttggtacgtgtacggtgtacgtagtctgccgccgcgcgctgttcgtgttcgtcgtgtctcgtgtctgtattatactcgtcctccccatcaaaaaaaaaagttgttccatgtacgtgtgcactgtcgagtgatgtttggctggacgtgatcgtgattactcctggaaactatccggcgcgtgcagatcgattgatacatggtcagtcagcgtcactgtatacgccactctatctactgaagcgaattgaagtaaaaaaaaaaaannnccccgaaaaaaaaaaaaaaaagaggcc

SEQ ID NO: 36434 - DNA, 375 bp, Zea mays
  unsure (1)..(375): unsure at all n locations
  Clone ID: MRT4577_133230C.1
ctcaactggtcctttactgttggagctccagccttgaataatcaggagcagggtcttagttctatgctgctattagcctnccctctatcttcgtgtagacattatgcttctaatctgccaccaatgggccattgcctaagcccacacccagaccggcgcggccggcatagaagcgcccgtgggggagaccccgccggcggccgtcgtgccctaggagtctgcccccgccgaagacggagcaggagctgaggttgatgctgctggttctgctgctgaccgagagattccgggcgctgaatatcacgcatgcgccgagccaaaggccgctactcctggtagttccgacgagcccaccggggccgaaccgatcagcta

SEQ ID NO: 36435 - DNA, 316 bp, Zea mays
  Clone ID: MRT4577_133231C.1
ctgcgcgcaccgacttcaagcaaacagtctggtaaaagagcagcaacgaaagcgaaaggtttcaggtgcggttgtgccattatgtgacagagaatgccagttttctccctttttccgctcttgctggagtgttgtatcatgtttgaggcgctttctccttttatttccttttcaagtattgtgggtaagcttatgtatacaatcactcattttggtgcatgcgtgcaatcaaactatccagagcatccaatctagatccaacggtttcatatgttagttgttaaaattaaaatttgcttttatattttttctttta

SEQ ID NO: 36436 - DNA, 899 bp, Zea mays
  Clone ID: MRT4577_133232C.1
gaccactcactcagttcttatcagcactactacatgacatacgtggccgggccgggactcttccatctccaggttgtcttcgttgtctggtcttggggctcatggaagagccgaggaggcctcgattcttcaaggtcctcgttgtcgacttcgcgcgacgaatagagatacctcaaggcttcctctgccattttccagaggggagagacaggaagcccggcaccacagcggtggcgtctgctaaagtcgtcctcaccaatgccgagggtagtagtatctggccggttgcgctagagtcgaccgacggccgcgtgtttctcaccacggggtggccaaagttcgtggaggacaaccgtttggggaagggcgagatccttatcttcaagtaccacgggagaatgcgtttcgtggtctcgatttttggcgtggatgccgtcgagaaggcaggtcgctggtctgcaaggagtggcgcccaggccgcggagaagacaggtaccatgcaacgaaacactaaaggggatgaacacatttcatcccagggcacagctggtttccttgactcacatgaagtagtttgctccaaagattacttggagacgtacttgtcagaggagacaatggaggatgataaggctaaagcagtagcggaagtaatgaagactttgcgtgttgacaaattgacagtagacttattctgtgctatactctgtttgtgtgaatggaaagtcgaggcagctgcagaatattttaatttttgtaggggcaaaccacaaatcccggaaaatctctgaagcagaaatttgtttttcagtttgactttgtaaagggacaacttacacgcttcttcccttgagatatgattctgagaaatcaagaagaacataatgagtcccctaatt

SEQ ID NO: 36437 - DNA, 329 bp, Zea mays
  Clone ID: MRT4577_133233C.1
ctgtaccagtcctccgacctgctctcgggatggactcgccggggcgacgggagaccactcccttcacacgccttcagcacctactgccaggtcctcgagtgcaagacatcctctatcgggagacgcagaggtcccgcggcttcgggttcctagaccttctccaggtggcaggcgatgcggaacgccatcgagggcatgaacggcagggagctggacggccgcagcagcaccgtcaacgaggccgagtcccggggcacaacgtagcaggcgggggagggcgctactgtggtgaccaaggacgctggggatacggaggccccggtcgccgg

SEQ ID NO: 36438 - DNA, 297 bp, Zea mays
  Clone ID: MRT4577_133234C.1
taccgtccggattattcccggtcgacgagctcactagtcggcggccgccctttttttttttttttttttttttttttttttttttttttttatttttttttgctacttacaggcttgtaatatatcatcaaaccagcgtcacaccgaagctgaaaaacaacgtaagcaaaccgcactacgacgcgcgctacccagggccgagcacctagacacgggggccgaaatgcagccgttttcggtgtagagcaccacctgtacagacacgcaaagaatgggagacgaaggaaaaataccttt

SEQ ID NO: 36439 - DNA, 436 bp, Zea mays
  Clone ID: MRT4577_133235C.1
aggccggccgggccgggaaagatagctgtagaatccccggccgggatggtcccgtgcgtgcgctcactcctttgctgtttttcttctctccgttcaccttgcgtgcgcgacatctagggcgaccgccgccgccgccgccgccctacgcccagcagcccaggtcttcgtcgcgccctttgccggctacgagcacccaccacaccagatcactgtaatccaggctgaattgtggctggtattggcgatataagcattcgttagctgtttaaattgtgtcttttgtctttgattaagcgtcattggaaaggctgtcatgagaaaactcttttgttcaaacgtttctctcctgtaatatgaatgtactgtgacaatccttcatcctatgctagaatcacatattttagcttcgaaaaaaaaaaaaaaaaaatttgcggcc

SEQ ID NO: 36440 - DNA, 166 bp, Zea mays
  Clone ID: MRT4577_133236C.1
cctacgcgtccgtgatgacggacccagatccaatgacaggagaggaggcagggccgcgggcgcgttcagaattccgagcggcagcggcgctcctaatgcacgcggcacagatgtcccggaggccaatggcaagctcacggccaggcccttggagcatgctagccaa

SEQ ID NO: 36441 - DNA, 417 bp, Zea mays
  Clone ID: MRT4577_133237C.1
aacgggaaagaggtaacccaagcaaaacctatcccataaaaaatttggggccttggaaccaaaacaaggaaacaatcagccatctccgggggaggggggggtttggtcttctcaaaaggagggggggggctgccaaacaaaatggggctgcccattcaacagctgcaactacattaacaaatcaacttgtatggttggggggaccgcaccccaaggttaaagatcttcattcattggggggccgttcccaggacgtctaaaaggggagactgtccccaaaaaaaacctggttagaaaactcatccaagaatgcccgcacagaaaggaaaacgcaaaaaaggagggctaacccctttggaaaaagggggggggaaaaataacaaggttttacaggccactacacaggaacagaggggg

SEQ ID NO: 36442 - DNA, 329 bp, Zea mays
  Clone ID: MRT4577_133238C.1
ggagttacgtttcgccaacaaacgctttttgtgattaaaccaaaaaaaggatggaacctgtggcatgatcctccaatgcgagccaaaaatgctaacgacgttttcactgccctgacagtgcaattatatcacaatggataaagttcactgtcgcgtgggcaagctacgactgttccaggtaccaccagatatgtattgatcctaggattatcctctgtctgaaagatggcttatagggtgcatcccggtgcgtcctaattagctggtgccggggacagaaagcacaatatgagagtgtccacagatacgaggcttgagaccatgggcgc

SEQ ID NO: 36443 - DNA, 444 bp, Zea mays
  Clone ID: MRT4577_133239C.1
aaaatatgcactgagattttgtcttcacctacacataatgaaatagctagggaattttgggtaacattggtttggtttaaactttgcacggtttggcccacaacaaatgccatgggttttctatttgcccagagaaaactttcagcgcacaagtactcttggtttctgctttgcttccaattagaactgcagtgtttgagacgacagtaccataatttcaactaaagtgtacatcttcaatcttctttgcaaggctatatataaacacatgtaccatcatatatagattcggttggtggttgcatccaaagtagcacttctcatcctatgagtagtattccggtgtacaaccaacaggattggttcaccttggaaattatctcgagacaatttagaattgtgttgcactatagttattacatatgttgctttaaaattacaagc

SEQ ID NO: 36444 - DNA, 241 bp, Zea mays
  unsure (1)..(241): unsure at all n locations
  Clone ID: MRT4577_13323C.1
tcttctcctctaaaaactctnctccaacgcgcgcttttttctacctggggggcggccctaaaaccctaaaacccccccccttcctaaccacaaccaacaccttcgtcttctttcccaccactcaacatccatacctcatcttccacttcaaaaaccacctccgcaccatcgcttctaaagtcttgtctccgtcgctcatctccacccccatgccgaaactccacttttatacctacacctt

SEQ ID NO: 36445 - DNA, 928 bp, Zea mays
  Clone ID: MRT4577_133240C.1
gccggccgggcctgcaaaacaacagggcattatagcattgacagatcgttcatcgtagcctcgtccagtcgtctcccgggatcttctccggctataaatttccgccccaattctccaatccagatgcgcaaacatcgaatcgtctcgctcgtggctgccctgctcatactgcttgccctcgccgtatcgtccacccgcaacgcacaggaggattccatggccgacaacaccgggacgttggcgggcggcatcaaggacgtgccggggaacgagaacgaccttcacctccaggagctcgcccgcttcgccgtcgatgagcacaacaagaaggccaatgctcttctggggttcgagaagcttgtgaaggccaagacacaagtggttgctggcacgatgtactatctcactattgaagtgaaggatggcgaagtcaagaagctctacgaagctaaggtctgggagaagccatgggagaacttcaaggagctgcaggaattcaagcctgttgaagagtgtgctagcgcctaaggatctctccttcaccatgtgcgagcctgaagctcaaagcaaagttgcagaataaggagccgcctcacaacatgctagaccatgctcccttgtgtaatttcataagactacaacccttttagggcttgttcggttgtgtctgtatctaagggaattgaaggtgattaaatttccttctatacaaatagaggggctttaatcccctccaatactcttcaatccactcctaaccgaacaagcacttaatatgatatcttagattgccgtacctgtgtaatatcatgaataaaatttgctattatgtattctaaggtttatgaactaccatacatggcagaattctcacattacttggctcaagtcttcggcttggaagtttacatgcagtttttttttggtc

SEQ ID NO: 36446 - DNA, 279 bp, Zea mays
  unsure (1)..(279): unsure at all n locations
  Clone ID: MRT4577_133241C.1
ggccgctncgngccgcgcgctgagctcanggaccncgagcccggcaccagggacagcgnccgcaccgggcgcggcggacagaacnnccggcccgacaaccccgncnncggccagncnggngcagggaacaacngggccaagggccacnacacagagggcgcngagcgcaacgacncngngcccgacgncgngaggaaagaggcggagaacngcgacggccnncaaggannccaagnnngccanncccnnggaggaggcacaagancnggaangggcacc

SEQ ID NO: 36447 - DNA, 1021 bp, Zea mays
  Clone ID: MRT4577_133242C.1
cattgggtacctcgaggccggccggggcagcttcccgaacgaaaatgtcctgtcgttccctttccaaccccgtctccgtctccgcccgccacaacaatatcgcattgacagatcgttcatcgtagcctcctccagtcgtctcccgggatcttctccggctataaatttccgccccaattccccaatccagatgcgcaaacatcgaatcgtctcgctcgtggctgccctgctcatactgcttgccctcgccgtatcgtccacccgcaacgcacaggaggattccatggccgacaacaccgggacgttggcgggcggcatcaaggacgtgccggggaacgagaacgaccttcacctccaggaactcgcccgcttcgccgtcgatgagcacaacaagaaggccaatgctcttctggggttcgagaagcttgtgaaggccaagacacaagtggttgctggcacgatgtactatctcactattgaagtgaaggatggcgaagtgaagaagctctacgaagctaaggtctgggagaagccatgggagaacttcaaggagctgcaggaattcaagcctgttgaagagggtgctagcgcctaaggatctctccttctccatgtgcgagcctgaagctcaaagcaaagttgcagaataaggagccacctcccaacatgctagaccatgctcccttgtgtaatttcataagactacaacccttttagggcttgttcgtttgtgtctgtgtctaagggaattgaaggtgattaaatttccttctatacaaatagaggggctttaatccactccaatacttttcaatccacgcctaaccgaacaagcccttaatatgatatcttagattgccgtacctgtgtaatatcatgaataaaatttgctattatggattctaaggtttatgaactaccatacatggcagaatcctcatgttactttgctgaaatctttgttggaagttggaacgtacatggcagaattcccaaaaaaaaaaaaaaaaaacccgcggcc

SEQ ID NO: 36448 - DNA, 594 bp, Zea mays
  Clone ID: MRT4577_133243C.1
cgttcaacgacatcacactgtccttttcaaggttaacatatgcgtaacatacatgtggttgatctgcatttacagttcgtgaaaactacatatcagaaagagaaaaaatagtggacaatgtatcccatccctccgtttgtaccagtcggtgactgacaagagatggaaatccagttggctggcttgatcctacactgtggttgagatctggcaagcaaaggccaatggtccatggagacggagcagcaaaaggccaccgaatccgcacattgctggttccatatgtctctcttttgcctagcagcacatcactagaacccaaagagagagaaaaacacaagtgccagaatcagcaacctctgctgggatttaggtcccattattaggcctggactgtccctaattttgtttctaaacgctatataatccaacgatgtgtaaaacaagaacagatgaacagctccattcacgtggtttcctgatctttttcagattgtttgccgtcgagagagagagagagagaaaaggtcataatggaatcaggtgccgtcttgccaaataaggtgcttgccttatcttggcacagcagtcagc

SEQ ID NO: 36449 - DNA, 1008 bp, Zea mays
  Clone ID: MRT4577_133244C.1
cattgggtacctcgaggccggccggggaaaaagtcgcagcttcaccgaacgaaattgtcctgtcgttacatttccaaccccgttctccgtctccgcccgccacaacaatatcgcattgacagatcgttcatcgtagcctcctccagtcgtctcccgggatcttctccggctataaatttccgccccaattccccaatccagatgcgcaaacatcgaatcgtctcactcgtgtctgccctgctcatactgcttgccctcgccgtatcgtccacccgcaacgcacaggaggattccatggccaacaacaccgggacgttggtgggcggcatccaggacgtgccggggagcgagaacgaccttcacctccaggagctcgcccgcttcgccgtcgatgagcacaacaagaaggccaatgctcttctggggttcgagaagcttgtgaaggccaagacacaagtggttgctggcacgatgtactatctcactattgaagtgaaggatggcgaagtcaagaagctctacgaagctaaggtctgggagaagccatgggagaacctcaaggggctgcaggaattcaagcctgttgaagagggtgctagcgcctaaggatgtctccttctccatgtgcgagcctgaagctcaaagcaaagttgcagaataaggagccatgctcccttgtgtaatttcataagactacaaccctattagggcttgtttggttgtgtctgtatcgaagggaattgaaggtgattaattttccttctattctaatagaggggttttaatctcctccaatactcttcaatccacacctaaccgaacaagcccttaatatgatatcttacattgccgtatctgtgtaatatcatgaataaaatttgctattatgtattctaaggtttatgaactaccatacatggcagaattctcacattacttggctcaagtcttcggcttggaagtttacatgcagttttttttttgaaaaaaaaaaaaaaaaaagcggcc

SEQ ID NO: 36450 - DNA, 295 bp, Zea mays
  Clone ID: MRT4577_133245C.1
ggaacggggggttatttaattgagttttttaacagtctaataaggctaaaaaagcttccgcctttttacaaaaagtggcctgggggattagacatttaaatcagagccttaacaagggtgcaactattgtttttatgtttcggccactagccttctttggtttgccttttaacaggagcaaaatgtttttggatttttcccctccctgcactcaaattcattggggggggaaccagttgccattttaaaaaccatcccgtgcaggcggtggaaggttgacctccccttgggtggg

SEQ ID NO: 36451 - DNA, 268 bp, Zea mays
  Clone ID: MRT4577_133246C.1
ggaaatcctgtgggcctttctgtcccacccctgtcagcactgtgctactgatgatacatcaccctggggaattcaaccctggtatatcccaactgaaggccacaaaaatgaactccatctacaagtgattacctagttgtgagctgttggcatgtggttagaagccatcagaggtgcaagggcttagaaaagaccctggccagaactgactccactcttaaacctgggtcttctccttggcggtgctgtcagcgcacagacccatgcg

SEQ ID NO: 36452 - DNA, 2204 bp, Zea mays
  Clone ID: MRT4577_133247C.1
tttgaattcggcacgaggggcccatccacgcagcccaaaccagtttagagttcgaactccgttgggttcgtctcgttttggtcccacgttctcgcagctgacgccgccccgttcgcctccgtcgccgccgccatcgccaccgccgaaccatggagaccacggagccgtcgcgtggcaccaagcgccctctcaccgccactgcaggcgatgacgacgatgctggcctggagcgcaagccgcggttccctaaggggaagaaggccaagtaccgcgacgtcggtgcggagggaggcccctctggcaacgctgtggacctcgacagcatgctgaatccggagcttgcggcggagcggcgggcgcggcagcgccacggccagctcaaggagggagacgacgcgaagggaggtgccgctgaggtgaagggcttcgaagtccgctacaacgacagtgttaactttgttgacgatggtatacggatagagccgtttaacttggagcgagaaagggaagaagggtatttcgatgagaatgggaactttgtggagtatgcaagaggcaatgagattaaggatgcttggttggacagtgtggaagttgacccaacatatgctgcaaaggttcagaacaaaggcaaagagaaagtagacgagtttgaggacctctcttccgatgacattgggaggctaaaaaggcagatagcaaacttgcttgagccaggagaaacgataatgcaagccttgaaaaggttgaagggtacatccacggataaacgtggaaagatggctgaggggactaaacgtatatttgatgaattgactgaagctgccatgaagctaatggagaacggcgattataatgtttactcagatgatcgtgagacctttgaacgcgaggctgctgggtatgaacgtttggcacgtgctcgacttggtttgccagaagttgatggtgtctctgaagaccaaaaatataatcagacaccatcatctgcactggaaattgaccaaccatcatctgtactggaaatggaacttggtccctcgactgccaatgtatatacagccactgctgcaatcaatgatgatgacagtaacctggacatgtttggtgatgatgacaacgatgataccaaacatagttctgatgccaatactgtaggttcaggtttgaaacctggaacctcagatgtgaagaaagccgataatggaagtgtggactcagactatgtatacgatccttcttcaggttactactatagcagcagcacaggctattactatgaccctaactctggatattatggttctgcatctacgggaacctggtattcatacgatgagcaaactggaacatacaaagaaattcaggatgaacaaactggcacggttaaagaagagctgggagatgccatcaaggagtaaccgagttgctacggcccttctcgttcttgattgctgatgcaactgaggtagttcagaccgcccagtgttctttaaagcgaggcagcgagctgtagcttcagtttctcggtaggcgctttgggccacgactcgctaaactgccttgatagatgttttatgaagaaattaagaggaaaccagtcagatcatactataggttgtaaaccagaaagtgatcgactgcaactgtacaattgcaatattaccgttctcggcagaggcttgttttattagctactattcctgctatttctgtagaaatatgcaataacacccaattcctatgtgaagatgtgtttgaacttaacagatgagaacgttatgtttggtgtgattatgtctaaggctcgagagcgttcagattggtaaactaaatcgggcaacctgtgatcgttggagtctaagaccggcgcggggacagtcaggcagagaaaaggttcggaggttggagacgcttcagggttgttcaatcttactgtactctacaacctcttcccgaaaaggtgggaacaatattttagaccgacaacgtcttctcgggaacacggttaggccctgtttacctgtttcgacgccaaattctctcccctgtaaaaactacacttatttctgtaaatttcctgtaatattttttttttgtgaaatttctgtctcaaacaagcctatggatagttttttagctatacattggcgaagtatttgttttaaaaaaaaaaaaaaaaaagggtggccgccgattagtga

SEQ ID NO: 36453 - DNA, 389 bp, Zea mays
  Clone ID: MRT4577_133248C.1
gagatctaccggcaccaggggttctatttccaagagaaaccctttaacttttgtccacacccattctactgagcccggatccaaaaacattcacgctgagttttttggcacacaaccttcacttacatacaagagatcaattggacacgtgtcgtgatgagggaaccatatcttcagattgcctggttaaatcttgtttgaaagttacacatagatctatttcaaaggattctttaacacccccttctccttgtagttcctggattgacgggccattctgctccttcttatgtgaaacactagcactactccatggcaagcaaacgatgtgatgtcgttgttagcaaccacagagctcttggtgcagagtccattacctcatatagctt

SEQ ID NO: 36454 - DNA, 263 bp, Zea mays
  Clone ID: MRT4577_133249C.1
atatatatatatatatatccaacctttagattttgctacctactcactaaaagtacctgatcattgcaacttatatatatatattttggatgacgaacaacttagaaatgatatcaaggatatatataatatcatatcttgtgtatgttcccgtaaaaaataaccaccaatatctttactactctataagcctttattgtaggcctacacacccgtgcgccgtatctgcctctcgatgcccgtctgcccgcgcgccccactct

SEQ ID NO: 36455 - DNA, 113 bp, Zea mays
  Clone ID: MRT4577_13324C.1
ctggtgatgaacttatgatgtatggggaaggtgaaggcatgagctttggatgtgatgacataaaggagattgaagctggaggtgtgagatacagaagaggaacaagtgatgac

SEQ ID NO: 36456 - DNA, 285 bp, Zea mays
  Clone ID: MRT4577_133250C.1
aaacagcttacggggcaggacttattttttggcctttgcaagagttttgcccgtaaccctccatttttacaactaagtttccttcacccgaaaaaaaaactttccttttttaaaacccccaacaaaaaaaatgttttgcacaagaagcaataaaacgttgaaaacaaaagagacaattcaaaaggccaactcagcctcaaaaatgatgttttgctgattgttttgccctaacactactgcttttttggaaagggtcctgacgggggctacataatttaacctttt

SEQ ID NO: 36457 - DNA, 302 bp, Zea mays
  Clone ID: MRT4577_133251C.1
ctctatgagaaagagttcattcatagttcattgtatcaacataacgaataaattaatatatctacatacttataaacttataataggtaacaaactaactaaggggaagagttatcaaatctataaaaatcatcccagcctaaatgcccatgtcctgtctcgacttcttccatgacttcacagcagattctgtccaattcttcaagtataatttcaaagaaatctccgctttgagtctctgatgtccagggattcataaggcctgatctcaatagcacgacatgatctgcatcacgtacgat

SEQ ID NO: 36458 - DNA, 527 bp, Zea mays
  Clone ID: MRT4577_133252C.1
cggacgcgtgggcttctccgcctccgcctccgcctccgcgtgacttagacttggggtgtcgtcgccgagttttctccggcggagggcggcgcgaccggcaaccagcgtgagcgcgaccactcggcgacatgactcgcggcaaccagcgtgaccgcgaccgtgagcgcgcggcggcgcggaagcccaacgccaagggctctcaggacgggctcaccccggagcagcgccgcgagagggacaagaaggcgctggaggagaaggcggccaagaaggcgcagcaggcagcggccggcggcaccgggacctccaccgacaacaacaacaacaacaagaataaggcaggtggcaagaagtaggcgcccccgtccacgcgcgcgccgccacctctgtacgattatcgatcgatgcctttagcttgtaaacctgttcgcatccacctagatgcgatgcttgttgggtcataaactcgtcttctgttactctgatgatatccacatttggtgatgagaataatacattgtgttctg

SEQ ID NO: 36459 - DNA, 470 bp, Zea mays
  unsure (1)..(470): unsure at all n locations
  Clone ID: MRT4577_133253C.1
agcagtggtaacaacgcagactactcggtggaaacaactgtctaacgaaaaaccttatttactgactttatatttgttaacagtgattactactaccgntcttgaagcgaatacttaactgtcaatctcatttatgcctnttaataaactagctggtattntgataatngactttgagtattgctttgaggcaggttttgtaaagnactacggatacgctttttattaatacaattgataggacttatttacttgttttgtatggttatttgtncgttntttntattgntaaaggttagttttgatttttgtgtttatngtagtgttattggtgtaatgcacttacaatntgatagttgttatggagtttgtggttagatgtagatagggtattatggttagaatttttgtttatgagttgaattgttagttgttggtttggagttttatattgtactggaattatgatt

SEQ ID NO: 36460 - DNA, 527 bp, Zea mays
  unsure (1)..(527): unsure at all n locations
  Clone ID: MRT4577_133254C.1
nnnnnnnnnnnnnnnnnnnnnnnnnnnnnnnnnnnnnnnnnnnnnnnnnnnnnnnnnnnnnnnnnnnnnnnnnnnnnnnnnnnnnnnnnnnnnnnnnnnnnnnnnnnnnnnnnnnnnnnnnnnnnnnnnnnnnnnnnnnnnnnnnnnnnnnnnnnnnnnnnnnnnnnnnnnnnnnnnnnnnnnnnnnnnnnnnnnnnnnnnnnnnnnnnnnnnnnnnnnnnnnnnnnnnnnnnnnnnnnnnnnnnnnnnnnnnnnnnnnnnnnnnnnnnnnnnnnnnnnccttcctgaaagagagaaaaattcctgaaattttttagtagatagtttacgtgggcattgttgtaagccgtcgcaacgcacgggcaaccgactagtagttatatacggcacagcaggcaccacttcgttgcgcatttacaaccatccgtttccacagattatcatctacctgcagacagttttggtttaaaaattaagaatcttgaatcgcaaaaaaaaaaaaaaaaaaaaaaaaaaaaaagcttgtg

SEQ ID NO: 36461 - DNA, 228 bp, Zea mays
  Clone ID: MRT4577_133255C.1
cattgggtacctcgaggccggccgggattaggcttcaaaactaaataacaaaacacaaaacatttatttgtagtcaaaattttataagtttgactcaaaccttatccaaaacgataaataataggacaccagagggagtatatctctatttctctccttgatttctatgtaccacacattttcacttttccttaaatccatttgtcaaacctaacgtcttttaatttg

SEQ ID NO: 36462 - DNA, 494 bp, Zea mays
  Clone ID: MRT4577_133256C.1
tgaaggtagtgcatagtgacttggtttttgcagagaagacatccagaataaatgataccttttgtgcaaagctcatcgcgcgaaagaggggatcatggagatctaatggggcaatactggcatgcaacgttcctattttttttcacagtccagaccaaaacatcgctatgacaagacccattacctcaatctaaacgacaaaaactctaaaacgaaatcgtttgagagaatatgctggaggcttaactcatccacctaccaaaccaacacaaaattttagatcgatcataatacagatgacacccacatgcacaattatgtccaaccatccaacagaatcttcggacctgttcctttacatatgctcaccggaggcctgctacacacctccctcactagctgggtaaccagctgaaccagaaccgcttcgttgttgttctagcgtaagagggtcacatgctagggcttcatgctgtggaggtggataatgtggt

SEQ ID NO: 36463 - DNA, 444 bp, Zea mays
  unsure (1)..(444): unsure at all n locations
  Clone ID: MRT4577_133257C.1
attacactagtcggcggccgcccttactttttttttttgaacgcaaatctgaagagactgattcaaacccactgcagttcatgctcattcaaaaaaggcacacaataatgttttacatcggcacctcacattaatttacaatggctgaaaggcatactgatcactgaatccgactctaaaaacgaaaaacaaggaagtcagcgggcatggatgaatctatgacagacgaggcttcatggagttaggatagcacaatgaactagcactcgctctgaatccgtaatcatccactcactatgtatatgtcagaacactatcattcatcaagctatctctagctggcatgcctcagaaacgctcaaactggctcatagcttgccgtataaacatgtgcagaccactaacaactgtcagctccacatgntacaacttctcggagaagac

SEQ ID NO: 36464 - DNA, 481 bp, Zea mays
  Clone ID: MRT4577_133258C.1
gaaaacgggcggacccacgcgtccgccaacccgtccgaaaaaaaaaaaaaaaaaatttaaataaaaaaaaaaaaaaaaaaaaaaaaagaaaaaaaaaaaaaagggggggcggttttaaagaaccaaacttaccttccccggccttgcaaggtaaaagtttttttttggggcaaccaaaattaaattaatggcccgcggtttaaaaacgtgggactgggaaaaacccgggggtacccaaattaaatggcttggaagaaaatccccttttcccaagtgggggtaatagcaaaaaggcccgaaccaatggcctttccaaaaatttgcccaccctaaagggcaaagggacccccccctgtacgggcccttaaagcccggggggggggggggttccccccagggggcccgttaaattggcaagggcctaagggcccgttcttttggttttttccccttcttttttggcaacgttggcgggttttcc

SEQ ID NO: 36465 - DNA, 1199 bp, Zea mays
  Clone ID: MRT4577_133259C.1
atttaacatctccctgtgttggaatcattgttatcgtgggtctgtactttgggctctatgattccatcaagccagttgtccttactggcaacctcccaggacaatttctttgccagtttcgctctgggttggctgatcactaatggtgctggtcttgcatcttaccccattgataccgtccgcagaaggatgatgatgacatctggtgaggctgtcaagtacaagagctccttggatgcgttccagcagattcttaagaaggaagggcccaagtccctgttcaagggtgctggtgctaacattcttcgtgccattgctggtgctggtgtgctttctggctatgaccagctccagatcctcttcttcggaaagaagtacggttccggcggtgcttaaatggagaaatatgatgacgaacaagagcagtgtgtgtgttcccggtcctttccaatcaggatctggtgaagtttttgcctttcatatcgaagaaattaataattcatgtagagggaggattcttccaacaatttgttttggatggagacttagatctccaaacactcgtaactatcctactaggtggtgacatcagtccccaaaaacgtttatggtcatagagtctgcccttcgtttgtcagtcgggcaatttttcttgcatacaatgccttcgtttaagtatcggatgagttgctgcgactaattatttgtttgtctttaccttttgcaatgcttgatcgttgatagcaaaaaaaaaaaaaaaaaaaaaaaaaaaaaaaaaaaaaaaaaaaaaaaaaaaaaaaaaaaaaaaaaaaaaaaaaaaaacaaaaaaaaaaaaaaacaaaaaatgcaaagacaaaaataattaaataaggtcaaccaaattacaattaaactgaccggagaaaacccatgcggttaaccaggtaaaaaccctgtggtaaccaaacttatttcactagctgcccatccccctaaaagcccctggcgtaataccgaaaacacccgtaccgctccccctttgccacatgggaccaaccttgtatgcgaatgtgacccgccctgtatcggctcattacccgcggcgtgaccggtacattcgccaagtctcaagcgtacaatcgtcagccccttatccctcccttcttcccctagtttcccttcttttcccgcaaagtttttcagtctgggccctccctttc

SEQ ID NO: 36466 - DNA, 196 bp, Zea mays
  Clone ID: MRT4577_13325C.1
gtcgatggcagtccgccgaggatgtaggcagagctgcctattcaagacggtgggcgtggcttgcgtctggtgctgcaccgagctgcacaaatactacctctatgtttacatggtttcttacggatacctatccacccttgattacgttaatgactgcttcacctgttcaaccaatgttattttatcgtagactacc

SEQ ID NO: 36467 - DNA, 426 bp, Zea mays
  Clone ID: MRT4577_133260C.1
aaagacaaacccgaactgtattcatgagttgttaaatatcaggggtggacagatacacaggaaaacgggtctattatgcaagtaacactgacaaaaaatgctgaaaggacaacttgcttcaattggagagggatgaaggggagataatgacccatattcagatgaataacgacatgctgttagtgcgaaggctaacaaggttccgaaggtggaatggttgtgttcatatggatttttatgattggtagagagaagcaattaaaattttgagtgtaaaataagagaatattgttgttatctttttggatgatttcggtgtggagtaggaaagtagtaacatttttaatgtgatcagatttctgaagatatgaggtgattgagttatggattatggattacagtaaagattggaatagaacttttttt

SEQ ID NO: 36468 - DNA, 128 bp, Zea mays
  Clone ID: MRT4577_133261C.1
tcatagctgtcactcatcgtgctgacatccttgatcctgctctgatatggtctcgacgggtggcccgaaagcttgcagtaccacacccatccggtgtagcactcgctagggtctatggaatccagtca

SEQ ID NO: 36469 - DNA, 252 bp, Zea mays
  Clone ID: MRT4577_133262C.1
gactgcaggcgccgccgctggtttccctcccctccgccggccgcttcggcggcgggagggtggggaaacctcggatccgcgcgtccggtgtgtaaatagcttgttttgcctgatcgtcgtcagtgctatgggggtggcggcggcggcgacatgtttccccatggcgatgctctcctccggtgtggcgtcgtcgagctcgtgggtggtggtggttggtctggtgtgggtcggttgcctgtcccacgtgcccct

SEQ ID NO: 36470 - DNA, 327 bp, Zea mays
  Clone ID: MRT4577_133263C.1
cgcactcgtccgcactgccgaagctgattgatgctctcatgatgcctatagtgcgcactcgcgacaagaaccatgactaccacccctacatcatggaagtgttccaaagctgagccgccaaggatatgcttggacttgaactactccaccggaccctatgattctttcagagtttgcgtactctgctgactcggaggagtccaaggaccaggaaaagaagtcgcttatggggcacacgtcatcccgccagagtgactcgaagctcttcgccctgaaagaggactaaatcagctttatcctcatagcagcattgcgactccaagaagc

SEQ ID NO: 36471 - DNA, 879 bp, Zea mays
  unsure (1)..(879): unsure at all n locations
  Clone ID: MRT4577_133264C.1
ccggccgggatctttttactgctctaccatcccctacgggctatggccctatttctaccgccacgcccgttcttctccccgcgtgttcgagtccatcttcttgtgccatccaacccctcgtccgtagatcgatcgctgctacgcgcctgcatgctgacggttcggcgccgctgatgcgatgaagctctcgtagcccgacgttagcgagaagacgggatcgcacaagtactgaggtctcggccaggtgtcgatttggttcaaccgagggagcacctgtgcattgctataacaacaatgctggatcgggttgccatgtcagctgaggattctgccctggctgaagatttgcaggttgaagaggttctccggttctcaattcagtcggggaaggcctgtgcagtttgcaaagaaggcatccgatcattggatgcctcgtggaaacctgaaaattgtgaccatgtcatctgcattgcctgcttctgccagtatgcacctgagactgaggccactggactgcccaggtgcgcggtggcatcttgtgattctttgtgcaatacagagacacatcagggcaccaatgtgcctcggtgcacttcgatctcgattgaagacatggaccggaaagggaagaaaccactaggtagtagtacaattcaagagcttggtcaatgctctcgaggtgcgagcacaaatatcagcagtgagttatactgtgccatctgcatggagacagtgcacatcggagagtccttttcccgtggatgggatgtacgcacacattctgcatcaggtngtgtgaagccagtgcattgcntgcgaaagggtgagggagaatgtgctgtcttatcggctggcccttgccccntgggtgcaagggat

SEQ ID NO: 36472 - DNA, 418 bp, Zea mays
  Clone ID: MRT4577_133265C.1
gttattttttatggtctttgcttattccaaggggggcatttaagaccatttgcgggggtaaccccccccggcccgccacgcttgcggaacacacccactgcccggcggaggccaaaaaaaacagcaccaaacacaccggcaaaaaaaaaaagaccaacaaaacacgcaaaaacaagggggcaaaagcaccaaagcaaaacaaaagcgcgccaggtacgaccgaggaggacacccacaagcaggcgaagcaggagaggaggagcccgccgaggaacacccccgggggcacccggcggcagctcgggggcccattccggagacacgcctgacgaggacaacgccggagaaacccacgccgcgcacagacggaacgagcccggcggcagggcggccgacgccgaggggctcctcggcgacc

SEQ ID NO: 36473 - DNA, 541 bp, Zea mays
  Clone ID: MRT4577_133266C.1
ctaaggaggctagctggagctcggggccgttgttttttttttttttttggggtcctttttttttttttttttttttttttttgtttggaaaacgaatcacgaaaacaacccttattatggaaggctttacagaagatttatccatacatgtttgctcattgggggagaccctgtttttcccctagagctagctgtatacggggggggtcagcatggggtaacgtaggaccacaggtttatagacgacattttttgtactaatagccgggcttggttgttaaccaaacgacaaccacgagattgcatcggtttaagaggaaaaaatcttagaagcaaatcgtccccggaaaccggttttactcatgaagcattggatcctttttttcgatgggatccaacttcctccaagccgacaggattagccggtttgtggccctttccaaaagggggtggtttttcgccttgaaggcagcaaaaaacggatttgggcgagttggaaacggtgtttttagcagcacaaaggctctggttgatgaggttc

SEQ ID NO: 36474 - DNA, 276 bp, Zea mays
  Clone ID: MRT4577_133267C.1
attgatagatggttcagaagtgaaactcaatgaattaaagagaatatttattcatggcgattaattaaattatttgcctaacttaagaaaactactgtgcgtaactctcagtttgtgcttaactccatttgacatgaggtgacagaagagagtctgagtctacctgtggaatatgttggtttattttcagtgtttgaagatacattcacaaatacttggtttgggaagacaccgtttaattttaagttaacttgcatgttgtaaatgcgttttatg

SEQ ID NO: 36475 - DNA, 139 bp, Zea mays
  Clone ID: MRT4577_133268C.1
attcggctcgaggtgatccagccggccgttctaggcctgaacccaggccagtggagagaggagactaccggctggatcggcccaatatgacctgggcaaacagtccgttgtgcatcggctgaaggagttgctcaaacac

SEQ ID NO: 36476 - DNA, 335 bp, Zea mays
  Clone ID: MRT4577_133269C.1
cacctaactattcttgaacttgattggcgactcaaccggcgaatcaaatccgatcagatagggcattacatcatggtgcccctattgtggtaagctacacattgcataacatgcgatggaccatatgaatcccttgccaaaaggcatgacttcaatgcaatagcatgacaccaacgatgagcactcaactgctccattcagctaacatacatactctatccacattaaggacctaacgatgctatccttgctaacgctgatggtgcggttcatgatgagtgatgttagtaatctaactacgaatgactggcatcatctaccacagtctacatatg

SEQ ID NO: 36477 - DNA, 347 bp, Zea mays
  Clone ID: MRT4577_13326C.1
tctttgttggaggaggattcatacagttatggctaccaggtgattcaatatgggtcataggtgcagaaagctaagcatctgcaccgggacattgacaccaaccctgctaactttgactgcacactgagacctgacgatatgtgatcatgatcttgaaaggatgaccttagaaactgattttatgactgaatctgttggcacaagatccggtaaaggaccaacagttcagctgagaaaatttaaatatactggtagcatctaggagtgatctgccacatgtcttatgatgacagcagctgggccctcattgcaagctttctgtaagagactatggacatcacatgcgt

SEQ ID NO: 36478 - DNA, 287 bp, Zea mays
  Clone ID: MRT4577_133270C.1
tgcctacacatccaacaagcggagggacgggggcaggcgacaaacgagcgggctcgcctggcgccccgccgccggcgacaaaagctcccggggcccactcgccgggacacaacccggccgcgacgacgacgacacacgcgactgcagggcgcgatacgccaacgaaacaccccactgcgccgcggacagagggaaacaagcagagacaaccgcaccaagaaaccaggaagcgggccaaccagagctcccaagcaactgaggcaactgggaagaaaccacgcggaaaa

SEQ ID NO: 36479 - DNA, 550 bp, Zea mays
  Clone ID: MRT4577_133271C.1
cgaaaatgtagtagttaaggcacaatactatagaccttatgacctgtgtttgactaaccaatgttctttatttttttactagttatatgtcacttaggtgctttattttgtttactagttatccgatgattcatagatggtttgcttaaatggtttcacttaggtgcttttgatataatcatgtacttatgtttaattgggaattttgggatacacttacaactagtaagtcaggcgttgttaataaaatattgacctactaaaatacttaccgcttatccatatcctaccttgttgactttgcattattcctcccacttgctgagccccaaccataagtgagctcaccccttgctaatattttgatcagagggtgatgatgaagacattgcagatgatatcgacgagtactaagtctaacgatgcgcgagtcacatttctgtggaagagtgtccatgtttaattacgccgtactttgataattatacttgttaagatactttgatctagatgatgtaataaagttactctactccctttatcttttgat

SEQ ID NO: 36480 - DNA, 589 bp, Zea mays
  Clone ID: MRT4577_133272C.1
gggggggaggggtccttttttttgtttaaaaaaaaggggggcccttcatgcatggggaaaaaaaatacaacccccccaagtatgggtggtggtgttataaaaaatttttcccattgccccaggggggaaaaaaattcccagggccccccctccccgggtttccatagcctttgcccccggaatatgaaccacgggaaccccccccgccacgggagccttggccgccaccacgggagggctgcctgggccttgaaaattcaccaaacgtttttgggtttactttgggccgttcaaaagggtttccccttccttttggccctccacgtccaaacgttccattaaagggggaatcaaaaaagtcgcccttgacataaacaggtttaaaagctagctttgggttggcagtttcctcagcctccagttttttataaaacacattatttcccacctcaccatccttggcccttggcggggattttttaccaaaagggccccatacttaatttttggtaaacttctaattcttggccgggaaataaaatttttcagggaatgctgttacaaactgggaaaacccactccctttacc

SEQ ID NO: 36481 - DNA, 1489 bp, Zea mays
  unsure (1)..(1489): unsure at all n locations
  Clone ID: MRT4577_133273C.1
ttttggcttgttctcccactaacgcttggcgacgcacgagtcnagggtttctcgcctgcgcggcggctacctctctccacggcggcggcgggcgatcctgcagatcccgcggctccctccgcgattcgagactcagatgggggaaggcacagagagcggcggcggggcgaccacagcgccgcctctgaggtatataaggtgctacaagtgcgggttctgcgacgtggtccggtccaagaagtgcttgctccgcgcccacgtgcttgagcaccacaaggatgaggtggatgctttggggggttactgggaaggtggagatgctggtccgcgcaaagagatcagccgtgcgtgcgaacagtgcgggatgagcttcaagaagcaggcgcatctgaagcaacatatgcagagccattcgctcgagaggcccttttcctgcactgttgatggttgcccctttagctatagcaggaaggatcatttgaacagacatttacttactcatgaagggaaactatttgtgtgccctgtcgaaggatgtggccgtaagttcaatatcaagggtaatatgcagagacatgttcaggaaatccacaaagatgtctctccttgtgaaagcaagaaagaattcatctgtccaaaggttaactgtgggaaggctttcaaatatgcttctaagttaaagaagcacgaagaatcacatgtccagctggaatacacagaagttatgtgctgtgagccaggctgcatgaagttcttttcaaacatggaatgcctgaaggcgcataaccaatcttgccatcaatatgttcagtgtgatatctgtggtacgaaacagctaaagaagaatttccagcgccatcatcggatgcatgaaggttcctgcgtcactgagagggttaaatgccacatcgaggactgcaaatgttcgttctcgaagaaatccaatttggacaagcatgttaaggcggtacatgagcagcgtcgtccttttgtgtgccaattctctgggtgtggcaagaggttttcttacaagcacgtaagggacaatcatgagaagtcaagcgctcatgtgcacactgagggtgattttgtcgaggctgatgagcagcggccacgttcagtaggtgggtgcaagaggaaacccgtatctgttgagagtttgatgcgtaagagggtagccgctcctgacgatgggcctgctcatgctgatgcaactgaatatttgagatggcttctgtcgaaatacagatcattggacctcaattataaaggcaatatgctgtattggcaagatcttgaatttctcattgtgcagaaccacagcactcttcattccgatttgcagatgcacgtgaccaaaaaagataatttgcagatgcaccatgaacccgtggcaccagatgcccgtcagcagctggcacccgtccagctcgcgccggagagcctccaggcggaccagctccgccgccccgcggatcgattggactag

SEQ ID NO: 36482 - DNA, 155 bp, Zea mays
  Clone ID: MRT4577_133274C.1
gccgacttggcaccccccttgacctttgccaggtcttcgtcggcccttttgcttggaaccaggcttcaaccagaaccaccccagggaatcctcaattgcttttagttccttaccaaacccaaagaaggaggccatcaaagataccaaggcttttt

SEQ ID NO: 36483 - DNA, 1729 bp, Zea mays
  Clone ID: MRT4577_133275C.1
cctcgaggccggccgggatctctctgtggttgtttttggcttgttctcccactaacgcttggcgactcacgagtcgagggtttctctcctgcgcggcggctacctctctccacggcggcggcgggcgatcctgcagatcccgcggctccctccgcgattcgagtcagactcagatgggggaaggcacagagagcggcggcggggcgaccacagcgccgcctctgaggtatataaggtgctacaagtgcgggttctgcgacgtggtccggtccaagaagtgcttgctccgcgcccacgtgcttgagcaccacaaggggtaacacttatggggtgtgtgtaggatgaggtggatgctttggggggttactgggaaggtggagatgctggtccgcgcaaagagctcagccgtgcgtgcgaacagtgcgggatgagcttcaagaagccggcgcatctgaaacaacatatgcagagccattcgctcgaggctatttgttgacatatgaatgcgtgaagcattggatcccaaagaactccaaaatgcgataaggccttgaatggactagtatcaggattgggagaccatcctgagaagctccatcaagcatgccttgttcacgcgtttcttaagaggcccttttcctgcactgttgatggttgcccctttagctatagcaggaaggatcatttgaacagacatttacttactcatgaaggggaaactattttgtgtgccctggtcgaaggatgtggccgtaagttcaatatcaagggtaatatgcagagacatgttcaggaaatccacaaagatgtctctccttgtgaaagcaagaaagaattcatctgtccaaaggttaactgtgggaaggctttcaaatatgcttctaagttaaagaagcacgaagaatcacatgtccagctggaatacacagaagttatgtgctgtgagccaggctgcatgaagttcttttcaaacatggaatgcctgaaggcgcataaccaatcttgccatcaatatgttcagtgtgatatctgtggtacgaaacagctaaagaagaatttccagcgccatcatcggatgcatgaaggttcctgcgtcactgagagggttaaatgccacatcgaggactgcaaatgttcgttctcgaagaaatccaatttggacaagcatgttaaggcggtacatgagcagcgtcgtccttttgtgtgccaattctctgggtgtggcaagaggttttcttacaagcacgtaagggacaatcatgagaagtcaagcgctcatgtgcacactgagggtgattttgtcgaggctgatgagcagcggccacgttcagtaggtgggtgcaagaggaaacccgtatctgttgagagtttgatgcgtaagagggtagccgctcctgacgatgggcctgctcatgctgatgcaactgaatatttgagatggcttctgtcggtttgattggacgttcaagtgcactttgtgtagttggaaacatcagcgatttacttggcatgtataggaagatgaatgtctctagtatgttatgtaaatgtttatgtacggtatcagaaatacagatcattggacctcaattataaaggcaatatgctgtattggcaagatcttgaatgtaagagcggttgctcatgatcattagatctatgtgtcttcagcacagcttggcaacatgttttggtatgttcgcaaaaaaaaaaaaaaaaaaggccccta

SEQ ID NO: 36484 - DNA, 384 bp, Zea mays
  Clone ID: MRT4577_133276C.1
cggccgggccggggctggcaaagaagcgctctctccaagcggttttccctctctctcctcgctactcacccctcctcttctccagacggtgactggcatccggtcgcctatcagcgcaaccacgccagtgctatcgctaggactacagggagcgctggaatggctgcatgagatctggagcacagttaggcttcttagcagatggcatgataatatgcggatgataaattgaagatgcggatactctgatgactgaaagacaaatgatagctattctaggagatagaggctgctcatcataaagcatcaacagcaacctctggaacagctgaaaatgctctactggatgctatttcaccgactgcccttaaatcttcatatttg

SEQ ID NO: 36485 - DNA, 192 bp, Zea mays
  Clone ID: MRT4577_133277C.1
cggctagacccacgcgtccaccgacacttgcaaacactcgtccgccttcacgtttttgaactcataagtggaaccctgatcatgtggtccatcttaccgttcttctcttatgccatcgtaccatggaaccgccctcttgacaacttgactatccacatgccttaacgagccaacagcaacataaacggatac

SEQ ID NO: 36486 - DNA, 517 bp, Zea mays
  unsure (1)..(517): unsure at all n locations
  Clone ID: MRT4577_133278C.1
tccgtgagcgaacgtccccgcctggacagttgctggaggtgctgtcaccaacatgctctgggtgaaccccctctgcggactctaaaacccgcagtacaccgaggtcaagcccgccctgaccaaatggtgtccgccgttaaggtcatgcggacccaggtcgccagcggcaagtgagcaccttttttttgcctttttctgtttcgcagagggcgtctgaaatgccaatttgacaacaataaacagggctgcgcccgtcgtattgtggaactaacgctgtggttaggatagtactcttcttgatctagccctcacactggacctgctttactactctctggaagggggttactgaggaaactggccgtgtgcttgtgtaagtaaaaaacgagtgggacatcttggtacctaaatctgacagctctcgcctattgagggctgtgtcatagagagaaagnaatgatgtcgtgctcgaactgctaaacgctacatgtgtgcaactatttacactggcgttgtc

SEQ ID NO: 36487 - DNA, 545 bp, Zea mays
  Clone ID: MRT4577_133279C.1
cactcgtttcctcagcaggctgagcaaggccggggtcaggggaaccaagacaatcagtcgcccgctggtaatggtaccgctgacagtggcatcagtgtgagctatgattcaaaaaaggtattcattggcggtttgcgggataatatcaccgagaaggagttccgggcttactttgagacgtttggcacggtaacggacgtcgtggtgatttatgacagtgcgacgagccggtcgagggggttcggtttcgtcacctttgattcggaggaagcagtggggaaggtgatgcggcagagctttcacgacctgaacgggaccaaggtagaggccaagattgctatcccctttggcgggagggatcctgccgctcctggctatggagggttcatgtaccaaacatacaatgctagatctggcccctacaatggctacatgccccaacctgctcccacacatccctacttttctgccccctattttgctgcggggggctatccctatgggagtggatacccaggtaaggcgtcatgccaacatttctgcat

SEQ ID NO: 36488 - DNA, 422 bp, Zea mays
  Clone ID: MRT4577_13327C.1
agcagtggtaacaacgcagagtactttttttttttttttttttttttttttttttcaaaaaaaaaacccatttcgatgaaaaaggaaggatccgagtccagtccaaagttcctaccctccgggtttgaaaactttcctcatgacaggtccagggttcaccgaaaagcgaagtacccctttaactcaaacataactgatttcctcacagacgacgggacctaaccccaaccccccagatggggcccctcttcaccacagatggatcgatcgccaccaacttttttttaacaccacggcagcagttgttgaccacaggatgttatgccttcaaggctccagatcttggggatgaccagggcagccccggaacagcccttttaccaggggacgatcttccagccccgcgtcctctgggttgttcc

SEQ ID NO: 36489 - DNA, 587 bp, Zea mays
  Clone ID: MRT4577_133280C.1
gccggccgggcctgggatcacacatattatctgataccaactaccaacatataaatttatctactgcaccaacaatgacaaccaaaatattttgctgacgtaggctctttgtgctctctgtaacgtggctaccgtgacattttccctccatgcttacaagctcctatatgttgctgtcttcccccatacctgtcacatctaccgtcttcaatgtgtgagaaacctattgttcaactgtacacgatgcagcatgtaatagcgacaggcatcttaccattatcacccttgctgctacaacaaccgcatgtgctattacaggatctacctttggcgcatttgtggcaataaaatattagggcacaacaactacaaccacttgtgctagcaaacctatgctgcatactctcagcaacatcagattcttgcattcaagcaagtgacctgcattgaactctagctgcttatatgctacaacaattaccattcattcagatagatgctggctacccccaggaaattctttcattctacccactaggagcattgaactctgctgcttatttacagcagctacaactactaccatt

SEQ ID NO: 36490 - DNA, 1531 bp, Zea mays
  Clone ID: MRT4577_133281C.1
gccgcccgcacgccgccagcaacccccctcccgctccccgcaaaaccctagcgctctctacctctgtctccctctgttcgtcggcgatggcggcggcggggggcgaggaggaggccggcgagagccggaagcttttcgtgggcgggatcccggccggggcgcaggagcccgagctgcgagcccacttttcgcgctttggggaggtgcgctctgtcatcgtgatgcgcgaccgagagacgggccacggccgggggttcggtttcgtcgagtttgaggacgaggctgccgctggcaccgcgctcggcgacggggagaagctcaagcacttcctctgcggccgcatggtggacgttaagagggccaggacaagagctccacgaaaccagggcgagcagcactcgcagcctcagcaggctgagcaaggccggggtcaggggaaccaagacaatcagtcgcccgctggtaatggtaccgctgactgtggcaacagtgtgagctatgattcaaaaaaggtattcattggcggtttgcgggataatatcaccgagaaggagttccgggcttactttgagacgtttggcacggtaacggacgtcgtggtgatttatgacagcgcgacgagccggtcgagggggttcggtttcgtcacctttgattcggaggaagcagtggggaaggtgatgcggcagagctttcacgacctgaacgggaccaaggtagaggccaagattgctatccccaaggatgagcagtattaccgtaacagaggaggccgtggtgctcgtccctttggcgggagggatcctgccgctcctggctatggagggttcatgtaccaaacatacaatgctagatctggcccctacaatggctacatgccccaacctgctcccacacatccctactttcctgccccctattttgctgcggggggctatccctatgggagtggatacccaggtcaaggcgtcatgccaaacattcctggcatggggcctaggcggggtcctccggcctatggaacataccctcaaatgtatccggtgtataacattatacatagagctggttatggtggtccagccacttcttttcagcatgaaattaatggtggaggtgattacaaaaaggatcaaacgaatgtagatatgcagcaagttgacaacactgctagcgttgcgacaaagttggaaaatatgaagctaggttgacaatgactttcaggactattacttctacaacgatgacactggagtagtctattgtttgggaacccgcaactgtgaagactttgagctgagagattctttggttgacaagtacatcattagaattcttcaaacttacgtaccgttcctatccccactgcctgtaaaacagaaagcatgcgagtcgctggctggctgttgacctcacctcccctctcctctcctctcctcttgtaccaatgttaaattcttacgaccgtttaatgtatcttaatcagacaatccagaatcgaccctaatcaaatgctttgctcttataaaaa

SEQ ID NO: 36491 - DNA, 417 bp, Zea mays
  Clone ID: MRT4577_133282C.1
aaaaaaaaaaaaaaaaaaaaaaaaaaaaaaaaaaaaaaaaaaaaaaaaaaaaaaaaaaaaaaaaaaaaaaaaaattaaaattgaaaaaaaaaaaaaaaaaaaaaaaaaaaaaaagttttttccctccccgggcggccgtttaaaggggcaatttttggaaatttccatccccctgggggccgctggaccttccttttgggggccccattccccccttttggggggggtttcacaattccctggccggggttttacagcgtggggaggggaaaacccctggttttccccaacttattccctttggacaacttccccttttccccccttggctttttatcaaatgggcccgccccgttcccctttccccaaagtggcccaccctgaatggccaagggcccccccctttacgggcccttt

SEQ ID NO: 36492 - DNA, 974 bp, Zea mays
  unsure (1)..(974): unsure at all n locations
  Clone ID: MRT4577_133283C.1
gccggccgggcttcgagtacacgagtgcggcacttccgccccgcggtccacagagccacagccgaagtgtcgcagcagtgcagaggcgatagattgagctcgaggaagacggccgggaacgtgcactgtgaatctgaggagggaaaatcacccaaaatcgagagcagaattttttctcccgaagatgccgaagatcacctcgtcgccgtctcccaccatctccgccatgaatcccctcctcccctcctcctttcccaaaccaccccacccgccggacccaaaccctagctccccgaatcctagcccctgcagctacctcctccacgccgacgccgacgacgaggcgctgattcaaatccctggtcagaaccctagcctggtgggcgcctccgcccccttcgcgttgctgccgtctatcgacccggtcccgcacgtctcgtcgcagttctacaccttcagcgccgcctcctacgggctcatggtacgctgcatccgagcaggccgctccgcatcttccgacgaggtccgcggcgccacgtcgctctccgtgctcgcctcctggcgggcggtctggaaggatcggaacgaggacactgcctacctcaccgcgtggaagcgcatccaggacaagctcgccgcttcggccgacggccggcaccttcacttcaagtccaacaccgcgcagcgcgtctcccacgtcggcatgtggagggacatagtctcggaggcgcacgccgaccccgacctgctccggcacctcgcgttcagggacaccgtcgaccgcatcaagcagtcttggactgtgggggccaaaatctacggtattccagaatcatttatccgtgcatgtgtcgctgcatgccccngtttgtaaagctgcgcctgctagccaacctgatcccgctacctcatcacctaaacgtgngaagcggcgccgcaggtttgtatatactgagacattggatgtgcctgct

SEQ ID NO: 36493 - DNA, 204 bp, Zea mays
  Clone ID: MRT4577_133284C.1
aaaggtgatgtacatattattcaaatgttgtcgattaaaaagcgtataccgtttggagataaccgtgctccctccaactagcgtgtatccatgcctagcaagccaaacatattaaccttacaacaagcctcccattgacacttccaccatctttgctgccttccctactccacacacaaccactggtttacttcgccgggattt

SEQ ID NO: 36494 - DNA, 234 bp, Zea mays
  unsure (1)..(234): unsure at all n locations
  Clone ID: MRT4577_133285C.1
cnnnnnncggncgncngngggcaaggaaccacctacggataacctcctttcagggagataatggatggccaaatgcccaggaaaaacctttcttccaagcacagggacggtggctctaaagtcaaggttggggacccccaaacaagacaaactgttgttttggcaccaccacaagattgggtgacagaaggaggacaggcctctgaaatacccaaggacatatcaaaattacat

SEQ ID NO: 36495 - DNA, 223 bp, Zea mays
  Clone ID: MRT4577_133286C.1
gatgttccaagatgtactcagacaacagtgaacctacaggatctccagaacatcgtgggggcatctaaggagctgggcaaagtacttgccaacttatcgtgaccctgacaacttaatctcgctagtgcattactcatatctgctcctcctacaaatccttactctaccctatctttcacattaacgctaatcatcttgatggtctatacttcatcgtttacta

SEQ ID NO: 36496 - DNA, 489 bp, Zea mays
  Clone ID: MRT4577_133287C.1
tgcacgcctgcgggcaccggcccggaaatattccggggtagaacgagcttctagtcggcgggcgcccttttttttttttttgtttgtaacgaccgcttgcatattacttcatggcattacacatcaacagcaggctcatacacaagggtacgtcgtgaccggccgcaaaagcattagcgtaaaaattcaattgtggcggtaggtctagacacacctaacaccggctacggcgacgatagttacggacgaccacgctactagttacagggcgggtaataacgatcttcaaaagcaactcacccagcgagcacgtgtgtcccaaatacgacgtgacctgaaaggaagaaagatcatgctcctcaagaggggctgtcgacgagcaacaggtcgtcatgatagaggccatgaaagttatctttgatttcgtcgagaacaggctgtagaatgacgcttttagacaccctactgagcttcttgagttcaagagga

SEQ ID NO: 36497 - DNA, 416 bp, Zea mays
  Clone ID: MRT4577_133288C.1
ctattccccattaggcccacccgctggggggtccggggatccttcaaaaccccaattacaggggggctataacataggaatcttaaatcccaatggggggggccatcccaggggtttaatagaaagggcccatatatggaatggggcccaacaattccaaccctaagggccactaggggggaaaagcatactagacacatgcaattgggttaaaaccaaacaaaggttaatatttcaaatctcatatgcctaactaaagaactgggaaacacagggcgcgggccttttcggggacgggataaaatttcttcaagggcagggggttctacaaaggttcttttggtatggccaaggtcatcacggtccccccttgcattttgaatatttaaaaagggggaagggccaaacatagaacc

SEQ ID NO: 36498 - DNA, 754 bp, Zea mays
  unsure (1)..(754): unsure at all n locations
  Clone ID: MRT4577_133289C.1
tcggccggaatggcaattgtctctcggctcgctggagccgataaggctgccgcgccctacctctctcctgcggtgctcccatggaatcggcggcgattgggtcgcagtccccgctctccttcccctccaacctctgaaatggaaggtgttgctgtctaaagatgagcaaatcatgctggagaagaaggtagaggaggtgaagtcttggatcttcagcttcaagggcattgatggaggaggaagcggcatagtagtgatatgaatgttggaaattaatgttggtctgtagttgtcctctgttagacgtcctttttaatagtcgtattatctggctacgatactattgtaaaactggtgtccccagtattccccctcccttttcctttttatgtttttttgggtttgtttcctgaactcttatatgctttcttataagcagagaattctcagttcaaaaaaaatgtacaagaaagctggtgactatggccaggctcgtaagctattcacacagatgtcggagagaggaattccgctatctacagtcacttttaatagtttgatgtcatttgagacagactacaaggaagtttcaagtatttatgatcagatgcaaagagctgggctgaaaccagatgttgtgagctattccctgctaatcaaagcttatgggaaagctagaagggaagaagaagcttggcggtttttgaagagatgcttgatgctggagtcaggccgacacgcanatcatataaca

SEQ ID NO: 36499 - DNA, 422 bp, Zea mays
  unsure (1)..(422): unsure at all n locations
  Clone ID: MRT4577_13328C.1
ctttgggctgatttatgtgcttggccgccaattacgcaaggggagatatcgctcaggtttctaatatatgggtgattccaagtgacgacccccgantgctaaagcgctgcttccgtaggctttgggcgtctcctgaccgcgcatggcgaggtcgacgagtcgggttttccttcggcgtacaaggctaagttcgagtctagacggaataatcatcttcggaatatacaggttaattccacgccttcggagcttttggcgggtgctcgtcctcttcatataaatatgagtcctgattcgtcgtaatctcatgataagactattgtcgatcatgtccataagccttcgtctaatcggcctaagaggcctttgtagcataggctttatgatcctcatactgttggtcaaagtcatcttgggtatca

SEQ ID NO: 36500 - DNA, 354 bp, Zea mays
  Clone ID: MRT4577_133290C.1
ctaatcctctctcttatccaaaccattttctttctccttccaaaccctaagctcgcctggcctgtttttttacacctccgttcacctattgctaatttcttctaggtctacatgcattgcatcttttattatcgcgcctacttcaccaacgttcacaactttcactgttcttatcgctactacctgtagtgttccctcgctcttctctcttacctgctctcgttccttaccatcctctactgcgatttcgttctcattctcctcaccttctctctcaacaatctttatgtctattcctacatcaacatcctcaatggcatcgtcatccctttgtactagctctcactcaccctc

SEQ ID NO: 36501 - DNA, 357 bp, Zea mays
  Clone ID: MRT4577_133291C.1
taaaaaaaaaaaaaaaaaaaaaaaaaaaaaaaaaaaaaaaaaaaaaaaaaaaaaaaaaaaaaaaaaaaaaaaaaaattaaaaaaaaaaattaaaaaaaaaaaaaaaaaaaaaaaaaaaaaaattttgactttggccggaaccccccttagggggatttttggaaatttccctccccctggggggggtttgagcttccttttagggggcccaattggccctttagggggtggttttacaattcattggccgtttttttaaaacgtcttgattggaaaaaccctggccttccccaatttaattgccttgaaaaacatcccctttttgccagttgggttattaagaaaaaggcccccacc

SEQ ID NO: 36502 - DNA, 207 bp, Zea mays
  unsure (1)..(207): unsure at all n locations
  Clone ID: MRT4577_133292C.1
ggacgctgggttggcaggagcatccattaacctatatcaaacattcatcagttccctcgacggatttgacgnntgnttcntatagggnnatggggcgcgcctgccnntgttcccagtaggcgncgtcgtgtgttggtccggggctgcaccagggatttctcccgtaatctggctgttagtgaacgacgggctagttctagatcgcga

SEQ ID NO: 36503 - DNA, 192 bp, Zea mays
  Clone ID: MRT4577_133293C.1
ctcatacacaccaagcgaaccgcactagcatcagcctaacaacaatggtctaccagggagtgggggccttcttgcgcttgtcgcccttatagctagcgcatcaaatgcacttattatagcacagagctcactggctcctagggccaatattccacagtcccttccacacaattcttcgatgggcttagaaca

SEQ ID NO: 36504 - DNA, 367 bp, Zea mays
  Clone ID: MRT4577_133294C.1
cccacgcgtccgcccacgatttcggcgacgcgtgggcggacacgtaagcgggagcgggttaacaccatcaaggaagcggtcgtcgctccaaatactatgaataatctacagccgaacaaggtaaggcgactttatacatgagctacatcttagatatcgacctcaaggcgaacaccaagtccgacgataactaccatctatatgagtacaccgacttgtacactgacgtgcatgggctcaattactatagagagaacaacgacatagacaaagatgtccatatgatagattacaaacgtaagacgcatgacatggactggattgtagacatgactttcgaatgatgatatactcatacactgtatta

SEQ ID NO: 36505 - DNA, 328 bp, Zea mays
  Clone ID: MRT4577_133295C.1
aaattaatgatttttttcattaatgggagattttttattaaaccttcgtttattttcacgggcaaacacaaacagaacatgaaaaaacaccgcaaggggaccatgaaaaccccggtgaatacaaacacaggggccctaaagcagaataaaaattactccggaggctggacctcatacccataaaaaaaaggggcaaggcccaccaccatatgtgaaaaatcggccccccgcacgacggtggggctaagtggctaaattttcgaacaaccaaaaggggacggccaaccctcacggctatattgttgactttaattctcgaccctggggg

SEQ ID NO: 36506 - DNA, 710 bp, Zea mays
  Clone ID: MRT4577_133296C.1
gccggatgcggccgtcgtcgtccgccgcgtcccagtcgtcgccgcaggccgcgaccagcccgcggcagcaggccgctccctcttcctcgccgaccctgtcggacgcggcggctgagagggccgacgtgcgggcgttcgtgtctgacgccgggcacgggcacgggcacgggcaccagcaacagcaccacttcttcatgccgcacccgcagttcctgcacgggttcagcctgctgccgggaaaccccgaagcggtggctggcaatggcaatggcagcagcagcagcgctagcgtcgccgccagcagcggggacgagatagcgctggcactggcggcggcggaggaggcgcacgcggcggggtgcatgctgccgttgtcggtgttcaactaggcaggcgtatagccaaaagcgaggtagggcgaatgaatagtccgggtgcttgcttatccggttccggtgttcatgcatgatcgttctcactgtcgcgatggagttgaggcgatcaacacacgtacgttctgcttgctgttcttaagtaattcctattcccatctcttttgctcatgcatttcctgctgtgctgctgctgctgggaaatagtattagtagctgtgcttggtactgtagggtttgcagaatcctgcttggtttgtgtatgcaatgcaaatgatgacggaggtataatataatggaaggcttaatttccaggct

SEQ ID NO: 36507 - DNA, 138 bp, Zea mays
  unsure (1)..(138): unsure at all n locations
  Clone ID: MRT4577_133297C.1
ttgtttncatgcatacacatgaataatattcaacagcctgatatagctgcacctggggcggcagctaagatgttcaccccaggtgcagctatatcaggctgtngaatattattcatgtgtgtgcatggaaacattaat

SEQ ID NO: 36508 - DNA, 601 bp, Zea mays
  unsure (1)..(601): unsure at all n locations
  Clone ID: MRT4577_133298C.1
ggcccgatcctaatccgatttgatccttaagttttatagtgtaaaatttgaggcccattgtcagccctacctccctcctctcctccgccagctggcgacggagatccgtcttctcggcctccatggcggccaccttctctatcagcctgcggttcttgctttccgcaaccgacttctcccgcacagcatccgcatgctgtgcccggagacgttcgacctcgacagcaacgtccacagtctgggcacccgacgcgacgagatcggcgaagtcggccgcctgacaaataaacccatgagacctgaatcctcataaaaacaacaaantatcgaagttcaatacaacttacttgcttcagctgctgtgacagctgctgcgacgcttccctcagtcgctgagacatggagcccgccacgtccttagcagcagcggccgacagaatctcgccgctcgcgcagaaagtggcccacgggtctcgcgcagcccccttcgcccccaccaacgccgccgttggtgtaagtggtcaccaccggaggcgggacaacagctagttgcccctcacccgagcctgcaccatgacactggttaaagacttcgtcgagc

SEQ ID NO: 36509 - DNA, 221 bp, Zea mays
  Clone ID: MRT4577_133299C.1
tttttggggatatttaaaagcacagcgggcaaagtcctgccggcagagaacatcaaaccaaacaaacccaataatgaacgggaactcgggtctcacgcggaatgcagcgccactggacgtatacttacagatcggctaacatgaggcccaaatgcaacagtgaatcacttcttaaggagagggccaacgcacgccacaaccagccataaatggggaccaac

SEQ ID NO: 36510 - DNA, 204 bp, Zea mays
  Clone ID: MRT4577_13329C.1
gtcttaattacgagcttactcacgtcatgcatgcgaccgcataaaccatatatagtggaccctaacagaacatcacgggccgagccataacaacgtagagcctgggccaaccctggcgctacccaacttaagcgtcctgcgtcaaatccctactctggcgcagccgaaattgagaaaagggccgcacctatccaccttcccaac

SEQ ID NO: 36511 - DNA, 357 bp, Zea mays
  Clone ID: MRT4577_1332C.1
accatgaccacagctaggctgcccgagatagatgatctccttgacgtcatcgatgtagcaaacttatgtacgtacatactggcaaggattgtattcctgcattgagcagtcacaacatgcgtgcttctagccgtccccatttgtaatgcacccacatcatacaacacataggttgcatacatgtaatcgtgcgcatacttgatcgcattacgcttctcgcgtctctctgtatgcgatcttagaggcttaaagtattgaagcttgtgatgtcgatgctatggtttgactacatacgcctgcaggccaatggatatggatcatagcggcttaggaatgacaatgggagggtcaagtact

SEQ ID NO: 36512 - DNA, 722 bp, Zea mays
  unsure (1)..(722): unsure at all n locations
  Clone ID: MRT4577_133300C.1
agtcgttgcgaccactcatagatatacaccgccatctacgcaagccatcgaagccgaagacaacgtatcgcgccgcggcctgtgggatatactgatggtcctagacatgatgaccgcgctacagagcccgatgccccggcaggtcccagtgcttaggccgcaagaatacgtctgtggccgccacctacaccgagacgatgctgcgggctcgatctagggcgtaacacgcgtggacgacttgagcatcatcattggcgtgacatcgactccgtgctcagggcctgtcaatatcatgctgctgtatgctagatcctatttactcgatcgtcgacatgaggatctcgcgcccgacgcgactctaacatgtatgagatctaccgacatacgacactgcgtctccaaagggttcgtccactactagcatgagtacatgcatcagggcgtgattaatgaagatgaggacatcttcacccggtacgaccgcacccttatcgtcgccgaccgcaggcgctgcttatctaagaattccggtgatcgcataagaccgaaacatgtgccagaagtgctacctgtgaacgatctgatggccccgcttgccgtaccgatgcctgtgttgtnccgacttgacagtcctatggctgcacccgtggcttaatttactatcatcgaagctacttatgtgggtctataactacatgctggtttacctgtcacaagtgctg

SEQ ID NO: 36513 - DNA, 491 bp, Zea mays
  Clone ID: MRT4577_133301C.1
ggttgcttggttttttccgggaattttgcccgggggcctccgggcggcccccctttcccgcttgtgaggagcttgagagcaggggggaaaaaggggggtcctgggtgacagcgggaaaaagttaccctcccacaataccacacaacagaagacccgaaagcaaaaagcggaaagcccgagggggcgaataaagaaacaaaaaaacaaaaatggcgacgggccgactgccagccggaaaaccggaaaacccgccgggccaactgaattaataaaccggccaacacagggggagaggcggttggccccttgggggccaggggggtttatctttttaccagggaaaaggggaacaacagttagcccctcaccgtcgggccgtgagaaaaaagcggcaaccggggcacgcccctgggccccaaaagcaaaaaaaactgttggaaaggggagaacaaaggaagaaaacaagagcggctgggggtatcctagtaccc

SEQ ID NO: 36514 - DNA, 280 bp, Zea mays
  Clone ID: MRT4577_133302C.1
accgcgggtcaattccttactttgcttgaggcctgatgggagttgccaggatcatgccaacatctgttgcccttgatgtagttgcagagaatttgaaccttaaattctttgaagagcctactggatggaagttttttggtaattggatggatgctggaatgtgctcaatctgcgatgaagaaagctgtgccactgggtctgaccacattcgtgagaatgatggaatgagagcatggctagaatggttttcaattgtggccttcaagaataaggacaacct

SEQ ID NO: 36515 - DNA, 359 bp, Zea mays
  Clone ID: MRT4577_133303C.1
tttttcgggttttttctctttgggggggggccccgtacagattttacaatcagaaaaccgaatttttcatggaggggagccccgtttgtagtttaacatttggggcaaaacatttttcaatcatgacccgggctccaaaagaacctttcacgatgccccggaattttacatggaacgggggcgcttaaaatcttggtggggaactgggggccatcctttttgggccccttggggttagcgaccgggggttgggttttcgccaccttgggaagggccttgtttttgtccggggacccccccttcaggaaggggcccaaaaccttggccggccttggtccaattcgggcccaacttgggct

SEQ ID NO: 36516 - DNA, 661 bp, Zea mays
  Clone ID: MRT4577_133304C.1
ggaaatcagtagtcggcgcgggaggccgtaacaatcacgcgaattgttaggagccggttgggattcaatcatcatcctgcttatttatagatgccctgtgatcacctcgccagcctagataggctgctgtgtgccgcaccaatagagattagatgacgttgttctcgagcgaaaactgggagagagaaggggagcatcgtaccggagattcgactatgtcattgatctacgcccagcatgcgggcgggggtggtcgatggtatacaccgtgcatgtctgcaacctctccgtgagggaacatcatcggggaaccgtggcattgctcgtcggaggaatggatccaccctaaagtcgacgggtcatgtggtcagacacaatcccgccaccataagccggtaagaatcatactatgagggaggaatgtagaaaatggccacacctagatctcatatattactttatttaccctataattctttactatgtgagtacccgtgcgttgcaacgggaacatataataacataataacttatatataaaatgtgtcttatattgttataaaaaatatttcataatccattttgaatcctagccatacataatttttgttattttaaatttagctgtttcacccgaaaaaaaaaaaaaaaaaagcgggcc

SEQ ID NO: 36517 - DNA, 505 bp, Zea mays
  Clone ID: MRT4577_133305C.1
cctagtcccctgctcccttctcagccgccgccaatcccttcacgtgctccgcaaccgctgagtgataacacagatgtccgtgacgggaggtgccccggctatcgtgatcgatctcggcacgaggtactgttgcgccagagagtggcagcacgaccgcggcgagatcttgccaccgaccaacccaagagcacaagcaccatccacggcgccttcacggaatccgaacgagctcatcggagatgcggccaacaaccagctccccatgcaaccccatcaacaccggctttgatgccaagcgtctcatcgacatgacgatcagtgcctgctactgagcacagcgataccaagtagtgagcacttcaacagccatgcccggccctgccgaaaaaccactgatggccgtcaacaacgaggccgatgagaaacagtttgcaggtgtggacatctcctcaatgattattatcaagatgctagagattggtgtacattaccttgcataacacca

SEQ ID NO: 36518 - DNA, 208 bp, Zea mays
  Clone ID: MRT4577_133306C.1
cttgttttttttttttaataaaaaagcataaatgggtcggttagaaggaatcacccggccagaacagaaaataactggaacagggataaatagaagattttagttaagaggggtcatgtatagaaccggttccaaatggcgatcaatttcctttttaaaggctggttgaagcacttggagctctttctgcatgccaaaaatggccccc

SEQ ID NO: 36519 - DNA, 378 bp, Zea mays
  Clone ID: MRT4577_133307C.1
atccgagaaaagctccccgtctcctgcagtcctgttactccagttggttcgccgcagtgcagtgcttgtctttgctcgggcggcttggttgcagtcaagatggggaaggacggagaatctgccaagctgaacgaggagaagaagtccaaggatgagatgcatctgaaggtcaaaagcaagggcgaggcgtccggcgaggaagacggcaaggaggaggaggtcgaggtacagattgaggccaagtttgttgagaaggaataggtcaaagacacgggtgacggtgcggcatgaaagggtaccaagaagaaggatacacaggagaaagacaagaataagaaggaaggtggtgacgattcagggaaggcagaggaagacaag

SEQ ID NO: 36520 - DNA, 978 bp, Zea mays
  Clone ID: MRT4577_133308C.1
tagaggtgatccagaagaagagggctgagaagcccgaggtccgcgatgctgctagagaagctgctcttcgtgagatcaaggagcgcatcaagaagtccaaggatgagatccatctgaaggtcaaaagcaagggcgaggcgtccggcgaggaagacggcaaggaggaggaggtcgaggtagagattgaggccaagtttgttgagaaggaagaggtcaaagacacgggtgacggtgcggcaggaaagggtaccaagaagaaggatacaaaggagaaagacaagaaaaagaaggaaggtggtgacgattcagggaaggcagaggaagacaagaagggtaaagcgaaggattcggagggcaagggccaagtgaagaaggaaaagaaggatggtgctggggacgacggaggcgaggagaagggcaaagaaaagaaagataagaaggacaagggtgagaagaatgacaaggagaagaaagagaagaagaaagacaagggtggagagaagaagaaagacaagggcgccaaggagaagacgaccgatcctgtgaagctcagagcaaagctggagaaggtggacaccaaactgcaagacctacatgccaagagagaagatatcctgaggcagctgaaagagctggaactggaagaagaaggcaaggggaaggccaacgaagaggagcctgcacatgtacagaatctggaacagggtggagagagcgtggtcaaggaacagagtcatgtcgccgcagcctgatccggttacacatgcacatgcatcacactgtaaatgaaggaacatacatcagctgagttgtgaaaatggtacgcatgcagtgtgaggatctccgtctctcactgtccagtgagaagaacggaacatataggtatagctgctgagaggagtgcgtccttctcctgatacgtgacaatgtaatacttggctggcttttgtgaataaaaggagtgtgcctgctgttgtc

SEQ ID NO: 36521 - DNA, 1145 bp, Zea mays
  Clone ID: MRT4577_133309C.1
cacgcgtcccgcctctggtttgcttgcctcccagatcttgccaactaattggaggcagccgagctgatctcccatcccgcaacgcgccgtctcgacggcggatcgttttcttctgcttctactgcgtgatctttgggcaagaagataagacacgtccaagcgtcgccacagtcaagggcggcttggttgcagtcaagatggggaaggacagagaatctgccaagctgaaggaggagaaggggtccaaggatgagatccatatgaaggtcaagagcaagggcgagccgtccggcgaggaagacggcaaggaggaggtcgaggtagagattgaggccaagtttgttgagaaggaagaggtcacaggctcgggtgacggtgcgggaggaaagggtaccaagaagaaggatacaaaggagaaagacaagaaaaagaaggaaggtggtgacgattcagggaaggcagaggaagacaataagggtaaagcgaaggattcggagggcaagggccaagtgaagaaggaaaagaaggatggtgctggggacgacggaggcgaggagaagggcaaagaaaagaaagataagaaggacaagggtgagaagaatgacaaggagaagaaagagaagaagaaagacaagggcgccaaggagaagacgaccgatcccgtgaagctcagagcaaagctggagaaggtggacaccaaactgcaagacctacatgccaagagagaagatatcctgaggcagctgaaagagctggaactggaaggaggcggcaaggggaaggccaacgaagaggagcctgcgcatgtacagactatggaacagggtggagagagcgtggtcaaggaacagagtcctcttgccgcagcctgatccggttacacatgcacatgcatcactataaatgaaggaacatacatcagctgagttgtgaaaaatggtacgcgtgcagtgtcaggatctccgtctctcgctatccagtgagaagaacggaacatataggtatagctgctgagtggagtgcgtccttctcctgatacgtgacaatgtaatacttggctggcttttgtgaataaaaggagtgtgcctgctgttgtaaaaaaaaaaaaaaaaagggcggcctatagatagagagcggccgccgac

SEQ ID NO: 36522 - DNA, 214 bp, Zea mays
  Clone ID: MRT4577_13330C.1
acacatacaaaagtcctcatgagcaaggccgtcgatgtacacatgccctgtcaaaaacattatctgggctcacagacggtcctgtgtaccctgcggctgcggggattgcggtgccaatggatgttgaaagaggcaatgatccagaagatcacgtgcgtctggtgcccataactactacccagagcatcggcagggtgatgactaatgcgagcac

SEQ ID NO: 36523 - DNA, 2127 bp, Zea mays
  Clone ID: MRT4577_133310C.1
ttgggaccctcgggcgggccggaaggaaccgccttctgcatctgacgttctagggtttggcggctcctctatcctttctccatccgctagcaggcgcgaggcgccccctccgaccgacactgaatcccgcctccaacctccgctcgaaacccataccttcggtctcctccgtctgtccgtcgcccatccggccgcctcttctcccaccagccgccgctgccgcacgttagctcctcctgcatcgtcgccggacctccgctacgcccccgtgcatccttgccttggcaggcaggatctggccacctttcgccggcaacagttgggcgccgcataggtaaccgcctacccccgaggcaaggcagtaccccgtcgcccagcgtataagcgcggaaggagggcgcggaatagcgccttttctaacactaatggcaacggcggcggcggatggcccccctgtggaaccgcagtctctgaagaagctgagcctccggtcgctcaagcggtccctggacctcttcgccccggcgcacgccctcctcttcacgcccgacgccgagagcaagcggattcgtactgggtgcaaggtgagtgcggagtacggtgcggtgaaggacctcacgccggagcaggggcgcggtgggcagggcaagggtcctgcgccgccatcttcaacagctttggcattgccaggaacacaagatacaaaagatgctcacggagaaggctctaggaatgccattgtccctgcaccacttatgctgccaaaagcacctgaatctaccatacctggcaaaaatacaactctgtcaattcctggatcatctgacagattttctacatccgcactgatggaaaggatacctagtagatggccacggcctacatggcatgctccttggaagaactatcgggtcatcagtggtcacttgggatgggttcgatctattgcatttgatccagcgaatgaatggttctgcactggttctgccgataggacaataaagatatgggatcttgcatcaggaaccctgaagcttacactgactggtcatattgagcaaattcgtggacttgctgtcagccaacgtcacacttatttattttctgctggtgatgacaaacaagtaaaatgttgggatcttgaacaaaacaaggttattaggtcctaccatgggcatctgagtggtgtttactgcctagctctccatccaacaattgatatcttactgactggtggccgggattcagtttgcagggtgtgggacatcagaacaaaagcacatgtttctgctttaacagggcatgacaacactgtctgttcagtgtttgctcgtcctacggatcctcaagttgttactggttcacatgatacaactattaaattctgggatcttgtagctgggaggactatgtgtacccttactcaccataaaaagtctgtccgagctatggcgcttcatccaaaggagaaagcatttgcatcagcatcagcagacaacgtaaagaagtttaaccttcccaaaggcgaatttctgcacaacatgctgtcgcagcagaaaacaataatcaattcaatggctgtaaatgaggatggtgtcttggcaactggaggggataatggaagcctgtggttttgggactggaagagtggtcataactttcaacaagatcagactatagtccagcctggatcactggagagtgaggcatgcatatatgccctctcatatgacgtgagcggatcaaggcttgtgagctgtgaggcggataagactataaagatgtggaaagaggacttgacagcgacgccagagactcatcccatcaatttcaagcccccaaaggacatccgaagatattgatgctcaaatcccacaagtagcaagctagtggatggttggagcctccacaattgtgtgacccaaactcgcttcttccctgagcccaattgaaattttgctggggtttgctctattgtataatctgatgcctgtactccaccagtctgatgccttggtccaacgctttgaaacccttcttagactgtttctttgtgatctttgcgtttgatttgattatatcctaccttagtaccaaaaaaaaaaaaaaaaaaaaaaaaaaaaaaaa

SEQ ID NO: 36524 - DNA, 1432 bp, Zea mays
  Clone ID: MRT4577_133311C.1
gggaccctcgaggccggccgggtcgaagtcgctgcggcacgcgtcccgcttctggtttgcttgcctgttgcctcccagatcttgccaactaattggaggcagccgagctgatctcccattctcccatcccgcaacgcgccgtctcgacggcggatcggtttcttctgcttctactgcgtgatctttgggcaagaagataagacacgtccaagcgtcgccacagtcaagggcggcttggttgcaggcaagatggggaaggacggagaatctgccaagctgaaggaggagaaggagtccaaggaagagatccatgtgaaggtcaagagcaagggcgagcggtccggcgaggaagacggcaaggaggaggtcgaggtagagattgaggccaagtttgttgagaaggaagaggtcaaagactcgggtgacggtgcgggaggaaagggtaccaagaagaaggatacaaagaagaaagacaagaaaaagaaggaaggtggtgacgattcagggaaggcagaggaagacaagaaggataaagcgaaggattcagagggcaaggaccaagtgaagaaggaaaagaaggatggtggtggggacgacggaggcgaggagaagggcaaagaaaagaaagataagaaggacaagggtgagaagaatgacaaggagaagaaagagaagaagaaagacaagggtggagagaagaagaaagacaagggcgccaaggagaagacgaccgatcccgtgaagctcagagcaaagctggagaaggtggacaccaaactgcaagacctacatgccaagagagaagatatcctgaggcagctgaaagagctggaactggaaggaggcggcaaggggaaggccaacgaagagaagcctgcgcatgtacagaatctggaacagggtggagagagcgtggtcaaggaacagagtcatgtcgccgcagcctgatccggttacacgtgcacatgcatcacactgtaaatgaaggaacatacatcagctgagttgtgaaaatggtacgcatgcagtgtgaggatctccgtctatcactgtccagtgagaagaacggaacatataggtatagctgctgagtggagtgcgtccttctgatacgtgacactgtaatacttggctggcttttgcgaataaaaggagtgtgcctgctgttgtcatatgaagatagtctctgcaagtatgttcagtgttcttatggtcgttccccaaccgccattgtaagtaaccatgcatgtgctgatactcaaaatacacgcatgctgcacttctgaattgatgcattcatgtgtactcctgttggtcgcattgctacctcataatgtgacaagcgtgtatgcacaaatgtaaccacattcatcgtgtctatataataaagataagctccttttgttaaaaaaaaaaaaaaaaaaaaaaaaaa

SEQ ID NO: 36525 - DNA, 1185 bp, Zea mays
  Clone ID: MRT4577_133312C.1
aattcggcacgaggccgctgcggcacgcgtcccgcttctggtttgcttgcctgttgccccccagatcttgccaactaattggaggcagccgagctgatctcccatcccgcaacgcgccgtctcgacggcggatcggtttcttctgcttctacctcgtgatctttgggcaagacgataagacacgtccaagcgtcgccacaaccaagggcggcttggttgcagtcaagatggggaaggacggagagtctgccaagctgaaggaggagaaggagtccaaggatgagatccatatgaaggtcaagagcaagggcgagccgtccggcgaggaagacggcaaggaggaggtcgaggtagagattgaggccaagtttgttgagaaggaagaggtcacaggctcgggtgacggtgcgggaggaaagggtaccaagaagaaggatacaaaggagaaagacaagaaaaagaaggaaggtggtgacgattcagggaaggcagaggaagacaataagggtaaagcgaaggattcggagggcaagggccaagtgaagaaggaaaagaaggatggtgctggggacgacggaggctaggagaagggcaaagaaaagaaagataagaaggacaagggtgagaagaatgacaaggagaagaaagagaagaagaaagacaagggtggagagaagaagaaagacaagggcgccaaggagaagacgaccgatcccgtgaagctcagagcaaagctggagaaggtggacaccaagctgcaagacctacatgccaagagagaagatatcctgaggcagctgaaagagctggaactggaacaaggcggcaaggggaaggccaaggaggagaagcctgcacatgtacagactctggaacagggtggagagaacgtggtcaaggaacagagtcctgttgccgcagcctgatccggttacacatgcacatgcatcacactgtaaatgaaggaacatacatcagctgagttgtgaaaaatggtacgcatgcagtgtcaggatctccgtctctcactatccagtgagaagaacggaacatataggtatagctgctgagtggagtgcgtccttctgatacgtgacactgtaatacttggccggcttttgtgaataaaaggtgtgtgcctgctgttgtcaaaaaaaaaaaaaaaaaaaaaaaactcgagggagg

SEQ ID NO: 36526 - DNA, 1173 bp, Zea mays
  Clone ID: MRT4577_133313C.1
tgggtacctcgaggccggccgggccgggatctcattctcgaagccgctgcggcacgcgtcccgcttctggtttgcttgcctcccagatcttgccaactaattggaggcacgcatcccgcaacgcgccgtctcgacggcggatcgttttcttctgcttctactgcgtgatctttgggcaagaagataagacacgtccaagcgtcgccacaaccaagggcggcttggttgcagtcaagatggggaaggacggagaatctgccaagctgaaggaggagaagaagtccaaggaagagatccatctgaaggtcaagagcaaggacgagcggtccggcgaggaagacggcaaggaggaggtcgaggtagagattgaggccaagtttgttgagaaggaagaggtcaaagactcgggtgacggtgcgggaggaaagggtaccaagaagaaggatacaaaggagaaagacaagaaaaagaaggaaggtggtgaggattcagggaaggcagaggaagacaagaaggataaagcgaaggattcggagggcaagggccaagtgaagaaggaaaagaaggatggtgctggagacgacggaggcgaggagaagggcaaagaaaagaaagataagaaggacaagggtgagaagaatgacaaggagaagaaagagaagaagaaagacaagggtggagagaagaagaaagacaagggcgccaaggagaagacgaccgatcccgtgaagctcagagcaaagctggagaaggtggacaccaagctgcaagacctacatgccaagagagaagatatcctgaggcagctgaaagagctggaactggaagatggcggcaagggaaaggccaacgaagaggagcctgcacatgtacagactctggaacagggtggagagagcgtggtcaaggaacagagtcatgtcgccgcagcctgatccggttacacatgcacatgcatcacactgtaaatgaaggaacatacatcagctgagttgtgaaaatggtacgcatgcagtgtgaggatctccgtctctcactgtccagtgagaagaacggaacatataggtatagctgctgagtggagtgcgtcctcctgatacttggcttttgcgaataaaaggagtgcctgctgttgtcattaaaaaaaaaaaacactttgataacaaagaccac

SEQ ID NO: 36527 - DNA, 1214 bp, Zea mays
  Clone ID: MRT4577_133314C.1
ctcgaagccgctgcggcacgcgtcccgcttctggtttgcttgcctcccagatcttgccaactaattggaggcacgcatcccgcaacgcgccgtctcgacggcggatcgttttcttctgcttctactgcgtgatctttgggcaagaagataagacacgtccaagcgtcgccacaaccaagggcggcttggttgcagtcaagatggggaaggacggagaatctgccaagctgaaggaggagaagaagtccaaggatgagatccatctgaaggtcaaaagcaagggcgaggcgtccggcgaggaagacggcaaggaggaggaggtcgaggtagagattgaggccaagtttgttgagaaggaagaggtcaaagacacgggtgacggtgcggcaggaaagggtaccaagaagaaggatacaaaggagaaagacaagaaaaagaaggaaggtggtgacgattcagggaaggcagaggaagacaagaagggtaaagcgaaggattcggagggcaagggccaagtgaagaaggaaaagaaggatggtgctggggacgacggaggcgaggagaagggcaaagaaaagaaagataagaaggacaagggtgagaagaatgacaaggagaagaaagagaagaagaaagacaagggtggagagaagaagaaagacaagggcgccaaggagaagacgaccgatcccgtgaagctcagagcaaagctggagaaggtggacaccaagctgcaagacctacatgccaagagagaagatatcctgaggcagctgaaagagctggaactggaagaaggcggcaaggggaaggccaacgaagagaagcctgcacatgtacagaatctggaacagggtggagagaacgtggtcaaggaacagagtcatgtcgccgcagcctgatccggttacacatgcacatgcatcacacacactgtaaatgaaggaacatacatcagctgagttgtgaaaaatggtacgcgtgcagtgtcaggatctccgtctctcactatccagtgagaagaacggaacatataggtatagctgctgagtggagtgcgtccttctcctgatacgtgatactgtaatacttggctggcttttgtgaataaaaggtgtgtgcctgctattgtcaaaaaaaaaaaaaaaaaaaaaaaaaaaaaaaaaaaaaaaaaaaaaaaaaaaaaaaaaaaaaaaaaaaaaaaaaaaaaaaaa

SEQ ID NO: 36528 - DNA, 639 bp, Zea mays
  Clone ID: MRT4577_133315C.1
ctcgaggccggccgggccgggatatatatatgtgcatgcatgcatgagctgctcgaggcttgcaagaaggttgcagatttgatcgatgcatggcgatgccggtggagacggcggtgtgcatcgcgcgcaacgtgctcttgctgctggacgcttgggtctggacgtgcgtgctcgccgccgacggcgccgcgcgcctcctccggtcggccacgcactgatcgatctatcgtcccccgccgccgattcacggccgtatgtgtctagatgcaaaacgaaagatagcatctccacccatatgacctcgtgagtcgatcgtcctcgtaatatagtacagggctcgtcaagcatgtgtatagcaacgttagatatatattgaagtcgtccaggatcggagatatactctctttttttttcaatacaagtaatgattttgaaacagctaccttgttcacctttcttttatttatcatcttagaggagatgacgacattgatgtgaagtaatatatgtaacagaaactagctgcagcattaattggatatgaattccaatttctgcgccagtgtatcaatttaatttcttctgttcaatgaaaaaaatgtatgacgaaaaaaaaaaaaaaaaaaggcccctagggcc

SEQ ID NO: 36529 - DNA, 325 bp, Zea mays
  Clone ID: MRT4577_133316C.1
atgcacgcgccgtaacgctagcttgcggttcggtcgaggtgcacggctctcttccagagaggtgccgtagggacacggacgtgggccctttaactgactcgctggcctgcagcctgcgagagaggaacgtgctggcctggcactatcccgacatcaccgacgctttcgtgagtgaggttggtgtggctgccaatgactaacagaacacccactagcctgtggaggctctcctaggcgcttgttgactacagacagcctgaaaatgtgcaccaaggcatcagactgcttgctgcttgattggacaggtctatccacccacctgaaa

SEQ ID NO: 36530 - DNA, 450 bp, Zea mays
  Clone ID: MRT4577_133317C.1
ctttcgagtacttccccactaaattcctatttctcacactccactcacacctacgcctatccacgaacaaacatacatccatactacaaccatgggtctcatgtggcacaagggctttggcggaaagagggctggtggcggtgtcgttgttgacaaacacggtgttcgacgcgcaccctttcgcatctcgtgcggtggtttctcttgcttccgctaagcatccaccctcctcatatcaacgattcacgacttctctcaacacgtccatatcttgatacctttgttttgcgatggcgttacggctcgaatctgaacggcggtgaacaagtggaagctgtgcatagctccttagcgtcacatgcatgcggagtcacacgcacacacacacatatgtgaccagattcatacatgttccataacctcagtagcctaataaaataagcatattcg

SEQ ID NO: 36531 - DNA, 626 bp, Zea mays
  Clone ID: MRT4577_133318C.1
cccccctcgaaaaactcttttttttttttttttttttttttttttttttttttttttttttttttttttttttttttttttttttttttttttttttggaaggggggggaaacccccgtaaacccaaacaaacccaaattaaaaaacaaaaaaaaaccccaaaaaaaaaagcaagcaacccgtttttttaaacaacaaaaaccaaaccaaccctttttggggggaaaaaaaacaaatttttccggcgggtaaaaaaaaaaggccaaaacggggggcccggggggccaaaggcccccttaccccccaaaggacccggatacttcaaccccacccttttttaagggggcaaaaaaagggggggaactgaatgcatgcaggaaaaaaattgggcccttggtggcggaaaaaaaaaaaaaaagcccccttctttggctgaaaaaattaacaacggagggaaaccgacccacttgggtaaaaaacttaaaccaaccaacccccccaagaaaagggccatgggggccttaaacccaaattgccccggggggcccatgggtcaaggaacccccccgtgggccaccccgaaccaattggcccctgctcccaaaattgccttgggggcccccgcc

SEQ ID NO: 36532 - DNA, 244 bp, Zea mays
  Clone ID: MRT4577_133319C.1
atgcagcgtacctatcatggcggggggatcaccttcactgttggatctcatgacgggctacctgcctcacaaatgccagtggaggctgctcgctggttccagggctcgatacacgccgatagataatatctctgcgtgctggaggattatcactagcatcgctctataggacacatcggagatactgtcaagagatcaactgtatcgtgtggatcacatgcagcttctgcacacacatctccat

SEQ ID NO: 36533 - DNA, 504 bp, Zea mays
  Clone ID: MRT4577_13331C.1
tgtgcactagtgatttgaaccttggttgttgacttcatattcagtcaccttaccaacaggacacatacatttttgtgttttatttacacaaaatctacttatatatagaagctgcagcaatgtacgtgcatttgactagtttctttatatttttagctgggacctgaatttacattcttaggttcatgttaaattgaaacaaacagcaagtcactttattgcatcttctaatttttgctaaatcgtagggagtatcatggcaataatatagtattctaccatgatcattgtgatattttttgtatatactgtgcttatgtgaagctggaaatctgacagagatggtgtaacttattactttataaactaacatatcttcaatattattttgagttggaggaaaattgtggtgttgagtcagttccaccaagcagcacagccacagccctgttgcaagttgtatgcttactgattttatttcttcttttttggcattagctctaa

SEQ ID NO: 36534 - DNA, 244 bp, Zea mays
  Clone ID: MRT4577_133320C.1
gaacgcggtggaggactgggtggcgaacccgcaccaggaccttctggggcgccgccacaggcacgccggctcctcgcgcctcaggaaatgcgggctgaggtacgaccaccgctacgaacccctacttcgatctggacatcaaggaggcgctcgggggggtgcctaaggaggtggtcaacacccgcatccagggcgaccagcgcctcaacaacaagctgatgaagcaccaggacgtccccgagga

SEQ ID NO: 36535 - DNA, 170 bp, Zea mays
  Clone ID: MRT4577_133321C.1
acacgactctatagtgactcgtattaatgtgacatacatactgtgctagcgccggaagccggaagcatcggtgacgaagccttccgtgtcatcactcagtcaggatctcatggggatgggtcggttcgcgggctttgggaatcagccgatgtgacgaagatgctcatcga

SEQ ID NO: 36536 - DNA, 162 bp, Zea mays
  Clone ID: MRT4577_133322C.1
gcgtccggactcatacgacaaacgataacgtgccagactataagtctggattatctgttatgtttacacgttttaagcatcttgtcgttattattcatactggcacaacagtgtcatacatttgtaccattacgagtaagaacgagactgatgttgaatatg

SEQ ID NO: 36537 - DNA, 594 bp, Zea mays
  Clone ID: MRT4577_133323C.1
gccactcgaagccgagatacggccatggactccaccggcaccggagcagcggggaagggaaagaagggagcggccgggcgcaaggtcggcgggccaaggaagaagtcggtgtcgaggtccgtgaaggctgggctccagttccccgtctacctcgccgctgtcctcgaatacctcgccgctgaggttctggagctcgccggtaatgctgccagggacaacaagaagactcgcattattccgcgccacgtgcttctggcgatccggaacgacgaggagctcgggaagctgctgggcggcgtgaccatcgctcacggaggtgtgctccccaatatcaaccctgttctgctgcccaagaagacggcggagaaggcgtccagtggcgggagcaaggaggcaaagtcgcccaagaaggccgccaagtcccctaagaaggcatagactgactgtccggagtgatctgatgtttagcagtaccttgttaccagtatgcggtgatgcgtaggctgcagatgggacgaatgtgcttgtatgtgtatgtgtcctgctgcaagttgtcctttgctatttagaatggaagaagaaatgccttgtttc

SEQ ID NO: 36538 - DNA, 282 bp, Zea mays
  Clone ID: MRT4577_133324C.1
gccccaggacctggggaaagaacggaaactcccggaggcccggaaaaccccaagacccgtgggcctaagggaccaaaggaaacctaagctctcaaaagggcccaaaaccaactgggacctccgggagaccatggccaaggaggcccgggaaccttgggcggaagcggcccaggaagtcggggaaaacctggaggggggcccggccccggggcacggaaagggggtccaacccaaggaagaggaactgggaatcccggcgacggacaccggaccgggaaacca

SEQ ID NO: 36539 - DNA, 674 bp, Zea mays
  Clone ID: MRT4577_133325C.1
gccgggctggatatctcggctctcgcatcgatgaataacgtagcaaaatgcttatacctggtgtgaattgcagaatcccgcgaaccatcgagtttttgaacgcaagttgcgcccgaagccttctggcggagggcacgtctgcctgggcgtcacgcaactcgcaattccgcattcgttccaactcctgagcactttctcctcgtcccagacaacccaatcgaagccgagatacgaccatggactccaccggcaccggagcagggggtaaggggaagaagggagcggccgcatcgggcgctacttgaagaagggccgctacgcgcagcgtgtcggcaccggcgcccccgtctacctcgccgctgtcctcgaatacctcgccgctgaggttctggagctcgccggtaatgctgccagggacaacaagaagactcgcattattccgcgccacgtgcttctggcgatccggaacgacgaggagcttgggaagctgttgggcggggtgaccatcgctcacggcggagtgctccccaatatcaaccctgttcctgctgcccaaaaagacggcggaaaaggcgtcccagtggcgggaagcacggagcaaaaatctccccagaaggccgcaaagtcccctaaaaaagcataaaaccgactgcccggagggacctgatgtttaa

SEQ ID NO: 36540 - DNA, 677 bp, Zea mays
  Clone ID: MRT4577_133326C.1
ggccgcttttttttttttttttttaagctgaaactaacatagaccatggaattatttcaacacagcaaagattcaataaacataaaaacattttagaggccacacaggcaagtaaactaactcgacattattttagggaacagggcttggcagttcctcagccttcccttcaagattatgctttgcctcgagatcaagctctgactctcaagaccatataggggataaactcaatataagttcggccagacaatcattcttcaacattttgccttctaccgttgtagctgttgttgattacatcgctcatgaagtaccagcagactgtgctataatcatgaccaccagataaagagccagcctgaggagccctgcacggcgtggacctcccagatttcatgtcaaagaccatgcccttattcctcgtagcacggccgccaatccagtatacacagttgcccctcagtcccggcacaccctctgcatacattgacactgcattgttcgttcccacaaagagtgagtaacctcctaggtccttcaccacatcccaggaaggctggcgcccaggacagtacttcagcaccactatctcattttcggccacacgacgctgacccccagcaggcagacgcagagtcacggtgcagctttcgttcctccaaacttggtacaga

SEQ ID NO: 36541 - DNA, 262 bp, Zea mays
  Clone ID: MRT4577_133327C.1
acagatcttgcccgtgcatgggtgggggcccaaccgttactccgcgaccgcgagtgcgtccacaaacaggactgtgggagggggccagagcttctgtcgggagccctggactgaagcgagcctgaaggaactgttgtgaataaaaaggaaccaagagacaggtgggcactgattttgcagccccacccccaccacgagttcgatctctagcatgtgagagctctctggagtttacctgccaaaccaacatgttgatgtgata

SEQ ID NO: 36542 - DNA, 197 bp, Zea mays
  Clone ID: MRT4577_133329C.1
tcgcccacgcgttcgtccacgcgttcgggctctctctctaccgacaatttcaggccctcgcggggagtcgaagtcagaaccacttggggtcccttaataaaaagctcactaagtggtggtccccgcccttttttttcccggtcctggttgaataccatatcctaatttgggccttgaactaaaccggccattaagtt

SEQ ID NO: 36543 - DNA, 429 bp, Zea mays
  Clone ID: MRT4577_13332C.1
attccggaggatgcagaaagatagcatcagatggtttcatagtagagggagggtggtggcagtggcagcaccagcgtaactgaaaggggtgtgggggtagaagaagagagatgccaaggtgcttgtgcgtagtattgttcttttgtatccaaatgcctcagcatggcatcgacttggcggcgcggctgtttatatttcttcattcttatttcctcccccttttttttcttctaggcatgggactttttttttggtctgtaggttttgtcggagatctatatgtacccacctacacctactaattgttttgaggagcatcctttccatgtactcgcttgtaaattggctccattggacatgaaattaggtccggtcgcctgtattgttgttgcggcatgaatattgaatagcagcatgatgataggtgat

SEQ ID NO: 36544 - DNA, 834 bp, Zea mays
  Clone ID: MRT4577_133330C.1
ttgggtacctcgaggccggccgggactcgcattccgattcgttccactcctgagcactttctcctcgtccccgacaagccaatcgaagccgagatacggccatggactccaccggcaccggagcagggggtaaggggaagaagggagcggccgggcgcaaggtcggcgggccaaggaagaagtcggtgtcgaggtccgtgaaggccgggctccagttccccgtcggccgcatcgggcgctacttgaagaagggccgctacgcgcagcgtgtcggcaccggcgcccccgtctacctcgccgctgtcctcgaatacctcgccgctgaggtactgcaatttgagcccagttctttgtttgtactgatttggcgacggagtattaattcttgcgtcccgattcgttttgcttccttgtttgaccaggttctggagctcgccggtaatgctgccagggacaacaagaagactcgcattattccgcgccacgtgcttctggcgatccggaacgacgaggagcttgggaagctgctgggcggcgtgactatcgctcacggcggtgtgctccccaatatcaaccctgttctgctgcccaagaagacggcggagaaggcgtccagtgtggggagcaaggaggcaaagtcgcccaagaaggccgccaagtcccccaagaaggcatagactgactgtctggagtgatctgatgtttagcaggaccttgataccagtatgcggtgatgcgtaggctgtagatgggtcgaatgtgcttgtgtgtgtatgtgccctgctgcaagttgccctttgctatttaaaatggaagaaagaatgccttgtttcc

SEQ ID NO: 36545 - DNA, 664 bp, Zea mays
  Clone ID: MRT4577_133331C.1
gctacagcgaagaagacgcccdctccaacttgccgcattgcgcacggcggtactcccaagatctgatccgagcaaggcgcccttcagtctttcaggaagcttaccagcttggtgccgtctacggctcacagcttctgtctttctttggcggcatcgccaagctcaaggtttgggttgggtgggcgagactwcwgcwgccttcaagaccccaaaaggtgtkaaaagatgcatccttttatgcyatgttgtcttgtatttccatctaatttgttccgggaaatgtggattgcgagtacactgttggctgttgcagtattaggcatttaagatgatatcatcctgttaaactgcacaagaggtgcagtctttgatgccaccttgttatatgttggatctaactttttgtttaattgatggttctgagttcaatgttgcgtatttagtagcatcgtggagggagcwcaggagcaattcaggtgcattcatgattcatgttgttcggtgatttgggccattttgcagtttaggagccaaabaggccggcaggataatgcacattgttggttaatccaaaggaaggaatkacttttagggttgtagattcactaaaatgatatatgcctttcggtcaaaatgataaatttttctatvttttatatctctt

SEQ ID NO: 36546 - DNA, 293 bp, Zea mays
  Clone ID: MRT4577_133335C.1
agtgagtcgtattaaactggattcccccgattccctcacccatcaaccccacagcggacaaaaggcaatatgttcggcttcgggcatcacggtcaccacggttagaacccgccggtgcatggcggcctgcaccagcccatcttcaatatcgtctgcaacgccgacgaggggtactgcttcaacgtccgcgacggcaacgtggtgctggcccccgccgacccgcgcgactaacaccagccttgggacaacgccatgcgcttcagcacgcatgtcatggtccaggagggcaggcc

SEQ ID NO: 36547 - DNA, 224 bp, Zea mays
  Clone ID: MRT4577_133336C.1
aaataattttttaaccacgcaaaactacatggggggaattttatgttttgggctctccctgtcggcaaacacagagctaaagcttatagtacaactccacgacataaattgggcaatctacggcagtgccgaaaataaccattagggtgatggtaccttgccaccactcggcactgactataaacggacacaaaaaggggaacccccctcggctatcaggcacc

SEQ ID NO: 36548 - DNA, 307 bp, Zea mays
  unsure (1)..(307): unsure at all n locations
  Clone ID: MRT4577_133337C.1
agctggcttgccaaacacattttggtatataatactacaattttttaagaatactgcagtattctttcaaaactttgaaaaaacttcactcctaaacatcccctaaacttgtccgcgcgcgcggactactacttcccacacggccacaccacagtgcaggttttgcaagcaaccaatggtcctatgcgcccatctggggacctgcaggcgtagggttggttggcacatgcntgacggnacctagaactgtgccatctgcattttgtaaacctgcntnagtttgcaaatntttacaaactgtgcaact

SEQ ID NO: 36549 - DNA, 466 bp, Zea mays
  Clone ID: MRT4577_133338C.1
gggaataaaccacatgatcttgcatccctgaagggaaagcttgacccagaggcaaaagaaaatcttggcatggctttgggctaccctcttggttcattaacccaagaggggcttagtgagattatgggcaaaattgttttgatgaaggaccttaaaaaaccgaacccaaagaaggaggttttattccacaaggggaacccggttccggcaaaaacctttttgccttgaaaaaaccatttggaacttaagttgcccttccacctgctaaacctattcccaaatccacttttaacttcctcaaaggaaaaaaacctcccagaccgcaagatttttaaagtggaaaggcttccgtggaagggaccaaccccagttcctgatgaaaataataacaaggaggaggatattgattccattaataattttgaaaacaataaaaaggccttcctggaccttaatttacttcacc

SEQ ID NO: 36550 - DNA, 258 bp, Zea mays
  Clone ID: MRT4577_133339C.1
cgacgacgcactcgtacaccggctacctgaggctgctggacgcgtcccaccgcggccgcctgctgtcccgcgcgggggcgctgaacatcgtgccgacgagcacgggcgccgccaaggccgtggcgctggtgctgccgcatctgaaggtgaagctgaactgcatcgtgctgcgggtgccgaccgcgaacgtgtccgaggtggacctggtgatctacaccgtgaagactggcatgacggtcaaggacgtgaacgcggttt

SEQ ID NO: 36551 - DNA, 573 bp, Zea mays
  Clone ID: MRT4577_13333C.1
ccccccaaaccaccccaggggggaaaaaaaacggaccaattaacgggggggggaacccccaaaccccgccccccaagggggatccaacaggaaacaaacattgggggcaacaacattccccccaacaacatggggggccccaaaagaccaaaaaaaaaaaaaaagggcccgggagaaccctttaagggccccgaggacccccaacaaacggaccgggaaaacccccgggaacccgggggcggaccatggggaaagggcaaaacccccagcgggagggggcccgtccacttaaaaaaacggccccacaagggggaaaagcaccctggaccacggggacaatccccccttggaaaaagaccccgggccggaacccccctagggggaaatcccaccccacggggggccggaacaaggggacccaacctgggacccaagctgggggaaacaagggccaaagcgggccccggggggaaatgggaaccccctcacaattcccccaaacaaacaagccgggaaccaaaaagggaaaacccggggggcccaaagggggggcccacccccataaatgggggg

SEQ ID NO: 36552 - DNA, 460 bp, Zea mays
  Clone ID: MRT4577_133340C.1
cccccgagggtttcaaatttatttcccaaacccaaaaaaaggcccaaaaggggaagggaggaggaccattgtaggcccagtccctgcattgggggtttcgttggggggaatataaaaactacaaatttggttacagcctacagccctactcctggggaggaggacccccccatcggccatggcccttgatcagttgaataaaggcgtcagttgccccttccatggggagggccccctgaaaaacggtcttgccaaaaaaaaggtcgatctttccgggagcccctccaacgtatccaaaatcggaataagccatttttcctgggccattgacaatacaccccatgaaagcgatcaaaacccctggcaaaaaaaaggtcttttttttaatctcagcgcttatttcctgaagggaaaaaagtgttcggccgccggaaggacaaaacccatattcagtttttgg

SEQ ID NO: 36553 - DNA, 329 bp, Zea mays
  Clone ID: MRT4577_133341C.1
gggaaaaaaggatcaaatgttcctcccgacataccggggattgggggcttgggctattttcacggccccacaaaatttaaaaatttaaagagcgcccgagcaagaagcatttcactttggccggccatggtttaacaccacacttggcggactgggggggccctacccgccattccaacacgaggggggggacacggctccctccgaggacataacaaggaaaggcgggctgggactggcgcgcacccagccgatccaccaggaactggctgccatgttgggtgggctggaagctacggccgggggcttgcttgagaaattccagtccc

SEQ ID NO: 36554 - DNA, 123 bp, Zea mays
  Clone ID: MRT4577_133342C.1
catttctgttcatttgtacaacaatcacgcggcggcgcattataaatttatttttcgactgaactcacaccaatgaaccaaccgtcctgtagggcccttacttcccctgatgcacatacacaa

SEQ ID NO: 36555 - DNA, 268 bp, Zea mays
  Clone ID: MRT4577_133343C.1
aattcggcacgaggcaaaaggcgaactactacgctccttcggtccttgctctccttattttaccaaaccgccccacgcttgatcctcagaggcctccatgacccccagctcaacgagatccggccagcgaattccatcttccccgaccaccagatcgcatgcatgaagacgattcggggcatcggaagggcatcctcctcaacgcagctgtctctagcgccagccatgttcatgccggttcaaacgctagaccatgaacgacaagcgc

SEQ ID NO: 36556 - DNA, 408 bp, Zea mays
  Clone ID: MRT4577_133344C.1
tttcctctcggcgtcctgccgttcgggtcgagtgtttttaatggagattttttgacgccgttaaaatcgggctgagaacggaactctgtcgcttcagtggtcgaaagatctatcctgggaaaggcatgcggtctattcctgctgagcgtcaggtttgccttttagacaactagaaatggaagcgctactttcataaacgcctgaagcctgcaggggttaactggacagcaatgtacaggaatgcattcaggaaggacattcatgctgaagctgttaataagaggcgccgtgccaccagagactgcatactcgaggtacattgagggtgcttccttggaagtgatccatatgaagagaggtgctaaccttgaagtgcgcgatggtggtagagaagctgcttttcgttag

SEQ ID NO: 36557 - DNA, 237 bp, Zea mays
  Clone ID: MRT4577_133345C.1
caccacacgcgtccatgcgaagagtaggctgcacagccgagaggcatccctgtgcagctggctagcagcttgaagcatgatcatatggtattttgactgccgtcggccgtgaggcaggtggacgaagtggaccgtgttgtccaactccgcgcacttgtcctgcgagccggagaaagaagacatggagccgacgcctgactgcgggtgaacgcacgcactctaggacggacgcgtggg

SEQ ID NO: 36558 - DNA, 189 bp, Zea mays
  Clone ID: MRT4577_133346C.1
atgtttagcaccgctgccacagttaggccggtcgtggctcgtaagctcgatcgactcatagagtcacaatcagcttgattctacgagctgaactaacatcttagcacgagctagctcagcttgattccacgagctgaactaacatctcagctcggttcgtctaacgagccagtttgatacgagctcgag

SEQ ID NO: 36559 - DNA, 325 bp, Zea mays
  Clone ID: MRT4577_133347C.1
cccagcgtccgctgtctgtggctctcgctctcagtacgactgggccgtcgccgtttggtgctgaggctttcgatggattcttcggcggagaccagcacccacgcagttctgtagaaatggctgatggtgaggacatccagcctcttgtgtgccacaatggcactcggaatggtcaaggctggttttggtggggacgatgcaccaagggcggttctacctaacattgatggccgagctcgccacactggtgtagaggtaaggatgggacacaaggatgcatatgtctgaggatgaggcacagtccaccagaggtgttctgaccctc

SEQ ID NO: 36560 - DNA, 315 bp, Zea mays
  Clone ID: MRT4577_133348C.1
ggaagggaaactgttgttttaaaaaaacaagttgctttgtagggaaaaacaccggggcagttgaggggaaaaaaacgttccatgggggcccattatttaaattttttccaagccagggctttttctgaaacagggggattaatacatttacaaggggggggattcgattgaatgcctaacctttggggggggggaaaacttttttttttgaaaagaaaaaaaaataaatttgggggaaactgggcgtccttgttggggggcggaaaataacgcacgggcgtttggttttttatgctgacagggccatccaatttt

SEQ ID NO: 36561 - DNA, 397 bp, Zea mays
  Clone ID: MRT4577_133349C.1
atcagtctcacagcatgacattgcttcatcggtgcgcaacaatagcatcagggtaggcggatcaatcccacatatatatatgtccacaggatcaactagaaatatatagatagataagatagatacatggttggtactagatgggataggattggcgaagctcctcagtcagcttctcagaccacaagagcaagagcaccgtcatggatgggattaggcccccaccaagaaaggccagcgagcgttgttggcctgaacgcggcgctcataccgggacatgaccctgccgtcgctgccgatggcgtcgtcctgcgagtggtagccggccgacacatccccatccgagtaatccacttggtccgtcggtggcttggtggactcgatccacgccaggaac

SEQ ID NO: 36562 - DNA, 209 bp, Zea mays
  Clone ID: MRT4577_13334C.1
cccacgcgtccgcccacgcgtacgccgactcttgggctgacacgtgggagttcgcatagactaagtgtaatagacgggtgcgcttcgataaggcgtaaccatatgaacatatgtgcgataactgaaaccttacaggccactttgcatgagaatacgccttacatactgaaaaccccaactgctaaaagtgtgtgcacattgccaattat

SEQ ID NO: 36563 - DNA, 722 bp, Zea mays
  Clone ID: MRT4577_133350C.1
cctcgaggccggccgggatccgataaccaccttcatccgtctctcttgtaaatacgcaactcatcacattcactccactacaccttccttcttttttctaaacaacacacctaccagcatgcgttccttcctcgttgttgccgtcttcctcgccttctttcaaacctcttcagccttaccgattgacaaacgtggctgtggtaatcagtctggcggcctcctcaatcttgccctccttaacagcaactcctgcacttctggctcccccgcgggcgccggtataggaccaggtggccctcctgctcctggcctccaaccaagccctgttcccatgggccctggtttcgggccgggtgggctcgcccccgatgtcacaggcctaggtcctatttccggagccgggttcaacggcatagtttcaggcggcggagccactggctttgctcaaggcggtgttgccaatggctttgtatcgggtggtggtgccgcggggttcttgccaggcggagatgccactggcttcatgatgggcggatttggcagtgatgctcccggcttcgtatcaggcggcggtactacgacccttctacagggcggaagtgctgctgcgggcttcctctacggcgggggcgattcgacgatcttgttgcaaagcggagatgggtacacgggctttctacaggtgaatcataaaatatttaacacgaaccttgctatgtgtg

SEQ ID NO: 36564 - DNA, 2096 bp, Zea mays
  Clone ID: MRT4577_133351C.1
ggtctgggttcgccaaaagttcggcagacgcgcaccgccagccgatacgaatccgacgagctcgatcgctccacttccccgatcgcacgccaatcagcaccagccaccgtggcgatgacggaggaggcggaggcgaaggcgaagggcaacgcggcgttcgcggccggccgtttcgaggaggctgtccagcacttcagcgacgccatcgcgctcgcgcccgacaaccacgtcctctactccaaccgctcggcggcgtacgcgtcgctctggcgctacgcggaggcgctagatgacgccaagcggaccgtggcgctgaagccggactgggccaagggctactcccgcctcggcgccgcgcaccttggcctcggtgacgcgcccaaggccgtcgaggcctacgagaaagggcttgcgctcgagccgtccaatgaggcgctcaaatccggcctcgcacaggcgcgccagtccgcatcggcgccgagacgtccggtgggctccggggctgacgccgttggcaagatgttccagggccctgagctatggagcaaggtcgcggccgatcccaccacgcgtggctacctcgaccagccggacttcgtgcagatgctgcgggaggtgcagcgaaaccccggcagactgaacagctacctttctgaccaacgaatggttcaggtgctcaccctcatgctgaacatcaagttccagaaccagagcagtggggcgcctgacccggcagcagcacaatcgaacccgccgccaccaaagcagcagccagaggcgaaggcaagagaaccagagccggacccggagcccgagcctatggaggtgacagaggaggataaggagcagaaggagaggaaagcgtcggcgcagaaggagaaggaagcaggcaacgccgcttacaaaaggaaggattttgataccgcgatccagcactacacagaagccatggagctcgatgacgaggatatctcctacatcaccaatcgtgctgctgtttaccttgagatgggaaagtatgatgaatgcattaaggactgtgataaggctgtcgagagaggaagggaactgcatgctgatttcaagatgatctcaagggcacttaccagaaaaggaactgctcttgccaaacttgctaaatcatcgcaagactatgatgctgccattgagattttccagaaggcgttaactgagcaccggaacccagatacactgaaaaaactaaatgatgcagaacgagcaaagaaggagctggagcaacaagagtactatgacccaagaattgctgacgaggagcgagaaaaaggtaatgagttctttaagcagcagaaatatccagaagcagtgaaacattacaccgaagctctcaggagaaaccccaaggaccccagggtatacagcaatagggctgcctgttacaccaagctaggggcccttcctgaaggtctgaaagatgctgagaagtgcattgagctagatcccacattctccaagggatacacaaggaaaggtgctatccagtttttcatgaaagaatatgacaaagcgctggaaacttatcaagctggcctaaagcatgacccgaaaaaccaggagttacttgatggtgtaaggaggtgtgttgaacagatcaacaaggcgagcagaggcgaactcagtgaggaggaactgaaagagagacagaacaaagccatgcaagaccctgagatccagaacatcctgactgatccgatcatgcagcaggttttgacggatctgcaggagaaccctcgggctgcgcaggcgcacctcaagaaccccggagtgatgcagaagatccagaagctcgtcagcgcagggatagttcagatgaagtagacggtggctggaatgtccgggttcagatctgggacctgtgctggaaatgctgtgaacttgatcattgtttcgcattttggaaactgaacccttttgtgcgaccatagtttggtcatggctgttaatgatccatatatgggttttcccatccgataaaaaaaaaaaaaaaaaaaaaaaaaaaatgttccaattcgtgcctttccccctggaatgcccgtgaaaaaggaagaatattcatc

SEQ ID NO: 36565 - DNA, 248 bp, Zea mays
  Clone ID: MRT4577_133352C.1
ggggggacaagcccaaaattcatttatcttcaacaaaacaagaaaaaaaagctggtaaacttgaggggatctggcagggtaaccttaaaacccccttttaacccagggggggccaagttccctggggacctgaaaggaaccagcctccttaggttacagttacaggttacacattgaccagacgggcccggcccttgcatgggttaaactaggggggggggggcccgtgggtccccccggggatttcg

SEQ ID NO: 36566 - DNA, 663 bp, Zea mays
  unsure (1)..(663): unsure at all n locations
  Clone ID: MRT4577_133353C.1
attcccggggtcggccccactncgtgccgacctcgggaccactacccgctacctatcccgccaccactgacccaccctttctctttgccggacggggggggccttttgatccaaccccgacacgtgccaccaagggctgcgggactaacagcaaaccctactaccagtgccgccccgacgacactgaccgtgctcggcgtaggcatgcatgggtgcaagcaactctctctttcggacactgtgtactagggctcacgatatactgcgactgactcacgtgatgctactatgcttcatagatcggaccacctgctggatcgtttttcgagaggcgacaaatgaagaaatgagtggccgtgtaaggagaccaatacggtgacgcttcccttgacatttgtgactggtgggcacaactgaccaaccgggccaacggcgataacggagctatttctgcgcgacacctccattggacacctgtcatcacaatagaccgactaacatctgccggccgcgaactgcatattaacaaaactgctgcatgcgattgccatacgcgcgctgatgcatctgtcttatgctttcgcaaacacgatggcgttattccatgctgcctgggatgattaccaaacagaactaaaacaagctgccggcgctctagacgat

SEQ ID NO: 36567 - DNA, 728 bp, Zea mays
  Clone ID: MRT4577_133354C.1
cctacgcctacacgacggcgctgcggcagcgccgaccaatccatggcagacgaggcggagggaacgaggctgaggccgggatcgcggccccgggcgcgggcgtggctcctccagcgcccggaggcggcgaggaaaccaagaggaagagggggaggcccaaaggtagcctcgacacgtataagaggcggaggcggaggcggcgcaccggcgacctggtgtcggcggtgcccgcggctagcctcggggatatgggccactcatgtggctgcattcccgctcccccactccctcccccctgcactgtgtacactgtacgcgacggcggcgtggcaatcacccctcaatccatggaggacgaagcggagggggtcgaggctgagtccgggaacgcgggcgcggcctccgccgccagagacggcgaggaaaccaagcggaagaggggaagtcccgaaggtagcttgaatgagaggaacaaggacaggacgcctaagcccaaggccaaggggaggcggaggcggcgcaccgacgaccagaccttgtcggtgtccgcggtgagcctcggggatctagggctcggggtagcggcggggaccaggtcgatcagagagaggaggccggcgcccaatgcgttcttcgacgtgggcagcgacagcgatactgagcatgatgatgatgatgatgatgatgatgatgatgatgatgatgatgatgatgatgatgatgaggag

SEQ ID NO: 36568 - DNA, 399 bp, Zea mays
  Clone ID: MRT4577_133355C.1
tctagctcactagtaaatggccgccctcttctttttttttttttgggggggtttttttaaaactttttggttctttttcaaccccccccccccctcacaaaatacatcaaacttcaaacccgctaaaggaaatcttaacaaatccggcgctataaaaaaaccactcccaaccaactgtaaaacccccgcgagtccccaacccaatccaacctagaaaggaaaatctggggcaaggtaagaaaaatgctttggcggcaaaggcctaaaccgctcaaaggattctaacccaggacgaagaggaaattccaggaaaaaaatgtcagcttctttccaaaaaatacaactatctcccccaaaaaaaaaagagcccgtgacccccggaaaaaaattctggtgaaa

SEQ ID NO: 36569 - DNA, 328 bp, Zea mays
  Clone ID: MRT4577_133356C.1
gaagacaattaatcgtattaatctgcatcattcacaccggattcaagtggtcattcatgatacaattgcacgggctcggcaataattcggaccagagggcatgcgccctgcccaaagggggcaggcgggaacggaaaagggcgcaggagctatgtgtgaaatcaaagagatattgctgcgacctactcccagcggtctcttgcttctttgtgacgcgcgtactgggactgatgacttgtggtgaggagtctggtgatcagaaggcggatatgagctcgcggagctcttccatgggctccgtctgcagggcgatggccacggacaggct

SEQ ID NO: 36570 - DNA, 1496 bp, Zea mays
  unsure (1)..(1496): unsure at all n locations
  Clone ID: MRT4577_133357C.1
cattgggtacctccgagccggccggggcagagccgcatcgcgtccttaggtcctagcatctggaggggacccgtctggcgtctggctgggaccgggctgcccagccgctcgatcgacgttcggcgaggacgctgctccggtactccggttggttggaccggaggcgcgacgatgggggcgctgtcgcggccggaggaggtgctggcgctggtgaaattgcgggtggcagcggggcagatcaagcgtcagatcccgcccgaggaacactgggccttcgcctactccatgctccagaaggtctcccgcagcttcgccctcgtcatccagcagctcgggcccgaactccgcaatgccgtgtgcatcttctacctcgtgctccgtgccctcgacaccgttgaggatgacactagcatcccgaccgaggtgaaggtgcccatcctccaggaattttatcggcacgtctacnaccgcgactggcattattcatgtggaacaaatcactacaaagtgctgatggataagtttcacctcgtatccactgccttcctggagcttggtcaaggctatcaaaaggcaatcgaagaaatcactaggcgaatgggagcaggaatggcaaaatttatatgcaaggaggttgaaactgttgatgactatgacgagtattgtcactatgtagccgggctagttggttatggactttccaggctcttttatgctgctggaacggaagatctggctccagattcactatccatttcatgggtctctttttacagaaaactaatataattagggattatttggaggacataaatgagatagcacagccccgcatgctctggcctcgagagatatgtagtaaatatgcagatcaactcgaggatttccaatatgtccgaacatacctcaacaggcagtactatgcttgaacgatatagcgacgaatgcactgattcatgccgaagagtgccttcagtacatgtcaggcttgaagaaccatgccatcttccgtttttgcgcaattccccaaataatgtcaattgcaacatgtgctctttgctacaataacgtggcatgtctttacaggagttcgtaaagatgagacgtgctctcacggcacgaataattgacgagacaaattcaatgtcagacgtctataccgctttctatgagttttcttcattgatagagaccaagattgatgacgatgatccagatgctgctctaacacgacagacacgtgaattcaataaagcaaacttgcaagtcatctggtttggtaaagaggagggggcaccattttggacacatcaccttacaggcctatgctggtgagtaacccgtaatcaggaaattcatgttagcactcttctatataatttgtcgatattcttctgtgatcccctcagatcatgattgtcctcctgctggtggctatccttttcggggcactgtataccaagtgatgcacttgtagctgggctttttccctatgg

SEQ ID NO: 36571 - DNA, 1891 bp, Zea mays
  Clone ID: MRT4577_133358C.1
cattgggaccctcgaggccggccggaggtgcagggacgccccgcgcccgttagaaatactcccacgcggacgcgctcgcagagtcgcaagagccgcatcgcgtccattaggtccatagcatctggaggggacccgtctggcgtctggcgtctggcgtctggcgtctgtctgggaccgggctgcccagccgctcgatcgacgttcggcgaggacgctgctccggtactccggttggttggaccggagggcggaggcgcggcgatgggggcgctgtcgcggccggaggaggtgctggcgctggtgaaattgcgggtggcagcggggcagatcaagcgtcagatcccgcccgaggaacactgggccttcgcctactccatgctccagaaggtctcccgcagcttcgccctcgtcatccagcagctcgggcccgaactccgcaatgccgtgtgcatcttctacctcgtgctccgtgccctcgacaccgttgaggatgacactagcatcccgaccgaggtgaaggtgcccatcctccaggaattttatcggcacgtctacaaccgcgactggcattattcatgtggaacaaatcactacaaagtgctgatggataagtttcacctcgtatccactgccttcctggagcttggtcaaggctatcaaaaggcaatcgaagaaatcactaggcgaatgggagcaggaatggcaaaatttatatgcaaggaggttgaaactgttgatgactatgacgagtattgtcactatgtagccgggctagttggttatggactttccaggctcttttatgctgctgggacagaagatctggctccagattcactatcaaattcaatgggtctatttttacagaaaactaacataattagggactatttggaggacataaatgagataccaaagtcccgcatgttctggcctcgagagatatggagtaaatatgcagataaactcgaggatttcaaatatgaggaaaattccaaaaaggcagtacaatgcttgaacaatatagtgactgatgcactgattcatgctgaagagtgccttcagtacatgtcagccttgaagaaccatgccatcttccgtttttgcgcaataccccagataatggcaattggaacatgtgctctttgctacaataacgtgcatgtctttagaggagttgtaaagatgagacgtggtctcacggcacgaataattgacgagacaaattcaatgtcagacgtctataccgctttctatgagttttcttcattgatagagtcaaagattgatgacaatgatccaaatgctgctctaacacggagacacgtgaattcaataaagcaaacttgcaagtcatctggtttggtaaagaggagggggtaccatttggacacatcaccttacaggcctatgctgatcatgattgtcctcctgctggtggctatccttttcggggcactgtataccaagtgatgcacttgtagctggcctttttcccctatggagacgagacaaactctgccaatctgatccttttcgtactctgtagtccccaatggctgcaggaagttcgaaattactggctgtagaagtgtagatcatacggcagcatgctactgcttccatgactccgttactgctctcgattcgtttcttcattatgttttctcgcgcgttgtatcgtttgaagctgttttaagcaacggaaaaaaataccatgtgacacgtgtatcctacgaacatgggtttctgtttagttagcagtgggcgcactgtattatgttgtcttgttgacatgtcatgttttcaaagctgacgtgtttgtgtttaccagaattgtgtagtggagaacaacatttgccgcgtcaaaaaaaaaaaaaaaaaagcggcc

SEQ ID NO: 36572 - DNA, 512 bp, Zea mays
  Clone ID: MRT4577_133359C.1
ccgggacttacactcacacccagccacacgcactgtacgaagcgactcagcaacatgagagtaggaagcaacgacgtaggtaggacgcgcggagtccgtgtccccaatgccggcgtcttcgatcctcacggcacgtctggggggggcgcctcacggcctgccgcccctggcgcggcgcacctcctcgtgcgacgtcgtgtgctccaacaagaagatgaacacagacgagccctagggtataggacggtggacagaacgacgaggtggacatctacgcgacaaacgaggagggctacgacgtgcactacctgaaccaccaccactacgagaactactacttacacaacctctcctacaacgaggatgactgatctccaaaccgacgatcactacgtccacgcaacctgtgcgcttatgatctggagcgacacgctggctgggatcctcttcgcgccggacctgctctactagaacaccactgctgctctccggctaaagatatcctatgcatg

SEQ ID NO: 36573 - DNA, 377 bp, Zea mays
  Clone ID: MRT4577_13335C.1
ccccccccccccccccccctttgtttttatatagggaaaaaaccccctttttcccccaacccggaggagccatatttaaaaaacggggggatccccaaaacaaagtataaaattcacaattctcatgggctagctgtttctgttttttttgccaagccaaaaccttttttttattggtataccaaagtttggggggatattttggttccttaacaaaaattgattagagggaaagggttccaagagcccatgaaggctacattttttggaaacatcgcttctcaacaagtttgttgtttccaggtttttttggttcccgcacaaacctatccaaagggctttagttttgacaaaaaactacacaaaattgggaacct

SEQ ID NO: 36574 - DNA, 570 bp, Zea mays
  Clone ID: MRT4577_133360C.1
gagacaaaagctttaggtggccaactgacacagcgaagaatttgaagtttcagaattttgtctgttcagccagcgagctaaaagcctggaacaacggttgtcctggtgggcaattccaaatgatccgcgcatggagcacgagacacggctcccaactttcagaatcgcttacacgagaagtctgcgaaaaaaagggagaaccaccatgtaaatcagaggggtcgtagtcaggtacggacccgacccgaaacaacaaggttaggggctattattgatttgcttgccacacaaaaaggaaatgcaatcagtgaacagaaaaagtgtaaagtctgaaacagcagagaggctttttttttcagacacgaggaatgggatcctttgctttatgtacaatccattccccacaggaaacgtcttttcttttctctcttatctctctctctcttgctgcctgttttatgggataacatgcacaacaaaaccttgggaaggggaaacttacaacgagaagaaaatcataccttttttcttcgtgtaacggggacacatttattggcgagtgaaaccggg

SEQ ID NO: 36575 - DNA, 244 bp, Zea mays
  Clone ID: MRT4577_133361C.1
gaaagaatcgcctaccagaggaatgacgatgatgaagaggaggcagcccgggaacggcgccgccgagcccgacaggaacggctgcggcagaagcacggaggaagaatccttgggacaggtgaccgaccaggtggaggtgaatgcccagaacagtgtgcctgacgaggaggccaagacaaccaccagcaacactcaagtggaaggggatgatgaggccgctttcctggagcgcctggctcgacgt

SEQ ID NO: 36576 - DNA, 366 bp, Zea mays
  Clone ID: MRT4577_133362C.1
acagcaacataatggccctgcatgacaagctgtgacttagatatgatcagtcgctcaacacctgctgggcggtttctgatatagaaacaagccacctagacgggtacatgcgttcacatatgcccaatgggaccgaatgatacacacggtacagagtgaaacggcacaacacctctgtgaccagttgctgcgtggagacgctcttaatgagcctttccacgaggactggggccacgtctggggcaactccagcttcgtgatgttatcattcatagtgacactactccgagcgtacttaatagacttccacgaatgacagttccccctgtcctttaggtaaaacacttccggacgatccgttttcac

SEQ ID NO: 36577 - DNA, 516 bp, Zea mays
  Clone ID: MRT4577_133363C.1
ccgactcccaaaaacccatttggcattgccttataaggtgcaccaatacgcttgcaacatgtcatacagcgcaagaaccggtttgggacaaaacgacacgttccctatctttacagggaattgctccaaactggtaaaacgactatcattcctcttatgctgcataggaagaaatacccatctcacgactgctcccgtgactccgtgcctggagactcccaacagatggggtgccgcggggagtaacagcccaagtgatccaaccgggtgaccttcaagactgagcaccgaccaagctgcaccactggtaatgcatacctaagaatgaccctgatgacgtgggactgacaggacaacttcctgagaacggaccaatgggactcccccgtgaagtgggagccgccgctagcccccacctctgactagcccagagcactaaccaagggatactgccacggcgggcattccaaatgggcatcatcggccaaagctgcatccacctgatgtaacaacggg

SEQ ID NO: 36578 - DNA, 369 bp, Zea mays
  Clone ID: MRT4577_133364C.1
ctaaatcgtacacatagcggtggttgcagggacgttcaacggcagtacagggggggtcaactggccttctctctacacgcatgcctacgtgcacagtgaggttcatactagcataatcctgcacacgctgcctctaacattcgtccttcgatccaacttatcgtttgtacactgtcacgccagctcctccgtgtgtaaccccgattagatcaccaagctctttcccaacctgttttgccagccatcatcgtcgctgttgccctccggctaactcctatagaccagcccgataaatgtctatgtcaacctctctggtgtacattcgcccgactggcacaatgtcacattctgcatcttttattacataca

SEQ ID NO: 36579 - DNA, 114 bp, Zea mays
  Clone ID: MRT4577_133365C.1
ctcgagccttatcggtcgcgcgatgcacaacacgatccacatcggcagcgagcacgggctactccacaggatgatactaatggacaagcctgaagatgatcatcaaagggacat

SEQ ID NO: 36580 - DNA, 612 bp, Zea mays
  Clone ID: MRT4577_133366C.1
gttatgcgtctcctcttcgatctactctgctacctagccactacctgcagacttgctctacggcttgggctactgaaatcgaggaacgaaacgatggctcgcagtggctccatgctgttctggatgctggtcctgcagctggtcatgcagctggtcatgcagacagccacgcagacagcggcggcggccgaccaacccggagatcaacgccgagttgtacgccaggtgatgtggcactacacctgccactacagcaacagtaatcgcctaacttgctcgatatattgctggacttgctgcaacacttgctgctagctagctagatagctagcgtgagctcttgcacgctctcaataccacttttcataccaaccttattgctgagctcatgcatgcgcatgatgagctcgttgctgggctcgtctgcgtcgtcgtctgcggcggcggcggcggcggcatctgcggcgtcatctctggcttatcaacgacctcatcaggcacttgtaatagcgctagctccagcattactttctgcaatactaagtcaaataagaagccaacacacgcaagtgcactcacaatcctaatattttttgctcttctttgtgccaa

SEQ ID NO: 36581 - DNA, 321 bp, Zea mays
  unsure (1)..(321): unsure at all n locations
  Clone ID: MRT4577_133367C.1
tcgcanncacgcntacataanctcnnaattcggctcnannttctanatcgcnanctgccgccgactantnanctcatcnacccngnaattaattccnnaccnntaccnccanncntaccanctttccctatantcantcgtattacancttcncgtaatcatgntcatanctntttcctgtgtgaaattgttatccgctcacaattccacacaacataatnttnccaaaaaaaaacatcaaacatntanncttcaacattnaatcncaacnancaacataccnttatcnccctttttttcnncnccnnnnnnnnnnccnnn

SEQ ID NO: 36582 - DNA, 133 bp, Zea mays
  Clone ID: MRT4577_133368C.1
ttcttcactccccttatacccacacccctgactacaaacgccagcgggggaacctttaggaaaccaaaccgcgttcgctacacagaacacgcaaagcacataacacacacgcctgagaccacttagggcacac

SEQ ID NO: 36583 - DNA, 501 bp, Zea mays
  Clone ID: MRT4577_133369C.1
ccgggctcgagttttttttttttttttttgacaaaggaaattttcttacgtttgaattgatttttcaatcaattagtttgttggtctactcaaaccttaccatttaatcttctatacaactacaagattttaaaaaattgctagacgaaatggaaactcgctgcatctaagctgcattctgaaataaagccataccagtaagcctggtttgtcagccttgtaaatgcgcaattaattaatatcttctgcaaatttgtcgttaattttccgtttcattgcatccaatcgatacagacaatcccatccaaaacgcgcttttcaacgctgtccacatactccgatccaacccccaggctgcggcgcggagtaggtggcgagccggttgccccagaagctgctggtgctcgccgcggcgggagcggagacggagagcgccgccatggcgccctacagcgctgccaacccagccatcctcccgccgctctcactggattcgctcgc

SEQ ID NO: 36584 - DNA, 134 bp, Zea mays
  unsure (1)..(134): unsure at all n locations
  Clone ID: MRT4577_13336C.1
gcgacaccggcagcggncaccgcncctccgccgaggccctgcgcgangccttccgcatcgagtgtcggagacgcctacaaggtgttcgtgacggatctggggaaggagtncggcgggttgcngctgaactanat

SEQ ID NO: 36585 - DNA, 525 bp, Zea mays
  Clone ID: MRT4577_133370C.1
aagcagcccccccccatcattaatcatcaaaccaaaaaaaagggccctacctacccggggggcatgcacagtttctgggcaaaattcctatgggtgaaaaatgggatcagctttcccaaaaaaaaaaaaaccaccaccattttaagggtcccctattttttttggctcctaaattaactcctcccttcaaacttttaaaacccactttggcatttccctctttgctggggctttttttgccccttggggccctttttcctttcgcccaagttgctcccatccccatgggaagcttccccataaaaatctccaaacccagggagcttttcgaactccttttaatcgaggtctccacgttggagctttttaaaaagccggtactggggccccagctaatccaggccctccttagtttgaattgactgaccctgtttgcccgtctttttccgttttggcttctccggcttctttggaggtctcttcctctccggctttggaatttgagcctccttttttgctttcctt

SEQ ID NO: 36586 - DNA, 915 bp, Zea mays
  Clone ID: MRT4577_133371C.1
tctgtcccccctcaacctctgcatcgacgggctcgagagaagagtcggcgggtcgccgccctgctccggcaccagcaaaaccgccaggtgatccccgacaaccagctagagcagctagccgctgcagcagaagggaccttcttatcgccgtgattcgattgggcggtgcggactccatgccgcttaatcctacagaaattgtggagtgcgagcgttccgtcgatctccacgatcgactggacaccatggatatagcctcagatttcatgcctgtgatgccagctcgggatttctgattcttgaataaggcgtatcgttgagttaatcacttgattctcaccttagccagccctgatctttcatctccaacagcatataggatcacaaagacattctgattcctcatcacccaagatcccgggtgctagctatcacactatgtgccaatggccagctgtgctgctctagttacaggatgcattcttgtggcctgcccaccttgtgtgaatcgtgttaggagaaagatccagggcagtatgtttctccaatctcagcacaaccgtgttagaccacattttctgggctcacatataagccaatggttcggctgtgctcctgtcggtggccatctcacagttgcccacgctcaaggtcggagctgtctatttcgttttgcaccaaagatgactattcaaggcctactacttgtgttgcaaggttccagaaaggcttgctttgatggtttccatgacagcactgtcatttcttcttctattgtacaatctagagaaattttagtttcaaaaaataccaggcaacttcttatatgctaaacaccacttcacaagtatatagtggctcttaagtcttaacgcactacttttatccatttccatcaaacagaacctaaacatg

SEQ ID NO: 36587 - DNA, 313 bp, Zea mays
  Clone ID: MRT4577_133372C.1
gggtcgagcaggcgtccccgtattacgccaagacggctgctgactgctggtgaggtgccatgccgcacgctcggaatcgcggtgccggcattcgtcgtagtatgagctacagacgggcatgtgcagcgcagaaaagatgcttatactgggcatcatcaacgctgaccggacgctgagcacaccgaagcattgacggtagacggtatctgaaccggagctgcttagatcttgttagtacgcgctatacactaggagaagccttcaagatggctacaactaccattaagctgcgtaacttatgatgagaagaaac

SEQ ID NO: 36588 - DNA, 831 bp, Zea mays
  Clone ID: MRT4577_133373C.1
tgtttgtgagaccaaactccccgcccgcgccgccccgcttcctagttcctttcctgaaacggtcgcctggacatcaactatgctgatggatcaacgaacgtgatacgggtctcctgtcctctcctctcatctctctccagtctccaccggctatatcatcgtactgccttcgtctcttccgtcagtagctgcagatctctgtctggtacaggttgtcgtatacgttgcgtgttgctgctttctggggagaggggagcgctgttgcagatggcaagcttcaaccaagagagcagagcaggcacacagagggaggaggcacctctacagggcaagtacggaggcatttctccgaagaaggcgctcatcaacaaggaccacgagcgcgcctacttcgactccgcagattgggtgctcggcaagcagcaaggcgtgagcagcaacagcccgacgacggtgcccgcagccgagcccctcaagcccaagctgcagcggacggcgtaccaccagcttccccctcggcggcccgcgtacacgtcgtcggagtagctcggcgagcggggagtcgctgcagtgcagcaccgtaggaagccggaatccacggaggtggcgccaattgggttgtacatgttgagaaacactaatgaaggattacgtggtaaataccgaatatatttctaaaggatatcacgtctatatatatatatatatacatatatatatatatagaacatatacaaatgtatcgtctcgtgtagaatatattagctactcatatggaatatagatagaaagaggctagagggcccaccctataaaaaaaaaaaaaaaaaa

SEQ ID NO: 36589 - DNA, 416 bp, Zea mays
  unsure (1)..(416): unsure at all n locations
  Clone ID: MRT4577_133374C.1
cctcttagccaacctattagctgtccaacacctatttagggctgcgagccagaggaagaagtggcatttggagggggcccaagttccccaaatcttttcatagtgtccgaaggagacagaaccagtaaacaatccttcataggcagctttagctgaataaaccccattagcagcaatactgaaaatatgattatcctccacattgggatgcaacacaaattctgaaagcagattccaaaggtgaagataatccattaagaccccaacagatattactttcattaccttggaagtataattagtgggtgcatggattatgctctnttgaggtttaagctaaactattgttattgataaaataagttaaaccaaaatattgtactagcatgagtcatggttaataacatttctttttt

SEQ ID NO: 36590 - DNA, 180 bp, Zea mays
  Clone ID: MRT4577_133375C.1
acgagatcgagctcacgggcgaaggcaacagtcgattcacctacagcacgcttgtggatggctgcacgagtcacaccggaacttggggcaagacagtcatcgaatacagaaccaccaagacctcccgcctgcccatcatcgatgtggctcccgtggacattggtgcgccagaccaggaat

SEQ ID NO: 36591 - DNA, 293 bp, Zea mays
  Clone ID: MRT4577_133376C.1
aaaaagcaggcaacccaggatcggggaaaattcaaacacgaaggacggcaacagggtcgggaactaaaaggggcccaaaaaaaataaaaaatgggtaaggggggcagccaaaaaagttaacatgctaaaaaaaagggttggttgttgtcaacacacacacaaaaaatttaaggttttttaaaaacaggtggataaaccccgcttacagactgggagggaaactaacccttgaataaagggttttaaaaggccgggcaaaaattgtttggttttcctggaagaagggggggggg

SEQ ID NO: 36592 - DNA, 114 bp, Zea mays
  unsure (1)..(114): unsure at all n locations
  Clone ID: MRT4577_133377C.1
ntccgcccacgtctgtccgcggacgccgtgggcaaaagtctcagcctcctcgggagaaagggcttataaaggaagacaaattctgattcggcaggggcaacctaccgtgaaaaa

SEQ ID NO: 36593 - DNA, 318 bp, Zea mays
  Clone ID: MRT4577_133378C.1
aacgttttctttttttacatgtctcccctgcactgggtctccccaactgggggggatctcaactcccccaaaaaccggtgccccttcttcggttcctttcttacactaccggccaggatatccttccttttcttcacctctacttactaaacggtgcctccatcctctttatcttttcccatttgatcggtaccttcactcttctccactcacttaatcctcttttgaacactcacccctttcctttcttctttacttgtccctctaactacgtatttattatcttttaacactttccttatttttcatacttttctt

SEQ ID NO: 36594 - DNA, 435 bp, Zea mays
  Clone ID: MRT4577_133379C.1
actacaacccattcctcgcctaccataggaacatcgctctgttcgacaccagctgaaggcatggcacaacgacttgtaggctattagctagctctgaggcgctgagatgatctacttctttctacatcgcaattagatgagatgtagttaataaatacgttatcccagggctaccaacgatcagtttgtgttgtacacaccagatcactcacgggcggtgaaaactaggccagagaaagagagaaagtggttgcacgcccggaacctcggttatctaaaacctttggccgggcccaccacaccttgcaaaggaacagttggagagaaaaaaaaatgttcgctagcaatgtgccagagctgtttggtattggagaacccttacctggattgcttattggacaatgcacaacccctctacttacagctgaaaatggg

SEQ ID NO: 36595 - DNA, 269 bp, Zea mays
  Clone ID: MRT4577_13337C.1
attcggctcgaggctggtggtagactgctttttttcgaccactggtgcgtatacatgcaggtgagtggggcatactgagcgcactggcgcctaccacattcttgttattgatgagcatgagcatgagctctgcgagcacgtccttgggagcagcccggacaaggggggtgcccatgcacaggctgaccgagagagggcccccgttttacttaccagcaacaacggggtggcatccaacggaggtatggcaaatgctatggggttccata

SEQ ID NO: 36596 - DNA, 555 bp, Zea mays
  Clone ID: MRT4577_133380C.1
attgggtacctcgaggccggccggggaacagggaaaggcatcgctatcagacgtatcagtgatcgactggactcgccgccgtcccaggctagctcgatgattggatgcgccaagccgctcgcggcgcctctgcaggcatgggctcgcccgtcgtctcccgccgttcgccgtctccccccctcgactctgcgccactgacaactccacagctctcacccgggccgtagagagcccagggcagcctaagcctgaagacgccacaccgccaagctcgattgagggcggctcacccctggcggcgcgggtgaggtcgaattcccacagatgaccgaggccgtgacccgtggggtctgggcagcggccgccgttgtagcgcgagcgtctactcgtaggacatactgtcgaggacgacgaggatacagtcgccgccgcgcaagtgaccttgccgcgacggagcagacatgatccggagtgacactggtgagatgccgagaaggactgcacaccgcgataatcgatgtctgcataacgccagagcggagcgggagatctcca

SEQ ID NO: 36597 - DNA, 2127 bp, Zea mays
  Clone ID: MRT4577_133381C.1
ctcgaggccggccggggcagcccgcccgcccgagtcacactcacacagagccgagcccaggcaggcggcccagcccaccaccccccccccgcgtcgcgcggcgccgccggagcgggagcgagagtgagagcgagcgatggacgcgctgccggaggcgtggtcgcaggtgcgcgcgccggtgatcgtgccgctgctgcggctggcggtggccgtgtgcctcaccatgtcggtgcttctgttccttgagcgcgtgtacatggccgtcgtcatctccggggtgcgcctgctccgcctccgccccgaccgccgctaccgctgcgaccccctccccgaggacgacccggagctgggctcctccgcgttccccgtcgtgctcgtccagatccccatgttcaacgagcgcgaggtgtaccagctgtccatcggcgccgtgtgcgggctgtcgtggccggcggaccggctggtggtgcaggtgctcgacgactccacggacgaagtgattaaggagatggtgcggatggagtgcgagcggtgggctcggaaggggatcaacataacgtaccagatccgggaggaccgcaaggggtacaaggccggcgcgctgcgggcggggatgaggcacgcgtacgtgcgcgactgcgagtacgtggccatcttcgacgccgacttccagcccgacccggactacctcaagcgcaccatcccctacctcgtccacaacccggagatcgccctcgtccaggcgcgctggagattcgtgaacgcggacgagtgcctgatgacgaggatgcaggagatgtccctggactaccacttcaccgtggagcaggaagtgagctcctccgtctgcgccttctttggattcaacggcaccgccggcgtgtggcgcatctccgcggtgaacgaggctggggggtggaaggaccggaccacggtggaggacatggatctggccatccgggccagcctcaagggctggaagttcgtctacctcggtgacgtccaggtgaaaagcgagctgccgagtaccttcaaggccttccggttccagcagcacaggtggtcgtgcggcccggcgaacctgttcaggaagatgctcatggagattgtgacgaacaagaaagtgacgatctggaagaagatccacgtcatctacaacttcttcctgatacgcaagatcatcgcgcacatcatcaccttctcgttctactgcgtcatcatcccggcaaccatcttcgtccccgaggtccgcatacccaagtggggctgcgtctacatcccctcggccatcaccctcctcaactctgtcggcactcccaggtctttccacctgcttttcttctgggtcgccttcgagaacgtcatgtccctgcacagaacaaaggccacgctgatcggcttgctggaggccggcagggccaacgagtgggtggtgacggcgaagctcggcagcgccatgaagatgaaatcggctaacaaagcggggctcaggaagcagttcatgaggatatgggagaggctgcacgtcacggagctcggggtggcagccttcctcttctcctgcggctggtacgatcttgcgtacgggagggaccatttcttcatctacctcttcttccagtctgtcgcgtttttcatcgtcggcgtcggctacgtcggcaccatcgtcccgcagtcgtagcggaagcgtgtccagatcatccgcttctctctggttttcgcattgtgtcttgggtaagtttcgtagtggatgaccggtttgaggtaaagatcatgcatgcggtcctctcttccatcgtctttttttggggaccggccgtgtgtgcttcgtcgaccttcggctgcatgcgcggtgttttactgtaaaataggaaagcagtgttgcaagatcgctgcaggagaatttagagattggtgccacatgggcaggagatgtcctggtgtttctgcttatatgctatatcaactatgtgatgtgttttaagggggggtgcaggatggctgcttccaatgtactagtaacatacagagaaacaggttcagacatgtgttcagaaaaaaaagagtcaactattcagccttcttgtagcatgctacattttacatgcgttctcctgtaaaaaaaaa

SEQ ID NO: 36598 - DNA, 275 bp, Zea mays
  unsure (1)..(275): unsure at all n locations
  Clone ID: MRT4577_133382C.1
cggcgcgcccttgtttttgtttttttttgataggtaaaatttaagcataataactattttaaagatagcacaaattacacatcatcaaccgatcatgcacgcctagttgcgcggcggcgagaagcacttcgtgctggtgcacggcctctgcctcggcgcggggggggggggcaaggttgccacngcnctggaatccgccgggcaccgcgtcacggcgctggacctggcggcgtngggcgcgctcccggtgcgcctgctggtggtgctgttcgttc

SEQ ID NO: 36599 - DNA, 465 bp, Zea mays
  Clone ID: MRT4577_133383C.1
ccctcgggcctgccggaaatcaacatacgtaccgagcgcgactccccttccattctcatttgttcgatcctactgcgtcgcccgcccttcgcagttctctaccagtggcgcgctccagagtacacggtgaggaagtagaccgtgggtatggcgccgcggaagcagctggccaccaaggcggtgcgaaagtcggccccggccaccggtggcatgaacaatccgacagtgttggccctggcaccgtggcgctcctcgagattcgtaagtaccagaagatcacggagctgctcatccggaagctgcctttccagcggctggtgcgggagatcgcgcaggacttcaagaccgtccttcggttccagtcctccgccgttgccgcgctgcaggaggccgacgaggcgtacctggagggtctctttgaggacaccaacctgtgtgccatccatgcctagagggttatcatca

SEQ ID NO: 36600 - DNA, 506 bp, Zea mays
  unsure (1)..(506): unsure at all n locations
  Clone ID: MRT4577_133384C.1
gtgctaaccacagtcttttctatgggggggagcgaacataattatagaccctaagcagaatctcacgggctcctttttttctatgtttaaccaaaaccgcatgagcacatcgcacacaacaaagcaaaaaacacgaggggcccttttgtcaacaaatataatatataaggcgtagtgggccttcgggagaaaaaacggtatcttagaaaaacacaagggatcgaggagttaacacaaacaaacacactcaagcacgatgcaaaaatgctctaactggagtatacctgggccataggacccttcttattgctgcaagggcaaaaccatctaatattcaaccagcttactctgtatccagtaacggcacaaacacncctaaatttccttgcgacggggacgtagacgaccataccaagggagaacaatgttgaccctttgtgctgatgctgccagatcacatgagaccgctgaaacagggcgacctgcataccattcatgctgacctc

SEQ ID NO: 36601 - DNA, 272 bp, Zea mays
  Clone ID: MRT4577_133385C.1
cctttttgtaattttgcggaacacccaatctgcccacgggggggatttaaaaaaagatggcgaggataccccaggaatacacacaacggagggagactgatgaggagacagcaaccagaaagcccatccagggatcaaacgccaccaaacggggagaccgcaaccagaactaaagggaaaggacgctatatacaggcctgggcaagggctcaacccgcaagaagtgctcgaacagctaaaggccctgccgaggacggtgcaggggaacctgg

SEQ ID NO: 36602 - DNA, 314 bp, Zea mays
  unsure (1)..(314): unsure at all n locations
  Clone ID: MRT4577_133386C.1
cctcccaaacagaggacataagcgagcgaactcctccncgtattgtcccgacacccgatagatgcctctgctgacggcaggcatgcccgactgccgaagcggctctcgaccgccgcaatccaacgcagatctagctgactccttacttacctgaggatttacacttatatgcttcgggctcgaatggtgcgcgggaattgcggacagcgagaacatttgtcacgacaggacaacagagtatgcatcatcgattcacacccaagtcgcgcaatatgacccatcacgtaaaggtgaacgaaactctgcatctccgg

SEQ ID NO: 36603 - DNA, 268 bp, Zea mays
  Clone ID: MRT4577_133387C.1
atgtggtacggccgattgaaaaaaaaaaaaaaaaaaaaaaaaaaaaaaaaaaaaaaaaaaaaaagaaagacaaacaaaaaaaaaaaaagaatagctaaccgggagagccccgccatggtccatcttaacttcctcgcaaaattaagttaacaggccgctccttttttattctcacggtctgattcgggggtggccctttaaaaaaaattggcttggagagaacacagccgtttccctagctaggcgaatctcccaaaactcccctttc

SEQ ID NO: 36604 - DNA, 1581 bp, Zea mays
  unsure (1)..(1581): unsure at all n locations
  Clone ID: MRT4577_133388C.1
atttcaaaaaaaagaaaaaagggaaggggttccgatcggatcggggaaaagcttccacgagctctcgacgactggtgggtgtgagcgccgccgcacgagatggcgatccgccgtgggccctcccgcgccgtcctcgccctgctcgcgctcgcctccgtcgccgcggtctccgccgacgtcttcttccaggagaagttcgaagatggttgggaaagccggtgggtcaagtctgagtggaagaaggacgagaacatggctggtgaatggaaccacacatctggaaaatggcacggagatgctgaggacaaaggtatccaaacctcagaggactacaggttctacgccatttcggcggagtaccctgagttcagcaacaaggacaagacactcgtgctgcagttcacggtgaagcatgagcagaagcttgactgcggtggtggttacgtcaagttgcttggaggtgatgttgaccagaagaaattcggtggtgacacgccctacagcattatgtttggaccagatatctgtgggtacagcaccaagaaggttcacactatccttaccaaggatggcaagaaccatttgatcaagaaggacgtgccttgcgagactgatcagctgtcgcacgtgtacactttgatcatccgccctgatgctacatacagcattctcattgacaacgaagagaagcaaactggaagcatctacgagcactgggatattcttccccctaagcaaatcaaggacccagaagctaagaagcctgaggactgggatgacaaggaatacattcctgatcctgaggacaagaagccagagggctatgatgatattcccaaggaaattgctgaccctgatgctaagaagcctgaggactgggatgacgaggaagatggtgaatggactgcccctaccattcccaacccagaatacaaaggaccatggaaacaaaagaaaatcaagaaccctaactaccagggtaaatggaaggcacctatgattgacaacccagatttcaaggatgatccgtacatttatgcatttgacagcctgaaatacattggcattgagctgtggcaggttaaatcaggcactttgtttgacaacatcatcatcactgatgaacctgcgttggccaagacttttgcagaggagacatggggcaagcacaaggaggcagagaagactgctttcgatgaggctgaaaaaaaaaaaaaaaaaaaaaaaggataacagaattaacagtaacatctggaccgtgttgagaaaccaccaaatgttcccctttcatcacagacgtctttggctgctcgtcttgtgatgtagcattctgccgtacaaaaggatcccccttattcttactactggacagatatttgtattttctcatatgtccccccaatcaaatgtatacatttttctgtgtgtaggggtcaatgttactcaagcagagaaatatagttttctttttgtattaaatcaggtatttgggaggccggttcacttatatataatatagtgtggcaaccatgaaaaaaaaaaaaaaaggccacccgctcgcgtnctagaactagaagaacg

SEQ ID NO: 36605 - DNA, 379 bp, Zea mays
  Clone ID: MRT4577_133389C.1
cctacactaagacacttgatgtggaacatgatggccgctgagacttgcaaacacctgctcgggcttgacaggctcagcactcaggctgtccaagggtgtagtcggtaaatgtgattggtcagatcgacttcaaaatgtgcatgggggcgcgtatcggtaattatcttattcgacattgaacttgctgagctggccttgactactacggccctttttctacttctctacaacactagtgctcgggagccacgccgctcagtttttttgcggagcgagtctgataacattactgcattccggccacgttcaagtctcatttcattaattatatttttactgacgtggaccagtgcaacaacagaagactaaacctggggtc

SEQ ID NO: 36606 - DNA, 639 bp, Zea mays
  unsure (1)..(639): unsure at all n locations
  Clone ID: MRT4577_13338C.1
cggnacattcattcaagaggttaattatctagcatctctctgtcattggaaccttgtaaaacttttggggtactgtcaggaggatggcatgcagatgcttgtttatgagtatatctccaatggcagcgtatcaacacatttacatggtaacagccatgctctaggttcaaggctagaattcaagaagagactttctattgctcatggcacagctaaaggcctgagtcacctgcattcgctgacaccccctgcggtccatatgaatttcaaaacttctaatgtacttgtggacgaggacttcgcaccaaaagttgcagatactgggattccaggcatgcttgatcgacttggtgttacaggactgtcttccagaacatttaatgatcctttcgtggaacctcgaatgaaggaagctatgaacttgaacttttccatacaaagcgatgtgtacagctttggcgtattccttctggagctaattagcggacggaaagctgtctctgatcaatgcatcattcagtgggcacagagcttccaggaatcaagtgacatctccgtgatcgcagacagcagaaatggccgtggctttacctcacanagcatgaaggaattgctgagcctgacagcnacgtgcgtaaa

SEQ ID NO: 36607 - DNA, 362 bp, Zea mays
  Clone ID: MRT4577_133390C.1
ctcgcgtgtcgacccacgcctccggatttgctgcaaataaaaaaaaaaaaaaaaaaaaaaaaaaaaaaaaaaaaaaaaaaaaaaaaaaaaaaaaaaaaaaaaaaaaaaaaaaaaaaaaaaaaaaaaaaaaaaaaaaaaaaaaaaaaaaaaaaaaaaaaaaaaaaaaaaagaaaaaaaaaaaaaagggggggggccccccaaggggtccaggctttatgtcgccgccagggggattcaagccccccccaagggggcccccaagttcatttccgggggccgttttttaaagaggcggtcgggggaaaacccggggtttgcccacttttaccccccggggaaaattcccctttttccaaaggggg

SEQ ID NO: 36608 - DNA, 608 bp, Zea mays
  Clone ID: MRT4577_133391C.1
aaaaaaaaaaataaaaaaaaaaaaaaaaaaaaaaaaaaaaaaaaaaaaaaaaaaaaaaaaaaaaaaaaaaaaaaaaaaaaaaaaaaaaaggtagtggccctttaggggggggccccaattactccgcagttaaaaaagtttgaaaaaggttttgacttttttggggtaaccccgggccgatgggttgattttttggaaagggaaaaagtttctctacagccaataaaaacccttgctcttgaggaggaaaaaaaaaggtttgaaatggggtttaaaccccaagtaaaaaaaattgttgaacaaagggacatgccctttccaggggccaggaaaacaaggttgtttagggggacgttcccaaaaaaaacccaaaaaagggcatcggttttccgggaaaacaacctcttccggggtggggaaaaagttgggccaagaaccgttttgattgcccacccagttgattttgggccgggggcaaaaaaaaaaacccccctgggggatctttttctggcccaaagagataccggaaagcaaactttcccgcttgtttttgggaaaacaaaaaggggggttgattctttgaaaacttggttgggcaaaaaggggtt

SEQ ID NO: 36609 - DNA, 439 bp, Zea mays
  Clone ID: MRT4577_133392C.1
atttttaggtttaagatgcaggttttcaatctatttgttatattgtagtattgtactagttactatgggacatattggtcggtaaactatgtttcattagaacctttcgtagcaatgggtctgatgaatttagtcttttgcgctgagtgcggttgtgatatgttagggttgattttggaagtgattatgttgaaggcttgaagcttcctgcctgttgtagtattgctcatcaagctattcccacttaatgcatattctcaatgatgtctatgaagctgggtgctttgtttaatacatcttctctgtgatagtttcagttttgagtagaatgaacagattgtacttgtcagtgtaatgctttgaactagttcactattaaattgtctctgactctatatttgttcagggttatgttgtttaccgtgtccgtgttaggcgt

SEQ ID NO: 36610 - DNA, 113 bp, Zea mays
  Clone ID: MRT4577_133393C.1
caaaaatgcttcgattctatatttttcatggtataaggttgaaaacattctgtctcacggatcagaatgtgtacaaggcgacatactgtgtttacaagtatatttatccataa

SEQ ID NO: 36611 - DNA, 440 bp, Zea mays
  Clone ID: MRT4577_133394C.1
ggaataccggggcggacccaggcgtccggcagtgtccaaaattaggttgcctttttttgtaggggggaaaaggttggaggaggaaataggcggaccactttttattgggaaaaataattttgggggtggttttaagggcattccgtggtccaattttgccatggattttttttgggttggaagaaaagattttgggttgctttaaccagtaaaaagggtttttagggggtcaattcaatcctttggccatgatgttgttggcctaatatttaagggttgggccgatccatatgtaactggtcttaatgagggtttcttgagggggaaataccttgggaggaattttgtggccttttttgtggggtttacaaatgatattcgtaaactgtttttctttattggggggggaaaaaggaaattcatggttggtgcccggttgg

SEQ ID NO: 36612 - DNA, 272 bp, Zea mays
  Clone ID: MRT4577_133395C.1
aggcatcccgtccattcgggaaattcactaactgggcgtcagcactaacaaatgtgttagggtggaaccagaacgcttctgtaacacaatcatcaagcccctctgggcgggcctccgggatctgatacctcccataaacaggggagcaagaatctctcaccaactcctcgttatagcagcaaccgtaaaggggcgacgagcaagttttcacctttgtgcacccatcaaagcctgcattgcggtatgtacgtatgtgtccgcgaccgcagcca

SEQ ID NO: 36613 - DNA, 562 bp, Zea mays
  Clone ID: MRT4577_133396C.1
tcgagcggccgcccgggcaggtaaaaaaaaaaaaaaaaaaaaaaaaaaaaaaaaaaaaaaaaaaaaaaaaaaaaaaaaaaaaaaaaaaaaaaaccaaaaaaaaaaaaaaaaaaaaaaaaaaaaaaaggttggtccctggggccggaacccccctagggggaatttttgcaaatttccttcacctggggggccgttggaccttgcttttagggggcccatttcgccctttgggggggggttttaaatttaatgggccggggtttaacaacgtggggaggggaaaaacccgggggttccccaatttaatggcttgggggaaaatccccttttcgccggtgggggtattagcaaaagggcccgccccgttcgcctttccaaacatttgcccaccctgatggggaaagggcccccccttgtagcggccctttaagcgcggggggggggggggttccccccagggggaccgttacttttgccggggccttagggccggttcttttggtttttttcctttcttttttcgccaggttggcgggttttccccgtaaagttttaaatgggg

SEQ ID NO: 36614 - DNA, 136 bp, Zea mays
  Clone ID: MRT4577_133397C.1
gaccacttaccactacaacttcaactttctttaatcaccccaaaacacccaagggaaggccgccatgtaattcatttcgtatcccacgctaccatgcactaaccataaccgcatcccgcgcaccatcaccagaaac

SEQ ID NO: 36615 - DNA, 231 bp, Zea mays
  Clone ID: MRT4577_133398C.1
gaagattgtcatggatacctgccgcaacattggctttgtgtcatacgatgctgggattgacgcctaccactgcaaggtgctcgtgaacattgatcagcagtcccctgatattgctcagggtgtgcatggccacttcaccaagcgccctgaggagattggagctggtgaccagggacacatgttcgggtatgctacctattagacccctgagttgatgccgctcagccatgt

SEQ ID NO: 36616 - DNA, 691 bp, Zea mays
  Clone ID: MRT4577_133399C.1
ccggccgggagtgggacacataaaccatgcgcggtcgcatggacctactcccgcgcctcctcctccgccgccacgtccaccgccgcgccaaaccagcgtccccatcgccccctccccttccccccaacccgccgcgcccgccgcagaagcccgagcccgtctccatccacggggagacgtggcacgacagctatgcttggatgggcgcgctctccgacgccgccgccatgcgccacatggacctacacatggaggctgaggagaagtacgccgaggcctgcctcgccgcctgcggcgctgaccgcctcgcccggaagctccagctcgagatggcctcctgccttgcctcggactcgtgcacgccgcccgtccgctggggcccttggctgtactaccgacgagcggacgagggcaagcaataccccgtgctctgccgccgctccgccgcgctccatagcgaattcgtctcgtacagtgacccctccgcaggattcgacttcacggctgggaagcgcatcgagcagaaattggtggattacaacaaggaggccgagcggttcggaggatactcatatgaggagctgtctgaagtatctccagatcacaggttcattgcatacacaatgtatgacaaagataaggactccttcactttaatggttagggacctagtaacaggcacacttcatga

SEQ ID NO: 36617 - DNA, 1710 bp, Zea mays
  Clone ID: MRT4577_13339C.1
tcgaggccggccgggacgccgcctccttcgccgtttcgccttcacttttccgcgccgccggttcgtgccaaaaccctactccctacaaaatgcagcggcgcctaagctgaaatcggtgaatcgtgcgccgcggcgaagagagaactcgaactcggcaggacttgtgcggaataggaggggagcggccgagcgggggtcagagagggagatagagttcatcaggtttgccatgtcctccagggctggcggcggcaagccgttgtggtctgcctccaccatcgtcgccaaagtcgcgagtgggtaccacatcctcaggatcgatggctactccaggaccatggagacccccacaggagagtccatcgcgtccctcccgttctcggtgggcggccgttgctggcgcattcgctactaccccaacggcgacaagttggagaataaagaatacatctcgctttatcttaatctccacgacagaagcgtcgaggcagagaaggcgcagttaatgttccgtttcgtcggtgacgtagcggagcagccgttgattctgggaggactgcataccttcgaaaagcaaggttgggggtacggcaagttcatcaaaaggaaagatttggaagagtcgaagcatctcgtggacgattctttttccatcaggtgcgatgtggccgtgcgcttcaacgatgtccgcgtggagaaggcgccggaagccgctgctgcagcagctatgatttccgtgcaaccatctgacctgcaccagcacctcggcagtctcctgctgacccagaagggcgccgatgtggtgtttgacgtcgccggtgagacgttcgcagcgcaccggtgcgtgctcgcagcccgctctcctgtcttcactgcagagctctttggtgcgatgaaagagggccacaccggaggcgtggtgcgcatagaggacatggaacctcgggcgttcaaggcattgctctacttcctttacaccgatttactattcccaaagacaatggcaacgacgatgaatcaatctgaagacggagacgtaggcggcgacgatgaagacgttctgtgtcagcacctactggtcgctgcagacagatacaacttggagaggctgaaatcgctatgtgaaaagaagctgtctgagtgcatccatgtgggcacggtagcaatcatcctgacgctagctgagcaacaccgctgccctggactgaagaaggtgtgcctccattttctcagatctcctgcaaatttgagggcagtcgcctccagcgacgcctttaagcatctgagcagcagctgcccctctgttatggtggagttggttgccatgcttggcaactcagcgtagaccttcatctaagcaggaaactgcacttggtgtttttttctggatcgacttgtattatcaagcggtcttggaaaaatgctactagttcatagtgtccacttccagtagctatgcatcctaagtttcaaggtagattctgaagtagttgaatccgttggcgcttttggtacaccatttcgcagcggatgattttggtatctggtagctttgaatgtctgccagaagtccgtctatgtccttaacatacaattctcagacgttggaaacttggaatgcaatgcagttcttgttattgttaaaaaaaaaaaaaaaaaaaaaaaaaaaaaaaaaaaaaaaaaaacaaaaaaaaaaaaaaaaaagcggcc

SEQ ID NO: 36618 - DNA, 342 bp, Zea mays
  unsure (1)..(342): unsure at all n locations
  Clone ID: MRT4577_1333C.1
cggaaacccgggttgtcccagcgtgtgggcacgnatcttccctcgctgggtcggtcgggtgctcccacgcaagcacccaaccaactagccaccgagcacccaccaagagccctgggatcctggttttgggccgctggcggcgcttgtcacctcgccgtgcccgccctggcccctcccgccgcacggccgcctatgccctgaggcgggcaggtgccggtgcgccccgacgtcggctgcgggataaacacccgtcattccaaaggaggacgacaagttgggctacaccgttctcacctgtatagctcggcgaacctctcaccgcgtactgggggcgttcgagat

SEQ ID NO: 36619 - DNA, 339 bp, Zea mays
  Clone ID: MRT4577_133400C.1
ccggccgggcttgccctgagagcccaactaccatcgccggtgagggagtggcggtcatggagggaggcgaagccgcgaggaggtgaccaccgacgtcgttccccgccgatgccagcaatagggtccacgtggttgccggggggtcttcgccatggcacggggaaggttaccatggccacgacatggaggatcttaccctaggaaagccttgatttctcgtcggagatcatagccgccgcggaatctacacttggtcatggacgaagctcctgcccacgccaatcaatgtgacaaccaccgccgagtttttgttcgaaaaaaaaaaaaaaaaaagcggcc

SEQ ID NO: 36620 - DNA, 374 bp, Zea mays
  Clone ID: MRT4577_133401C.1
ggcttggaacctttgggctgatttatgtgcttgtttatgtgcttgagaagttgattacttctacgaataggcatgagtctgggtgtatgtctgggtagggtattcctgttaaggcgcattatggttggaattctgtgcttggtgagagtgcggttactaaggctactgataaggagaaggcgacgtgtgctggtacgactgattagactaagtgtgagactcttgctacgtgttctgcctgctattttaatgctgcgtagtcgtatgaggcgacggttagtaagagtaagacacatcctgttacggagcatgcctggggtggtgagtctcctcgttgtgctcgttgtgggtggtctaaggaggatattgtgaga

SEQ ID NO: 36621 - DNA, 508 bp, Zea mays
  Clone ID: MRT4577_133402C.1
aactaccacactgcaggttggctatgtgactaccatctgtttttcttgtttcttgatcagatgcgtcatgatgtgcctcaattcatttgataaagaagcagatcttgatgtcctgaaccatccaatcctgaacttcctctattacctggtatgaatcctgacggtgtaaaatggtttaccttagatttttttgtaaccaagtggcatttagattttgaaatatcgacttgatcacttctaggaagccaactgtggaaatttgtttggttgtaattttaaaatctatggtgaatatatatgtgcaatagttttattttgacaaacaataattgaaatgtcattggaggactgtatagattattgcatacgcagatgcaagtttttgtgagctttgatggcacatgccttaaagcccttgctcagacagctatggctgggaatcaaattagtaaattacccttttccatttactgacagaattcacctattgcgactgcagctggttgag

SEQ ID NO: 36622 - DNA, 1189 bp, Zea mays
  unsure (1)..(1189): unsure at all n locations
  Clone ID: MRT4577_133403C.1
tggacgcctgcggtaccggtccggaattcccgggtcgaccacgtgtccggtatttgtacaccagactgccataaagaagaataaccccaggaagtaccttcgcagtgtaggcgatggagagactgtggagtttgatgttgttgaaggagaaaagggtgcggaggcagcaaatgttacaggccctggtggagttccagttcaaggcagtaaatacgcagcagaccgtaaccattatagacgctatccacgtcgtaggggtcctccacgcaattaccagcaaaattaccagaatagtgagagtggggaaaagaacgagggatcggaaagcgctcctgaaggccaggcccaacaacgccggccctatcgcaggcgaaggttcccaccttactacatgcggagaccctatgcgcgtcgaccacagtattccaacccccctgtgcaaggagaagtgatggagggtgctgacaaccagggtgcaggagagcaaggtagaccagtgagacagaatatgtatcggggttacagaccacgattccgaaggggccctcctcgccaaagacagcctagagaggatggcaatgaagaggacaaagaaaatcaaggagatgagacccaaggtcagcagccacctcaacgtcggtaccgccgcaacttcaattaccgacgcagacgcccagaaaaccctaaaccacaagatggcaaagagacaaaagcagccgatccaccagctgagaattcgtccgctcccgaggctgagcagggcggggctgagtaaatgccggcttaccatctctaccatcatccggtttagtcatccaacaagaagaaatatgaaattccagcaataagaaatgaacaaaagattggagctgaagacctaaagtgcttgctttttgcccgttgaccagataaatagaactatctgcattatctatgcagcatggggttctttattatttttacctaaagacgtctctttttggtaataacaaacgtgttttttaaaaaagcctggattttctcaatacgcctttaaaggcttttaaattggttcatatctggtcaagttgagatttttaagaacttcattattaatttgtaataaaagtttacaacttgattttctcaaaaaagtcaacaaactgcaagcacctgttaataaaggtcttaaataatgncttaannatat

SEQ ID NO: 36623 - DNA, 387 bp, Zea mays
  Clone ID: MRT4577_133404C.1
atttggctagagacactatgcttttctaggtcttgacagatcacgagcgacgccatgtccagatgcggacgggaagactgatttgagaacagaggccacggaagtgcattctgaccagaactaagatgatagagatgctgtatagcagaaggtcacggtggtgcgtgatgtctgacgaggcactgaaattggatggataaaacggtgatagtagatgcaaactttcaatgtggaaggatcaagtgctcaggactgagacctgacaacacagtattcagtgaggcacaggatatgctaacaagtgatgacgaaagatcaataaattggtcttgctgatgctgtggactgttaatcagtgcaccatcctcaatggagaaggacgatgtt

SEQ ID NO: 36624 - DNA, 372 bp, Zea mays
  Clone ID: MRT4577_133405C.1
atgtggtacaagggcatcaagcttgacggcggcgacggcgataacaggagaaaggtctctgcgcacgtctagctagccactgcatactggacctcgggccttcagttttcaggttcagagacgtgccgggctggcccctggccgtatgcccgtatagtcttatagagagaggagagagagagagaggaaataaaatgtcaaagaatatgtaaccatccgctcggcgttggatggcccatgttgttatgtatctttggtcagatgatccaagtaacctcatgtgaagtactaatgcaataattatatatggatagtacactatctgtgccttaggacggcacgtaattatatttaatgatgagtgattttagt

SEQ ID NO: 36625 - DNA, 255 bp, Zea mays
  Clone ID: MRT4577_133406C.1
tattttctttctccaatgccatatctttgtgagggggttgtttatagttgtgagggtacaatctctgaactctatacaatataataataggttttgttttattagtaaaacgcacttttgtcttatgctcttaatgtatcatattattaagatcgcaaggttgtcatatgcttatgcactgttagtattcttttattgagagtgtgagtatgtgatatcttataaaacacctccattgtatttttttacaataat

SEQ ID NO: 36626 - DNA, 213 bp, Zea mays
  Clone ID: MRT4577_133407C.1
gaatactatcacaacagaacaagactttgttctttacatttcaattgttcattcaggacattgatcacactaacactggcacccatggggatgcaagacacattattactaaattatagacgctaaatgacccaactagctagctagccagcggctataatacagcccataggtttttcattgggggacaccgcccccaggcgggtaagggca

SEQ ID NO: 36627 - DNA, 819 bp, Zea mays
  unsure (1)..(819): unsure at all n locations
  Clone ID: MRT4577_133408C.1
aaaggtagtcttcctcggaacccggggggcaaactagaaaataaaaactagaaacgaagtgtagcgccgctcgccttgccggcggagggaagacggaagacgagaggtatggcgggtgccggtgcgatgggcttcccacgggagctgatggttcagcgtatacagagcttagtggaggaggggttctgggacgcgctccgccgccacaagctcgacgtcctcggcaccgacgactcccccatcccaatcaccggttattatactccgcgccagcgtcgcccgatggcaagcttcttcaacctacggtccggatcattggtgctaccatctcacagttctgttggcgacaggaacaattgcccagttccagggaccctcataaacactaataacatgaggggattcgaaaacctagatagagaacaacttctgaaagcagaagcaaagaagatcttgcatgacattgtgtctggtaaagtagaagaggatccttctgttctacttagattccttgtgacatcattcgctgatttgaagaattggaaggtctattacaatgttgcattcccctcattggttttcaactcaagaatcaccttgctcagcctgcaacctgcctcaaaagtgctcaccanagaagaggcagcatccatgtatacatcattgcaaaagtggcgtacttctagtgnaacaacagttattccatttcttctggtagnatatcctcagattcctctgcttctatanacnacttaagggatggaaagctggccaggggaactatcnaaagctgctatttgggatttatgacatggatgc

SEQ ID NO: 36628 - DNA, 744 bp, Zea mays
  unsure (1)..(744): unsure at all n locations
  Clone ID: MRT4577_133409C.1
cctcgaggccggccgggccgggtgtctgcccttatcgatttcataccaatattccagcaatctttccattcaccattactgtgttggactgatggcacgagacgccaaattcgacgtcggagtcgtggtgattggtggcgggcctgctggtatggcaatagcactcggatgcatcaaagccggcatcgatgtcaaggtgtatgaacgatatccctatgccagaccagcaggcaacattctcaacctatggccaccggccatacacgccctcaagtgcatgggcgtgaatactacggatctcggagctgcctcgcctgcaaccacatttcggaaccccagtggacatgtacgtgctacagtacggctggcggacgatgtcgtagagaaatatgacggcggctttcttgggcttctgcgaccggatctgtacaagcgaatgctctcagctatccctgagggcgtcatggagttcaacaaatcagtgacttcattcgaagacactggcgattgtgttcggatgacgctaggagacggtactgtcgtcaaagcagctgtcgtcattggtgccgatggcatcgactcttccgtccgcactcacttatgnggccaaagtccgcgaagaaaccatgacctccacgttatcggcggcttcacctttgacaccgncgatggtgtcatccccaacgaatgcgtcatcacccacgacccccaagtccagggcacatacggacctcttctaagcca

SEQ ID NO: 36629 - DNA, 1258 bp, Zea mays
  Clone ID: MRT4577_13340C.1
tccgtttggttggccatggctagtgggtataaccggaagctgctgatcttggtggtccttgtgagcttcctcgcaccattgcgtgcgctctgagaagattgactcactgagcatgtcatctgccgcgtcggttgcccttgccgttgtgtttgtggtggtgtccagcatcattgctttggtgggagcacggggggcaagatcagcatgccgaggatgggtccagatttcatctcccgtgcagcaatgctggacctgctcgtcgtgatacccatcatgactaatgccttcatctgccatttcaatgtgcagccgatctacaacgagctcaaggagaagacaccacagaacatgtacaaggttgggaggatcagcaccgtgctatgcgtggcggtgtatgccctgactgccctttcagggtacctcttgtttggcgaggacaccgagtccgacgtgctcaccaacttcgacaaggatctcgggataagattcagctctctgctcaactacattgtcaggatagggtatgtcatccacctggtcctcgtcttcccagttgtccacttctcgctgaggcagacagtggaggcgctgatcttcggggagctggcaacccctagcaggaagagaacattcacattgacagtggtgcttctagcactcatctaccttggctcgacaatgatacccaacatctggatggccttcaagttcaccggagctaccacagggctggcgttgggtttcatgttcccggccctggtggcattgaggctggacaaggaagggagtcgcttgggacatggggagaggctccttgcgcttggtttgctggggctatcaattcttgttagcgtcatcggagtcgttggaaatgtatacaccttgaagagtaagtctgaatgacctccccaagatggcaagttgatagctagggttagaggaacctttgcatcatgaagacacatggtgtgttgctacaactggcatacagatcgtgtaaacatggtaactatacactaggtcaaaatgtattacattcgagagagcctcagcatcctatatccgttttttacttcagaggtttaactgtggaccattctcgagggaattctttttgtacttcggaccagattgttttcgatgtatcgatttcattgtgttcttacatgagggctctagagtcactctttgatcagcaaccaaaaaaaaagattggttctgatgtactttgaggagatttttgtttccctatgtcagt

SEQ ID NO: 36630 - DNA, 1815 bp, Zea mays
  Clone ID: MRT4577_133410C.1
ggcccgggcccgggaaaaaaagaaaaaaagccagttgtgtgggaagtcgagtgcccagtcgcctagcatgcaggagagctgggaaagatcattaccgtggcggctgcaaatggttcaaaacatcattgggtcgcactaacctcctgtttggtgcgctacctaacttgctacactttgcctaacttttctgcctaagattagttcttcaattcgaacgactaaccttaggcaaagtgtggtgcatttagccacgaaccaaataggcccggcatgtggtctcaccctgatcatgggaaagtccacagcaagcagggggaatggcttgccggagttcattgttgccgccaagccgcacggcgacgagaagtctgctaaattgcatcgaccgctggttgtcagcattgcaaccactgctcaggagaagatgaagctgtggaacgagacttccaggagttccaagactacgacgagttctaggtgtggggtgatgtccatattatgtaactgctgtgtacgtgaataactgatcctggcacgtacatggttcgcattcggtttgccttctaaaaaccgggtgtgacagttaccacttcaattccactaaacccaagcttcagtacttcagcaattgctattactttggccttcctctgaggctcttcacacattgacttctcttgcatttcagtaccgtactccacagccgctaccatcttgccattatgcgtaatactttgaaaatgatcaagagcatccttgaactgttcaattactgctgaggtgttgacattctgaagagcactctgaaaacgactgtgtgcatcattgaacagctccactgctgctgccatctcgctagcatgctggacgacattttggaagcgatcacgtacgtccttgaacagctccattgcagcagccattgtgctggcatgctgaatggcattctgaaactgaacatttacatccttgaacttgtccagagatgggcaatttgattcggtcctattcgttttcccgtcataattgtatttcttctgactcttaaagcttaacgttgcggccaaggagcgaccagatattcctgtggacatcctgtcctcttccacttcgtcatctccaacttcatttatattttcattctccatgttagcaattgcagcttcagacccttccaacccttccccagcagagctgtccttgccatatattgcatcaaatgtatcgaaatatacaaacgggacaccatacagacccttggctctaggatggtctctgcaatattcatcatatcgttgtttttcacactggatcatctttcttgtgtcatcccaagagaagcctgtcgatgctatcatatccttgatcgaataatacttccgcttcatcactttcagccgagaatcaacatgagggctggctttaataccacgaccaggtagcttttgtgaaagaatgttctctatgccttgagagtaacagttcttaaaggcccctccttcaaccttatatctaggatcagcagatatctcacacaaagctttgacaagctcgtcatcttcatctgatgtccacatccttttatttctacccctgccacgaataattctagaaccttgactgtggttcatctctgatctgtgaagaccaaagttggttgacacgccaagcgtcacaagatgcagacaaggtcagcacttgggcaccggattaggactgtcgagtgctcggctggatcctgagattgcgattcccgctagaggggacgtcttcgtttcagggaatgggtatggcgtccttttgcggacgcgtggg

SEQ ID NO: 36631 - DNA, 1040 bp, Zea mays
  unsure (1)..(1040): unsure at all n locations
  Clone ID: MRT4577_133411C.1
gccggccgggncgcggtgtaactttcctctannaaaaaaaaaaaaaaaaaaaaaaaaaaaaaaaaaaaaaaaaaaaaaaataccttgctcgtcagcccggataagataacgcccatctgcacgggccacgcgaagcgttcgagctcctcccacggcagccatggtcaccgccaccacctccccgctcttctccctctcctccctccgcgcctccctcccttcccccacccgatttcacacgtctctctcgctccgagccctctccccacgtgcccgtctctctgccgccctccctttcgcctccccactcgtgcgggtacgggacctgggcggcgacttcaatctcgtccgcgggaaggttgaaacggcgggggctggaggtggtgtgcgaggccacgaccgggcggcagccggactcggtcaagaagagggagcgccagaacgacaagcaccgcatccgcaatcacgcgcgcaaggccgagatgcgcaccaggatgaaaaaggtcttaagagctcttgaaaagcttaggaagaaacctgatgcccaacctgaagaaataatcgaaatagagaaattgatctctgaggcatacaaagccatcgacaagacagtgaaggttggtgccatgcataggaacaccgggaaccatcgtaagtctcgactggcgaggaggaagaaggccatcgagatactccgtggttggtatgttccaaatgctgagcctgtcgccgccacctaggattcttgagaaatcactatcatggattcgtggcagcttttcatcaaatttcaccaattttgggcaacatatgctattcaaggatctcgacagcttgccaagttctctattgaaatggtctgttcataccttttctgctatcttctatgtctatgcgcttgctctgtattagcagttaaactactgactagagtggccacctcttctccccccgtttctgttgttgttcacttcattgttgtaaaactaaagtcagaaaaatttaaatatagctgttctctggtgtgtccagatttcttc

SEQ ID NO: 36632 - DNA, 1076 bp, Zea mays
  unsure (1)..(1076): unsure at all n locations
  Clone ID: MRT4577_133412C.1
cgccgggccggtcgaggcgtgaggattttctgattgagcaatgcaccccgttccgccttcataccttgctcgtcagcccggataagataacgcccatctgcacgggccacgcgaagcgttcgagctcctcccacggcagccatggtcaccgccaccacctccccgctcttctccctctcctccctccgcgcctccctcccttcccccacccgatttcacacgtctctctcgctccgagccctctccccacgtgctcgtctctctgccgccctccctttcgcctccccactcgtttcaggcgggtacgggacctgggcggcgacttcaatctcgtccgcgggaaggttgagacggcgggggctggaggtggtgtgcgaggccacgaccgggcggcggccggactcggttaagaagagggagcgccagaacgacaagcaccgcatccgcaatcacgcgcgcaaggccgagatgcgcactaggatgaaaaaggtcttaagagctcttgaaaagcttaggaagaaacctgacgcgcagcctgaagaaataattgagatagagaagctgatcgctgaggcatacaaagccatcgacaagacggtgaaggttggcgccatgcataggaacacggcgaaccatcggaagtctcgactggcaaggaggaagaaggccatcgagatactccgtggttggtatgtcccaaacgctgaacctgtcgctgccacctaggattcttgagaaatcgctatcatgtgtcagcttttcatttttgggcgactatgctattcacgggtctcaacagcttgccaggttctctattgaaatggtctgttcataccttttctgctatgcgtttgctctgtactagcagtttgactactggctagaatgggcagctcttctcccctgtttctgttgttattcgcctcaacgttgtaaaactgaattcagaaaattttaaatatagctgtcatctggtaaaaaaaaaaaaaaaaaaaagaacaaatcgcataagaagtcagtatgcatagtgaaaacagagtgcagatgatgttttcgatnnnnnnnaaaaaaaaaaa

SEQ ID NO: 36633 - DNA, 622 bp, Zea mays
  Clone ID: MRT4577_133413C.1
ataagccgctcgcccggcctcctccccctccccctctcgcccccgccgccatcccttccttatagagacagcgtgtaggcgccgggcgagcaggccaccaccgcaaccctagccagcccaactaccgccgccggctggagaggactagctgctgctcgagagagagagagagagatgtcatcgggacggtacatggcctactcgccctccccgtccaccacgccgcactccccgcacatctccggcctccgcgcctcctccgccgccgtcgccgaccaggagaagtactttgcggagctgctcgcggagcgccacaagctcaacccgttcgtcccagtgctcccccatagcatacggctgctgaatcaagagttcatcagcttatagttggcttggaggttctcaaggcagctcatctggactaattgtcaagaaaacaatgagggttgatattccagtagacaaatatccaacatacaacttcgttggtcgcatccttggtcccagaggaaattccttgaagcgagtggaggcaactactgactgccgtgtgcttataagaggccggggtagcattaaagatccagctcgggtaaaactcttgataccatgctttcttaat

SEQ ID NO: 36634 - DNA, 467 bp, Zea mays
  Clone ID: MRT4577_133414C.1
gcctgctatgctagcgctggatccagtgtgttggggacgcagatctatccgtgctcaactgtgatggtgacaatctggaagggaaaggtgttggtgctccatttgagcaggggaaaggggatgattcatcgccagcggaggtgcattggagcagcatggttcatcagactggtggtggcatcagcatcgtggactagagaggttgcgcttatgtgagagcctagagttcatggaccgatggtatgttgaggtgggatggtaggtggtattattttgtttttttctttttttttgttttttttttatatttttttattttatattctacttttattattatttatttctatttacttttatttacgtaatatatcttcttactttttttattttcttttctttttattattttttttttttttatatttttatttatgttttttatttatttttattttatttatttt

SEQ ID NO: 36635 - DNA, 798 bp, Zea mays
  unsure (1)..(798): unsure at all n locations
  Clone ID: MRT4577_133415C.1
ccccctcttcctcctctcgccccccgccgccgccatcccttccttatagagacagcgtgtaggcgccgggcgagcaggccaccaccgcaaccctagccagccagcccgactaacgccgccggttggagaggactagctattgctgctcgagagagagagatgcgtcgggacggtacatggcctactcgccctccccgtccaccacgccgcactccccgcgcatctccggcctccgcgcctcctccgccgccgtcgccgaccaggagaagtaccttgcggagctgctcgcggagcgccacaagctgaacccgttcgtcccagtgctccctcatagcatacggttgctgaatcaagaaattttacgtgtttccacactattggagaacgcctcccttttaaaccaaagtggctttgaacatggtagtccactaacatcgggaggattatattcaaatggagcagcaactgatatgaatggatggacatcagcatttcaatcagaaagttcatcagcttatagttggcttggagggtctcaaggcagctcatctggactaattgtcaagaaaacaatgagggttgatattccagtagacaaatatccaacatacaacttcgttggtcgcatccttggtcccagaggaaattccttgaagcgagtggaggcaactactgactgccgtgtgcttataagaggccggggtagcattanagatccagctcgggaggaaatgatgcgtgggaagcaggatatgaacatctgaaatgaccctacatatattggtcgaggcagagctg

SEQ ID NO: 36636 - DNA, 183 bp, Zea mays
  Clone ID: MRT4577_133416C.1
acgagcgccggcttcggaatgcctccctttgcctgatgtttttgtgggggacaaagggaggccagaagcggtagcaccgccgccgcgtcatggttcgccggagacatacacaaagacaggaagcaaaacatgcaaaattgccaccgcttctcactcaattttatgctcgaatgtgaatctcat

SEQ ID NO: 36637 - DNA, 695 bp, Zea mays
  Clone ID: MRT4577_133417C.1
ccgcgacacgaggaggaggctgctcctctcctccacacccgccatttgcgccgccgccatggccgcctccggcaaggccggctccgctccgtgcaaggtcgtggactcccacctccacgtctgggcctcgccgctgcaggctgccgagaattacccttttttcccgggccaggagccgacgctccggggtgatgtggacttcttgctcgagtgtatggatgaagctggagttgatggcgcactcattgttcaacctattaatcatatgtttgatcactctttagtgactagtgtgttgaagaagtatccatcaaaatttattggttgctgcctcgcaaatcctgcagatgatgggagcggcattaaacagcttgaacatctgattgtgcaagaaaaataccgtgctgtccgtttcaacccgaacttatggccttcaggtcaaaagatgactaatgaggtcgggaggtcattgtttgccaaggctggagaacttggagcaccagttggaataatggtgatgaaggggatcagttcatatattcaggaaatagaggagctgtgtacggattatcctgcaactactgttatatttgatcacatggctttctgcaagccaccaacgaatgatgatgaagaaaaggcattctcttcatttctaaacttatccagattcccacaggtttacgtcaaataca

SEQ ID NO: 36638 - DNA, 812 bp, Zea mays
  Clone ID: MRT4577_133418C.1
cattgggtacctcgaagccggccgggtcgcctaccttcgctcccgccgcgacgtcctcgctgcggcctccgtcgcccgccgcatcctcgctgccggcgcacggccgctcccctccactgcggcagctcttcttcgttcactcccttccgccaccgcggccctcgacatgtatcatcaaatctacacgcatccaagtccacggagcaatcacctcctcctgccgactgttcacaccttcaattccctcctccttgctttccaccgcgaaggcaagtgtgatgaattcgagattgtgctccaggaaatggacaaatattcctgcaagcacaacgtgtgcacctacagcatcaggatgtctgggtactgcaatggcgggcatgtggataaggcgcgaacactatgggatgagatgattcaggaagggatccagcctgatataactgcgtacaacacaatgattagtgggtattgccattctggggaggtaggggtggcagaggagatgtttaaaaatatgttgatgggtgggattgattcaagtgccacgacgttcgaatggttggtcagagggcattgtatggcacgggatgtcgaggcagcaatgcttgtgcgtgcagacatgaaaaggaaggggtttgggttggcgccagaggttgttgaggaattgctggatggattatgtcaaaatgggagggttgaggatggcttgagtgttttgcgagaggagatgaatagggaagaatttgtgccaaccccgacgagttacgaggggttgatatattgggtttttttatttgatcaaaagtgtatgt

SEQ ID NO: 36639 - DNA, 593 bp, Zea mays
  Clone ID: MRT4577_133419C.1
ttaaaaggttgatggtttggaactcgtttgcaaaaaaaagaacagtcaaattatctcttatttggaaaccaattctggattatgttaccatgatgttctccatcagttcttctgttatccaatccttaattttttataccccaggggatatccattcttttgaatgctgaaaatagctccgagtcaaaattttctgtcctgcaaaacctggagatggaatcaacaattgaagtttatagatccctctctacaaactcctgtaattcgaagtttttttccaaggttttctttgatggtttttacaaatacttggtttgcactattgatgaaaacatggcattgttccaagccaaccttgagcatttgtcggaggagtttgaaaatgctagtgtcctttctgctcttggtgaaatagtcattggactgttacagaatgatcaaatgttgacctatgctaatcaagagttgaaggaaacacctgaagattcttctgtgtgcagacaaccggaacttttcttgaattgcttcaagcttgctaataggtttatgaagttgtcaagttttcatttcaaagcaaatccagctggacagca

SEQ ID NO: 36640 - DNA, 140 bp, Zea mays
  Clone ID: MRT4577_13341C.1
ccgcaagatagctcacttcttgttacaggtgatgccggctcaccaaatgcgacaccgacacgccgtcgccatgatgaacgtccgggccatcgcgctcattctttccaggctggcagtcgagggggtctggtgcccagcgc

SEQ ID NO: 36641 - DNA, 1579 bp, Zea mays
  Clone ID: MRT4577_133420C.1
cagatattcagatgtctgaacaaataagtcgtcagcaattcctatcaagctgcgacggcgtccatcacaacatggacaatatattgatcacaacatggccggacaatcaagtacacagggagtgtaaaatatattgatcacaacatggccggacaatcaagtacagagggagagtgtgggtgtggtagtacaacagcaacgtagaagcacaggtttacttgcactgccttgggtggaacttctcctccgacagcaacgacgtgaccagccgctgcagccgcgcggctccacggccaggcacaacaagcccggtgtctccgaccaccgagcaagggtcgctcccgttctcccgcgtcccagcgcaccagcccccgggagtcggcacgtccgcgccgcggcccaggatctcctcgtctatcctgtccagcaccgggtcgtcctcgtggaacttgcgggcgaacggcgcgtcgctggcgaccatgcggtccaggtcctccgccgtcaagtagtgcgggtgctgcttcggagggttgtcccacgagatgtagtgcaggtcgtggttcaccgtcgtgttcttgaactcctccgcgttgcacacaacggtgtggaagtatccttccggcgacgagatgaagtttgagtagtacatgagcactgtgcgaggtaggttgtcccagccccatatgcagtattccacaaagggcctggacagtgccatccaggcagaaccagtgaagagcttgaatgctgtaggcacactccgcctctgcggaatccagaacacatcggctttcttcttcatgtagagccctggatcaatgatgaccggctttgccctttgaaactccttccatccaatgtcgctggtgtggtcgatgaagttgagatcgcgcggcagcttggagaatacgtgtatcagattcatcctgcgtgacgagcgggtaatcggaggcggagaggttgatgaaccaatcccagtgcgaggcgccgtcgccccacaagaaggcggcggcggcgtggagcgtgttggcgaccatggtgggcccgcggtaggtgacgaggttggcgcggtcgacgacgcgcacgttggccgcggcggcgatggcggggtgggaggcgaggtcggcggcgaggttgctgcggtcggagtcgggcgcctcggcatcgaggtgcaggatgtagcggttcctcgggtggtagagcgcgaggaggacgcggcggagcgcggaggcgtcccccgcggatccggagatgaggaaggcgatgcggggcagcgaggcggcgggggacggcggggagggggcgagcttgtgctccacgaagagcgctgaggaggaggagggcgcggagggcgaggggaaggtggtgagggcgacgaggaggaggagcgagagcgcggagccaacggccagagggagcagccagcggcggtcgacggcggcgtggagtgagtgggcgatgggcttcatcgcctcgccggaggtggatgtggtgggggccccaggtggcagcttgttgtgccgggcggctcttttgatttggagtactttgggatgcaggctgcggtcgaggtacccaa

SEQ ID NO: 36642 - DNA, 423 bp, Zea mays
  Clone ID: MRT4577_133421C.1
ctggggagggcggtttctgtgataataaatgccaactggggcctacagggtacaacaaattgcggcatacaaagtcatcggactacggccagtgtatggtgtaaacaagactgtgatcgctaacaggggcaccaaggaacaatcaattttttttcccgaagggggggaaacgcacccactatctactatctaaacacaaacagcactcctgaatggaagggaccattttaggaatgacaactcatgctacactcttacagaaaaaccgcaagttggaaatgaccggataagacctccacagccggctgaaacaataacgaggcccaaggcccaccgattcagaggtggacctccctggctggaagcgaaggtacaacccctaagactttgatttggtggtgggacaagaacttcaggccaacc

SEQ ID NO: 36643 - DNA, 373 bp, Zea mays
  Clone ID: MRT4577_133422C.1
gccagaatggtgcacgctccattaatgcacaccaacggtaacactgatcaataatgctagggcatcccaatagagctgctggatctaattactgactgacgggctgtcaggtcatcataagcatgtggtcggtgcagatagtgatctgccaaattctgactcgtgcccataggctttgattgctgagcttgagaagataaacaatggcacatgatatacaagaaatattgcgcactaccatgttgatattgtcataagggatgattctgttaacatcggaatgaaagctggagaggctgaatgagacgaacaaagttactactactaattggagactacattgtgacagggctatcgcatgacgcggttcgtg

SEQ ID NO: 36644 - DNA, 475 bp, Zea mays
  Clone ID: MRT4577_133423C.1
gggttgacagttttcgaatattcaaaaggagaagactataaacatgtaattatacaagagaaacttgcttgcttgaaataaaaaaaagaaatagaaagcccgctaaactattagctaaactgtttggatgtcttcagctaattttagcacagctaactattagctcaaacaccccctaattcagtgggcgactgtaggccatggacccaacacactgctatttacccgtttaaaatcatatatcctgctacaggaggccttcgtattacaattcgaatattcgatagattaattaggtgtgccagagctccaagggagctgacaaaaccaaatagcatgtcacagttgggcatggaacttatatgggatgaatcagaattcgtaacacttgtgtcgccaaaacgaaaagaaagagaagcagtcttgtgtgtaataatgtccctggaaatagaagaaagggaaaacaaaatataaa

SEQ ID NO: 36645 - DNA, 218 bp, Zea mays
  Clone ID: MRT4577_133424C.1
ctattgagcttgttgaccctttaagggcggaccggtaccaggaggcgtaccaccatttcatatatatgggacgattaaaggtttgccttataaccggccaaggcatttccttgggaaaaagggggtcctttcaaaaattccacaaaccttacgagtccgggggaaaaaacagacctccaggggggcccaaagggttaaccaaattaaaattaatgtca

SEQ ID NO: 36646 - DNA, 335 bp, Zea mays
  Clone ID: MRT4577_133425C.1
gggccccacttagcaaattaacctttgccccaaattgggtcaaggtttgcgctacacatatcccaaatctgaagcactgccctgttgggaaacatattaacctacccccaaaattgagccaaagtcgcacttagccaagaaagggttttttttacttagcgaaaattgggccaaacttgcacttaccaaataacacaacggttttttttgggtatcctactggtgaggacagggacagggcctttccattgcttggcttgaggagcacacgatctgggatgccgggctcactttgatgtggaggggacaaatagcggaaatcttagcgtaaaatt

SEQ ID NO: 36647 - DNA, 150 bp, Zea mays
  Clone ID: MRT4577_133426C.1
gggaaggcaaaattacatccatggggatttcagttcaaccacttacaagtaacaagaaaccaactggtttgtttctttctttttcatcagcccctttgaccatcctatagatccaaatgaaaggccagtaccaaaaatcccacgcgttcg

SEQ ID NO: 36648 - DNA, 781 bp, Zea mays
  Clone ID: MRT4577_133427C.1
gccggccaaaaaaattcggcagcaaacacacgcccactggccaagcaccaaataacacgcctcgtgtcgaccagcgagggccaaaggcacgagcagcggcactagcaatacgcactgcagtgccatgccggaagcaccgactaccaagataaacccgccagccggcggcttcgcccccggggcgcaccgcgaggcactcgagttcatcgagcatgtcacggcgaacgccgggaaggtgcagcggcgcgtcctcgcggagatactgtcgcagaacgcgccagccgagtatctgcgccgctacggcgtcccgggaggatccgccgatgccgtcgaagccttccgccgtgtggtcccgctcgtcacctacgagggcctccagccggacatactccgcattgccaacggcgatgcctcgccgatcctctcaggcaaacccatctccgagttcctcacgagctctggaacatccggaggggagaggaagctgatgccgaccatcgccgacgagctggacaggaggtcgttgctgtatagcctgcagatgccggtgatgagccagtcggtgccggggctggacaagggcaaggcgatgtacctgctattcgtgaaggcggagtcgcgcacaccaggcggactggtggcgcggccggtgctgacgagctactaccggagccggcagttcctggagcgggcgcacgacccctacaccgagtacacgagccccaacgagggcatccctgtgcgtggactcgtaccagagcatgtacgcgcagctgctctg

SEQ ID NO: 36649 - DNA, 147 bp, Zea mays
  Clone ID: MRT4577_133428C.1
tatcttatctctaaacataatcattttttactcccatatcattcacacataaatcccgactttattataaacttggctggcaccacacatcaatatcatcactaacacatcatcaactcacacaaattactacctcatcaattatac

SEQ ID NO: 36650 - DNA, 817 bp, Zea mays
  unsure (1)..(817): unsure at all n locations
  Clone ID: MRT4577_133429C.1
gtacgcctgcaggttccggtccggaattcccgggtcgacccacgcgtccgcgcggctccaagaccggtcccgcagcagctgtgcgctgtggccgatggacatgggcacgcagggatcggggcgcaagcggctccccaaccgggagcggctgacggcggaggacgacgcgctgaaccagatcgcgcgcgaggcggaggccaggctcgcagcgaagcgtgcagcccgagccgaggctcgagagatccggatgaaggagctggaacggcagcagaaagaggtagaagaaagaccagacaaagacttcgctgagaagggctcccgtaacatgcctagcctgtctgcagccacactggcatctctgggtgggacttcctcccggagagggagtggagatacctccatctccatggacaccgaagcatccatcagggaaatcaaggaacttaatgagttaaaggaccagattcaggatgtagaaggcaaatacatgcagggactgaaagagatgaaggactcgctggccgaagttgaggagaagtacaagaaagctatggtctccaacgcccagctagacaatgagaagaccaacttcatgtaccaggtggacacactgaaggacatgctgctggagctggaagagcagctggccgagtctcagcgngcatacgaggagaagaacaaggagttcgagagggagaagcatgcccacagcatcctgcagttccagtttgccgaagtgaaagaggcctgcggcaaagggaagagatgctcgagaacatgggataatcctaaatcagaatagccaccacggagagac

SEQ ID NO: 36651 - DNA, 412 bp, Zea mays
  Clone ID: MRT4577_13342C.1
acgacaacgagtggggatacagcacccgcgtggtcgacctgatccgccacatgaacagcaccaactaagattatgaagaactcaaggtctggtgatacgagcgagttgtcttcttcccccccggagaaaagtgcttccgagaataaattttttccatcggaatgtctgaaactatgttgggtgtatcctagtggttggttgagcattaatggctcatattttgtcaggtctacgtgtcgccgtgaagcttttaatcaaatcagttcactcttttgccaaaaaaaaaaaaaaaaaaaaaaaaaaaaaaaaaaaaaaaaaaaaaaaaaaaaaaaaaaaaaaaaaaaaaaaaaaaaaaccccaaaaaaaaaaaaaaaaaaaaaaaggtccctgggccggaacccccctaagggca

SEQ ID NO: 36652 - DNA, 428 bp, Zea mays
  Clone ID: MRT4577_133430C.1
aaaaaaaaaaaaaattttttttaatctgggaggggggaagataacacttaatttttgggggaaaaaaacccctttttttttttccccacgggattcccctggtttccccaaaaaaaaaaaaaaaacccccacctgaaattaaaaacccccccccccaatttggattaaaagttacaaacacaattcctccccctttttaaaaaattttccaaaacggccccccccctttaaaagttaaaacaaattttttgaggtgggcgtaccaaaccccctggatttttacatccttgggccccttaaccccaaggtggtggtcccacgggttccccctttcaaaaaccccaaaaacccccccggtttcccggtttcttttggtgaccctcaactgtatttttcccctgaaaaagcggctttttttatatttttcc

SEQ ID NO: 36653 - DNA, 447 bp, Zea mays
  Clone ID: MRT4577_133431C.1
cccacgcgtccgctttgctagctaggttcaagatgagcaagcctgtgaagatcgggccatggggcggcgatggaggcgaacctcgcgacatcgaatacactcctttcgcactagttggtgtggcagttcgtagtggggacgcaatcaacggtgtcaggtttacttacgtggataccagtgggaatctgcatgaggaggaatggggaggctccgaggcggagaaatttgaggagttgcttcttcaagaattagaatatgtggaggaaatttcaggaacgtacggttcaccccctgaatcatatgtaacatgtcttgaattggttaccaacaagggtcggactatccgtggcggcactgacggctctgggggttctttcaacgtaccgctagttaacaaccggatcatgggctggtttggagctgcggagacgactgacattgactgct

SEQ ID NO: 36654 - DNA, 429 bp, Zea mays
  Clone ID: MRT4577_133432C.1
cccacgcgtccggaactaccacatgaaatgactctaaaagatgtcatggatactgtaggtaaagacgtataggaaattaatgatgtgaaagctagcacatgatgaatgatatcagctacttcttatgcattgggtttataaggaattgctaagtctacatggtatcttcttaccttgactcgcgcttgaacaggcacaacagttactgtatttcctgtgataggttatgattgcgctcacaaatcattacaaaggaataagcaggatgaagatgatgatggaactctggctgacatgacagtgatatatgcttatgaacctggaagatttaagcattgccgacatcatgctaagacatacatgttgatagaagatactgcattgcaacatgattagctaaaggaaatttaatcatcatcttatctaacg

SEQ ID NO: 36655 - DNA, 275 bp, Zea mays
  Clone ID: MRT4577_133433C.1
gcgccgtgcgtaaacgttaatagccttgctttttattctaataagctccaacaaccgataggtgtctttaacatgggagctggcattctactgatacatatagacagtacttctcagacacaattcactctgacacaattctaagatagctggtcacaggataacctacaatcacaataccgcttactatccaagatctttacccccaggatatctcgttcccataacaatcccgaaaccaacttattatcgtgtggaccacattatcctcttag

SEQ ID NO: 36656 - DNA, 179 bp, Zea mays
  Clone ID: MRT4577_133434C.1
gatagaatgatgaatatatttacaggaagcgcaaaatcttattttccttcttcggacaggaaacgacgacctcttcgacccacggactcttcaaagctatcttgcttcgtactgttgcacaaattgaaacaaactaagctaaaacaacgatggagcttacacgcatccttaccacaaat

SEQ ID NO: 36657 - DNA, 763 bp, Zea mays
  Clone ID: MRT4577_133435C.1
cgttttccagctgcactgtgagacccccgtcctgcacctccgcccttcggcccccattattggttgtgctcaactggccttgccatttttccttccagatctgagctcagttcctcctccacgctagacctctaccgccaagtagccgccgcctcctgacctgtcgccgcggccccgcctgcaggtctgatttctgtaggctgacacaagaacatggaccgtcgcaaggaagttaccgctgctaagttaaccgatgatctagtggtcgatatcctctcccgcttgacatacaaggacttttgccgctgcaaatgtgcctataaggcctggtctgccttctcctccgatccagactaccgcaagaggctgcccaaaaaagtaaccactggacttctgtaccaagcccgcaatacgtctgctatcccgcttgttagcctgtcccgagatgatggagaaatcgatggaattcttgctgacgtgccacactatgagcatttagagtttcttgactgctgcaatggtctagtcctctgcaagtacaagagcagctatacttctccaggcatttgccgctttgttgtgtgcaacccagcaacacgagagtggagaatacttcctgatacttttgttgggactgatggccaccgtcgtacaactattttgggctttgatccttcatggtcaccacacttctatgtcttcagctttaatcgcatgcattcatttcttcagtttggccggcaaagttgagatgttttcgtct

SEQ ID NO: 36658 - DNA, 361 bp, Zea mays
  Clone ID: MRT4577_133436C.1
tgctgtggtaacttcacaactacttgtcagtttatatagtgctgcaggtaagaaggcgaagcggcggaattgttacaccaggcgcgcagtaacttgtacccgctgcgcagtggaccgcaaggatcaaacagtaactctgcaaggtgggatcgacacgcgctcggaagtcggatcgtttctccgcaacgagctcagggaaggtgttttttggaccttcggcttcccgaagctgaagaggcttttttcacgggtcaagctcgttacgaagaacgatctagcaccgcgaaaggggctactgttggggtcgtgcttcggtgcgccgaaggtctcacacgaagaagcagcttcggctgaagtcgtc

SEQ ID NO: 36659 - DNA, 396 bp, Zea mays
  Clone ID: MRT4577_133437C.1
tttctttttttataaaaatataagagtctggggggaatacatacgtgcctgtccaccatatgattaaccaccgaacacctatttatgttcctaagccctagctctctttactggcagaacattcttaacctaaaccatgacacataaaaatcgcggagggacaatattgcccacccccttcacacaacccactattaagcgaaacccgatgatctactgcttactcttctttaagttcctatttcctttaacgactcatggggcttcaaatgaggccaagggttggagcaaaggctctgggtgcctctaatctgctctttaacaactatatacactgaacaaatactgaatccccaacctgatcaactttagattcaaaccagctcctgagtttat

SEQ ID NO: 36660 - DNA, 273 bp, Zea mays
  Clone ID: MRT4577_133438C.1
gggcgccccattcccctcggcccgcggcactttctcagtcccctctagccgccgactaccgctcgcgctctcctcgcgctctgcgaaggtcgtttcgccacggtctcggagacggagacggtcgccttccacccggagatccaccagctggtctcgctcatcatcaacaccttctactccaataaggagatcttcctcagggagctcatctccaactcctccgatgccttggacaagatccggttccacagtccgacggacaagaccaacctg

SEQ ID NO: 36661 - DNA, 1229 bp, Zea mays
  Clone ID: MRT4577_133439C.1
gctcgagtcgggcccggccgggacgtcgcctctcatcccggctctcgcctctcgctccccagccatccatggcgatgccaccgagccgttcgtgggcggagctgcagcacgacctcctggtgtcgatcatgacccgcgtgggcgcgccggacctcctctggggcggcgcttcccgcgcctgctcttcgtggcgggccgcggcgcgggacccactcgcgtggcgacgcgtcgacctccgcgactgggtcgccctcacctccggccggcgcgccgcgagacctggacactccagctctcgcgtacccgtccacgccgcgctcgtcggcatcctggaggtcgccgccaagttggccgaagggcggatcgaggccgtgctgctccccgagtttgctgatgaggaccatctcttgttcctcgctgagaggtgcccaaacctgcactatttcagccttcctagcacctgtatgacttacgatcagttctgcaaggcgataggtggacttcaatcgcttaaaggcatggcagtggatgagagtctgattaattatgatgtcctcctgcatgtgcaccagtgctgcccagactttgtggagctgaaggtgtctgcactgtacgtggatgaagagatggcctcagtcatctgcaactctcttcctcgtctgaagaagttggagataccaagttgtgacatgtcttccgctgcgattataaggttccttgattgcctagagcagctcgagcacctggacatctcaggttacgagacatcagccatctcaagcccggttcttgagaaagcttcgcggctcaaggtcttcctctggaactcgaaatttgagcttggggagttcatggactgctccaattgtggagagcacaacattaaccctcaagaaccctgcaagtgcatgatggagcacaaggtcatggactggctggctggaccttcataagcttcctgaaccaaaggcgtctcttcttgtgtcttgttaaatcatgacgttttcctggctgtaaaattccaacctctgtcaaagttggtgtctgagctgtatgtacaaggaaatatgccacttcaaatgtttagcgcgccttcatgcatgatacttagagaggtctgcaactttttaatgtaacaaattgttgtatcaagtgttaatggaacctcttctttacacctaaaggtgcccatgcctactccctcatttttcccccttttcttccccccc

SEQ ID NO: 36662 - DNA, 687 bp, Zea mays
  Clone ID: MRT4577_13343C.1
atgctgtttctctgaatccaataagcatatcctccctatgctacccatcgctcacttgaacaagaggaatggctaatggttgccccacatctaccacaagctccctgcccctcttcttccttctctcttgcctgcttatcggccatgctctctgcagccaagcccacaatggcagaacatcagatgctgattatgtggtgcaatttcctcaccaagaattgactactaagcatataattttgccgaaggtcatcaagggtctaaacaagggcatactgtcaaagtatgcaaggagaatgttgatcggctcaattgctccaatatgtacatacaacgagtgcagggggtgtcgattcaagtgtactgctgagcaagtcccagtggatgcaaatgaccccatgaacagtgcttaccactacaagtgtgtttgccacaggtgatcttcaatgagtaggaggagctgctatgttatggtatgtcctggagaatagtagtatttttttccccattcttggttctccgttctccctcttcgcttccttctattctttggtttctctgttgaaaagggttccttttttttcatttctattttacaagaggctagctagtagaggactggagcctagaggagcattttgtactttaaaatgcttgttcaggttatgaactagtaattttgttagt

SEQ ID NO: 36663 - DNA, 250 bp, Zea mays
  unsure (1)..(250): unsure at all n locations
  Clone ID: MRT4577_133440C.1
ttgggtccctcgaggccggccngggctgaactgtagactagtagataaggaactaagccatgtccccatgaatttcaggttcattgtgaagctgaggtgggtgtataggcataaagagagcatgaacactgttagtggtacaaagcgtgcaccaaggagacagtcgcaagatgggtctggtgataaactttagtggtgatcgtggaagcaagttccccggggggtgggagccgtcgtggacacatacccc

SEQ ID NO: 36664 - DNA, 762 bp, Zea mays
  Clone ID: MRT4577_133441C.1
cattgggtacctcgaggccggccggggagagttatcgattatcatccacgcctctacatttcttctctctctgctcctccgcctccggctgatcctacaagaacgggagcgccatgtccgattccgaggaccaccaatacgaatcgatcgtccactctgccatccccaagacctacccgcaagaagctggcctcgaccgtaataacagatttctccacatcatcaacctgccctgcaaggttgtgcaggtccctaccttccaatactggcaagtatggacacaccacatgcaactttggccgcatatacatattcaatgtgaaataccttcaagatattgatccttcctctcctcactgtgaccttccctatcgtgcaaccgaactgacaatcacttgtgtgcatattattgataatgacatttgtgcaccttcttacttcagatgtccacactactgatgatcttaaactcccaactgataagactctctcgtggaccttatcaaggaatgcaatctaagcccgaaaatattgatgagactgtccactatgcgatggcggtacgactatatcttggctctgaacgacgtggttccatttaacttccttggatttggagacctgatcctactctatctcaacttacatcgggctacaactgatctcccttatcgatagctatccacacatgcacctgggttcatctgtgttaagctataaccagcaagttgatactggctgtaacacctacctgacttatca

SEQ ID NO: 36665 - DNA, 446 bp, Zea mays
  Clone ID: MRT4577_133442C.1
ggttgaaccacgcgtccgcccacgcatacgtccacgcgttcgcgcacagccactgcccaatttcgtttctctggctcctcttgcgcgtccccggacacgggagatcatccgtttgtggtcgtctccggcgcagatcgtcggtctgtggccgcctacctcctctgcagttcgccgatctgtggccgccgccgccgtcacctgtcaggcgtctattggagcatccgacggcgcgacgtgaggtatgtgaccgctagtctgccagtcgtcggtgtgcaacgaggtctgtggacataagactgtcagccggcgataggagccgacaccgtgagggctgtggacggcgttatttgattggagccgtctgacgacgagcacagggctcgtggtcgatgcctgcgacgatttgtggtcatcagacgctgattggggctggcgctcgatgattg

SEQ ID NO: 36666 - DNA, 395 bp, Zea mays
  Clone ID: MRT4577_133443C.1
ctgacgtgtgatgggacccgcgaagtgcgtaaccatgtcacctgcttggtgggaatccacagatcaatgagatgcatgggggactgagggcagacactcatgtgatcagattatgagctgagaggagaaggggacctgaaaagaggtagataatcgatgcaaatgcgaacacgatgctccagagctgtcagaggcaccatagcaattaatgatactatatgtatggacctggccatgcacctgtaccttggtgaaagaggtcttcacagcacctgatgacataatataaggaatgcacgctttaacataaaataggatgtggttaacctgaatccaccagtaggctactaagaaattacctatgaatctcgactagacatccttacgactaagaa

SEQ ID NO: 36667 - DNA, 2162 bp, Zea mays
  unsure (1)..(2162): unsure at all n locations
  Clone ID: MRT4577_133444C.1
ggccgggnannnnttaaaaaaaaaaaaaaaaaaaaaaaaaaaagggcccaaggcttctctatctagggattcatcttcctctcgtcttccctcttcctctccgaagatacaaggcgccgtcccaggtataggtagggtcgccaccatgctggaggagctgctcatcttcacccggggcggcctcatcctgtggtcgtcctgccgggcgctcggcgccgcagccctcaagggctcccccatcgacgccctcatccgctcctgtctcctcgaggagcgatccgccgacgccagcttctcccaggacaattacgccctcaagtggaccttccacaacgacctcggccttgtcttcgtcgccgtataccagaagatactccacctcctctacgtcgacgatctcctcgccgccgtccgcaaggagttctcccagatctacgaccccaagcgcacctcctacgatgactttggggacatcttccgccagctccaccgcgaggccgaggcgcgcgccgaggaaatgaagaagtccaagcaggccctctcgtcccgtccgcagcctgctctcacccagaagaagcctggtcccaagggccgcggcggtgattcccgcggcggcgctgctaacaagggcggctctggtgccaaggatgactctgatggcgacagctatggcaaccaggaccaccgtactctggcaaatggtgccttcaagggccaagagaatggcgtccgcaaggagaattcttctcatggccgcactgttgttgtcaagggaaaggagaatggggcccccaaggatgaaggggccttcgatgtaagtaaactacagaagctacgggccaacaagaagaatggtgccactgacaatggaaccaagaagctgaccaaacctgacataaagaagaaagggaagcaagatagggtgtgggacgacaaaccttccaacaagaagctggattttacagacccggcagacgagagaggggacgaggtgacagacaatgtggcggtcatcgagggagaaagcatgatggataaggatgaggatctgagcagcgacagcgaggacgaagaggtggaagatggacccaaaaagaaaggatggttctcatcaatgttccagagtatttctggtaacaatgtattggagaagtctgatctgcagcctgcgctcaaagctctcaaagataggctgatggcaaagaacgtggcagaggaaattgcagagaagctttgcgaatctgtcgcagctagccttgagggcaagaagctaggatctttcactagaatatcatcaacagtccagacagctatggaggatgcgcttcttcgtattttgaccccaaggcgctctattgacatactgagggacgtgcacgctgccaaggagcgtgggaggccatatgttattgtttttgttggggtgaatggagttggcaaatccaccaatcttgcaaaggttgcttattggcttcttcagcataacctcagtgttacacttgcagcatgtgacaccttcagatctggtgctgttgagcagctgagaactcatgcaaggaggcttcagatacctatatttgagaagggttatagaagcattggttggaaatgatgctgtggatcagctcactaaatttaaccagaaattagcagacctatctgctgttcccactgctagattgatcgatggtatcctgctcaccaagtttgacaccatcgacgacaaggttggagcagcgctttccatggtctacatatctggagctccagtcatgttcgttggctgtggtcagtcctacacggacctgaagaagctgaacgtgaaatccattgtgaagaccctcctgaagtgattgcaccaccgtgttgaagtgcagtctgttatctattgtatccccagtgacctttgtcatcctcatgttggacgtcgtcgtggatttgtaactgtcggagttgcaacaaaacttgtgtgcttgcgtcaacgtgtgccgtcttgctctaataatgcactatctgcattttgaatgggtaaaaaatggatgagtatgcgagtttgctatcgtctggatgttaccagattcctttctgcaaaaaaaaaaaaaaaaaaaaaaaaaaaaaaaaaaaaaaaaccaaaaaaaaaaaaaaaaaaggcccctagggcc

SEQ ID NO: 36668 - DNA, 139 bp, Zea mays
  Clone ID: MRT4577_133445C.1
acgaatatatcagagcgattttttatatttgtagtactgggtgttgttaagagactattattagtgagatcgagagcgatccgcaagtgtatcgatcgcgttgtgagctagctagagctagcgcgagcgctaccaggac

SEQ ID NO: 36669 - DNA, 727 bp, Zea mays
  Clone ID: MRT4577_133446C.1
ctggccgggatgtgacaccttcagatctggtgctgttgagcagctgagaactcatgcaaggaggcttcagatacctatatttgagaagggttatgagaaagatccggcagttgtagcgagggaggctattcaggaagcaacccggaacaaatcagatgttgttctggttgacactgctggacgtatgcaggacaacgagccactcatgagggcactctccaagctaatcaatctcaatagcccagacctggttttatttgttggagaagcattggttggaaatgatgctgtggatcagctcactaaatttaaccagaaactagcagacctatctgctgttcccactgctagattgatcgatggtatcctgctcaccaagtttgacaccatcgacgacaaggttggagcagcgctttccatggtctacatatctggagctccagtcatgttcgttggctgtggtcagtcctacacggacctgaagaagctgaacgtgaaatccattgtgaagaccctcctgaagtgattgcaccaccgtgttgaagtgcagtctgttatctattgtatccccagtgacctttgtcatcctcatgttggacgtcgtcgtggatttgtaactgtcggagttgcaacaaaacttgtgtgcttgcgtcaacgtgtgccgtcttgctctaataatgcactatctgcattttgaatggataaaaaaaaaaaaaaaaaagcggcc

SEQ ID NO: 36670 - DNA, 234 bp, Zea mays
  Clone ID: MRT4577_133447C.1
agctgggaatacattttttgccgtcttgtttaacacacttttattagcacccactaccttccataacattcggagtgacctatttaagtgaaaggacgttcaatcgcccaccatccagaagttcaaagggctaatatttggatgccaaactataggctttttctagcttcaggagcaacattcaagatacatcacctatacttcaatatactgatacaaaaagaaatgcctcat

SEQ ID NO: 36671 - DNA, 956 bp, Zea mays
  Clone ID: MRT4577_133448C.1
gccggccgggccgggcgtctcctctcccgtgggacaaggcgccgtcccaggtacgctacgaaccaacccccgatcgaccggatcagtatcatatccaactgtagagtagggagaatcagtcaaattcccccgttgtagctgtaggcttggcgttgctgctcgatcgcgctcctgtctagatccaggggcaatcccccttatcaattacaactgggactggtagaggtagggtcgccaccatgctggaggagctgctcatcttcacccggggcggcctcatcctgtggtcgtcctgccgggcgctcggcgccgcagccctcaagggctcccccatcgacgccctcatccgctcctgtctcctcgaggagcgatccgccgacgccagcttctcccaggacaattacgccctcaagtggaccttccacaacgacctcggccttgtcttcgtcgccgtataccagaagatactccacctcctctacgtcgacgatctcctcgccgccgtccgcaaggagttctcccagatctacgaccccaagcgcacctcctacgatgactttggggacatcttccgccagctccaccgcgaggccgaggcgcgcaccgaggaaatgaagaagtccaagcaggccctctcgtcccgtccgcagcctgctctcacccagaagaagcctggtcccaagggccgcggcggtgattcccgcggcggcgctgctaacaagggcggctctggtgccaaggatgactctgatggcgacggctatggcaaccaggaccaccgtactctggaaaatggggccttcaggggcaaaaaaattggcgtccgcagggagattcttctcatggccacagttgttttcacagggaaaaggaaatggggcccccaacgatgaatgggccttcgatgtaagtaaactacagaagctacgggccaacaagaagaatggtgcactgac

SEQ ID NO: 36672 - DNA, 3072 bp, Zea mays
  unsure (1)..(3072): unsure at all n locations
  Clone ID: MRT4577_133449C.1
gggaccctcgaggccggccgggatggtggtcacccatccgatcccacccggcagcactcggcagcggtgccgcgcaatggccacccacgcagctctcgccgcctcccgcatccccgccggcgcccggctgcacagcagggcggcggcgctcgtccaggcacggcgtgcagaggctggacttcgccgacttctccgggctcaggccggggtcgtgctccgtgagcgctgccgcgcgggaggcgtccttctccgacgtccttggcgcgcagctcgtcgccaaggccaccggggagaacgccgtgagggcgcccgccgaggcgaagctgaaggtggcgatcaacggcttcggccgcatcggtcttatcttcctccggcgctggcacggccgcgaggactcgccgatcgacgtcgtcgtcgtgaacgacagcggaggcgtcaggaacgcgtcccacctcctcaagtacgactcgatgctcggcaccttcaagggcgacggcaatatcgaggacgacacgaccctcatcgtcgacggcgaggccaggaggatataatctttacttggaagtttacgtgaaagtctctgtctaactgaatctggttcccgtttggtaagcgtaccggtaccctcgaggccggccgggaagggcccaaggcttctctatctagggattcatcttcctctcgtcttccctcttcctctccgaggatacaaggcgccgtcccaggtagaggtagggtcgccaccatgctggaggagctgctcatcttcacccggggcggcctcatcctgtggtcgtcctgccgggcgctcggcgccgcagccctcaagggctcccccatcgacgccctcatccgctcctgtctcctcgaggagcgatccgccgacgccagcttctcccaggacaattacgccctcaagtggaccttccacaacgacctcggccttgtcttcgtcgccgtataccagaagatactccacctcctctacgtcgacgatctcctcgccgccgtccgcaaggagttctcccagatctacgaccccaagcgcacctcctacgatgactttggggacatcttccgccagctccaccgcgaggccgaggcgcgcgccgaggaaatgaagaagtccaagcaggccctctcgtcccgtccgcagcctgctctcacccagaagaagcctggtcccaagggccgcggcggtgattcccgcggcggcgctgctaacaagggcggctctggtgccaaggatgactctgatggcgacggctatggcaaccaggaccaccgtactctggcaaatggtgccttcaagggccaagagaatggcgtccgcaaggagaattcttctcatggccgcactgttgttgtcaagggaaaggagaatggggcccccaaggatgaaggggccttcgatgtaagtaaactacagaagctacgggccaacaagaagaatggtgccactgacaatggaaccaagaagctgaccaaacctgacataaagaagaaagggaagcaagatagggtgtgggacgacaaaccttccaacaagaagctggattttacagacccggcagacgagagaggggacgaggtgacagacaatgtggcggtcatcgagggagaaagcatgatggataaggatgaggatctgagcagcgacagcgaggacgaagaggtggaagatggacccaaaaagaaaggatggttctcatcaatgttccagagtatttctggtaacaatgtattggagaagtctgatctgcagcctgcgctcaaagctctcaaagataggctgatggcaaagaacgtggcagaggaaattgcagagaagctttgtgaatctgtcgcagctagccttgagggcaagaagctaggatctttcactagaatatcatcaacagtccagacagctatggaggatgcgcttcttcgtatcttgaccccaaggcgctctattgacatactgagggatgtgcacgctgccaaggagcgtgggaggccatatgttattgtttttgttggggtgaatggagttggcaaatccaccaatcttgcaaaggttgcttattggcttcttcagcataacctcagtgttacacttgcagcatgtgacaccttcagatctggtgctgttgagcagctgagaactcatgcaaggaggcttcagatacctatatttgagaagggttatgagaaagatccggcagttgtagcgagggaggctattcaggaagcaacccggaacaaatcagatgttgttctggttgacactgctggacgtatgcaggacaatgagccactcatgagggcactctccaagctaatcaatctcaatagcccagacctggttttatttgttggagaagcattggttggaaatgatgctgtggatcagctcactaaatttaaccagaaattagcagacctatctgctgttcccactgctagattgatcgatggtatcctgctcaccaagtttgacaccatcgacgacaaggttggagcagcgctttccatggtctacatatctggagctccagtcatgttcgttggctgtggtcagtcctacacggacctgaagaagctgaacgtgaaatccattgtgaagaccctcctgaagtgattgcaccaccgtgttgaagtgcagtctgcccaaagtctgttatctattgtatccccagtgacctttgtcatcctcatgttggacgtcgtcgtggatttgtaactgtcggagttgcaacaaaacttgtgtggttgcgtcaacgtgtgccgtcttgctctaataatgcactatctgcattttgaatgggtaaaaaatggatgagtatgcgagtttgctatcaaaaaaaaaaaaaaaaaaacacgagactagtctcgtgccgtactctctggatgttaccagattgcaagctgatccggtggtgggaggcatcccaaaccaagattctgaaaagtgagaggaggtgattcaatgaggtattgatttacactatttggaacattcggaaagaacggaacanaaggatctttacccgcgcgtttgaaacggcagcacaagtggcctctatagcg

SEQ ID NO: 36673 - DNA, 396 bp, Zea mays
  unsure (1)..(396): unsure at all n locations
  Clone ID: MRT4577_13344C.1
ccgctacgaagctcggattctctcgagcagttctttctcctgtcattatacccccagggtaggcttattcattgttgggagggccctccaanncnatctcctccatcatgaggtcacagcttactgtcttgattgagttgatctacttaagctactttcacaatctatcattcataggataccacatctattcttctttatctccttcactcatgattaaccaatagtttgctgactcctcccatcttccttctgtcataattcaagattcaatcacttcactcactccctattaatcacttttgtaaatatattatatttttcgcatttcctctagtatataactctttataatgacttttttcatcccatttattttaatatgatttcggcatt

SEQ ID NO: 36674 - DNA, 3080 bp, Zea mays
  Clone ID: MRT4577_133450C.1
ttgccgtccatatccttcaacctgatggaatcgggtcttgacgaagatactaccagaaaaggtccttcccacttcagctgaagcttgcctactatatcggggttagccactctccgaagcaccagatgtcctggcttaatattttttaaccgaacctttctgtcacgccattttattgtttcggcttgatatttattgatgttctccacagcctgaagtctggtcccctctatagtatcttttgctacgtgataatcagcttcgtcttctgccgaagctactgttcttattgaccctgctttagcttcttcaggagttacaacttcgtcatcgaacaatagtttgcaaggtgtaaatcctgttgaacttgatatagttgtattgtggctccacaccactttaatcaactcatctggccattttcctctaggctgattgaagattaacttcattattcttgtcataataatgccatttgctctttctaccaacccatttgactccggatgcctaactgaggcaaaatggatctttgtaccagtgtgatcacagaactctttgaatgtttcagcatcaaactgtgttccattatccacagttatagccttcggtacaccgaagcgacaaacaatattttgccagaagaattcctggactgtagccgaagttattgtagccaaaggctttgcttgcgctggtggaagtgggcctaacaaatccaggccccatctttgcaatggccaggtaggctgtattagctgggtgagagatgaaggttgcttctggtctcttgcacatttttgacatttttcacatttttgaactagttttgctgcatccggagctgccttcggccagtaaaatccttgtctaaacacttttcccagcaagggcctagacccaatatgagatccacacagacctgcatgtatctccttcattaattcaataccttcagctctggataaacactttaacttccgaagccccaacagaattgcttcgtattcagcaatattatttgtacaatcgaagtcaagctttgctgcataacatgttctgactttagaaggggaaactaggacagcagccgctcctgcaccgaaggttccccaggaaccatcgcaaaacactatccaagcttcggcgtctttatttgtttcttcttcctgagaccctggcgtccaatcagcgatgaagtctgctaatgcctgggactgaattgaggatctatgcacatagtcaatactaaattcgttaagctccacagcccattttccaatccttccagtagcttctttgttcctcattatgtccttcagaggaacaccttctccaattctgtataattttttctttgataaacttaaaacttcggagacgaagtacactggagcctgctttttggtttggccatctagcttctcctgtagaagagccgcactaactgcagagtgcgaagctaccacatataagagtaatggagcccctggcgaaggtggagttagtgtcgttagatcgatcaagtattgcttcaattcttcgaaagctttttgctgagtcggaccccattgaaaaacttcggctgacttcaatattttaaagaatggcatatttctttctgctgctctagatatgaatctattcaatgatgctagtcttcctgccagctgttgatcccccttctttgtgcttggtggctccatccgaaggatagcttcgatcttgctcaggttggcttcaattcccatcgttgataccaaatagccaaggaattttcccttcttaaccccaaaaacacacttttctggatttaacttcaggccagcttgcattcctcctatttgagaatgaaggaccttggttgtcattctgctgaagcttcctccagcattcttaagcccctcaggcatccgaaggtagcaataggtgtcactgggagttatgaagctagtctttggctcgtcttcctttttcatccaaatttgatgatagtctgagtaacaatccagtagactcatgagctctgaagaagctgttgcatctactagagagttcattcttggcaatgggaactcgtcctttggacaagccttgttgagatctgtaaaatcaatgcacattctccatttactgttggccttcttcaccataacagtgttggctagccattctgggtatttcacctctctgatgacaccaacactgagaagtctctttacttcgttccggtcatcttcagctttgtcttcagacatcttccgaagcctttgttttcttggcctgaaggatggatccacattgagtgaatgttcaataacatctctgttgacgccacagagatcattggctgaccaagcaaaaacatctttgttgttgaataaaaatcttagcaaagtcttctcttgctcttcagatagctgagaccccagcagtaccctttgttctgctatgtcttcacataggagcataggcttcgactgatccaccgaagcagccttctctcttttgtatttatactgctgacaggcttcggctccatctatgttatgaattgccttagaatctgtccagtttccttcagcccttctggcagcttcttgactcccatggacagcaatgggcccttgttccgaaggtatcttcatgcataaatatgctggatgaagtattgctttgaaagcattaagtgtccctcggtcaatgattgcattataggggtactttatgtcaacaatgtcaaagacaacctgttcagtccttgtgttgtggacgaagccgaaggtcactggcattgtgattttaccaagtgcgacaatatgtcttcctccaaagccacaaagagggtgtgtagcatcatgaatcttgtcttctggttcttgcatctgtgtgaaaaccttagcaaatatgatatccattgcactgcctgtatcaaccagaacattatggaccaaaaatcccttgatgacacaagatatgaccatagcatcattgtgagggtaatccttgagcttaaggtcctcctgggagaaggtgattgggatgtgagaccatttggacttgatgaagggtcccttcat

SEQ ID NO: 36675 - DNA, 673 bp, Zea mays
  unsure (1)..(673): unsure at all n locations
  Clone ID: MRT4577_133451C.1
cgggaatatttgaccccgagatatatgatgggtccatgtgtgaatatgacccaagagtaaagtagactcaaacattgtagctcacggtatcaacatatattgatcatcagatttggcacctagacggtcggttcagccttatcctagacggtccgcgcttgaatggtccgacgtgttaccctggatgatctgtgaatagattaatttatactggagttcttatctttttgtggggttatcctaataattcacgagaaactgttggatttcgtctagtaaaggatctgaaccccctatacatatctaaaagggtgtgatcgattcaagaaaccaacaatggatctacaaatcacttttatcttatttaccttatgcattagccttaggagtagttctagccatagttatagttctcaactttgctcttcacttctcttcgactctatgtcgtctagagacgctttggatggcctgtcgaccccaaggtaaccctaagatcttcctccctgtcaggatctaggttcttcctggagctctttgggccaacgcgaatggtccgntgacctaccacggacgatccgctagcccaaagaggagtctccaagatttctgtgtcgcgcaggtcctaggtaccgtttatatttggcccaaaaaggtgacaacatactttttg

SEQ ID NO: 36676 - DNA, 450 bp, Zea mays
  Clone ID: MRT4577_133452C.1
gctctctcccaacataactttcctacaccaacggatctttattctcagcttctaatggttagaagaggggctggggaggcaaaccttacgccgactcttaacaccttttaacgcgccaactcatgtggctctttggcgggagaagtgcactgccacccctcatttgatatgttcagtgaatacttctaaattggtggccgctcatggagcattgaccttgataccatgctcaactgacattcgaaaaaagccctatatttttattcaacattaacgcccccgccttcttgctttacctgccgttgttcgactttctgggcatactgacactataccacttcgatacctaccagatgctacagatcatgtttgtacaccacccggatacttgcgactagctctgaaagttcatgacatccttgcctacaaagcacgcagaaaacaacatcc

SEQ ID NO: 36677 - DNA, 387 bp, Zea mays
  Clone ID: MRT4577_133453C.1
gggaggggaaattttttttaaaaaaagggggaaagggttgaaaatttaaaggttttaaaaagatttcaattttttttgttggggtttttttaaaaaaaaatttttttaaaaagtttacatttggagggtttaaaaattttttaagtttaaaaaaaacttgctcataaaagaaagactctccaaaaaaaacttagcttaagggggggtttatcttatttagaacgggcgaccccacggggttttatgcccttccaaaaagaaagaatttttagcctggggaaaacactaggttaggggtttaaaaaaatgaatgttgggaaaaaatttccaattgggggccttgttagattcaccctttttagcttgggaaaaaaaaatttttttgaa

SEQ ID NO: 36678 - DNA, 994 bp, Zea mays
  Clone ID: MRT4577_133454C.1
cattgggtacctcgaggccggccgggagacgcggctaggagcaagagtaaggttccagctgctgggcagctatccagcgggccactgagtttaccttactcttactcttacatactaagatcgctaccagagcatggcgggaacttcgtcgtggtcgtcgtcttcatcctgcgcgtcgtcgttcgggtcgcccgaccacgatgtcgtctgcgtcaccgagccggactctgtgggcgccgcaggcgccgtcgccgacgccgagggaagcgtcaagttcctgtgcagctacggcggcaggatcctgccccgccgcaccgacggcacgctgcgctacgtcggcggcgacaaccgggtcctctccgtcgaccgtcccatccggttttacgtgttgcagcggaagctgagggaattgtgcggcggctgggaagcgcacctgcggtgtcagctaccgacggaggacctggacgcgctcatctccgtcacctgcgacgacgacctcgccaagctgctcgaggagtacgacgaggctagcaaggaccgcctccagtcgctcaagatccgggcgttcctgttcccgactaggacgccggcgccgtccatactacagcgtaggagcccgccgtcgattgctcacctccactggcaaaacacttccccgccggccgcagccggcgtctcgctgacgtgcgcgccgcggtggtgggcagcgccccaggcctctcgccaggcgcaggcgccccaggcgcagaactacgaccgacacagcctcggtgaggagcggccgcgcctgtactattcatatatgccacggacataattagatcagatttattattagaccctgaccaaatatggtccaaaattttgttgaagttgtaatagacctacatgaacaacttattgtaacatctatatacggagtaatataaaaaaatgagcgcttacagttgagttaaaattataattcaggcacgctatagtattcatgtttagg

SEQ ID NO: 36679 - DNA, 857 bp, Zea mays
  Clone ID: MRT4577_133455C.1
tcgagccggccggggcacagacgtgtacgtaagctaggagcagctgctgggcagctatccagcgggccactgagtttaccttactgcttactcttacatactaagatcgctaccagagcatggcgggaacttcgtcgtggtcgtcgtcttcatcctgcgcgtcgtcgttcgggtcgcccgaccacgatgtcgtctgcgtcaccgagccggactctgtgggcgccgcaggcgccgtcgccgacgccgagggaagcgtcaagttcctgtgcagctacggcggcaggatcctgccccgccgcaccgacggcacgctgcgctacgtcggcggcgacaaccgggtcctctccgtcgaccgtcccatccggttttacggtagtacatatatttgtgccggcgaatcgacacgagtccagtgaacaatcctttgatttctctgacttcagttgccgtttatttctgtcggcagtgttgcagcggaagctgagggaattgtgcggcggctgggaagcgcacctgcggtgtcagctaccgacggaggacctggacgcgctcatctccgtcacctgcgacgacgacctcgccaagctgctcgaggagtacgacgaggctagcaaggaccgcctccagtcgctcaagatccgggcgttcctgttcccgactaggacgccggcgccgtccatactacagcgtaggagcccgccgtcgattgctcacctccactggcaaaacacttccccgccggccgcagccggcgtctcgctgacgtgcgcgccgcggtggtgggcagggccccaggcctctcgccaggcgcaggcgccccaggcccagaactacgaccgacacagcctcggtgagga

SEQ ID NO: 36680 - DNA, 401 bp, Zea mays
  unsure (1)..(401): unsure at all n locations
  Clone ID: MRT4577_133456C.1
gtgtggtgttttttttttttatttttttttttttgtgtgttttttttttttttttttttttttttttttttttttttttttatcctctaacccggggtcttttcatgggtaccaaaaaggtttgggggtcaaggtcaaaaaaaaaaaaaagggggggggggggggtctcacccggggttaaaaaaatgggcgtactaatttaaaggggggggccgggccctggtggatgcaggggggggggaaaaggttaaaaacacaaatgccgggcgggggaaatggtttgggggtggttacaccccaaaaaaaggcttgagtttattttggaggggaacgccttctttggaaacgcaaaagcaaaccaaagccttggtntcatggggcttgaaaagggaagggggttc

SEQ ID NO: 36681 - DNA, 348 bp, Zea mays
  Clone ID: MRT4577_133457C.1
gaccggaacgaccggaccgacccacgcgtgcgtacggctgcgagaagacgacagtatggggatattatccaaactctcaatttgggcataaagatcttggaggcttcttgcgcgtgagacatgcagatggattgacaagtgcaccaattcgttccaagcagtaaagctaaaacaaaagtttgagtactcgtatccaccgaaactttgcttgtacttaggtacatgaatatctaattaagaaaaaactttgcaagaggtagtagaaaatagtaaattaaattgctgaaatttaattcaaccaggataaaggatttaaccttaattttaatttatttatttaattccaaa

SEQ ID NO: 36682 - DNA, 1043 bp, Zea mays
  Clone ID: MRT4577_133458C.1
gggaccctcgggcaaaccaaaccgtccgaacacctctaagtttcaaactggccctaaaccgctgctctttgggcttgactctgcccgcttttctccatctccacttggtccctctctcgcatggcggcggcggcatcggcgtcgacgccgcagggggtggcggagcggcggggcatcccggcggcggccttcgtcgaggacgtcgaggcctacctccggcaggccgggctcgacgttaactccgccctcgccttcctccaggaaaggttgcaacagtacaaaatagtggagatgaagcttctagcacaacaacgagaccttcaggcaaagattcctgatatagagaagtgtttggatattgtttcaacattacaagctaaaaaggatttgggtgaggcacttatagctgattttgaattatccgaggggatatactcctgtgcgaaaatcgaggatactgactcagtgtgcctgtggttgggtgcaaatgtgatgctggagtactcttgcgatgaggccaatgccctcttgaagaaaaacttggaaaatgctaaggccagcttagaagtccttgttgctgatcttcagttcttgcgagaccagcaaaccatcactcaggttacaattgctcgggtattcaactgggatgtacaccaccggagaagcaaacaggctgtaaaggaaccttaatgagttagatcacgaggtcaaccaatgtgattgggacaaattttttcgtaccttttggtacctctggcagattagtccatcatagcgagctctttgtttgttgatggtttctttgctgtgtaacaatgtatcggtttattctctttaatggtgtgggaacattagtagaagatgaaacattttactgcctttttccccactggatgtccactggatcacgtcgcaaaatattttttttcatgattcatgcaaaaaaaaaaaaatgtcccgcctcggaactttaggacttttttccccgtgtttcttgcgtttttctagtaagaaaacgttcctgctttccaaaaaaaaacaat

SEQ ID NO: 36683 - DNA, 119 bp, Zea mays
  Clone ID: MRT4577_13345C.1
attcgcacactcgcgacatttaccacgagagctaaggcaccattgcgctagcgagcctccgggcaaagtcgggggtgcatatagctcacatgcggagctgctcggcacccgcgacttac

SEQ ID NO: 36684 - DNA, 275 bp, Zea mays
  Clone ID: MRT4577_133460C.1
ccgtactcgccgagcagcaagcaagcgctccccgcgtgatacacctggacctgctatgtgaggccgaaggggacagaccatcaaccacaccccttggagtctgccagctcgccgacccaaccgacaaggcctaaccgccgaaggacgagtacccacagcgtggtactcgccggccggctacccttccgcggcgcagggggagggaccgcaggcctacccccagcacgcctacccgccgcagtacgcgcagccgtctccacagcagtagcacagca

SEQ ID NO: 36685 - DNA, 700 bp, Zea mays
  Clone ID: MRT4577_133461C.1
gggaagaaaagactgctgcctactgtaaggccctcctatgcttgctcgctagcaaaagagactgggagtaccagagagagggaggagacctggcagaggatcgatgcacgcaaggtgggaaagaggcatgaccacgggcagccggctggcgcaagggtaacatgctgcctactcattggacagccgaactgaagaatacgactgaagaatgctcgggagatgaaacaaaatggcgctgggatgattcaacttgcccatcagatgcctgttcaccaactcacccggctacccattcaaccagtgagacaagccatcaacaagcttgtggaacgaaccaacggagcctgaacgatcataatattgaccattcacgcgagcttgatggagtctttaagagacgacgaaaacaatatgatgttacagtcttgcgtggacactccgcaaacaggttacgcacataatacagaagcctgaccgagctgagctcttcggcatatcatacccatatgccgatgcatactacaggggcgcagcggcactacaattatggcccgcatgctatacatgcaccctcaggtggttggcatgggtccgccctctcgagtgccattgacgatcgagccacgcgctgaacagcccatctatgtctacgcgaagcagtaccacgctattctccggtatatacagctgcatgcaaagc

SEQ ID NO: 36686 - DNA, 562 bp, Zea mays
  Clone ID: MRT4577_133462C.1
ggccgcttttttttttttttttttcttttttttttttttttttttttttttttttttttttttttttttttgccaaagaaggaaaaaaactgtggctcttcaaaattttgaaagaccaaaggtgagacccactggccccaaaaaaagaaaagaaattgaacccatgcacccaaaagggttacatagtattataagtaaccgaagtccctatgcaaggacaatcggaacttgaaagggcccctaatggcccggggtcggaaaaacagggggaaacctaaaaggccttttccccccacgcgaaaggggtcgaattacccatctgggtatgaaaagccgtaagttttttacggcccggcggggcccctggatctcatatccgcagaaggttgggtcaccacctccccagttgtccacagcagaaacggaccccacaactttgggatatttttggcccttggggacaccacgtgaactggcgcttccgtttaataagggatcataaatcccacgaacaggcctctgggggggggctgcactcacccagggggcgcccgggcttttc

SEQ ID NO: 36687 - DNA, 393 bp, Zea mays
  Clone ID: MRT4577_133463C.1
ccccggggcaaaccccaacagctctgacaaaagggcaaggccatcctcctaacataacatcaaaatcgggggcccgaaagagaagcggcgaccttatgggcatatatatagaccacgaagcagccacaaaacctgccccgcctttcacagctaacagggcagaccccaaggtggcctaactcccgaatgggttacagccacaaccctccaaatggggggggctaaggggcattaccagggggcctggaaagcatcctgtcaactttggccaacagcccctgcatttcccccaaaaccttatttggaacagggtccagctgggcgtctgccaacaaggtccccttgttaaaagcccagcggggggacaaaaacaggcccacgggggcctcccta

SEQ ID NO: 36688 - DNA, 497 bp, Zea mays
  Clone ID: MRT4577_133464C.1
cacgctattagtctttccatgtttttcgcttttttatttttcttcatctttttttgtgaggtcttaaaacaaccccccttcaagccttgaaaaaacggccctacccaagaaatcacagccacagactgaaactgtgaagatgcactgatcgaattaataaagaggatgagctacaccagcatcacactgaaggacaataaatccgaccgaaaattaatattgaataaggaaccagtactctggagccggatatacaaaggttactatcacaatcttattaaaaggattgacttcacctgcttgttatttggtcgaacccgattatttaacctttgggtggaaatggtaatccacaaagatgttgggggatttgatgatacgatgcatgatctttgcataacatgatccgagcaagcactcgaggcccttctcggagccaacacttgagccttcaccgccttcaggcaacacagagtcggcctgctcactgcactgaa

SEQ ID NO: 36689 - DNA, 345 bp, Zea mays
  unsure (1)..(345): unsure at all n locations
  Clone ID: MRT4577_133465C.1
gcagnagcggcgnagacgagcggggcgncnccgggncnncgcccagcgaacaccagagggannnncngnacagaacccagccagncggccaanaagncggangaacggaacaccccananaanannggngaagacgacgcgggcacganggnncaagngaacgnngannanaccnncccagaagcccccncgaaggcagccaccannnccaacacggacgnccccnnnccagnccccaagnngnacacnncacagcccannnnggcggagnccacgnagagcccccccagggccgccaagcggccgccagccagggcgacaacgggganggaaacacgcacccca

SEQ ID NO: 36690 - DNA, 241 bp, Zea mays
  Clone ID: MRT4577_133466C.1
ggtcgcccacgcgtccggcacaagaggggcctccgcctcccctgcccccgtttgcttatcgcgcgcataatccggttctggccgcgatcattggcttcttccccgaacaacccgccgcgtttggcacgcaaaacaccttctgggcagggtccaaggcaggggccttcactctcggggacgggggcacttcccggggcgttctccaatctccaaatcttccgcggggcgggccccgccgccc

SEQ ID NO: 36691 - DNA, 309 bp, Zea mays
  Clone ID: MRT4577_133467C.1
aaccagttgaatcgtaaaggacttcaggcaagtgtttctcaccattttttatttcccccccaaagaatatatatgagagctgtgtatctaaggtagaaaataattaggctttagaacacaagctgctgtagtttttgtcagttctcaccatcttttcaggaacatcatattcagcaaaccaaaatcacgtctcaaacctcattgtcacacttaatcatgttcttcttagtcctaagtttcacttctgttttttaatctcatgattaaatatgaacaaactgaattgttgcaacatggtattttaaaatt

SEQ ID NO: 36692 - DNA, 381 bp, Zea mays
  Clone ID: MRT4577_133468C.1
ggaagaagccccacagtaaacgtttgggctttgttttttttttatttaacaagaaaaaaaatgccagtcacaaaagtaaatcacagtttgggggtttgtttttaaccccaaaatttgcccacaatttcaagggttttgactttttaaaaatacacttttttcaagacccccaaataaatagttgttttcaatttactggctcaaggtttgaaaaatattctgggcatacaaatccatggagtaccttcccgggcggcccttttaaagggggaatttcaacacactggggggcgttactaggggatcccagcttgggaccaaacttgggggaattatgggcaaaagtttttccttggggaaattttttttcccttacaattt

SEQ ID NO: 36693 - DNA, 292 bp, Zea mays
  Clone ID: MRT4577_133469C.1
ggcgcgcacccacccgccggtcttcgatctcggatccgcgtacccgtaccaggtccgcgatgcacatcttctctaagactctcactgtaaagaccatcaccctcgaggcggagagatctgacaccatcctcagcgtccaggcctggatgcatgactagcgactgctttccactgcacagcacacaactcatctccgccggcttgcatactatagcgacggactgacacttgaccaactacacaatctacacggagagcgccctccagcttgctctccggcttatgggatgca

SEQ ID NO: 36694 - DNA, 671 bp, Zea mays
  Clone ID: MRT4577_13346C.1
ctcgaggccggccgggaaaaatgctcccagcgtaacagtgtccttcctccatcttcctcctccactccactccaatttccctctcctccatctgcgcctctaccctgggcggcacgatgcccttcagctccgctcgcctctgtagcacaagaatatgcaacgggtaccgcacggcgtcagggcacacgggaatgtctctctatatatgctgatcctcacaacacatcagcgctcccaagccaccatgctctcctgctgccttttctcgtttcatgtcagcttcatctgctaccctataggatcgagaatatgaaactgccactgtaacagatgtcttgaagtctacaaggaagagtgctgatgcatgttcggtctggtgcaccagagaggatagcggctatgactatgccaaatctatgactcaagacaacgtgagatctttattgggtgccaaatctgaacagaatatgtcgatcacgtccaccgtcactgagagagactatctccggaaaaacatagtggagggaaggacttccgagccaactaagggtggctgacttcatgactgaagagaacacactgatctcagtgagtcccgacaccaaagtcctgcaagcaatgcatttcatgacagaaaaccgcgtcatacacatcccggtgatcgacactac

SEQ ID NO: 36695 - DNA, 206 bp, Zea mays
  unsure (1)..(206): unsure at all n locations
  Clone ID: MRT4577_133470C.1
gaggccaangntcagagaggcgatcctgtaattttttagctttaaaccaaactgaagaagggtaaaatggatacagctattttaattttaatctaagacgactcttgcaaatagcaataacatgattggcatctgcttgtatcgcttccaaaaaaaaaaaaaaaaaaattaagcttaaaaaaaaccaaaaaaaaaacctaaaccaa

SEQ ID NO: 36696 - DNA, 385 bp, Zea mays
  Clone ID: MRT4577_133471C.1
aaaaaaaaaaacccggggaactttattaaagggattaaaacaggggacaaacaaacaggggcaaaaacggatacaggaacacccttgggctcgctccgggtaattaaagcaacggggggcaggcaagcaaaaaacgcccggggagaaaaaaccccggttattctgctaggacgaaggcaggcaggggcacgaacgaggggggcgaggggcaaaaaaaacgggggttaaaaaggagggggggattttccagggggggggggagacctcgcaccaattccaaagcacgacgtaggggccgtaaaggacgccgccgggccacatggccccggggagggcattaaagtggagggaaagggtgtggaccatggggacaaaacggaagccg

SEQ ID NO: 36697 - DNA, 577 bp, Zea mays
  Clone ID: MRT4577_133472C.1
ctggtatctgtctactgcgtgatgacgggaagatgatcttgaacaatttctttagtacctgaggaaaggtttacaactgccatctggttcttggatcctacgacaaaagaatccctcggctttgccttcgtgtctatggctctgtggcaagtgcaagacgctccatgaagtatctgcaccgaactgtacttgatagctatctggacactggataaaatgttatatgctaactgaactgattcattccattatgcataggtctataggcttgcttggtgaaaatggctacatatgtcatgttatacgtgtatactaatgtcaagtcatctattactaacattagtacatcaacacatttttaagctactatactgccttgcatgtaatattgtcttatgcttatccctacccttcccactttatccttcaaatccctgatgtcttacatacataaatgcatctatcttgtgctctggaaactatattcagacaccctctaaaacttcaatgatgctatgctctgttcatattaaacctctggtgaaggtccttcaggacaggtattttatcacttatg

SEQ ID NO: 36698 - DNA, 394 bp, Zea mays
  unsure (1)..(394): unsure at all n locations
  Clone ID: MRT4577_133473C.1
ctgcggtggtgggtgtgggacttgaacacggatcccgcaccctcttcccgccgcgccgccgccgccgccgcttcctccccgccgccgggtaagatgtgtcgcgtgattcgggcgcatattanaggcccccgatgagagagtctcacgccaccacacgtggcggctttctccccagagcagcacgcgccgacgtatcctcagctttgctacaccagctgcgacagaatacatccccaaagcgaggcacaagaggagaccctctgacataacccacagaacggctgccccccctgactatacccccatcgccgccgcttcttcggacgaccttgtatgagcttccaacgacgatgatagaaaggaacccagctggtctcactactgccacgatcat

SEQ ID NO: 36699 - DNA, 2972 bp, Zea mays
  unsure (1)..(2972): unsure at all n locations
  Clone ID: MRT4577_133474C.1
cgggatcatcctcattcttacgttcttcctgtatcttttgataataaggacattcagcatgaatatcctagcccaacaccaaaatctgacagtaaggaacctcttgtggacaactcagtattaacatcagtagggcctgaaatgctagcgacaacttctgtctctgatacatgcaaaacggaggagtttgtgaatcagcaaaaagcacttgaagcagatgcatcaaatgcttcacttaatcagcctcacatttccgctgtaccttccgataaacaagatattgagtgtgaatgttctagcccaactccaaggtctgactgtaaggaacctcttatggacaactcagtattaacatcagcggtgcctgaaattctagcaacatcttctgcttctgataaatgcaaaatggaggagtttgtgaatcagcaaagaccaattgaagtggatgcatcaaatgcttcacttaatcagcgtcctcgttgtcacattttcaatgcatcttctgataatcaagatgttgggcgtgaatgttctagcccaactccaagatctgactgtgaggaacctcttatggacaactcagtattaacatcagcggtgcctgaaattctagcaacatcttctgcttctgcttctgataaatgcaaaatggaggagtttgtgaatcagcaaagactaattgaagcggatgcatcaaatgcttcacttaatcagcctcgcattttcgctgtatcttctgataataaagatatagagcgtgaatgtcctagcccaactccaaggtctgaatgcaaggaatctcttatgaagaactcagtattaacatcagcggcgcctgaaattcttgtaagatcttctgcatccgcttctgatacatgcaaaatggaggagtttgtgaatcagcaaagaccaattgaagtggatgcatcgaatgcttcacttaatcagcctcctcgttgtcacattttcactgcttcttccaataatcaagatattgagcgtgaatgtcctagctcaactccaaggtctgacagtaaggaaccttttgtggacaacttagtgttaacatcagcagtgcctggaaatctactgacaagttctgcagttgcctctgatacatgcaagatggagatcttgaataagaaaataacacttgaagcagatgcatcaaatgctccacttaatcagcctcctctctctagcgttttcgcttcatcttctggtgatgaccacgttgatgtgtgtggacgtcctagtccaaatccaagacctgagggtgagcagcctctcatgggtaactcagggttaatatcaacagtgcctcgaaatctaacttctacttctgcatctgcttccgacatatgcaaaatggagatcttgaatgagaaaagaacacttgaagcaaacccatcaaatggtttgattactcaatctcctcaacccaaggttttccttgtaccatctcctgatatcctagagtgtgaattttctagtgaaacacctaggcatgagtttaaggaacctgttgcggacagctctgggttaacttcagcagcacatgaaaatttagggactaagccacatgtccactcaccagatgcctttgtaccaccaaagtctggtgctctaactggggaattaggtgacacgaaatcagattttaaaggtgaagaaattattcaaaaagagcaatattttggaagtgaatctattgccgctacaagagagaatttgttaattgatccttcctctggtgttgagtcgatagatgtgtcagatgtactggattctttaatggaagaaaggagtggaacttcgtacatgccaggatcaatagaggacttcctagccgaagaagaaccacaatactctagccctatcgcattatctccttggggtgaacctagttactaccaaggtgatgctgttgattctgcgctatggggtactcaagatttgatcaatgatatgtggtcattgctttcaccaagacctatgctccaaccttcatctggtattggaactgaggggaaggaaacttttgatatcaacgaggtggctgtgacccatgttagtagtgattattttcaaaaaggatcaatgtttggggaggaaaatgtgaaccaggcaaacttgagtgctgctgcagactggatgctgcctgagcaggtcccatcaataccaaatggtatgtcaacatcgtcagtagatgagagcaccatagttttaggttctcagccatcaaccaatcagagcttagactggggtggtactacatggagtattggccagaatgccagcgtgtatagcaatgaaaaagcagagccctcgagtaaaagctattgggaagaaccaaggaagcaggaaaccgccaaatccagtgtttctatttcaggacaggccattggaaacaacaagggcttggaccctcgtgataatgctgctaatcggggcagccggctgagtcatcatcaccgtggcaggtactcccaaatcagtgaatcttggctacttagttcaagtcactctaggagtaggtctgatagatttggcagcggtgggtcatcaagatcaacttcaaaggggcaatctaggggctaatgtaaattgtcaagtgcaggagagaaatgatgcatcttgtagctaacctgcatccttgatctctgcagcaggaatagttttctttttaaaattctttgtcatatctttgcagtttgtataggctaattacagtttagtccactcagactgtagcaaggagcatatatgtttagcatagaggtatttgactgcccattgcccaaggagtagattcagctcttgggcatggtctgtatcatcctgacattctgttggatggagctccaattgtaccaccggcatctctgttgacaccgaaacgcctgatgcgttggaaacaattatatctgattgattggtttaactccgtggaaaaaaaaaaaaccccnnna

SEQ ID NO: 36700 - DNA, 465 bp, Zea mays
  Clone ID: MRT4577_133475C.1
gtaaagctggctcgcccgcctgaccggcccggacacttcctggctggaccgacccacgcgttcgcggtcaatgaaggtgaagtgccctatgaggaagctgggttcaatggctacgctcattttgattccagcgacatgtcaacatggcgcccccttaaaatgctggacagcgcagctctgtccgacaaaaggccagatgaagttccacagctcttggagtccatgctgagcaaacttgttgaagaatttgaaaatcgtctaaacagccaaaatgaactggtcaaagcggctctaaaaaccggcattgataacactagatcctttccaaaatcaaaggttctggttgagaccactcctaatactagtgggagaaagatggatacagcagatatttactgtaaccataaacaaacaaaaaaagtagcatcaagtgaattggcactgaagcaatattcaattctacaa

SEQ ID NO: 36701 - DNA, 347 bp, Zea mays
  Clone ID: MRT4577_133476C.1
atcccccacggctgaccatacgctcgttttcgcatttatttcctctccctgctgcacaccagtgccctccggtacctctatgcgacggccatctccacccccatcgacaacttcccttttatcgcctcctccttccgacacaagtgcgtgctggctttttacctcaccaacccggtgcactccaccacgcaatccggtattccggctactacagctttcccttccgccgcctaacacgtcactcccactttgttctggactgtcgtccttactttccacagccagttctcactctctgtctcctattactgtgagactacatcttatggaccttttcaccggcctta

SEQ ID NO: 36702 - DNA, 475 bp, Zea mays
  Clone ID: MRT4577_133477C.1
gggggaagggggatttaattcgggggacaaaaaaagggtggggcacgggggcgccgaaaaaaaaggccataaagcattggcctgatagggacccccggggctgaaactaccctggaaaaaaaaaaaaaagggggtgggttaccatccaacgaaacagcacttgggaatactccaaaaaaactatgcggggtgggccaacttttcccgggatatgctcaaaagttggggaactttgtactggactccaaaggggacaaaaaggggggtgaaataattttcccaggaaaccattttccgggaaggggattttgggcctttggtggtggagtcaccctttcgaactggaaatacacaaagcctggagtttttttggaaaaaaaaatatgcttaactggaccaaacttggaacactcattttgggaatcatttcgaatatccaaggcaaaatcaggatctggctccaatgggggggaaa

SEQ ID NO: 36703 - DNA, 2379 bp, Zea mays
  Clone ID: MRT4577_133478C.1
gccaagtgcgctacccactcagtattccacgcttgacactccgtgacggacgcgcgccctttcccctcttctgcgactcattccggagcgcgctgcctccgatccgcggcaccgcgtcgcgtccgccgatgacgagggcgcacctgccggcggcggcgcagcggcggccgacggtggcgctgcttctgggcctggcgctcgccttctgcctcgccgtcctctccatccagtcctccttcttcgccgccccaggggcgccgggcaggaggctggatctggacgccgacgacgtgcgcgagctcgcggggttccagtcccgcgtccagcagtgcgtagctagcagaggacttggtctcacagcacatattattgatcactgcaagctggtccttaaatttcctgaagggaccaacagcacctggtataatgctcaattcaagatttttgaacctctagaatacaaatatgatgtctgtgaaactatcctattgtgggaacagtaccgcaacatgacaactgtattgacaagggaatacttggatgtgaggccggatggatggttggattatgcagctaaaaggatcgcacagcttggtgctgataaatgttacaaccacactctctgtgatgaacttcttagcattttactgcctgctaaaccccctttccatccacgccagttcgcgacatgtgcagttgttggtaactcaggagatctcttgaaaacagagtttggacaagagattgatgcgcatgacgccgtgtttcgggacaatgaggcacctgtcaataagaaatatgcaaaacatgttggattgaaaagagactttcgactggttgtccggggtgctgctcgaaatatggcaccaatactgaagggctcctgtaatgctccgatgaggcacttatcattaaaagtttgacgcacaaagaaatcaatgcggtgataaaggaacttccaaatcctgtctacctttttcaaggtatagttttaagaagaggtgctaaagggactggcatgaagtccatagaacttgccctttccatgtgtgatattgttgacatgtatggttttacagttgatcctgggtacacggaatggacacggtatttctcagcccctaggaaagggcacaatccactgcaaggccgagcttattatcaacttctagaatgccttggggtcattcgtatccattcccccatgagagcacagagagtggaagattggtcagacataccaagcaaagaagagatcagaagggcacacaccatagcttttcgtctaaagaagcatgaaactggccagctagctgaactggggccatttagcaactgcaaggtatggggaacagtcgacccagactacggaccggtatcaggtacttcagacatgagcgagacgcgcaagaattcaaactacagcaagtgggagttgcttccgtttgagaagctgagaagagaagcgcaagaacaccatatccaaatgggtggcgtgtctctatacaagatggacggaaacaagttggatgatcttgtctgtgtgaggcatcagcgttcatcaagttaagaccgtggccgcctaagcctagttgtttggacgctgaattgatttcatggtggatctgaaaggatgctagacagcaagagccagaagatccgatgaagcagctctgctgtacccacttgtaaaattacatgagccatcgggttcagagcgaggcagccctctacctggaatatggaattcttttattggttgttttgggacttgtagccttctaggaatagctacttaagctgtctaggggttgttatgcgcacaccacatgacatggttttcacttcttttaacacagctgtaactgatgcaaatgggtcttgccatttctcaactatgaggtgcagttttgttaccgatccagcagtctctcgattccaaattcgtgacgtttgttgctaactgacaccttatttgactgtcccagttgagttcatttacaggattaatggatacccttcaatcttacaatggtttaatttcagcagacaacgatctgcatctgtggtacccagatctgcatgctccaagagtgttagatagcagcaaagtctctgacaaaaatgaacatcggacaatgatctgaacacacatcttacagaggtgacgacatcgtcctggggactctttttgtcagttctcttggagtgcttgaataagagcagaagaatagtagttcagttctctcacataactcccaacagatgtatgttctgatcttagttctactcgttctgtcctgaaaccaggacggtgttagttttggcgacaaatgatctggacttcttactgaaactaatcactgaacatgttcatgg

SEQ ID NO: 36704 - DNA, 448 bp, Zea mays
  Clone ID: MRT4577_133479C.1
tttttcttttttttttttttttttttttttttcgctcgttttttttggtttttttgacccccaaaaacctatttgccattatgttttataatttggggcaaaacttaatccaacatgttatacaggacaggaacccctttgacaaaaaccaacacattccctatttttcaagggtttttttttttacctcatcaaatagggaaaacaatataattcattcatgctatattggaggcaaaaaccaacttccgacaacacctgggaatttatgcctaccaccaaaggccgggggagcaaaaacccaaatgaaccaacccgcttacctttaaaactgaccactttcatgcaacaccactggtgatgcaacacaaggacttaccctgtttactgggactgacatgacaaaaaccttaaaccaaaccaatgggacccaaccaaggttttggag

SEQ ID NO: 36705 - DNA, 112 bp, Zea mays
  unsure (1)..(112): unsure at all n locations
  Clone ID: MRT4577_13347C.1
aaaagtgtgcgaattgctgttattgatcgtatnagaaagcgttctgcgtgatcgtgtcannntgtcccacttggtggtattggtgcaggaagtattggaagatgctacaaag

SEQ ID NO: 36706 - DNA, 369 bp, Zea mays
  Clone ID: MRT4577_133480C.1
agctactagtcggcggccgccctggggcgtcgttatcgcgcgatgtccgacttgtgccccagtcccacagccaaggtcacctagggcggtaccggtaggccggcctattagctcctctctacgaggtcactcctgagcctattcgcgtagttcgcgatgacgactagccccaacgcctacgcgcccgagctgctgtccagggccccgccgggcctggcgggcgtgctggtggcggaggaggccgactagcgggggtccttgttgaggaacgggcgcagggtgctccgcggggcgcggctccgggtgcagatggcggcgtcgccgcctatcgagtttagtgtgaagaacaaggcgggccatttggctgct

SEQ ID NO: 36707 - DNA, 279 bp, Zea mays
  Clone ID: MRT4577_133481C.1
ccataggggtcttgaactacacattaaaaataacatcaacactccgcccttttgaggataataaatcacaatctactgcttaggcctcgtgaaaaaaaaaaacacacgcaaaacatcgcacagttcgtaaaaaaaaagattacggacaataaaatatgacaaccgactatacaaaaaaaaaaggtttaacttggacatttcattgaattttgcccatggccatccttccggataagacgattcttagccgtctccgcttttggtctccaggattggatc

SEQ ID NO: 36708 - DNA, 422 bp, Zea mays
  Clone ID: MRT4577_133482C.1
acgctggaatctctccccggtcgggctcagcaatagagtataaaacctgaaccctgcacccttgaagcgcccaacccgccatattcaagagccctcatcgaaagcatgaaggagatctgactgatggcttggggtcgcggtggtccgctacacctgaatcacaccatcgaagtcgttcgaacccggcatgtgctcgagtaggggtcgtcgggtacactgagtgtgtccaggacctcttcgtgcaagctcgatgatcggagagctcgtcgccatgaaaactgagatggatcgccgccgtgaatctatgcctggcgtggtcaagaacaggtaccacaagatgaggcgcatggaggatgttgtgacatgttcgtgcgaggtctaagccgtcgtctcccaatcaactttgggttgctggatcattg

SEQ ID NO: 36709 - DNA, 580 bp, Zea mays
  Clone ID: MRT4577_133483C.1
ggtcgacccagcgttttgacgacccatgcgtcgtccgcggcataagagccggactacttggacaccttgtacatcctgctgaccgaatccacgagcggggctggggccagctcgttcacttatactgcctcctgccctgacgttatcaccgcagaccccactcagcggccacaatgactgcgtggtcgagcctctatgagtccgtccgaggcaccacctgccctacattgctgaagggtggggactgccttgctcgcccaaataagccactcagagtcctacggagtcaggttgcacttcaactactacaaatcaaatctcgccttaacgcgcaaactgttgacagattttgatgctaccgacatgcatcaacgtgaaggaaaaagaatgtgacttcctcacgctttatgtgtctttaacgttgacgaacaaattgatctcctcaacgatccctctagatataagactggtatggttaaggcttgcgggagttatatgcgcagctgctccacccaaattgagagcgcggtatgaacattctgtgctccaaaggccccaaacaacgcttcttatgttctgc

SEQ ID NO: 36710 - DNA, 555 bp, Zea mays
  unsure (1)..(555): unsure at all n locations
  Clone ID: MRT4577_133484C.1
ctataggaacacaacttgaaaaaccaaccagttttagcgggtccagggtacaaccgtacaagcttatttcttaaagccgagcacaagcgcccgaggattttttacatttacagacgtcctccaatatgaaaacacgaaacatggaatactagcagcgccgtccaacttttaaaaatcctgcaaaaaacaaactcaaacaaattaagcgaccgcgggcttgtccttaagccaggcgtcaagcggtttgccgatggagtaaacgatgaagccgatctccctcagtttttccgggtcaacaatgttgcggccgtcaaaaacaaaggcgggcttttgcatgttgtcaaaaatcttctggtagtccagggtcttgaactcgtcccactcggtcaggatgcacaccccgtgggcgcccttggtggcctngtacgcgtcccacacgcagttcacctgtttaatggccgtggggctcgacggttgcaggtgcatcgggtggtcccagtcaaacttgttcatggccaggtcccgctggatctggtcctccgtcacctgggggtc

SEQ ID NO: 36711 - DNA, 1249 bp, Zea mays
  Clone ID: MRT4577_133485C.1
gtgtacgcccactgggtccccgaggagaacatcatcaccaccaacctgtggtctgccgagctctccaagctcgccgccaacgcgttcttggcccagaggatctcgtccgtgaacgccatgtcggcgctctgcgaggccaccggcgccaacgtgtcggaggtgtcgtacgccatcggcaaggactcgaggatcgggcccaagttcctgaacgccagcgtggggttcggcgggtcgtgcttccagaaggacatcctgaacctggtgtacatctgcgagtgcaacggcctgccggaggtggccaactactggaagcaggtgatcaagatcaacgactaccagaagagccggttcgtgaaccgcgtggtgtcgtccatgttcaacacggtgtccggcaagaagatcgccgtgctcgggttcgccttcaagaaggacacgggcgacacccgggagacgccggcgatcgacgtgtgcaagggcctggtgggcgacaaggcccaggtgagcatctacgacccgcaggtgacggaggatcagatccagcgggacctggccatgaacaagttcgactgggaccacccgatgcacctgcagccgaccagccccacggcggtgaagcaggtgagcgtggtgtgggacgcgtacgaggccgccaagggcgcccacggggtgtgcatcctgaccgagtgggacgagttcaagaccctggactaccagaagatcttcgacaacatgcagaagcccgccttcgtcttcgacggccgcaacatcatcgacccggagaagttgagggagatcggcttcatcgtctactccatcggcaagccgctcgacgcctggcttaaggacatgcccgcggtcgcttaattcgtctgaggtgctccattggattggatccggggaaggaagaagaggaactggttgaccattcttcattacagtttgtttttttttgcaggattcttaaaagttggacggcgctgctagtattccctgtttcgtgttttcatattggaggacgtctgtagatgtaaaaaaaatcctcgggcgcttgtgctcgggttgaggaaatatccttgtacggttgtaccctggacccgctatagctggttggttcttcaaattatgttcctatagaagccaaagttactacacgatcgatatgttctttttgcagaataacaatacttgtctcacatttcatcctttcatctttccacggagaatgtttttcttctttttttgatgcaaa

SEQ ID NO: 36712 - DNA, 333 bp, Zea mays
  Clone ID: MRT4577_133486C.1
ccggccgggatcacccataacattttgagcattcagaagccacctagcgaagcgcactagcaacgacctaacaacagtggctaccaagatattatgcctctttgcgcttcttgccctttttgtgagcgcaacaaatgcgttgattattgcacagtgctcacttgctcctagtgccattattccacagttgcctgcgtccagttacttgagtgggcttctgacacccagctgtgcaagcctacagggtacagcatgcgcttggggggacccccctacggcagccggttggccggttgcggcggcggtggttggtgcatgtggccatacaaacca

SEQ ID NO: 36713 - DNA, 244 bp, Zea mays
  Clone ID: MRT4577_133487C.1
tcctcctgttcttttgaaggggggaccccaagagaggggccccgcttgttgcattccaatgggaaccgtgcccccggaatctttttctttcttggccggcgcgcccttcccccaccggattcaagggacacccctgtatttgagtggaagtttgggggaacctcctgaatcctatattggattaaccaaaaattaaatggctggggggaccaattgagccaaatggaaggcaacacctaacccc

SEQ ID NO: 36714 - DNA, 413 bp, Zea mays
  Clone ID: MRT4577_133488C.1
tcgcgatctatttttttttttttttttttttttttttttttttttttttttttttttttttttttttttttttttttttttttttttttcggcccgggccccagggaaattggcaccctcccaaccgtcccatttttaaaccccttggtatcaacccgttccaaggggggccgaattttaaccttaacccagggccccgaatggcgatgcctttttcgaattccttgccggccaattttttagccccatttcaggttgggccccccaaccagggtcaaaccttgtttgggaaagccttaaatttttttaaacaaaaccccttccccggcccaagcctttaaaaaaggggtccttggggcccatccccctaaaaggtttttggaaaataaaataaaaaccttttccggccccgg

SEQ ID NO: 36715 - DNA, 466 bp, Zea mays
  Clone ID: MRT4577_133489C.1
agcagtggtaacaacgcagagtacgcgggaaggtttgctcaaatgtggaacgccattattacaagtttccgcgaagaggatctcatagacaatagggagaaggatctgctactggttccagcctgtaaagaccgtgaacttgatatattccaatggccgcctttcctacttgctagcaagatcccaatagcactggatatggcagcagacagtggtggaaaagaccgtgatctgacgaagaggataaagtcagatccatacttttcctttgctatcagagaatgctatgcttcattcaagaacatcatcaataccttagtatttggtcagcgggagaaagatgtcctagtacagattttcacagttgttgataagcaaaaaaaaaaaaaaaaaaaaaaaaagtactctgcgttgttaccactgcttgcactgagcaagaagtttgttgaattacttgagttactgc

SEQ ID NO: 36716 - DNA, 230 bp, Zea mays
  Clone ID: MRT4577_13348C.1
cggacgcgtgggctgacgcgtgtgctgactcgtgggcggacgcgtgggctcttcttccgattgttggtggtgtagctttggcatcccttactgaggcctcctttaactgggctggattttggagtgcaatggcttcaaatgtaaccttccagtcaaggtatgtgctaatctagaaacttatggtgaataaagttgaatctctcgacaacattatcctattctcgatcatt

SEQ ID NO: 36717 - DNA, 403 bp, Zea mays
  unsure (1)..(403): unsure at all n locations
  Clone ID: MRT4577_133490C.1
agggggccgccctttttttctcnttttaaagaaaaccaacatggccggggtgggtttttacattgacttaccgggggttcatttaattaacggaacaaaaaatttaaagaccccggttccaaaaattttgctggatgggacctagtcctggggaaggccgaaaatggatattttggttcagcacacatgaatggttgaccccccaaggaggggccctcccgtcttgtgagagctccccacgtgcgcaaccatttgtgggctccctccacctacgtgccccagtcatctctaaggggcccccacattaaaagagccctctgtatgcgggccccctgcgatcatcccacccaaagcgccttaaacaccgaggtagaaaaaacacccgcgcggggccccggggggc

SEQ ID NO: 36718 - DNA, 181 bp, Zea mays
  unsure (1)..(181): unsure at all n locations
  Clone ID: MRT4577_133491C.1
ggggagcacgcgcagcgcgtctccgtcngagaacccgtcgacctcgactttctctggccgcgggattcgtcctgctccccgctccatccatttctccctcctatggcgcactccttcccctagtcgcccatgggcgcgccctctggttcttcccctggcgtctccttctctggttacagct

SEQ ID NO: 36719 - DNA, 515 bp, Zea mays
  Clone ID: MRT4577_133492C.1
acagcagcaggcaaagcaagcaagagaactcagcccatcattcatatccatccaccaatggcgctcacacgccgttgggcagcctccctcctgctcctcctcgccgcaaccctcctcgcgggctcggccgcggccacgggaaaggccggcaacgtcgtcgtgttctggggccggaacaaggacgaggggtccctccgggaggcctgcgacaccggcacgtacaccatcgccgtcatctcctttctggacgtcttcggccgcggcaagtaccacctcgacctctccggccacgatgtctccgccgtcggcgccgacatcaagtactgccagtccaagaagttcctcgtcttcctctccatcgggggcttcggcggccagtactccctgccgaccgcccagtccgcggccgacgtcgccgactacctctggaacgcctacatgctgggcacccgcgaggatgtctaccgcccgttcggcaacgcctacgtggacggcatcgacttcttcctcgacgg

SEQ ID NO: 36720 - DNA, 197 bp, Zea mays
  Clone ID: MRT4577_133493C.1
cgctagcgccttcctagaaccttctcgtttctgtaagatagttctcgcctctgtaagataaactaatgcatgcgcaagctagaaatagtccgcttgatccgtcacgcggaattggttaaaaaaaaaaaaaaaaaaaaaaaaaaaaaaaaaaaaaaaaaaaaaaaaaataaaaataaaatataaatgggggcgctcgt

SEQ ID NO: 36721 - DNA, 506 bp, Zea mays
  unsure (1)..(506): unsure at all n locations
  Clone ID: MRT4577_133494C.1
ancaggtctcaggagctgcagcacctggggctgccngagaacaaccaagnagcncaggcaaaggggacacccaacgcgcagcaacaacaannncnnccanncaaccaacggncnacacggaacccngcngcnnannggcagcaacaacnannaccanncagccagctagctactgggtggtgtcagcaacaacaacttcttccatttaaccaattggccgcactgaaccccgctgcttatttgcagcagcaaatactactaccatttagccagctagctgcagcaaaccgtgcttgcttcttgacacagcaacagttgctgcctttctaccagcagttggcggctaaccccgcaaccctgtgacaactacaacaatggtggccctttgtgcaactggctgggacagaccgagcggcctgctaccaacaacacatgatggggtggggccctgtgggagatggctgatgagggggaatggaatgatgagagggggggggatgatgggt

SEQ ID NO: 36722 - DNA, 425 bp, Zea mays
  Clone ID: MRT4577_133495C.1
cagaatctatttcagtccaaatgaaggggatttccaaattaaaagctatgtttccttgttcgcagacaacaaatgaaggaaaattctacagcacatgacacattcctgccatcaatgaaagattgggcataggtgcacaacaaatttaactattacattagatgccaaagctgaggtttaaaaaatacatatttttagtacctaatgtcctgcaagaaccagccaaccggtacagcctgtcccttattctcctttggtttcaacaccaacagaaaatattcattttttctctgctactatttaacttggcacacgaccagagaagttcaatcatttgaacctactattgaacttagaaaagcattacaaaggttgattttaccgaaaggaaaaaagaaagaaaggcacctttagccctgggaaat

SEQ ID NO: 36723 - DNA, 421 bp, Zea mays
  Clone ID: MRT4577_133496C.1
aaaaaacaccaaaaccggcctggggggggggcaaaaattttgggaacgacccataagcattaattaaacccacaccccctttttggccaacattttttccttggggcatagggaaatctacacaaggccccaacaaaaataaacgaaggggggtggatttcaacccccacgggccggacaaggggcctaaaaatttaacgttcggttttgggaaaaaaggaaacggggaggcgcggggcccccccaaaaggctcccaacgggctggtgttgcccgttccccccaaacgggttttgggccttggaggaacccgggccggggtttttcctgccgttaatgctgttagagggccccatgccctcggggggcattgtttggaaaaagtaagaggccctccccatgtccctcaagttttgaaaggg

SEQ ID NO: 36724 - DNA, 891 bp, Zea mays
  unsure (1)..(891): unsure at all n locations
  Clone ID: MRT4577_133497C.1
cccacgcgtncgtggagaattgtcaaccaccgggatatcattccaacagggccacgtcttgaggggctattgccatgtggaagcatccatttatcttacaatttggggacgcaaaagatgcaccggtaagtaacagcattctagatgatgaagaccaaggtgacgtgataggggagtacacacctgatgttcttgttactgaatttatgaaaggcgagaagcaacttgtggaaaaactactgcaaacagaaataaatttactccgctcaatcagggatggttcggctcttatgcagcacatggaagacttctactatgtcacccttcttgagaatgtgagatcaagttatcaagtggcagatactgccaatgatgaataccaattgacagcgtgatcctagtaaaactgcacagctgaacatcatggactgtgtttccctgcaaaaacttcatttctgaaggacactgaatggggctatgaaagtgtgcaatccttactcttagtggaaacatgaacaggcagaacagccttggacctcagtcaggatagaggaaatgaaactggtttcactggcggatatacttgtagcaccgtgtcaattggtagatatgttgtttgagctattttccgttgatgtagctagcacactttggaatatattgtatgatgtttgaaattctagaaaagttcatagacacctgggagaataactcaagaaatatccaagtccgttttggccaatattttttttcatggagaaacttgcacaccgtggtaggctaccggctacccaagggctgatagggtgtgttaatcgagtgtacgacctagataaaaatgttcaatgtgatggaactatatatcttgcatggaataaagtagcatcatgt

SEQ ID NO: 36725 - DNA, 1425 bp, Zea mays
  Clone ID: MRT4577_133498C.1
gggcgtacgtacgtgaacacacatcgatctccatatatctgtctagttagctagctagctagtagacatatggtgggctcgcagtacgacgacgacgatgacaatgttgttggtcgccggaagacgaggtggtacgctgtgaccggcggccgggggttcatggcgaggcacctggtggcggccttgctccgctccggtgagtggcgtgtccgggtcactgacctcgcccctactctagccctcggccatggagagacagaggggattctgagcgacgctctccgtgatggccgtgccgtctatgcctcggttgatgtctgcaaccttgaccagcttgccaaagcctttgaaggggtagacgttgttttccacacagctgctgcggatcctagcaagaacaacctgcaacttcactacaaggttaacgtggagggaacgaagaatgtaattgacgcttgcaagatatgcaaggtgaagaggctgatccacaccagtactagtgctgttgtgtttgacggcgttcatggactttttgacgcggatgagtcattgccatacccagataagtttcctgatgcatatgcacaaacaaaggcagaagcagagaagttagtcatcaaggccaatggcattaatggccttctaacttgttgcatacgtcctggtagtatgtttggcccaggtgacattatgatgccaactttggatcgttatggatggtcaaatgttactattggtgaagggaagaactatgatgattttgtgtatgttgaaaatgttgtccatggtcatctttgtgctgataagactctttctactattgagggtgcaagaaccagtggaggaaaagcatactttataactaatatggagccaatgaatatgtgggacttcttatatcttgttcaagaagaacttggatacaaaagaatattcaagataagggtacctataattgttatcaagccagcaagctatttgatagagtgggcatatagggctgttttctctcattttggaacttgccagcctcaaatactaacaccggcgaggattagatatgtaacgctcaatagaacatttagttgcaataaagctgttgaagaacttggctacaaacctattgtgacactacaggatggtttgaagaaagcggtgaaattgtatattcaactgagggataaagatttacctaagatatagtgaagttgtgatgtaaaacaactctaccaaaatatcataagccaaagccagaggtgatcgatgatgtcccatcaataaaaatcgggtttgtgttttttattataataaaaaaagctatgtaaaggactacgaaatattgttgtaatgctctaatggtcaggcatgtatttatgttatctgggacgtagacgatattatatttgcttttatgttcctctcatc

SEQ ID NO: 36726 - DNA, 335 bp, Zea mays
  unsure (1)..(335): unsure at all n locations
  Clone ID: MRT4577_133499C.1
caaagattctttatcccacggaataaaatcnnatctaagaacctttctaaaaataaaaaagacgtctttcacctcccctaattctattcatcacaatctattcactcattcctcttttattttaatactactcaatttactttcccattaaattcaaaacttctaaaattctccactttccacattcataactttctaaaccaataactttcatcacaatttataattccattactatattgcaatcctttaatcccctattcactaattccaaccactaatcttacataaaaataaaatcttcttaaatcctcttactctctaatatccatacc

SEQ ID NO: 36727 - DNA, 514 bp, Zea mays
  unsure (1)..(514): unsure at all n locations
  Clone ID: MRT4577_13349C.1
ggtaccctccgggtctcggccgggccaatccaanccaagacagtaagcggcagctctcgcgcagcggtactggtctctctggtgggtggggcccctgttcgccgctggcacgccaaggagagcgatgggccaccacaacccgcgacgggggagcgaagccgtgcgcattccacggaccgttccaccgcaccaggggaaggaggacacacatgatcgtcagcctctatctccagcggcctcaggcgctcccctggatctggtgtaaactacggcgcgcccctcaccatatgcatgattggcgctcatggcttcattggctcccacctctgcgagaagcacaagctcgatacaccccatgtagtgctacacacaaacatatactgtgatacgatccggcgcctacctgaaccctgtcgggctgcaccttgccatgcgcatctacttacgccatttcagaaactgtgatgactacagatgtgatgaccgaatacagactggcgaccagtgcctgaac

SEQ ID NO: 36728 - DNA, 441 bp, Zea mays
  Clone ID: MRT4577_1334C.1
tcgggaaaagcaaacgcatccctactttacaacaaccaacaaccaacaaacaacattacaatggagtccatcaccaagaccgcacagaacgcagcaacgtacgttcaagaatcgatcagcggcaccagtgcgaccgcttcgaaggaggccaacaagcaggaggccaagaactccaacgctggtgtcggagagcgtctctctgctgccggaagcgccatcggtgacaaggccgatgagcagaagtccgaggccaacaaggagtctgcaaagcagaacctttaaggattagcctacatcctgctcagccactggtgcttctcaaagtgatgtagcctacatcctgctcagccatatagtggttctcaaagcgtcccgatagtttggtgtcagtctgcgaaagccaaatgatagccatcattcatatgacacgcattgccgtcg

SEQ ID NO: 36729 - DNA, 277 bp, Zea mays
  Clone ID: MRT4577_133500C.1
ggcgagggctccggccatcgaggtaagtaaaggcccccacttctgccgctccccaggatgaagcctcacgtggagcctaggcagatccccccagcctcctttcctcttcatttccttcacctgggacccaaggggcccccactgcgggtgctatggggtggtaagcccggctgtgtctgtgctgcctgagagtcattcttgaactctggagatgaaacatgggagccagtgtcccagaaatggcgatgggcaggccctgagtgtcatccccactccc

SEQ ID NO: 36730 - DNA, 323 bp, Zea mays
  Clone ID: MRT4577_133501C.1
caaacaaaaaaaaaaaaaaattttttttttttttacaccccaaaaaaagtttttttgtttaaaccatccctatttaggggaccaaaaccccacttatcctttttgggccataaaccctcaaaaaaggaaaaccaatttcaaattccttggctaggaaatcccttcggaaaaaaaaaacacccaaaattttaccaaaagggaaaaaacctttggccccccctttgtgcccacaccttttattcgaaaagaaacaaaacacttccccctttgggaaaaaaaaaaacccccaaaaaaaaaaaaaggcccctcttgtggcccccccc

SEQ ID NO: 36731 - DNA, 115 bp, Zea mays
  Clone ID: MRT4577_133502C.1
aacaaaatgttctttacccacaccggggagagaacgttcatgatcatcaaccgtccatcgatttaagacgaaaggaacatgtacaaccctcgaaagtgaatcaggaagacaacac

SEQ ID NO: 36732 - DNA, 462 bp, Zea mays
  Clone ID: MRT4577_133503C.1
ttggcttggaacctttgggctgatttatgtgcttgtttatgtgcttgctctttctctttctcttgacttacctcttagtgtagtgaagcgaatacgcgcgattgggtaaagacgctgcggtaggtgcatgcggatgagtattcgacgcgtgagactgagggttattattctgtggtggtggctactgctggttatgatggcgttgttcgggtgtagagtatggcgccttttgagcctaagattgaggatacggctaatactacgaaggatcctgatgagttagggtattctgtgttgataggttcgccttctggattcattaagcatacggctacttaacgtgagttcggcgttgctacttgcggtaagaagggactaggaggtactattgcgaagaagatagggtaggtatctgctgccggtactcatgatcagttgacgatgttcgggtagcgtaatacg

SEQ ID NO: 36733 - DNA, 260 bp, Zea mays
  Clone ID: MRT4577_133504C.1
gtgaagggaacgtttgtttcttaagcatggaacgggaatatcagttttcatagcattaacaagaatttcaaaacgttaccggggaaacacgaagcaggctggggctcgaaggggatcaaagttacacacctactccccggtattaagatcctagggtcactggttagagtaagactggctatacgatcaccaggattgtactgagatccgaaggaccggacccagggggtgacgactaatactttgggggggtggtcaaa

SEQ ID NO: 36734 - DNA, 228 bp, Zea mays
  Clone ID: MRT4577_133505C.1
taagctcggaattcggctcgagctctctctctctctctctctttctttttctctctctctctctctctctcggggacggtcgaacttcagccctccgtcccattcaacacttacgccatggcgcgcctgctccacgccgccaccgtacaggcgctcctggccgtctccaccaccgatctgtcggcgctcccatgagcaggcagcctgtccgccggcgacctggcccat

SEQ ID NO: 36735 - DNA, 374 bp, Zea mays
  Clone ID: MRT4577_133506C.1
tttcttcatacccttttttttttttaaaaaaaatcgcagatgaccctgagcaacaagatgatggtgatgggctcaaaccacgctatactggctcttgcatgtgagctcccagtcaaagcataggaagtgttgacccatgaggcgtccaccagggtatgcttacagaccagccccggtacaaatgacggactgcaaaaatcttatacctgctgtgcatggacaataggctggacaccttacggagatagacggctgcctccatattatcatgacgcatcaccagctcatatgacaacgagcccaatgccttaccatactgagcagtcttggacgctgcaatatgcaagtatacccatgcacagggcaactttcct

SEQ ID NO: 36736 - DNA, 762 bp, Zea mays
  Clone ID: MRT4577_133507C.1
cactccttagggcgattgggttcctcgaggccggccgggtagtagtttgttgaataactcgatcgagatagacctatcgctatcggtgtagcattcaagtagggaggtggccatgaacaacattgaatcgtcggagctcaggaaggtgttccaaatgttcgacaagaatggcgatggccagatcacgaagaaagagctaggggagtcgctcaagaacctgggcatccacatctctgatgacgagctcgatgccacgatggacaagatcgatgccaatggtgacgggtgcgtagacgtcgaggagttcggaaagctctaccgctccatcgtcggcgagggccaagtggacaagcacgacgaggaagaggacatgcgggaggcattcagcgtcttcgaccagaacggtgacggcttcatcaccgtggaggagctgcggtctgtgctgtccagcctcggcctcaagcaaggtcgcacggccgaggattgccgtaagatgatcagcaaggtcgatgccgacggcgacgggcgcgtcgacttcacagagttcaagcagatgatgcgcggcggcgggtttgatgcacttggtacatgatcgggactttggaggattgaagatgccttaatataattgcgtggatggtaagggcggtgtagatacttcgttcattaaaatgttcgcatggtacggatgtggcaatctaatgacatttcctcattagttaattatttggtttggagaaaaaaaaaaaaaaatttgcggcc

SEQ ID NO: 36737 - DNA, 142 bp, Zea mays
  Clone ID: MRT4577_133508C.1
tcagagtcgcgtcctcaaccaacacgccctctctagctctctgaatctgtgcttcgacccggccaacttcctcctccagatgcagcaagcactgccgcatcacgaccagcatcatgatcagcaccatgaaggccacgacgac

SEQ ID NO: 36738 - DNA, 485 bp, Zea mays
  Clone ID: MRT4577_133509C.1
ggccatatccacaactttctttgagccgctaaacatcacaccttggggtgactggtggccgatcgaaacgatgcaaatcacccagtcggtttttacaaaacaagtacgcggccaacttccttgggaaaccaccaaacttagtgtcttaaaacaggtaccgggtgggggcgagatcaacaaaactacttacctaaccacaccacggtgtgcaacacaacggcgggcacatccctgtttattggaaacaaattggcatcagcgacacccttcctgggaaactaaaaaggctaaaaaaaggtcctcacttggcgcttgctaactgggtgcggatgagcttacccgcgcataccatgttggacacggcggccttgacctccgtgtacttgcgggtattgaggccctactcggggttcacccaaaggatcgttggggtccagcaccgccagcatcttgacgatgcggtcggattatctcctcacaggggc

SEQ ID NO: 36739 - DNA, 417 bp, Zea mays
  Clone ID: MRT4577_13350C.1
atggcgcgtccatggcgcgaccatggcgtgcccgcgcggcccctgcttcagccgcggcgcgaccgcgcccgcccttccccggcgtccgcccgccccagcccctccctgcgtggcgcgctcggcgcgtccgcccgcccgagcgcactaccccgcccctgcccctgtccgacgcgtggcccgcggccacggcgcgcggcccccgtccccgccccgcccggcgaactcccctgccccgtccccgacgcggcctcggcggcgtgctcgcgcagccctgccccagcgcggccatggcgcgcccgcccggctcgccgcccctgctcgcggcgcagcgcggcgtgccccctcccggcacggctccccagccccggccacaatcccaacgtactagaaattggttacgttagttatttcatgtag

SEQ ID NO: 36740 - DNA, 5927 bp, Zea mays
  Clone ID: MRT4577_133510C.1
aaaagttctagctgaaaacaacagatttgctctacatgctgacaatatgacgattcagagcatttgatggatggtgcaactgttgagtttgactattcccctcaacgcgagagtgaaagtgagggctcgaatttgggttcagtatcatgtttgaaacgcgccgacgcgcggacgctcccgtcaccatcgcgacccatgcgtcgggtccacgctgaaccctttcaccggggcggcgaaagatctcagccgcgacgccgactggctcgagcgccgatgagcgatcgagcacccgagttagtaaactgtctccggtttctcctcggttgccaaagcctagtctcgggaagacgctgcgtacctcaatcccaccacacctcaataaccccttgtggtatccgaccaaccatttctgtaagccttcaaacactagcgcgaggaaaagagtagaaaatgagaggtgtcaagacggctcaatgtaagatggatacgcccgacgctggaacagcaaaaggaccattaaatgtaagccatcataagatctgcgatcaaaacgcaagtcagaaccttggcacaaggaggtcggcaaatataagaaatgtaaaacgaaacgacagacatgatattaacggggagcatcagtgcaccgagaatttttaatgtagataccaagtccaaggatcaactatttcctgcctttgaataagccaggagatttacagaaactggcctgtcttttatgagttatgactgctgctgatgctgcatgttcattgtatactttgtctctaaatcgagaagctacaccaaatcttattgtgtcatctgagagatcagtcaagtcaatgactgaacagcagttagatgaaaacagtgaaaagcatgaagaaaatagtggaaggcttgaagaacatggtggaaatcctgttcaaacttcctatgatcaaattgttaatggctgcagtggaagagggaatagaaaattctgcagtggaagaaggaaaggaaaaggaaaatgataaggaaaaagaagaggaaaatggaaatgagaagagcaaggaaactggaaatgagactgaatatgaaaaggtgaagaacataaaactggttcacatagattatattttggagaaggctgaaactggcgttcagttcgttggcaatgtcatgcgtagcagtagtcagacaaggcgggcacactgttggtttccttgtgttgatagtgccacagaacgctgtccatttgacctagaatttacagttagcatggatttcattgctgtcagcaatggtgacttgctttaccaggtatgcgttcagtcttgatcaagagatctggaggaaaaatattaatttccttgtttttgaagaactaacttttgtgaagtaacaaggaagctcttttagctttaatacacttggtattacagttcatttcttttttgtgcatgttagttatgttctgtttcctgatcttagaaggtctctagtaaggaagatccttcaaaaaaacttatgtgtacaaattgaacactccagttagtccacagtggatatccttggttgttggctcacttgaagttcttcctgacagaatcacagaaatgacataaatgtctcacacatatgtttattccctgctttggcaaagcttcagaacactattgcatttttccacaatgcatacaggtgctgatcaatctttttttttctgtgaaaagtgcttagattggtgttgattttattagtatctcaataagcttatttttaattgatttctgaaatttgcatttcttttgcagctgttatgaagactatctttctgcaccatttcccttaggtttatacaagcacatttttcttccatctgaaatgacaatattaccagcaagcttaggagcctccacatgcatcctcagttctgatatcttgcatgatgagaaagttatatagatcaggtgcgtttgtttctcttattttactacccaggcatgatatttctagggagctacagtgtactgctgattcaaggttggatgctcttcccaagaaccagttctctcctgccattaatctgccagaagctttagacaagcctggcagtcagcttgaaggtgtctccaccagctatgaaggaaaccaagctccagaatctgtgaacggagtggaaacgaaagagagaaagaaaaaagacaagaaagataaaaagcggaaacgtgatgaaaaacgattaaagaaagatgacccagagtatctagagaaaaagcgacttaagaaggagaagaaaatggagaaagagttggcaagaaagcagctagaaggtgaaggaagagctacccctgagcagccgaaaacagtgaaaccttcaggttcactggaagttttgcctgcaaggccaccagctccagtgctaagtgctgaaccagctgctgttcggagctctgaacctcaggtatcaagcaagggaaacaactgtaccccttaactggtggcttgataacactttgtattatgcattaaccttgcttctttgtatccccttaattagtggctcttggtaatgctttgtacacctgcattacattatagtcaagtattatgtttcataccttgcagtctgcactaacttgtaaaatagttcagataattggcacaagaacgaaactggcttatgcccttgcaaagcaatggtttggaatatacacaagtgcagaggagtccagtgacggctaactgctcagtatgtgaatctgatgttagtggtgcaactgctttgagctctactgctgcttcaagtgatttatatggaactcaagcaatcggttcatatgggaaagttcgttcattgaaagctgtagctgttttcaaatgttggagaagcagatgggaccagactcatttcggaaggtattttcatctttgatacggctattttctcatagttatttttttgtctaaataattgcaacactttggctaagcaactaaatcgatgtggagatgtacaagactattcatgatatgagttactgtgtttcagatactaatcatccttttttttatctatatccatagttgaaaattctagatagtatctgggtaggagtaaagtacctattggctgttttttttgtacgcggttatttcttaattgaagattatgtatatatagattgcttctgatagatttcaattgttcacaatttcagattttgcaggtgatagtggctccaagtcgtgcataaaatctagtaagatgtgacctatatttattgttagatgcattccatcttatcagtttatgcttggtaggagcaaaatggtttgatatgattagttatgaacatacatggtgaccttcatggaaataagctagtctgttcaagatagtttttttaggttaactagactgaatagttttgtagacctgtttgctggtctaatgctaatgctttattcattcagtgccgaaatttacagtggtgacttgtttgcatgatgtttagacaatttgtctgataagtggatcctgtcctgaccaaatgtctttttgtcaaagtggatcgtgtgatcctgtccttgacttgtggtttctattgagttccaactctagcctaccccaacttgtttgggactaaaagactttgttgttgttgttgttgagtgaattttgaggcttgcttctttcacgtacaaaaagtgaaataagaccaaatatttttttgggttcttattgatcatgaatttcattataaggcattatgattgtacacaaaatgagatcaagcttttctgcagggcatgagcttcctagcctctcttctcaagcaaattgatcggttcttgcaatttgacaactttatgcctggttataatggggtcttgactgtcagctgcattcgtacccttgtacgaatagcaaagaaggtgccatcttttgtatgccttgatcacatttttgaattggttgcccctttccgcaacatggacaaaccatggaaagttcgaattgaagctagcaggattcttattgatcttgagttacaccataaaggactcgatgcagctcttttgttgttcttgaaatatgtggacgaagaaaagtctttgcgaggttggattgctagagtactttttgatggttttgtatgctttgctatcttttgacatggaagctgttgaaggagcgacaaagttggctgttcatgtcttgcgtatatgtcaaacaagtattgttccttacgccaatgatcaaataaattttggcaactctaattggtcttctccatctgcttgctggcacaaaggcatacaataacgtatttcttcgtcatcatgtgttctgcatattgcaagttgctgctggaaggtccccaacattatttggtgttccaaaggtcgtcacaccccctcttgtggtcaaggacatctgtagtgatcagcacactaaagctgattcctcgattcctcaaccatcaaagcctcaggaaccttccactagcactcctagtgtccgggaggtcttacctacctctggccccactaaagatgctgataatatatctaactgcagcgaacgaaggaatgtggtcaaaattagggtgaagcttactgcgtcttccagtaaagcatctgatgctgaccacagaggccattttcatggtggaagaaatgaaaatgaaccgggtccatgtagctcaatgtcagtggatgcccctatggttgggactgcaaatgaaccattaaatgtaagcaatcataacattgaggaacagaactcatgtcatgaccttggatcaaggatgtcggcaagtgttagcaatgttaagctattggacaggcatgatatttccaaggagctacagtgcactgctgattccaggctggatactcttcccaagaatcagttctctcctgccattaatctgccagaagctttagacaagcctggcagtcagcttgaaggtgtctccaacagctatgatggaaaccaagctccagaatctgaacggagtggaaacggaagagagagaaaaaaacaagaaagataaaaagcggaaacgtgacgaaaaacgattaaaaaaatatgacccagagtatctagagaaaagcgacttaagaagaaggaaaagaaagagttggcaagaaagcagctagaaggtgaagagctacccctgagcagccgaaagcagtgaacccttcaggttcactggaagttttgcctgcaaggccaccagctccagtgctaagtgttgaaccacctgttcggatctctgaaccccaggtatcaagcaaggaaacagctgtagatactgcacgtgcagcagccaaaccaaggataaagatcagagtcaagcccttggtaagaaaatctgaagggaattaaaaaagattgtagaattgtggccagtctgccatcatttgtaaggattactgtacagcaggaaaaatgcgggtttagttattttgtgaatggctgatgtatcctgtaaaaaaaacattgctctgctctagtaatttctggggtaatcgaaatctgagttctagggtagtccatattttctgctgcagttgctttagtatctcagcgcttattatctcacaggttttaagtgtttgttcgatttgctgggcctaaaactaaaactgaaggatcgctgtgctcaatttgtagctgttgatgcattcatttcagatttgaggaggcttgacggaattgaatccctatcttatccaataaaacctcttatccaataaaatgagggttttagcccctctaatccccttcgggtgtgtgacttcccaactagtccttatagtttttgaagaaacagccaaaccaacccagccctaagtgaagggtccctgtgctcaatatgtagctgtttacgcggtccttttagatttttattaggcttgagcctgcgctt

SEQ ID NO: 36741 - DNA, 456 bp, Zea mays
  Clone ID: MRT4577_133511C.1
gtggggggaaagcgcgatcctttgaatttagagccaacaccacatcaatcaaaacaaattgggggggttttcacatcacagtctacagactagggggggggggggggaccgtctatcactctattcaacccttttctaaaggggtgggaactccttttcctcgtcaccgacgggggtttcctgggcattccagagctccgcatacacaccctccagatccagcagttcccgatgcgaccccatttttactacctgcccgtccttgggcccgagaatctggtcgctgtcatagatcgtccggagtcgatgcgccacaaacacactcgggcgccgtttgtccttggggatcctgttaatgttttgcagtaatgcctgctcggtttaggtgtccaaggccggggtcgccttttcaaaaaacaacaggggggggcccttgggcagtggccgcgaaagggc

SEQ ID NO: 36742 - DNA, 4519 bp, Zea mays
  Clone ID: MRT4577_133512C.1
agctggaattcgctcgaggagcttcctagcctctcttctcaagcagggggatcggttcttgcaatttgacaactttatgcctggttataatgcagctgacagtcaagacccttgtacgaatagcaaagaaggatcacatttttgaattggttgcccctttccgcaacatggacaaaccatggaaagttcgaattgaagctagcaggattcttattgatcttgagttacaccataaaggactcgatgcagctcttttgttgttcttgaaatatgtggacgaagaaaagtctttgcgaggttggattgctagagtactttttgatggttttgtatgctttgctatcttttgacatggaagctgttgaaggagcgacaaagttggctgttcatgtcttgcgtatatgtcaaacaagtattgttcctcacgccaatgatcaaaattcggcacgaggaaggaagagaaaaatggaaatgagaagagcaaggaaaatggaaaagttacggaaaatgaaaaggtgaagaacataaaactggttcacatagattatattttggagaaggctgaaactggcattcactttgttggcaatgtcatgcatagcagtaatcagataaggcgggcacactgttggtttccttgtgttgatactgccacacaacgctgtccatttgacttagaatttacagtcagcacagatttcatcgctgtcagcaacggtgacttgctttaccaggtcttaagtaaggaagatccttcaaaaaaaacctatgtgtataaattgaacactccagttagtgcacagtggatatccttggttgttggtccacttgaaattctccttgacagaaatgacataaatgtgtcacacatctgtttatctcctgccttgtcaaagcttcagaacactattgcatttttccacgatgcatacagctgttatgaagactatcttgctgcaccgtttcccttaggtttatacaagcagatttttcttccatctgaaatgacagtattaccggcaagcttaggagcctctatgtgcatcttcagttctgatatcttgcatgatgagaaggttatagatctggctaaccacacagtatgtgagtctgatgttagtggtgcaactgctttgagctctactgctgcttcaagtgatttatatggaactcaaacaatcggttcatatgggaaagttcgttcattgaaagctgtagctgttcttcaaatgttggagaagcagatggggccagactcgtttcggaagattttgcaggtgatcgtggctccaaatcgtgcctaaaatttagtactaaagaggcaccttgcaaataaggtcggtaaccttgaacgtccattcctgaaagaattctttccacggtggattgaatcttgtggatgtccagttatgaggttgggaatctcatatagcaaaaaacggaatatggttgaattagccgtttcaaggggttgtacaggaaaagctacacctgatcctgatagtcacaccaacggtgacactagagaaggcgatgctcctggatggccaggaatgatgagtgtacgtgttcatgagaccgatggggcatatgatcatccagttctgccaatggctggtgaagctttgcaggtggtggaaatacagtgtcattccaaactagcagcaaaacgtgtttggaaatcgaaaaagaacacaaaacttgatggttctgatgacaacatagatacctctaatcaagagaatcgcacaagcatggattcacctttgttgtggattagagtagacccggagatggaatatcttgctgagatccattttcaccagccagttcagatgtggatcaatcagttggagaaagacaaagatgttatatctcaatctcaggcaatatctgccttggagaaattacctcagctgtcttttgctgtgagtaatgccctcaataatttcctaaatgacacaaaggccttctggagagttagaattgaagcagcatatgcattagctgttacatcatctgaggcaactgatttagctgggttgcttcatctggttaagttctataaaagccgccgctttgattcagatattggaatgcctaggccgaacgacttccatgatgtcccagagtacttcgttcttgaggcaatcccccatgcagtagctcttgttagatcatcggacaagaatagccccaaaggagccattgagtttattcttcagctactgaagtacaatgataacaacgggaatgtttactctgatgtgtactggctatctgcaatggtcctggcaataggcgaactggaatttggccagcagggcacgggcttccttccctcccttctcaagcgaatcgatcggctcttgcaatttgacaactttatgcctggttataatggtgtcttgactgtcagttgcattcgtacccttgcacgaatagcaaggaggttgtcatcttctgtatcccttgatcccatacgtgaattgattgcccctttccgcgacatggacaagccatggaaagttcgaattgaagctagcatggttcttattgatcttgagttacaccataaaggacttgatgctgctcttttgttgttcttgaaatatgtggatgaagaaaagtctttgcgaggagcgacaaagctggctgttcatatcttgcgtatatgtcaagcaaatattgttccttccgccaatgatcaaataaatttgacaactctaattggtcttctccatctgcttgctggcacaaaggcatacaataacgtatttcttcgtcatcatgtgttctgcatattgcaagttgctgctggaaggtccccaacattatttggtgttccaaaggtcgtcacaccccctcttgtggtcaaggacatctgtagtgatcagcacactaaagctgattcctcgattcctcaaccatcaaagcctcaggaaccttccactagcactcctagtgtccgggaggtcttacctacctctggccccactaaagatgctgataatatatctaactgcagcgaacgaaggaatgtggtcaaaattagggtgaagcttactgcgtcttccagtaaagcatctgatgctgaccacagaggccattttcatggtggaagaaatgaaaatgaaccgggtccatgtagctcaatgtcagtggatgcccctatggttgggactgcaaatgaaccattaaatgtaagcaatcataacattgaggaacagaactcatgtcatgaccgtgaatcaaggatgtcggcaagcgttagcactgttaagctattggacaggcatgatatttctagggagctacagtgtactgctgattcaaggttggatgctcttcccaagaaccagttctctcctgccattaatctgccagaagctttagacaagcctggcagtcagcttgaaggtgtctccaccagctatgaaggaaaccaagctccagaatctgtgaacggagtggaaacgaaagagagaaagaaaaaagacaagaaagataaaaagcggaaacgtgatgaaaaacgattaaagaaagatgacccagagtatctagagaaaaagcgacttaagaaggagaagaaaatggagaaagagttggcaagaaagcagctagaaggtgaaggaagagctacccctgagcagccgaaaacagtgaaaccttcaggttcactggaagttttgcctgcaaggccaccagctccagtgctaagtgctgaaccagctgctgttcggagctctgaacctcaggtatcaagcaaggaaacaactgtagatactgcacgtacagcagccaaaccaaggataaagatcaaagtcaagcctttggtaagaaaacctgaagggaattaaaaaggatagtagaattgtgtccaggctgccaccatttgtaaggattactgtacagcaggaaaaaattggggtatgttgtaggttgtaccacgagtagccagtttttttcgtgaatggctgatgtatccggtaaaaaaaacattgctatgccctactaatttctggggtaatggaaatctgttctagggtagtccatgttttgtgctgctgttgctttagtatctcagcccatgttaaaaaaaaaaaaaaaaaaaaaaaaaaaaaaaaaaaaaaaaatctcccgggttttaagtctctgtttggttttctgtttctaaaactataaggtttaagggctagttttggagccccaaaaccggaggagattggaggggctaaaatccctatcttatcaaataaaacatcttatcaaataagatgagggttttagcctctctaatcccattcggttgtgtgacttcccaactagtccttatagttttagaagaaacagcaaaacaaacccagccctaagtgaagggtcgctgtgctcaatatgtagctgttgacgcgttccttttagatttttattaggcttgagcctgcgcttaaaaaaaaaaaaaaaaaaaaaaaaaaaaaaaaaaaaaaaaaaaaaaaaaccgagaaaggggcccggtacc

SEQ ID NO: 36743 - DNA, 2155 bp, Zea mays
  unsure (1)..(2155): unsure at all n locations
  Clone ID: MRT4577_133513C.1
aaaccctagcgcaggaggaagaggagttagnaggagctccagggatggcgaaggcgaggaagcagaagggtgacggtggcagtacgggaggaggcgccaccgtgctccaccagaagctctgcctctccatcgacatggagaaccagctgatctacgggtacactgagataaaagttctagctgaaaacaacagatttgctctacatgctgacaatatgacgatccagagcatttgatggatggtgaaactgttgagtttgactattcccctcattggaaaaatgaaagtgatcaaccgaattggtcttcagtatcatgtttgaagactgctgctgatgctgcatgttcaatgtatactttgtctctaaatcgagaagctacaccaaatcttattgtgtcatctgagagatcagtcaagtcaatgactgaacagcagttagatgaaaacagtgaaaagcatgaagaaaatagtggaaggcttgaagaacatggtggaaatcctgttcaaacttcctatgatcaaattgttaatggctgcagtggaagagggaatagaaaattctgcagtggaagaaggaaaggaaaaggaaaatgataaggaaaaagaagaggaaaatggaaatgagaagagcaaggaaactggaaatgagactgaatatgaaaaggtgaagaacataaaactggttcacatagattatattttggagaaggctgaaactggcgttcagttcgttggcaatgtcatgcgtagcagtagtcagataaggcgggcacactgttggtttccttgtgttgatagtgccacagaacgctgtccatttgacctagaatttacagttagcatggatttcattgctgtcagcaatggtgacttgctttaccagctgttatgaagactatctttctgcaccatttcccttaggtttatacaagcacatttttcttccatctgaaatgacaatattaccagcaagcttagtagcctccacatgcatcctcagttctgatatcttgcatgatgagaaggttatagatctgataattggcacaagaacgaaactggcttatgcccttgcaaagcaatggtttggaatatacacaagtgcagaggagcccaatgacgaatggctgttggatggtttggctggttttctaaccgatttatttatcaagcgttaccttgggaataatgaggcgcgttataggcgtttcaaggctaactgctcagtatgtgaatctgatgttagtggtgcactgctttgagctctactgctgcttcaagtgatttatatggaactcaagcaatcggttcatatgggaaagttcgatcgttgaaagctgtagctgttttcaaatgttggagaagcagatgggaccagactcatttcggaagattttgcaggtgatagtggctccaagccgtgcataaaatctagggcacgaggggcttccttccctcccttctcaagcaaattgatcggctcttgcaatttgacaactttatgcctggttataatggtgtcttgactgtcagttgcattcgtacccttgcacgaatagcaaggaggttgtcatcttctgtatcccttgtaagaaagttcacattcccatcactcttgtcgacgtcttgtccataagctgttgtgctctgcattgtgaatatcacattcacattcatacataacttctcattactgcaggatcccatacgtgaattgattgcccctttccgcgacatggacaagccatggaaagttcgaattgaagctagcatggttcttattgatcttgagttacaccataaaggacttgatgctgctcttttgttgttcttgaaatatgtggatgaagaaaagtctttgcgaggagcgacaaagctggctgttcatatcttgcgtatatgtcaagcaaatattgttccttccgccaatgatcaaataaatttgacaactctaattggtcttctccatctgcttgctggcacaaaggcatacaataacgtatttcttcgtcatcatgtgttctgcatattgcaagttgctgctggaaggtccccaacattattttggtgttccaaaaggtcgtcacacccnctctttgtggtcaaggacanntctgtagtgatcagcacactaaagctgattcctcgattcct

SEQ ID NO: 36744 - DNA, 786 bp, Zea mays
  Clone ID: MRT4577_133514C.1
gccggccgggtcggattccatcccgaacctccagacctgtcagctccatacacaaatcgtgtaatgctatctttccacacaatcgagactggcatcgtcattattggtgcatggaggaactccataaatcgctttccatcgtcttattcatcacttgtatagctggagcggtagcatactctgatcgttctgaattattgtcccacaagacatgcccacagccacaggatttcccaagtgagcagctatatcgttcctacgtggtaatccagcgcttcaagagcaccattaccagcgaccccaagaacgtcaccgcaacctggatcggcaatgacatctgcggagaaacgacctacgtgggtttctactgcggagtacttcctgggcgagggccaatcccgcaatcgattggccacctccaggattccctcttcgagatgctcctcctcaacaaccagctttccggatgcctcccgcacgagctcggcatgctcaccaaggccgccgtgatcgacgccgggatgaaccagctcacgggcccgatcccgtcatctttctcgtgcctcaccagcgtcgagcagctcaacctggccgggaaccggctctacggtcaggtgcccgaggcgctctgcaagctcgccgggcctgccggccgcctcaccaacctcacgctgtccagcaactacttcacttcggtgggtccggcgtgccgcacacctgaacaagaacggcgtgccggacgtgaagaacaactgcatccctggcctccccagcccatagggcccc

SEQ ID NO: 36745 - DNA, 416 bp, Zea mays
  unsure (1)..(416): unsure at all n locations
  Clone ID: MRT4577_133515C.1
caggtatcaaagctaagggaaacaactgtagatactgcacgtacagcagccaaaccaaggataaagatcaaagtcaagcctttggtaagaaaacctgaagggaattaaaaaggatagtagaattgtgtccaggctgccaccatttgtaaggattactgtacagcagngaaaaaattggggtatgttgtaggttgtaccacgagtagccagtttttttcgtgaatggctgatgtatccggtaaaaaaaacattgctatgccctactaatttctggggtaatggaaatctgttctagggtaaaaaaaaaaaaaaaaaaaaaaaaaaaaaaaaaaaaaaaaaaaaaaaaaaaaaaaaaaaaaaaaaaaaaaaaaaaaaaaaaaaangggggcggcccgttttaaaaggatccaagttta

SEQ ID NO: 36746 - DNA, 250 bp, Zea mays
  unsure (1)..(250): unsure at all n locations
  Clone ID: MRT4577_133516C.1
cagccgcatgccacgcaggccctatgacgcccgccatcctcatccaggagtcccctggtgcncagcggcccttccacccccgcagcgcggtcctgcccctctcccctcgcacaggcactcccttcctccatctccatgctcggcgcccgcaccatctccgctctggctccgctccacctccctaagcgcctccgagctaaccgagtccccccatagaccgaacgggatcttcgcgtccgacgcgcccatc

SEQ ID NO: 36747 - DNA, 243 bp, Zea mays
  Clone ID: MRT4577_133517C.1
cctcctttttttttttttttttttttttttttttttttttttttttttttttactttaaacccgtttaatattttttgtcggacggccaacaccaatctaagggggttcctgaattctttaagcgcgatggggggcatcaccaaaaaaatgaccgattaatgagccaccggtctttttggtgaccgacccgtctcaaccaccacaattcctatttttggcgctactgggctgttttcccaaaa

SEQ ID NO: 36748 - DNA, 1264 bp, Zea mays
  unsure (1)..(1264): unsure at all n locations
  Clone ID: MRT4577_133518C.1
ctgcggcctgttggagggcagcaccaagtatcacagtctagctactgcctggcaccagcaagcttctgccctgccccgccccgccgccagaatccgacaccagtcaaccacagcggccacaacctcgcggcgcccgcgtggcggccggcggccccaaaagctagccagagctgctccagctgcttcttcgatcggtccatggctgtcgtcacgagggacgcggcgtgcctgcccctcgtcctcctgctcctagtcttctccgcggccccgtctccggctgacggctgcgaccgctgcgtgcgccggtccaaggccacctactaccaggcctcctcgctcgccctcaacgccgggtcgtgcgggtacggctccttggcggcgtccttcaacggcggcctgctcgccgcagccagccccgagctgtacaggggcggcgtcggctgcggcgcctgcttccaggtgcggtgcagggacagcgagctgtgcagcgccgccggcgccaaggtggtggtgacggaccaggcgcggacgtcgaaccgcacggcgctggtgctgagcgccgcggcgtacgcggccatggccagtgccggcaaggccgcgcgcctcagggaccggcgcgtcgtcgacgtcgagtacaagagggtaccctgcgagtacgcgaaggaccgcaacctgttgatacgcgtggaggagaagagccggccgccaagcaacctgtccatcaggttcctgtaccagggcggccagaccgacatcgtcgccgtcgacgtcgccaccgtggggtcgtccaactggcggttcatggcgcgggaccacgggccggcgtggagcacggcgcaggcgccgccggggccgctgcagttccggctggtggtgaccggtggctacgacggcaagtgggtgtgggcggagtcggaggtgctgccgcgccggtgggaggccggccgcgtctacgacgccggggtgcaggtctccgacgtcgcgcaggaagggtgctacccctgcgacacgcgcgagtggcagtgacgtgacgcgcgcacgggctggattgtagtagattgtacagtttttttttttggtcgggaatgggacgaaagatatgaaatgatgatgagcggagccggagagccgaatcaaaccaaatcaaacaaaaaaaaaaaaaaaacgtgccgttgcaagttggttcggccgcgttgctcgaccctaaggggtgccgatatataggattcaagtataagttagagtgcatgcggtgtnatgatat

SEQ ID NO: 36749 - DNA, 558 bp, Zea mays
  unsure (1)..(558): unsure at all n locations
  Clone ID: MRT4577_133519C.1
tccggngctacccctgnaacacggnanaacagtggaacccttgcaggttcacaggagttttgccttcaaggccaccagctccagttctaagtgttgaacaactcctgttcgaatctctgaaccccaggtatcaagcaaggaaacagctgtagatactgcacgtgcagcagccaaaccaaggataaagatcagagtcaagcccttggtaagaaaatctgaagggaatttaaaaagattgtagaattgtggccagtctgccatcatttgtaaggattactgtacagcagngaaaaatgcgggtttagttattttgtgaatggctgatgtatcagtagtttctggggtaatcgaaatctgagttctagggtagtccatatgctgcagttgctttagtatctcagcgcttattatctcacaggttttaagtgtttgttcgatttgctgggcctaaaactaaaactgaagggccgctgtgctcaatttgtagctgttgatgtattcagatttgaggaggcttgacagaattaactgctgagcttgctcaaacatttttntgag

SEQ ID NO: 36750 - DNA, 319 bp, Zea mays
  Clone ID: MRT4577_13351C.1
aaaccaccccacgaacaaaacactggattttattcctcccactggaaaaaaaaaaaaaaggcccaaaaaaaaaaatcctggggggggggttcaaaaaataaagggggggggacctttttttccccaccaggagaattaatacgggggggtttacatttccacacaccacatgggaaaccttcagggggggtaacaggagttttggccggcccacaggaaaggggaataatttttgggtggggtcgacagggcccacgttaactcctgttatttttttaagcctggctttttttttttttacaaaggggccaaccatttt

SEQ ID NO: 36751 - DNA, 351 bp, Zea mays
  Clone ID: MRT4577_133520C.1
gcgcctcggaggcgttcagctgcttcaagatgaagctgaacatctccttcccagccactggctgccagaaactcattgaagtggacgatgaacgcaaacttcgtactttctatgagaagcgtatggccacagaagttgctgctgacgctctgggtgaagaatggaagggttatgtggtccgaatcagtggtgggaacgacaaacaaggtttccccatgaagcagggtgtcttgacccatggccgtgtccgcctgctactgagtaaggggcattcctgttacagaccaaggagaactggagaaagaaagagataatcagttcgtggttgcattgtggatggaaatctgagcg

SEQ ID NO: 36752 - DNA, 2541 bp, Zea mays
  Clone ID: MRT4577_133521C.1
tcgattcggcgcctcctctccttcacgcgcccacgctgccgtcgcctcctcctcactgtcgtccatgccgctgtagccgcctacggccatggccgctggagccagcgactatttgacggtggagtaccactccagagactcccctctttcccctccgacgacgagggagccaccggcggcagcggcgtcctcgtacaccacggtgggcacggtgggcgatcttctcatgaagtggtggtagtgcctcgtggacgtcgacggagacgcggcgtgcctgcccctcgtcctcctgctccttgtcttctccgccgccccgtctcctgctcacggctgcgaccgctgcgtgcgccggtccagggccacctattaccaggcctcctcgctcgccctcaacggtacccctgccttgtgcgtgattcgtctgtttctgtggaatttgattcatctttcggtttctgctgaactgcgcagcactcagcaagccggttcgaattcatcgtcgccttccattccatgacgtcgtgcgcgtgcgtgtggttggattttggcaggtggggtcgtccaactggcggttcatgtcgcgggaccacgggccggcgtggagcacggcgcaggcgccgcgtgtagttccggctggtggtgaccggtggctacgacggcaagtgggtgtgggcggagttggaggtgctgccgcgccggtgggaggccggccgcgtctatgacgccggggtgcaggtctccgacgtcgcgcgggaagggtgctacctctgcgacacgcacaagtggcagtgacgcgcgcacgagctggattgtacagttttttgttttggtcgggaatgggacgaaagatatgaaatgatgatgagcggagccggagagccgaatcaaatctattaatcggtggcgctggaagggagttttttgaaaaaaaaaaaaaatttccatcccgcctctagatctgtcagctccttacacaaatcgtctaatgccatctttccaacacaatcgagattggcatcggcatgggtgcatggaggaactccataaatcgctttccatcgtcttattcatcacttgtatagctggagctgtagcataccctgatcgttctgaattattgtcccacaagacaaacccacagccacaggatttcccaagtgagcagctatatcgttcctacgtggtaatccagcgcttcaagagcaccattaccagcgaccccaagaacgtcaccgcaacctggatcggcaatgacatctgcggagaaacgacctacgtgggtttctactgcggagtactgcctgggcaaggtaacaacctgacagtaacggcggtccttttgaatgggtatagactacatgcaccgaagctgcaagggtttatagatgagatccccgatctcgcgctttttcatgctgcttccaacaattttggtggtggcattccacgcgtcgttggcctcgggtatttttataagctgaatgtcggagttgagcttccattacacactacggtatatgggttgactgtcggaagtagcccagcggcttcgattccttatgcttgcgtaactactgccctaaacttcacatttagtataggaactgacggtgctaaaggacgaaaatttcctggtgttacggatgccaaggccctccttctcaatcacaatagcctgtctggggcacttccggcggaccttggctattccaaggtgagctacctagctctggctaacaacaggctgacagggccaatcccgcaatcgattggccacctccaggattccctcttcgagatgctcctcctcaacaaccagctttccggatgcctcccgcacgagctcggcatgctcaccaaggccgccgtgatcgacgccgggatgaaccagctcacgggcccgatcccgtcatctttctcgtgcctcaccagcgtcgagcagctcaacctggccgggaaccggctctacggtcaggtgcccgaggcgctctgcaagctcgccgggcctgccggccgcctcaccaacctcacgctgtccagcaactacttcacttcggtggctccggcgtgcgcagcactgatcaagaacggcgtgctggacgtgaagaacaactgcattcctggcctcgccagccagaggcgccccgcggagtgcgctgcgttccagagccagccaaagacgacgtgcccggcggagagcaccctggtggcatgccccgccgcagctgccatggacgcggcggccctcggggagaggaaagtcagggactactccagctacgtgacgtacgctactctgcatgactgagccggcgccacatcggcatgcagtaggaaacagagttccttgctgtcattttggctatttgttcttgtattcatgatgcgtgtacactagtgtgtggtgtgattgttgtctatttgcattgcacgtgtgttgctgtcacatctagatcgtccatttgaactgccatgcatgtccattatttcatgaaaaaagttgttggtgctttaataaagttgtacctgtcttagtttccc

SEQ ID NO: 36753 - DNA, 279 bp, Zea mays
  Clone ID: MRT4577_133522C.1
atctaataaaaatactaacaaaaaaaaaaaaaaatttttaccaatactaaaaaaccaaccacgagaaattatacataaaggagaggctttcacatgccccactttatttctatcatcaacttacctcaccccacttcacttcctctctttttatgacctctgacccttccttaccctcaacttgtctccatttaacctcctcgcttcacctacccccttgtcctctcccaaccttctctttttgccccttacccttctttcttcattcccctacttacc

SEQ ID NO: 36754 - DNA, 120 bp, Zea mays
  Clone ID: MRT4577_133523C.1
ggtggagtgcggaggagaggacccacagcagaggagtcccagtcaccagcaaccatgacggaccaacaggctgaggccaggtcctacctcagcgagcagataatcgctgagttcaaggct

SEQ ID NO: 36755 - DNA, 464 bp, Zea mays
  Clone ID: MRT4577_133524C.1
gatcgctagcggttgctttgtttgtttttattcattggaattgtacatgcttttatacgtgctagcaaaaggacataaagcccccagagttgtgacaacgatgggcgctaaaaacaagataggggggggcccgtacaacatccggcaaaaaagtgaatccccccgcccagagggggaacgcggtaacggaaaaagcgtcaggaaccctggtggaaaaaaaagaataatgggcgacactagaaccagggggcttttctgttctttgcatgggggcccacacggcccagaagacctgggggggacgctaggacaaaaaaaaagacaacttggccgacggaacttgaacatttcgtgcacatgaaacggaagaggcacgcgatgtcctccgtcatggatcgggtttaagaaaaaaacagaaactcccgaaaaggaatacccgggggcctaaaaaaacggaccccccc

SEQ ID NO: 36756 - DNA, 150 bp, Zea mays
  unsure (1)..(150): unsure at all n locations
  Clone ID: MRT4577_133525C.1
ggctcnagatnttgagtacacatcaactgcngttggattcataagtgcattntgccagtactctccatttngntgtcctcgnggtgnaccacagggcaattcncatgnaangggatatgnantgactngtngaatgngatnactcagtag

SEQ ID NO: 36757 - DNA, 1123 bp, Zea mays
  Clone ID: MRT4577_133526C.1
cccacgcgtccgttgctttgcgcgtcctcccaatccgtggctagcggtcccctgtttcctgccgagctcgccggcgttccccttcctccgctgctgccagtggtggttggagatgacacatatgtttccaagggaaggtgcctcatctagctcaacctcaatgagcagccagaggagtgaaactcatgatgataggatgattgcaatggttctctccgaagaatatgccaagttagatggtgctatggccaagcgtcttactaatttaacatcaattcctcatgttccccgtattaacacatactttccaacatatagtgatgccactatggaccattatcgcctccttgataggctaaatgcatacggcttgtttgaggtgagagtatctggtgatggaaattgtcagtttcgtgcactctcagaccaactatatagatcacctgattatcacaagcatgttcgaaaggagattgtaaagcagctcaagaaatgtaacaccttatatgaaggttatgttccaatgaaatataaaaaatattgcaagaaaatgaagaagtctggtgaatggggtgaccatgtcacgctacaagcagctgctgacaagtttgctgcaaagatatgtctcctaacatcattcagagatacatgttttgttgaaattgttccgcaatatcaagctccacagagagagatttggctgagtttctggtccgaaattcactataactcactgtacgatgctcgagatctcccaagcaaatacaagcctaggaagaagcattggttgttgttttaatatccatgcgggagtttgcttcatactggtggaatcatattgtttgaccctttcgaccaccgtccgccaaatgatgcaccgtacagctacagcacgatccaggcatacaacagtaggtgtagagttacaatgctgaacctgagccttgtgaatagatgttcttaatacaggttgactgtaatgccctgtcttatttgttcactgtgtatattctttatttatacaactacatgttagctctattcaccagttcattattcccttcgtttttggaagaatccatcattgccttctgggcccaaatgtccattgccttttgctgac

SEQ ID NO: 36758 - DNA, 596 bp, Zea mays
  Clone ID: MRT4577_133527C.1
gaggcaaacacatagttttttctactctataacagcagtctgttcatatttactgttgaacatgggttacctgaagactgcagaaagaagatgtctaactttttcatgtacttctggcagtttgctgcaaagatatgtcttctaacatcattcagagatacctgttttgttgaaattgttccacaatatcaagctccacacagagagatttggctgagtttctggtccgaagttcactataactcactgtacgatgctcgagatctccctagcaaatacaagcctaggaagaagcattggttgctattctaatatccatgcgggggtttgcttcatactggtggaaccatattgtttgaccctttcgaccaaccgtccaccaaatgatgcaccgtacagctacagcacgatccaggcatacaacattaagtatagagttccaatgctgaacctgagccttgtgaatagatagatattcctaatacaggttgactgtaatggagatcactaaaatgttagtaatttaacttctattcacactttcaattccatcgtccgtgaaaatttgataaatatgaatgtgttgccttgactcc

SEQ ID NO: 36759 - DNA, 396 bp, Zea mays
  Clone ID: MRT4577_133528C.1
gcgtcacgcttactgacgtgttgtccatggccattgttcaagccgaccaactcctactggtccagagagatgcaatgtccggctcgcgatacatgacttacccgggcacacaggtcacattcatcttcgtctatgatggccatggttgcccatgagaccttcggttgcatcaatgactacctatgcaaccatctcagaaagtttgcaactgatcgcatgtggatgtcagcaaacctgacccggtaagctttccaagctactgaagatggatgactctctatagtcagcaaggaatggtctgtgaagcatgagattcgacaagacgactgccgatacctcgtaagcataatcagcgatctgacatctgtatgtggtatacgtgttcaactcaaatgc

SEQ ID NO: 36760 - DNA, 1850 bp, Zea mays
  Clone ID: MRT4577_133529C.1
aacattgccaggaaaaagcaaagaaaaagaggatgcttcgcatgcgtggataagggccatccccgcaaagcagaaggttttgctttgcgcgtcctcccaatccgtggctagcggctccagccttgactactctgacactttttctttctgtgtgtgtctaaagttatatactacagtcttgatatattgtacaacataaactgcatagttcccatattaattcaactcgttcggatcgtttatatgtgaggctatcaacattattatattatactgatactaacatgaccggaagccggccggcagcctgcccagcgcaagaaaaaggcagaacccagccgcggcgccctcttcgcagtcccaactcccaaccgagaggtgaaagcatccgtcccgtcccagtttcgccgccgaccctgcaaagcagaaggctctttgcgcgtcctcccctctttcctcccggactcgccggcgttcctgtctgttgctgccggtgggcggtggtggttggagatgacacatgtgtttccaagggaaggtgcctcatctagctcaacctcaatgagcagccagaggagtgaaactgatgatgataggatgattgcaatggttctctctgaagaatatgccaagttagatggtgctatggccaagcgtcttactaatttaacatcaattccccatgttccccggattaacacatacttcccgacatatagtgatgctactatggaccattatcgcctccttgacaggttaaatgcatacggcttgtttgaggtgagagtgtctggtgatggaaattgtcagtttcgtgcactctcagaccaactatatagatcacccgattatcacaagaatgttcgaaaggagattgtaaaacagctcaaggaatgtaactccttatatgaaggttacgttccaatgaaatataaacattattgcaagaaaatgaagaagtatggtgaatggggtgaccatgtcacgctacaagcagctgctgacaagtttgctgcaaagatatgtcttctaacatcattcagagatacctgttttgttgaaattgttccacaatatcaagctccacagagagagatttggctgagtttctggtccgaagttcactataactcactgtacgatgctcgagatctccctagcaaatacaagcctagaaagaagcattggttgttgttttgatatccacgcgggggtttgcttcttaatggtggaatcatattgcttgaccgcttcgaccaccggccgctggtggcagcctggtcatagctcattgtggctctatccactatatagctatgcatcaatgatccattgtattgctcggtacaactccatcacgatccaggcatacaacactagatacagttacaatgccgaacctgagccttgtgaatagatactcctttactgacatacaggttgattgtataccatgtcctatttgttcattgttatattctttatttatacagttacatattattaatcttcatcagttcattattcagttcatatttggaagaattcatcatcgcgttcttggcccaaatgttcattgccttttgctgacacgtgaatctgtttatcgtatttcatgcctggattggatgtacagcagttgtggtacagcctgccaagtggtggaagccctgagtgactgattctaatgctttagagcatctccaagagactttttattttttactctctatttgactatttatttgtctctccataaatattaaactctatatataacatcttattccaacagactctccaaaatgcaatttagcttggctaacgagagttgctagccaaatttggcc

SEQ ID NO: 36761 - DNA, 463 bp, Zea mays
  Clone ID: MRT4577_13352C.1
ggagtcactgctgaaagttcaggtgagagaagctactttgcgaacaagctaaaagccacaagtaggttgaaagcaaagctccttctaatagctagagaatggaaagtatcggatataaaaacaatcaacagacaagctgtagaggataaatgcaactgtggagcacgaagatacacatttggacgtcagaaattggtacatgatctcaatacaggcatccaattgtcagacttgaactcagtcttggaaggtgatatcgaaccattcatcagaggccgtattacatccagacaattgtgatgcacccagttctcacaaagtcattgatctgttcgctcgttatgattctgtacatttatttcttttcttttacagaacaaatcacatcataagataatatctgtaaatatatcacatttcaagtcaaaagggcatgacaaaaggtatacaaaacatcaatatt

SEQ ID NO: 36762 - DNA, 899 bp, Zea mays
  Clone ID: MRT4577_133530C.1
ctcgaggccggccgggccgagatcacccatattattgataccaactagcaacatacatagtgaagtacagtagcaacatcttagcaccaatggcagccaagatttttgccctccttgccctccttgctctttcagcaagtgttgctaccgcgactattattccacaatgctcacaacaatacctctctccggtgacagccgcgagatttgaatacccaactatacaatcctacaggctacaagaggccatcacagcaagcatcttacggtcgttagcattgactgtccaacaaccatatgccctattgcaacaaccatccttagtgaatctatatctccaaagaatcgcagcacaacaactacaacagcagttgcttccaacaatcaatcaagtagttgcagcgaaccttgctgcttacctccagcaacaacaatttcttccattcaatcaactagctggggtgaaccttgctgcttacttgcaggcacaacagctactaccattcaaccaacttgtcaggagccctgctgccttcttactgcagcaacagttgctgccattccatctacaagttgtggcaaacattgctgctttcttgcaacaacaacaattgctgccattttacccacaggttgtgggaaacattaacgccttcttgcaacagcaacagttgctgccattctacccacaggatgtggcaaacaatgtcgccttcttacaacaacaacaattgctgccatttagccaacttgctttgacgaatcctaccaccttattacagcagcccaccattggtggtgccatcttctagatttttttatgctttatactgtaataataaagttctcataaaaaaaaaaaagtaaaaaaaaaaaaaaaaaaggcccctagggccctc

SEQ ID NO: 36763 - DNA, 842 bp, Zea mays
  unsure (1)..(842): unsure at all n locations
  Clone ID: MRT4577_133531C.1
caagtacgtctacctcgacccaaccctttcaagccgtggccgttcccgaccagcctcggggactgccaatcgatcaccaacttctccgccaacagcgtcaacatgaccgggacgctcccggacttcttcggctcgatgccgtccctccaggagctcaatctggcagggaactcactgtccgggccagtgccgccgtccctggccgatgcgccgcttgaggtgctctggctcaaccagaaaatagagaccaccggcttcagcgggtcgattagcttcgtcgccaagatgaccaaggccacgaagctgtggctgcactccaacgacttcaccggccccttgccggacttctcgaagcttaccagcctttctgatttgggtctccgtgacaaccagctcaccggtcgagtgccagacagtcttgtcaacctgaagtctctgaagacggtgagcctggggaacaatttgctgcagggaccgagtcccaactttgctccctctgttgaagttgacaggacgggtaaaaatcaattctgcttgccgcctggacagccgtgtgatccccgtgtagacctgctgctggaggtagaggctgggttcatgtacccagccaagctcgcagctggttgngcggngaacgacccatgcagctatcagccgggcgttgtatgtgatagtggtaagaacatcacgtcgctgaattttgccaaaatggggcttaacgggagcatctcaccatctatcggcaagattgccacacttgagacgctacttctttcagacacaacattactggcacggtgccgaaagagctcgctgagttgccagcactgaaaaagtcaatc

SEQ ID NO: 36764 - DNA, 1053 bp, Zea mays
  Clone ID: MRT4577_133532C.1
acatagtgaagtacactagcaacatcttagcaccaatggcagccaagatttttgccctccttgccctccttgctctttcagcaaacgttgctaccgcgactattattccacaatgctcacaacaatacctctctccggtgacagccgcgagatttgaatacccaactatacaatcctacaggctacaacaggccatcgcagcaagcatcttacggtcgttagcattgactgtccaacaaccatatgccctattgcaacaaccatccttagtgaatctatatctccaaagaatcgtagcacaacaactacaacaacaattgcttccaacaatcaatcaagtagttgcagcgaaccttgatgcttacctccagcaacaacaatttcttccattcaatcaactagctggggtgaaccctgctgcttacttgcaggcacaacagctactaccattcaaccaacttgtcaggagccctgctgccttcttactgcagcaacagttgttgccattccatctacaagttgtggcaaacattgctgctttcttgcaacaacaacaattgctgccattttacccacaggttgtgggaaacattaacgccttcttgcaacagcaacagttgctgccattctacccacaggatgtggcaaacaatgtcgccttcttacaacaacaacaattgctgccatttagccaacttgctttgacgaatcctaccaccttattgcagcagcccaccattggtggtgccatcttctagattttttatgctttatactgtaataataaagttctcatactgatatgtgcaacttctcagtaataaaagattagagatctatattttaagttcaaaaaaaaaaaaaaaaataaaaaaaaatcaaagtaaaaaaaaaaaacaataaaaaaaataacaaaaaaaaactaaaaaaaataaaaaaaaattactttaggaaaaaaaaaaaaggggtgcccttttaagaggaccaagttttataacccgggctttgcaacgtaaagattttttttagggccccctaaattcaaatcacggg

SEQ ID NO: 36765 - DNA, 317 bp, Zea mays
  Clone ID: MRT4577_133533C.1
aaaaaaaaaaaaaaattttaaaaattttatatttaatataaattattgaacctgaaaaataccaaaatttgaaataaaaattcaaaaccatttttaaaaaaattgtttttgccaaaacaccaaaaatacattaattcaatgtcaaaaaaacttactgaaacttttagcgtttaataaccaaagggaatatactaattatgttccaatgataaatttccgagggaaaaaaaccagtgccaaaatttaagaacgcaccatttttaatttaaaaaacaaattgttttggaagggattaccgaaaccaaatcaaaaatttt

SEQ ID NO: 36766 - DNA, 397 bp, Zea mays
  Clone ID: MRT4577_133534C.1
cggacgcgtgggtttagcataacacggggtgcatgcacatgtatccgattccctgcatcactcacacctcactttttctgctaaattgtggcagtggtgataattgatatgcatagactgtacttatttaatgactatgaaataccatttaacatagctattgtgcctgacagggtaaatctaccaaggacacacatagttaagccttgctcagctgacgactgctaaggaatttctgttaagtgcagtttggggggtcttctcaaccattgcttgacttaaggcaacacattagaggatattcatcagcatcagaggcaattcttcccaatctgatttgagaaaaaaatttgttggcaacgaaaaattagtgttttcttgctgaatcttggggggc

SEQ ID NO: 36767 - DNA, 1642 bp, Zea mays
  unsure (1)..(1642): unsure at all n locations
  Clone ID: MRT4577_133535C.1
cccaaatcccgatgcgccctcacaactagcacctccgcctcgcggctcgctccatcccttccaccaccaccgcctcaccactcaccagtcaccactcccctatcacgggacgggaccaccgccgccgcgtcctatgacgtcgccgtcctcgcaccacccggactccacctcggcgtcctcgacccctcgcgccggtgtcgggaacggcggcatccaccacctccatccgccatctctgcacccggcgcccgcgcctaccccggctgctccccccgcgcaggcgcaggcggcgcacgggggcccgcaagtgcgcctcatgtgcagcttcggcggccgcatcttaccgcgccctgnggaccgccagctgcgctacgtcggcggggagacccgcatcgtctccttcccgcgcgccgtgacttccttcgccgccctcgtcgccgcgctcgccaaggtcgcgcccgtgctcttcgccccgggggcgcccaggccgtcgctcaagtaccagctgccccaggacgacctcgactcgctcgtccccatcacctccgacgacgacgtcgaccacctcatggacgagcttgaccgcatccaagacctctccgccaacgtcgtttgtcaccccgcctccgcgtcttcctcttcgcgcccgcgcctgacgccgccttcggctccgtcttctccggcaccaccagtgaggccgcctccaccgaccagtggtttgtcgacgcgctaaacgcccccgcgccgcagccgcaccccaccgagcgcggccgatccgaggcctcctcgatcgtctccgaggttcccgactacctcttcggcctcgaaaccacgtccggtgagcccagccccggccccgcggcggcccgcgccaagtccgacgccacggagactccgcgccacgacgacgacgacgaatgcgacgtgccaccttccgcgcgccagatgccgtacgttgtagagggagcgtcatcgtggcccgccccgccgccgccgtacatggcgcagcctgtgtactacttccccgtgccgccgccggtccactatctcgaaccgtctgcgcagggcggctacatgcctcgcccggtctaccacattgtcgctggcggaggaagcgaggcgcctgttggagatcttcacgcggccggcggcgtctacggcgtcccgcagcacatgcaggcgttcccgccgatgatgtacgcgccgccgcgcgcggtcgtctacaactacaactcggaggggatgccatcgctgcctcccgaaggtggggcacactcttcctaggcgcatcggctgcttcacatctctggttcctgattattattgcagatgcctgagttctgcgtgcgtattagatttttatcgattcgtcttggttggtgtatagacgagggaggcggatgatggatagatattattgcagttttcgtctagtggaaatatattcgtgaaatggatctatgagcatgatataatactaagtagtatagtatttggtgtgattaatcagtaccgagttaatgtaatgttggattcatatattctaggtggctctggtcttcttcctctggaagccaattttgggtattttatatttacataaactggatgttgggtaaaaaaaaaaaaaaaaaggccccta

SEQ ID NO: 36768 - DNA, 870 bp, Zea mays
  Clone ID: MRT4577_133536C.1
accatcttattgataccaactagaaattcatagcgaagcgcactagcatcatgttatcaccaatgggagccaagatttataccctccttgccctccttgctctcttaggatgcgctgctacctttactattatcacacactgctaacaacatatacctctctccggtgacagccgcgggatttcaacacccaactatctcaaatgctacatgctacatgaggccatagaaggaagcattttacggccattagcgttgaccctacgacagccatatgccctattgcaacaaccattcttagtgcatccgactctccaaagaatcgggacacaacagctgcgacaacagtagctaccaacaatcaatcaagttggtgcagcgaaccttgctgcttatctccagcaacaacaatttcttccattcaatcaactagctggggtgaaccctgctgtctacttgcaggcacaacaactactaccatttaaccaacttgtcgggagccctgatgccttcttactgcaacaacagcttctgccattccatctgcaagctgtggaaaacattgcttctttcttgcgacaacaacaattgttgccattttacccacaggttgtgggaaacattaatgccttcttgcaacagcaacaattgctgccattctacccacataatgtggcaaacattgttgccttcctacaacaacaacaattgctgccatttagccaacatgctttgacgaatcctacccccttattgcaatcgcccacccattgggtggtgccatcttctagattttttatgatttatactgtaataataaagttctcatgctgatacgtgcgccctctcagtaaaaaagtattatagattt

SEQ ID NO: 36769 - DNA, 2646 bp, Zea mays
  Clone ID: MRT4577_133537C.1
agccgccgcctctattctcccttccctcttctctctcccctcgcctatctcctcccccgacgcgcctgcaccagcagtggaagagctcgctggcgaagcaggcctgggttgcggcgcacagcgtgaacgcgttcggcaagagaccctcctcgagcgtctcaccgaaaaggcggagcgcctccacctcagcgccatttcgcgagaggcaggacgccatggccgtccaggagacgaggtcccgcaggccgacgggcattccgtcgaacacgctgcgcgcggcggccacgacgctacacatggagtagagcgtgaggagcgagttggcgacgacggaatcggtctcgatctataccctgtcgcgcacgccacggcgcacccgtactgggaggagggaggattcttgtttgagagccgtcgctcacgccgatcgcggcttttcaggaccaccggcaattcaagcagcgctacttcgagttcctcgactaccatcgggcccccggcggcccggtcttcctgcgcatctgcggcgagtccgcctgcgacggcatccccaacgattacctggccgtgctcgccaagaagttcggcgccgcggtggtgacgccggagcaccggtactacgggaagagttctccattcaagcagctgaccaccgagaacctgaggttcctgtcgtcgaagcaggccctgttcgacctcgccgtcttccggcagtactatcaggaatcgctgaatgcccggtacaaccaccgatcaggtttcgacaacccctggttcgtcatcggggtctcctactccggcgctctcagcgcctggttcaggctcaagttcccccatttgacatgtgggagcctcgcgagctcaggggtggttcttgcagtgtacaactacaccgactttgacaagcaggttgatagtccactccgggcataggttggagagtcagctggccctgagtgcaaagctgtccttcaggaaataactgaactcgttgacgaacagctccggctggagagtcactcggtgaaggctctatttggagcacagacgctgaaaaatgatggcgacttcctcttcttcctggcggatgcggcagcgacaaccttccaatacgggaacccagatgccttgtgccctccactaataaaggcaaagaagaagaggaaaaacttggtggaagcatatgctcaatttgtgaaagattattacattaaaaaaatggagacaccaccatcctcgtatgaccgagaatatctgaaggaaacaactccacatgattctagttctaggctctggtggttccaagtttgcagtgaggttgcctactttcaagtggcacccaaaaacgacagcgttcgttcagcaaggatcaatacgaggtaccatttggaaggcgacagacatgtcttaaaacttggcgtaagcatatgctcaatttgggaaagattattacattaaaaaaatggagacaccaccatcctcgtatgatcgagaatatctgaaggaaacaactccacatgattctagtaaggttctaggctctggtggttccaagtttgcagtgaggttgcctactttcaagtggcacccaaaaatgacagcgttcgttctgcaaggatcaatacgaggtaccatttggacctatgcagacatgtctttggggaaggcgtttatcccgatgtgttcatgacgaacttgtattatggaggcacaagaatcgctggttcgtctctctctagctagcattgattgcctgttgtgtgacatcaaaagtgacaatgagcagctctttcgactttccccatttctctgatgcatcaaatatatatgtacacagcttctaaaatcgtctttacaaatggctcccaagacccatggcgccatgcctccaagcagaaatcatcgaaagacatgccgtcgtacataatgaaatgcagaaactgcggacatgggactgatctgaggggctgtccgcagtggcctttcaggatcgaaggggacgcttcgaactgctcgtctctcgctgtagtcaataccgcaagggagaggatcgccaagcacatcgacctgtggctgtcgcaatgcagcaaaccatcagtaggagcctggtaaccgcggactagtggttcatccactcgggctcgggaagagtggaaaaggttttggattggatgtcctggagcaaacttgtgtcgggacttggattacgtgtttgtgcactttgaaaagcagataaagctgatggtgtaaagcagcagtgcccggtaccccaccagggtacgtgatgcaggcaggggtggtgctgtctgtgtcgatgccgtcgtccttttctggcgtggcgctgcagacgaccgacgtgtcacggcgcgtttgggtgcacggcgcgcgcgcgtcaaaacgtaacaagtactagtacctactactacgtgccatgccaggtgttgcgtcaaaacgtaacaagtttctcccttccgttctttgtccgagcgagtttacaagtactatactaccaaaaaggccaaagcgaacccgcaattttcttatgtatactagtagtagtgaactgctgcaccaacatccggtccacgtaaacatgtgccttttccgacgtgtatgttttatttaatggcatgtgttcacttgtgc

SEQ ID NO: 36770 - DNA, 918 bp, Zea mays
  Clone ID: MRT4577_133538C.1
atcgaggccggccgggaacacccatattattgataccaactagcaacatacatagtgaagtacactagcaacatcttagcaccaatggcagccaagatttttgccatccttgccctccttgctctttcagcaagcgttgctaccgcgactattattccacaatgctcacaacaatacctctctccggtgacagccgcgagatttgaatacccaactatacaatcctacaggctacaagaggccatcgcagcaagcatcttacggtcgttagcattgaccgtccaacaaccatatgccctattgcaacaaccatccttaatgaatctatatctccaaagaatcgcagcacaacaactacaacaacagttgcttccaacaatcaatcaagtagttgcagcgaaccttgctgcttacctccagcaacaacaatttcttccattcaatcaactagctggggtgaaccctgctgcttacttgcaggcacaacagctactaccattcaaccaacttgtcaggagccctgctgccttcttactgcagcaacagttgcttccattccatctacaagttgtggcaaacattgctgctttcttgcaacaacaacaacaattgctgccattttacccacaggttgtgggaaacattaacgccttcttgcaacagcaacagttgctaccattctacccacaggatgtggcaaacaatgtcgccttcttacaacaacaacaattgctgccatttaaccaacttgctttgacgaatcctaccaccttattgcagcagcccaccattggtggtgccatcttctagatttttttatgctttatactgtaataataaagttctcatactgatatgtgcaacttctcagtaataaaagattagagatctatattttaagttcaaaaaaaaaaacac

SEQ ID NO: 36771 - DNA, 545 bp, Zea mays
  Clone ID: MRT4577_133539C.1
gtaccctccgaggctggccaaaaaaaaaaaatcgaggacctcgtcgcgctccgcggcttcctcaactccgaccagacgctcttctctgacaacaccaggacccgtcgcgtcgtcgagcggctcagcaaggaccaggacgccttcttcagggccttcatcgaggggatgataaagatgggggagctccaaaaccccaggaaaggggagatacggcgcaactgtcgcgttgctaacaacgcgccgaggcaaccaaggacggcgatggcgtccgtacagacgacatctgagctccgccgaggacgggagatcgcgcaagacttcaagaccgacctacgcttccagagctcctgtgtctccgcgctgcaagaggcgggtgaggcctaccttggcgggctctgtgaggacaccaacctgtgtgccatccacgccaagcgcgtcaccatcatgccgaaggacatccagcttgcccgccgcatccgtgaggagagggcctaagcattatatattctcgcatgagtgcccgatcagaagatgcacagatgggc

SEQ ID NO: 36772 - DNA, 434 bp, Zea mays
  Clone ID: MRT4577_13353C.1
accgtacccgttcactccgtgtgttgctagcagtaggaggacgagcggccggcaacgccgccgtcgttgatgggcgcctactgtaggagtgcctgtgcactttctctatgtactatgacgtacaggataggggcgcctagccgccagccaaccagcgcgcgcacacgccccgtacggccgtacccggtcttcattccccactgcacacaaatactactgtgactccgtgagggagcaacaggaggaagaagcaggggggagaggggaggggaggatatgcatcgccgctccattttcctcggctaaagcctgagtactgtactgacatagggagctttacgaagaagtaggcatcaaccttgcactcgatgcttgcgatgttacatatggacgaaggctacagtgctacttggcacagcgacgaccaataccac

SEQ ID NO: 36773 - DNA, 1009 bp, Zea mays
  Clone ID: MRT4577_133540C.1
tacatagaggccggccgggccgggcatcaaattagtagttaatccatcacccatattatttataccaactaccaacatacatagtgaagtacactagcaacatcttagcaccaatggcagccaagatttttgcgctccttgccctccttgctctttcagcaagtgttgctaccgcgactattattccacaatgctcacaacaatacctctctccagtgatagccgcgagatttgaatacccatctatacaatcctacaggctacaagaggccatcacagcaagcatcttacggtcgttagcattgaccgtccaacaaccatatgccctattgcaacaaccatccttagtgaatctgtatctccaaaaaatcgcagcacaacaactacaacaacggttgcttccaacaattaatcaagtagttgcagcgaaccttgctgcttaccttcagcaacaacaatttcttccattcaatcaactagctggggtgaaccctgctgattacttgcaggcacaacagctactaccattcaaccaacttgtcgggagccctgctgccttcttattgcagcaacagttgctgccattccgtctacaagttgttgcaaacattgctgctttcttgcaacaacaacaattgctgccattttacccacaggttgtgggaaacattaacgccttcttgcaacaacaacaattgctgccattctacccacaggatgtggcaaacattgtcgccttcttacaacaacagcaattgctgccatttagccaactcgctttgacgaatcctaccaccttattgcatcagcccaccattggtggtaccatcttctagattttttatgctttatactgtaataataaatttctcatactgatatgtgcaacttctcagtaataaaagattagagatctatattttaagttcaaaaaaaaaacctgcccgggcggccgcccgggcaggttcaagactttttttttttttttttttttttttttttttttttt

SEQ ID NO: 36774 - DNA, 1099 bp, Zea mays
  unsure (1)..(1099): unsure at all n locations
  Clone ID: MRT4577_133541C.1
ccggccgggatcacccatattattgataccaactagcaacatacatagtgaagtacactagcaacatcttagcaccaatgggagccaagatttttgccctccttgccctccttgctctttcagcaagcgctgctacctcgacttttattccacaatgctcacaacaatacctctctccggtgacagccgcgggatttcaatacccaactatacaatcctacatggtacaagaggccatccaagcaagcatcttacggtcattagcattaaccctccaacaaccatatgctctattgcaacagccatccttagtgcatctgtatctccaaagaatcgcggcacaacaactacaacaacagttgctaccaacaatcaatcaagtagttgcagcgaaccttgctgcttacctccagcaacaacagtttcttccattcaatcaactagctggggtgaaccctgctatctacttgcaggcacaacagctactaccatttaaccaacttgtcgggagcccttatgccttcttactgcaacaacagcttctgccattccatctgcaagctgtggcaaacattgttgctttcttgagacaacaacatttgttgccattttacccacaagttgtgggaaacattaatgccttcttgcaacagcaacaattgctaccattctacccacagaatgtggcaaacattgttgccttcttacaacaacaacaattgctgccatttagccaacatgctttgacgaatcctaccaccttattgcaaccgcccaccatcggtggtgccatcttctagattttttatgatttatactgtaataataaagttctcatgctgatatgtgtgacctctcagtaataaagtattagagatctatattttaaattcaaaaaaaaaaaaaaaaaaaaaaaaaaaaaaaaaaaaaaaaaaaaaaaaaaaaaaaaaaaaaaaaaaaaaaaaaaaaaaaaaaaaaaaaaaaaaaaaaaaaaaaaaaaaaaaaaaaaaaaaaaaaaaagaaaaaaaaaaaaaaannnnncttcggcggcaaccccgatagagggaaatcccaacccctgggggggcgttttttgggg

SEQ ID NO: 36775 - DNA, 233 bp, Zea mays
  Clone ID: MRT4577_133542C.1
gcacgaggcctcttatttacaatgaatgaataatattagtacgtaaagttttccattgcttggtggatgtatacactattgcaacatttttagactgcattgcacatcgtcataccgattaccttacatatatacatcagcattttattaaatgttgtacgcaaatgacaatgcatacatttaattgtgatcttgcaggttgctcgaccacttcataatctatgtggtttgtt

SEQ ID NO: 36776 - DNA, 183 bp, Zea mays
  Clone ID: MRT4577_133543C.1
ggacaccgatgcttttttgcacgtgaataaaatgacaaacatgtacggagacaaccgggttatttacactgttttttaaaacctaacagtcacaggcacaggatttaaaaatttaagatctggggcatgcaaccaggaagctgagggggggggggaaactgcaagtttgatagcgggcttctg

SEQ ID NO: 36777 - DNA, 985 bp, Zea mays
  Clone ID: MRT4577_133544C.1
atcgaggccggccgggccggcatcacccatattattgataccaactagcaacatacatagtgaagtacactagcaacatcttagcaccaatgggagccaagatttttgccctccttgccctccttgctctttcagcaagcgctgctacctcgacttttattccacaatgctcacaacaatacctctctccggcgacagccgtgggatttcaatacccaactatacaatcctacatggtacaagaggccatccaagcaagcatcttacggtcattagcattaaccctccaacaaccatatgctctattgcaacagccatccttagtgcatctgtatctccaaagaatcgcggcacaacaactacaacaacagttgctaccaacaatcaatcaagtagttgcagcgaaccttgctgcttacctccagcaacaacagtttcttccattcaatcaactagatggggtgaaccctgctatctacttgcaggcacaacagctactaccatttaaccaacttgtcgggagcccttatgccttcttactgcaacaacagcttctaccattccatctgcaagctgtggcaaacattgctgctttcttgagacaacaacatttgttgccattttacccacaggttgtgggaaacattaatgccttcttgcaacagcaacaattgctaccattctacccacagaatgtggcaaacattgttgccttcttacaacaacaacaattgttgccatttagccaacatgctttgacgaatcctaccaccttattgcaaccgcccaccattggtggtgccatcttctagattttttatgatttatactgtaataataaagttctcatgctgatatgtgcgacctctcagtaataaagtattagagatctatattttaaatttccaaaaaaaaaaaaaaaaaaaaaaaaaaaaaaaaaaaaaaaaaaaaaaaaaaaaccaaaaaaaaaaaaaaaaaagcggcc

SEQ ID NO: 36778 - DNA, 334 bp, Zea mays
  Clone ID: MRT4577_133545C.1
ctgcgtacacggcaccgcttttcctgtcatttctaaagtgagagtgaagcaacgagggggagacaaggcgaaatggggaagggaacgcaacgcaacgaagcgacggcggcgggcggcgaggtggaggagaacataacagcgtggctggtttccaagaacaccccccagatcatgcccttcaagctaccgtccggcgggccttatgatgtccgcgtgcgcatgacagcaatgcggatttgctgcagcgatgtgcactacccaacggagatgcgcatcgcacacttcactgtgaaggaaccgatggtgatcggacacgactgcactgccctggcct

SEQ ID NO: 36779 - DNA, 544 bp, Zea mays
  Clone ID: MRT4577_133546C.1
ggcgctaaccaggatatagtatatttagttcaattcacgttgtgccctaatctttttataaagatttataaaatagggcactgtcagaaaagtccatgtatgtaacaacataaataaatgttaagttatactatgcgttgaggaagtccagcctgcctgccggccggccatgctcatgcggcatggtctcctcatcagccctcgagatctcgcggacaggcagtcgtgcaggtgccccaagatcccagctcaaccaccacaccacaccacttcttttttttccccacgaattgattgccaactcctttctgctgctagcgtgcagtgcaggcgttgcaggtcccggccacgcaggcatgtgctcgcctcgcccgcttcctgccccgatgcgatccaatccaaattccaatccaaccaccttttcatcccaaccgtcaaccgacgctgccggccggtgcgtgcgcgtaagctccctcagctactgcggcggcgacggggacggcgactctccgagtccaaccgacggggggagcacgagcccagg

SEQ ID NO: 36780 - DNA, 303 bp, Zea mays
  Clone ID: MRT4577_133547C.1
gccgtacaaccttcgagttgctgctgtatatggtggtgtttccaagtttgaccagtttaaagaactgaaagcaggttgtgaagtagtcattgcaaccccagggagattaatagacttgctgaagatgaaggcattgaagatgtttagagcaacttatctggtccttgatgaagctgatcgaatgttcgatcttggatttgagcacaaatacgatcattgttggtcagttagaccagtcgacaacatactttttctgcacaatgcatacaagtagacgtttgcagagaatatgactgatctata

SEQ ID NO: 36781 - DNA, 186 bp, Zea mays
  Clone ID: MRT4577_133548C.1
tgccgatacagtagagctcctgccctggcactatgataacatgcagcactacccactgtctgcgcactacctcggcgacgactggttgaccatcgctgccgttctacagcaggagcacactgctgagctcttgtgctcggactggcccggcgaccagctcgaccgagctgatgaacctactgtgct

SEQ ID NO: 36782 - DNA, 687 bp, Zea mays
  Clone ID: MRT4577_133549C.1
ccggaattcccgggtcgacccacgcgtccggggaaagttaggtcattaactaggaggggttttgaaaacagttctcccaacctaagaaagtgtgattataaatactattctagaacagtttacatgcctgcatcctgatagagattaggcctttgtgtgtttttaagactacagtctcacttaatgatatatttgtttttaataaaactggggaggatatattatctcagcatctccagaggatattattttataatttgctgcatttggattctaaatattcttcttattgtccagaagaacaacaacaaagaaaacttttattagcagagagaaaataagacggataatccttgccttcctggaggttctgtaagtcagactggcctgccctgtgaggacagcattctttcctctttatcttctttaatgactgctctgctaatcacacctgactcctgttatcaatcctgtggttgtatcttttcagggtttttactgtggtcagaggttttcagatactgtattattattatgaaaaagaagcattgtcattatctgtcctatcttgggacacagaacaatgaacattttttcaaaaggaagggaatctagccagatattgaagctcttggatcttttttacttttgcattcttgtgaaaaggcattttacctcggttgacag

SEQ ID NO: 36783 - DNA, 702 bp, Zea mays
  Clone ID: MRT4577_13354C.1
cctcgaggccggccgggagcgctgtccccctctctccggcggagcctcgaactcctccttcaccacacaccctgtacctagacacagaggaccacccccgcctgcgcacctcccctcgccgactccgccgaacttgtcgatcgaaacaaaggccaccaccacggcggccatcctccacggctgaccagaactggaggcttcgtcaacctgatgaacccctgcatctcgcacgagcttacgaacacatgggagcacaatggccctagcgcgctacgacaccttccgttcaggccaccttccaatagtccgcaggccggaccctctaggtccatcagaatgccgcccacatctaagacgggtactggcacatcaccttcttctgccgacacctcccggactgcaacctcggcgacctccccgcacgtctacaacccctacaggaaggcgatggagcagtcgcatcagagatccgtcacatctgacatgatacgctgctcgcacctgctgcgcgagaacctgtgcctgcatcccagatacctgaacgggtgcttctgggggacgcactgcccgacgttccgcaccaaagtgagcccggaaccgtcgtgcccacgccctgaactcgacaacggccttctctcgcacaccgacctcgaataaatcgcgctgctgttccaggacgaccatgtgaccggtctgcaactg

SEQ ID NO: 36784 - DNA, 115 bp, Zea mays
  unsure (1)..(115): unsure at all n locations
  Clone ID: MRT4577_133551C.1
agccttccggtggttccnttttattttgccctccaccagggttaaccaatttttggaaccactaaccggggggccgaacttttaccaattcaccattttcccaagaggatcatac

SEQ ID NO: 36785 - DNA, 135 bp, Zea mays
  unsure (1)..(135): unsure at all n locations
  Clone ID: MRT4577_133552C.1
caacaaaaacaacatcantttgnngcgggggcgtgattggaccggaggcctttacgtttctcccacaattgcgtggaagcaggccaggtggattgatagcgggagcttgggctgctatgaagncacccttacaga

SEQ ID NO: 36786 - DNA, 436 bp, Zea mays
  Clone ID: MRT4577_133553C.1
gcgcaggaagcaagtgcacactcccactttccctctccactcccgcgcgcctcgcccgcgaccggggcctgtggtggtggaggcggcggccatggcggagctgcggcactcgatggcggtgcgctcgtccaactcccccgccaagcgcgattccgacaccttcgcggcgttgtcccccttcctcctgtccccctccacccgcggcagccgcggcggcggcggcggggacgacgacggcaaggacgctcaccgctcgtcccctctcctctcgcatcaccaccacaagcgtgtccacctgctgacgtccccgttccgctccctcctcgcactcgaggaccccaggtcctccgtcgactcgtcctcctaccggatcctgcttgctctcctcgcgctccttctcgccgctgtgatcttctgcgcgcccttgttctggtcc

SEQ ID NO: 36787 - DNA, 265 bp, Zea mays
  Clone ID: MRT4577_133554C.1
gtcggacttgatggaatggacatgaggtggctacgcccaacgctcaagatggcgatcgcgctcataagggaaggcgcaaggccagcggggagcgtcaacaactaggcatcgccgcgcgcgtgcgtgcatgtgttcatacatcctgctgttactgtactttcgtttctcctcccctcatttccgggttattgcagtacttgtatgtagcaggcacaaatggatcaaatttgtagtatggcatgtacagaagctagggtctcaaaaa

SEQ ID NO: 36788 - DNA, 352 bp, Zea mays
  unsure (1)..(352): unsure at all n locations
  Clone ID: MRT4577_133555C.1
tatcaagagcttgacgtcgcatgcacgcgtacgtaagctcggaattcggctcgagcttctcggatcgagactagggttagggtttcgtcactcccgccccgattcgaaccaatccgcctaggcccccggcgcgccatggccgacggttccattgtggtggacttcccctccatgggcgccgccctctgcttacccaacctcgaatcactcctgcgagacttcgcctcgggtttcctcttcgccgtctccggcgccccggtccccggcgccgncgacctcaccaactttcaccgcgtattatcgcgcgttctcagcacctactcagacccgccgctcgaggtcgtctggttct

SEQ ID NO: 36789 - DNA, 427 bp, Zea mays
  Clone ID: MRT4577_133556C.1
gtggcgcacgagaccaatcctgagcgcccctctctcaatccccataaccccgacatacggggacaccataaccgagggatctgatgcctccgcagcagcgcctccttctcctcactcatcgctaccccaggagggcgcgccggcctatggcccaacgctcgccgatatcctcccaccgacatcactgcgagacgacaaggaagagaatgtggactaccttaacctaccgtgtcccgtgcccttcgaggagatccaacgcgaggctgtcatgtctctgaagcctgaactttttgaaggatcgaagcttgactacacaaaagggttcaatcaaaaccattgtcttagccacaggtaacatcattgcataatgtcagacccagggccagagactcccacatgagcgtggcctggggaaggaataaactga

SEQ ID NO: 36790 - DNA, 432 bp, Zea mays
  Clone ID: MRT4577_133557C.1
cggggaaaaatcccacccaattttttgtttttttttgggaaccccctcccggtttgggggcccctttttcgggccccttttttttgtaaccaaaaagggggcccccccaccggggggttgttccctccccaggccgggtttcttaaaaaaaacccggttttttggcaccattttttttttttttgggaaggccccccccaaggggttcccccctcccaagggataaaaaaccttttgccctttttgggggccccccccaaatttccccatattttgttggttaaagggaacccctttttccaagtagccaacagggtttccccccctttgctgatttaaagctggcccaatttgttgcaacaatttttgttgcaggtttttagggcctttggccccagggagggggtttaataaaaaccttttttttttttt

SEQ ID NO: 36791 - DNA, 678 bp, Zea mays
  unsure (1)..(678): unsure at all n locations
  Clone ID: MRT4577_133558C.1
cgggggggaaaaaaggagggtaaaacggcatgcgattcggcggcagcacacttaaaaacatgcacagaccaaaagcaaaactctacagaaaaaaagccaggccccatgtnctgcagagtcgcgccgagctatgctgcgcacgctcctatgtgcatggctggcgcaccccagcgtgctgttttgggtgccaaatgccctcctgcgagcaaacttttcttggctaggaatacatggagccataacacatctctcgaaactgaaacaccgaccactgctatggagaggacctacatccgtgaagaagcgcgcaagcancatctctgtgacgaccatcggatctcatagaccctgtgacagcccagaaccgtacgacgaatagcccagcatggcgtccgggcaaaatagctagtcctccaagaccagcaacaagcatgagatgagacactgcaatgaatttgggcacaccccagcatgcatgttccgtgcaagggggaggtggatcgatgacacgatcacgtcaccgtgatcgagggtatgggaaaccagcgagcctctcctcacagggtaattctctcgcgtcaaagagcagaccatggaggaaaatcctgagagacgtagatgataataaagcgttaacgaggcacttgccaagagattggtgaatcgactcaaccagat

SEQ ID NO: 36792 - DNA, 1291 bp, Zea mays
  Clone ID: MRT4577_133559C.1
ctcgaggccggccgggaacgttggaaccttaccaggctattcttacaccttcatactctcaatcgaatttaagcgatagtagagagctcctcctattgcaaataccatcatcatgggcgcccccgaagttcaccacctcttccacaaccccatcgccgaccactccttttcggccgatcagtctaccctggctgtcgctcgggatacttctgtcgagctctatggcaaggttggcagcgcttttaagctgaaggactcgctcaagggccacgacaagacagtcactggtgttgatattgcccctaacagtgggcgcattgtcacatgctctcaggaccgtaacgctatcgtttgggaaccttcccctgaaggctataaaccaactctcgtccttcttcgaatcagccgagccgccactttcgtgcgctggtctccctccgagaacaagtttgccgtcggatccggtgacagggtcattgctgtctgctacttcgaggaggagaacgactggtgggtgtccaagcacctgaagaagcctatccgcagcaccatcaccagtgttgcctggcaccccaactcagtccttctggctgctggatccaccgatgctcatgcgcgagtcttctccgccttcatcaagggtatggacgctcgtcctccccctggagtttggggcgagcgtctcccattcaacaccgtttgcggagagtatctgaacaactcggctggatgggtgcactccgtttctttctcccccagcggagacagtcttgcctttgcagctcatgacagcagcatcactgtcgtttacccctctggccccgaccaagcccctcgtgctgttgttactgtctctactcagcagcttcctttcaagagtctgatctggaccagtgaagatgagattatcgctgctggttacgactgcgaggctttccgcttccagggcggcgagggtggctggcagttggctggtcccattgagcaaaagggcggccctggtctgggcgagcaccgtgaggagtctgctctgaacatgttcaggcagatggatctcaagggcaaggctaaggatgacactcagcttcaaaccacccaccaaaacaccatcagcaccgttcggccctttgagagttctggtgaccgcgttaccaagttcagcacaagcggtgtcgatggcaggatcgttctgtggagcgcttaaatagactttgggatccaacatagtcgtagaatagatttggactatttatcatgagactactagtagatataatcgaactcatgaaag

SEQ ID NO: 36793 - DNA, 447 bp, Zea mays
  Clone ID: MRT4577_13355C.1
ccggccggggtatcctagccctcaattggttacatacaggcaaggtagaaatcgagtagtcaggagaggagaagatggttcgttcgaaacagaccgccctgaagttcaccggaggtaaggccccgcgctagcagatcgcctccaaggtggacgtggaagtcggcgccgacgaccggcggagacgaagaagccccacatgtactggcccgagactgtggtgctgcgcgatgatccgcatgtaccataacagcacggttgtgctgatcggtaaggtgtccttccagtgcctgatccgtgatatcgctcaggacttcaagactcatctggtgtttcagagccacgacgccctggtcctccatgaagccggcgatggctacctcggcgggctgttcgaggataacaacctctgcgccgtccacgcagatcgcgtcaacatcatgcccaaag

SEQ ID NO: 36794 - DNA, 946 bp, Zea mays
  Clone ID: MRT4577_133560C.1
ggacggcggcggcgccggggaggacgacgacgagcaggagatgcgggaggcgttcagggtcttcgatgtcgacggcgacggcttcatctctgccgccgagctgcaggaggtgctcaagaagctcggcctccccgaggccagcagcatggccaacgtccgggagatgatctgcaatgtcgaccgcgacagcgacggccgcgtcgacttcgccgagttcaagtgcatgatgcaggggatcaccgtctggggcgcttgatcgatctcatcgtcgtcggagcggacgagtgtgtgtgtccaggagcgggggcgaggcaaattgaacccacaaagctccgcaggacccgtatttccttcctcgagacagcgatgcgactgcgaccttcattcttgtcttgtcttgtggtggcaccggtgtgtctctacttgtgtgtgctcttcttttaaattcattaattaatcttgtcgtctttcgctggtcaagcagaggcgatgagaatggttcatgcatgcccggtggtcttcgatgtcgacggcgacggcttcatctctgccgccgagctgcaggaggtgctcaagaagctcggcctccccgaggccagcagcatggccaacgtccgggagatgatctgcaacgtcgaccgcgacagcgacggccgcgtcgacttcgccgagttcaagtgcatgatgcaggggatcaccgtctggggcgcctgatcgatctcatcgtcgtgggatcggacgagtgtgtgtgtgtcaagcaaattgaacccacaaagctccgcaggacccgtatttccttcctcgagacagcgatgcgaccttcattcttgtcttgtcttgtggtggcaccggtgtgtctctacttgtgtgtgctcttcttttaaattcattaattaatcttgtcgtctttcgctggtcaagcagaggcgatgagaatggttcatgc

SEQ ID NO: 36795 - DNA, 332 bp, Zea mays
  Clone ID: MRT4577_133561C.1
cccacatgatcttgttggcactctgaagcgcgatcctcgagtgcccatctagatgtaaaggaaggaacaaactatgataagacaaaacggctaccacactttggtgcgtccaagagccatatatgccatagctatggttccatttttatacgaacggcctttgttttagtattgtctacttccaccgcatcctcatctaataactagcccctgacgctgaactcacactagagcaccaaatcagagatgaacgccgccacaaggaccgagaccttgcaatagaagtgcagctcgatggagaacatgccgcccatgatgatctctgacgtgcc

SEQ ID NO: 36796 - DNA, 205 bp, Zea mays
  Clone ID: MRT4577_133562C.1
gaaggaacaaaaaagcacccggggacccctccgcaatttccccgattcgcacaacattttttgtttctaccccagctcaggagcaatggttccggacatatcacacaggcgcctgggtacttctataacaccacctaaattaaacctactacactacaaccttacaaacacctcctagcccacattctctcttcccccaacagaa

SEQ ID NO: 36797 - DNA, 802 bp, Zea mays
  Clone ID: MRT4577_133563C.1
cattctcgggctcgaccggggtcgggagagccagtctctactcgcctctctctcgcgcaagccacagtagagcaaccaaccataccaccggcccgtgtcgatctctggcctctctcgtgcaaggaattaagcaggcaagaggccaaccttcttccagcatggccaaggcgagcagcaggctgctcttctcgctctcgctcgtcgtcctgctgctcctcgtggagaccactacttctccccatggacaggctgacgccatcgactgcggcgcgagctgctcgtaccggtgcagcaagtcgggacggcccaagatgtgcctgagggcgtgcggcacctgctgccagcgctgcggctgcgtcccgccgggcacctccggcaacgaggacgtctgcccctgctacgccaacatgaagacccacgacggccagcacaagtgcccgtgatccatccaccgtggttcccagcatcagcagctttgccaaaaagacatgatacctacatatataggagtactacctagcttctgctgctgctgctgctctactaccttgttggttcattatattgtgcgcgtgcatgcatgaataaataaatgaacatattagggcatgtacaacccagatacggctgcacggtactccaagtacaagatacaactaaaacacaacacaatacagtggtcatgtctaaaacatgtgtcttacgatattcattgtaccaatcagagtattcaataaattaaagtgaccaatcaaaaaaaaaaaaaaaaaaaaaaaaaaaaaaaaaaaaaaaaaaaaaaaaa

SEQ ID NO: 36798 - DNA, 346 bp, Zea mays
  Clone ID: MRT4577_133564C.1
gtagcattggaaacaaggtaaatggtgaagttgcatagctaaatggcagtgtcatggaccacacatagatgcagaaatgaagcactcatggcttgtagacatcaggaagctggaggcctacactggcggcagatttgttcagtatcttcttcgtttcatcagatcgatccacagctatattgtacgagagcagcagatcctggacaatcaagcatgatgtggagttaatagcgtccatagtgcataataagctgatagtacagtgctattgagaacacgctcggtgtagaaagatacatttaatcaggtcaaatcacggaaaatgaaaaaaaaacacaatgtttct

SEQ ID NO: 36799 - DNA, 186 bp, Zea mays
  unsure (1)..(186): unsure at all n locations
  Clone ID: MRT4577_133565C.1
gacccaggcgacccctgcgccgaagccaccgccgtagcaagcgtacattgaacacccacaaaccaagccacaaggcggggccaccgtcaaggagggcacaggacaacagaccaagcgccgacaaagaaccacgccgggagccacaccccacaagagagaccnggacccagcgaacggggcgcagca

SEQ ID NO: 36800 - DNA, 299 bp, Zea mays
  Clone ID: MRT4577_133566C.1
aaaaaaaaaaaaaaaaaaaaaaaaaaaaaaaaaaaaaaaaaaaaaaaaaaaaaaaaaaaaggggatgttaaaaaagcgggggttattaacgacttccattttacgtactcgttcttgtatcgtgccacctatattatattgactgctggatttagttcactgtccttacttgtacaaccctggtattgcaaaacctattcggttacccacttaatcccctttgcttaatatgcgtctttcccaagctgctgtaatggcccagggtttccaaactgttcctcctcccgatggtgacttgt

SEQ ID NO: 36801 - DNA, 1512 bp, Zea mays
  Clone ID: MRT4577_133567C.1
ccggccggggccgccaccctctgttccggctctgtggagcgccgccccttctccgacgtggcgcctcagtatttgttagggttttctccgggattgaaggcactgctgcaggctgaaacgtttctcgcttgattggcggaagaagggattccagcgatctgtttgctgctagctgcgagagttcaatatgtctcggaccttcaaatcgacgacgggtctctctcggcggtttctgaatctgatcgcggccaaccactcccctggcgtcaagtcgctgcaccgcatcggcctgggtcgcatctttaactcaacgccagggccaataccaaacggagatcgattggagtccgcagcaggacaagaagactacatggtgcggccccgcgcgttggatatcattcggctccccacgccggtaatgagcttccgatcttcagcgtcatttgaaagcaaagaatggaagttggattgcttcccgttatcggactgcaaagttttctgcatggaccagtcagggcgcggtttcctcttcgatgccaactcgtgcggggtgtcaaccgtggcccatctccatacacccaaggtgaagcccatctccctctctatcccccaacccaatgttgacgaagacgaccacaacgacgagtggggcagcaaacttttcatcttggagagcatgcccgaagaaccagaggtgaactgccagttcgaggccttcatctaccgcatgcgagatgtgtatcccagggtactgaaacattggaatcgccacctcgtcccaccgccgccgccattcatccgtgagacagttaaccagaatagccgccgccttgaggttacatcttatgctgtgattgaggatggctcccacatctgcatatccattgagggcgctggcacctactgcatgcacacggtcagccacacgtggaaccgggtcggcgagtggacactacccttccgtggcaagattgagtacgtgcccgagctcaaactctggtttggcacctctgccgagtctgggcacctggctgcggctgacctctctgccatggactcccagccacagctagtgggtacttggaaggaacttgatccgccagagggttggaaggaatgcaaggattctcaggttgtcaacctcggctccggtaggttctgtatagcaaggttctttaagaaaaatccagtggacgtacgttctggtgacgaactaccgggccagagttttgctgtccttaccggcgtggaggtggtgaatcgagggtgtgatgcggaagtggaactccggatggtcactcacaaatcgaggcgagtcaacagcactacaatcgagacattgttctgattttatccattatgtgtcatctgaattagtaaaagccatcttttcttggcatctatttcttgtgtttctctctgttctcagtgtattgttcttcgatgctgaaactgattcaacttatgtacgctcttgatttacaaatttctgttgtgcttccacggatacac

SEQ ID NO: 36802 - DNA, 452 bp, Zea mays
  Clone ID: MRT4577_133568C.1
gcaaaaagggtgcgggtttgccccccaaattattttgaccctttcaagcaatacttatagccctggggtccctataggagccccccccttctgaaacaaagtaccccccggaccaaatataggatcccccaaaaacatatccttaacaagagtttaattcaaaaaaaccccgctgccaaaacctagcaaacttcacaaaaaagcatccttaaaaccccctggttggcttccccatggggcccttgacgaacaggcatttcacattctgccagttttttttcaaaagggaaacaaggaagttgccccccatctggatgttccgcgggatctgcttctcccccatccccaagttgccgacggggacccccatgcaaaggacccttttgagctggaacttgacgggggccttaatcccgttcaccctggacccgagggattcctggggaaaaacc

SEQ ID NO: 36803 - DNA, 1067 bp, Zea mays
  Clone ID: MRT4577_133569C.1
ctcgagccgccgggccgggaaataaccggaaaaactgtttccccgccctctccccaagccaaacaccggaccacccctcccccctccattcctccctctccctacacctccgctccctctcgccgctttcccccacccaatccgaccgctgggccgcctcctctccgccggggccggcgattccccggagattccgcgcgattcggctcagattctgggctcctcttgtggtttctcggcgaatcggcgggatcgggactcccggctggagaatcttccgtctctttcgctaactgtttggatcattttacgtggagattgcatgccatcaccttccttgaagtgaaaaatatatgggctgatcttggcatttcatgggaggttttgaagatgatgaaccaccctcaaaacgcgcaagagcatcctcagtagaatctgcaagtttaccagactgtttcttgttttcaaaatctgccaatcctttgggaagtacaatggctagacctttgccttcccaagggaaagaagctatggttggttccaagggtgttattaagaaggaggaatttgttaggataatcagcaaaactctgtatagtcttggatatgagaaaagtggagcagttctggaagaggaatcagggattactttacataaccctatggtgaatcttttcagagagcaggtgattgatgggaattgggataatgcggttgttaccttgaataagattggccttcaagatgtaaacatcatgaaatctgcggcatttttgatattggagcagaaattctttgaacttctaagaaatgacaatgtcatgggcgctatgaagactttacgatgtgagatcacaccccttggtgtgaatagaaaaagagtgcatgaactgtcgacttgtatgatttcttgttctccacagcagttgttccttgggttttcaaaacttggcattgattcttctagttcaaggtttaagcttctagaggaattgcaaaaggtgctcccttcaactgttatggtgctagagaggaggttagaaaatttagttgagcaagcacttact

SEQ ID NO: 36804 - DNA, 358 bp, Zea mays
  Clone ID: MRT4577_13356C.1
ccccgagtagatatttattagttaatgaagctcgtgttcccaaaccaacgattaggatttaatgtgaatttgtaaaaacataacaaattactaagcgacggatcataataattgaatattcatcgaagtaaaccataatgtttatgaaaaggattctataatgaatgtaccttgatgaagcaatttttccctgaccagatatgtagaagttaatgaagcccttccttttttccaaagcaaagataaagatttacttgatgaagcaggtttttttcccttgaccagatatgtagaagttaatgaagcccttcctttttccaaaacaaagataaggattttatgaaggacgcggcgcgga

SEQ ID NO: 36805 - DNA, 262 bp, Zea mays
  Clone ID: MRT4577_133570C.1
atgacgcgtatatggactcattgtcaatctttgccaattaatcttcttgataaattataggtaatatagtaatatgatactgcctacgcgctacaagattcaatgtctattgtatatcatatctggacgtatagcggatgtagtcattgatcttatacacctataacacatatatgaatatagtaagttctcaagataatatatgtgccagacataatgcactgacactgacctatcttatataatacactaagagagtgcc

SEQ ID NO: 36806 - DNA, 1292 bp, Zea mays
  Clone ID: MRT4577_133571C.1
cggacgcgtgggcggacgcgtgggcggacgcgtgggcggacgcgtgggcggacgcgtgggggagttcagatgattgccagctcctcacatgtgggcaggaggaagccatcagacgctgggatgttaaatctggcaaatgtcttcatgtttatgaacatcctggcattggtttgagatcatgtgcttggtttcgagatggaaagcaaatattgtctggtctagctgatcaaaccttttgcatttgggatttagatggtaaggaagtagattgctggaaagggcagagatcggcaacaacatctgattttgctgtagcaaaagatgggaatcttataataagcttgagtagggacaatgcaattcttctatttgatagggagacaaaacatgagagaataattgaagagggtagtacaattacttcattttctctatcagaagatggtgatttcctgcttgtaaatcttgtaagtgaagagattcatttgtggaacataagaaatgatcctgttcgagtcaaccgatacaatggccataagcacagccggtttgtgataaggtcttgttttggcggatttgagcaggcgttcatggctagtgggagtgaagattcacaggtctacatatggcatagagcccctggtgatctcattgagactctcgctggtcactcgggcacagtcaactgcgtaagttggaatcctgtgaatccccacatgctcgcatcagcgagcgacgatcacacagttcgtatatggggggcaaaggtcagtcttaagcgcaaggatgttgggagcagcaattgcaacagtaacgggttccaccactcgaatggaaatgcacatggcaatggtttcgctcaccagtgcaacgggaacagcaccaaatgatttgccaaggcaatgtacccccatggatggttgactggcatctgtaaatccccctttacttccctcctagaacaagagtcgccgccgaaatagtaaaagaaaagaaaagcaaaaaagaaagctgcagcacaaagtgtgggcaacctgctgggtttcgtgcgccatctttcccttgttctatcatgacagccatcacatttatttcttaattcaagatgggatggaattatgatattactttgcgtctttgatatcttgatttatcctccctgattgattgtaacttcattttgatggtggtgatggttaactctgattgctgtctaaacaaccggacggaacttatcataaatttaagtaaaatcagtcatctagttcaagggatcaaaaaaaaaaaaacac

SEQ ID NO: 36807 - DNA, 316 bp, Zea mays
  Clone ID: MRT4577_133572C.1
ttttggggggggaaaaaaaacacccccgtcagaaattaaaacaaaagaagggtcttaagacaacattgtccttcacaaagaaccaaaaggagataacgccttgttgaaccaccaaaacccgataaaacttaattaggttttttaaaaatatttgacaaacttaaagccgaatgaaacaggggtggccttcagttttgggagaccattttgggggggttggcacaaagggggggcagccaaaacgattttctccgaactccaaaacttgggttagaagaccaatttgggggggttggcgccctccctaagggagaac

SEQ ID NO: 36808 - DNA, 2630 bp, Zea mays
  unsure (1)..(2630): unsure at all n locations
  Clone ID: MRT4577_133573C.1
attgggaccctcgaggccggccgggagagatcatgaggccatgaacctcttctcccagactggacgtctgcagtctgcactctgcacccccgtgccaatcccgtttctattcagtcggttcccctctcccccaagccaaacaccaccatccttccctccctccctacgcatcctctccccctcgacgctttccccacccaatccgaccgccggggcgggcgattccctggagattcggcgcggattcggggctcctctcggggtttctcggcgaatcagcggggatcgggactcccggctgaagaatcctctatctgtttcggtaactgtttgcaacagtttgtgtggagattgcataccatcaccttccctgaagtgaaaaatatatgggctgatcttggcatttcatgggaggttctgaagatgacgagccaccctcaaaacgcgcaagaacatcctcagtagaatctgcaagtttaccagactgtttctcgttttcgaaattttccaatcctttgggaagtacaatggctagacctttgccttcccaagggaaagaagttatggttggttccaagggtgttattaagaaggaggaatttgttaggataatcaccaaaactctgtatagtcttggatatgaaaaaagtggagcagttctggaggaggaatcagggattattttacataaccctatggtgaaacttttcagagaacaggtgattgatggaaattgggataatgcggtggttaccatgaatacaattggccttcaagatgaaaacatcttgaaatctgcggcatttttgatattggagcaaaaattctttgaacttctaaaaaatgacaatgtcatgggtgctatgaagactttacgatgtgagatcacaccccttggtgttaatagaaaaagagtgcatgaactgtcgacttgtatgatttcttgttctccacagcagttgttccttgggttttcaaaacttggcattgattcttctagttcaaggttgaagcttctagaggaattgcaaaaggtgcttcctccagctgttatggtgccagagaggaggttagaaaatttagttgagcaagcacttactgtgcaaagagatgcttgctatttccataattctgttgatgggttgtcactttacattgatcatcactgcgggaaagatcagctaccatctcgcacgttacaggttttgcatgcacatcatgatgaagtgtggtttgtccaattttcaaacaatgggaagtatttagcctcagcgtcaaatgataaatctgcaattatatgggaggttgatgaggatggagagctattactgaggcatacattgagtggccatcaaaagtcagtgatgatggttgcatggagccctgatgattgtcagctcctcacatgtgggcaggaagaaaccatccgacgctgggatgttaaatctggcaaatgtcttcatgtttacgagaagtctgccactggtttgatatcatgtgcttggttcccagatggaaagcaattatctggtttagctgatcaaaacttttgcatttgggatttagatggtaaggaagtagattgctggaaagggcagggatcaacaggaacatctgattttgctgtagcaaaagatggaaaccttataataagcttgagtagggacaatgcaattcttctatttgatagggagacaaaacatgagagaataattgaagagggtagtacaattacttcattttctctatcagaagatggtgatttcctgcttgtaaatcttgtaagtgaagagattcatttgtggaacataagaaatgatcctgttcgtgtcaaccggtacaatggtcataagcgcacccggtttgtgataaggtcttgttttggcggatttgagcaggcgttcattgctagtgggagtgaagattcacaggtctacatatggcatagagccactggcgatctcattgagactcttgctggtcactcgggcacagtcaactgcgtcagttggaatcctgcgaatccccacatgctcgcctcagcgagcgacgatcacacagttcgtatatggggggcaaagaagtccagtcttaagcgcaaggatgttgggagcagcaattgcaacagtaacggttctcgctcgaatggcaatgcacataacaacgttttcgttcaaaagtgcaacgggaacaacaccaaatgatttgccagggcaatgtatccccatggatggttgactggcgtctgtaaatccccctgtcctttacttccctcgtggaagaagaatcgccaccgccatagttaagacaacaacaacaaagctgcagcacaaagtgtggggaacctgctaggtttcgtgcgctatctttcccttgttccttcatgactgtcatcacatgtatttcttaattcaagctgggatggaattatggtattactttgcatctttgataaaaaaaaaaaacctcactgattgattgtaactgcattttggtggtgatggttgttaactcctcttattgcaaaaaaaaaagaaacgaaacaaaaaatagactaggatgctccgtctaaagaacgggacggaacatcttatcacaaatttaagtagattcagtcatctnnnnnnagt

SEQ ID NO: 36809 - DNA, 377 bp, Zea mays
  Clone ID: MRT4577_133574C.1
taattattggttcggcaagcaatggatttttcatgtttcagcaaaggtgtagatgcacccacgcgtccgaatacagattcggagacacttaggcggacgcgtgggtagttcttgttccgagagcagattatggataatcttttaaatcagaccaggtgaaattgatggaggatttttgtaaaaaacttggccattctaatccaataagaacttgtgaaaatgtcatttaacgagatcacgtaaaaatcctccagcactggacttcaaaaaattatagatgggagctgtatttggctcagtgacataaaggttgccaaaaatcggtaattcaaatttaaatcttggacatgcaaagtggttaatgtgagtctttgatc

SEQ ID NO: 36810 - DNA, 328 bp, Zea mays
  Clone ID: MRT4577_133575C.1
cccacgcgtccggttccctgataccgactaggtacctttggaactgaaagtaggcagagtgatcttattcatgaacggtatctgctgttgatgaatgtcaagcttcattgtaaatgtcattgatgatcacaacagtggactatttgacccgtcgctagatgggctgtcaggtagtctcatacgcaacgcggtgagatcacttggatccgttagaagaccgccgagcacacaatgaccgtcatcacacagacccattaacggatcatgtagatctaatgtcgacagaccacacagacacatcatcgttagctcttataattataggaat

SEQ ID NO: 36811 - DNA, 271 bp, Zea mays
  Clone ID: MRT4577_133576C.1
acgcccactcgtccgcctgcacacgaagcctagaatagccctcctgttgtgggccacctactaggatccccaccaccccacccctaccccatacaacagggtgatggaggctaagatgggacgcttctttcagtacgtgaacaatttctttaaaggaggcgaccactttccctggtgcgaccacgacctcattcgtcggctgtaaaagagagcttgttaatgctgcaaatgatgcacagaggaatgaaagccttattaggctgtcatgggc

SEQ ID NO: 36812 - DNA, 476 bp, Zea mays
  Clone ID: MRT4577_133577C.1
aaaatacatttttaccggcattgtgtgtcggcaccaacaaacaggatataaagaaaaataaaaaaaacaaacacccaggcaaaggagagaaaaagtgtcgataaaagatgaaaaaagcaagggaaaaaggaaccgggaacagaaaatatgcggacaagaatacggaagacccactgcaaaaaaaagggaaaccttaagaggaaaagagagccgcaaaagaaaaaagctataagtgctaagaaaaaaccagccgtgaaaaaggaaaaaaccgcaaatgatctcaatatcttcaggggagggggagggacccggaatttaatcaaaagacaatgggtgaaaagggttctcggagggggcctgctttaaaacaggcaaaacccttacctgaagggccaaaacttctactgaaggcctcctcggaggcgcaacagcaggccggggagaggcattgagagggaccaaagaagcctaaaaac

SEQ ID NO: 36813 - DNA, 762 bp, Zea mays
  Clone ID: MRT4577_133578C.1
cctcgaggccggccgggctccgccggctcccccactcagaaaacccagccgccgccgcatcggcctcccaggtaagcagtagcgtcctccgtccgccgcgtgctcatgtccgcggcgctatcgacggagctccgccacaagtacaatgtgcgttccatcccgatccgcaaggacgacgaggtgcaggtcgtgcgcggcacctacaagggccgtgagggcaaagtggtgcaggtgtaccgccgtcgctgggtcatccacgttgagcggatcacccgcgagaaggtgaacggctccaccgtgaacgtgggcatccacccttccaaggtcatggttacaaagctgaagcttgacaaggaccgcaaggcgctcctcgaccgcaaggcccggggccgcgccgccgacaaggctaagggcaagtttactgccgacgacgtcgccgccgctgctggtggcgccgccgccactggcgcgtctctccaggagatcgactaggcgcttcgcggggatctgatggtggtcctaccgcctattactccttatcgctctagtttttgctatcaatgattatgtgctaggagttttatgttacttataaactgctttgagcctcgatgggagttgaacttaatgtggagtgtatctgagatatgaagaactcattatatggctaatatctcttgttgtgttctgctaaatggttgccgagttttggctttactatattgcttattacatgcgaaaaaaaaaaaaaaaaaagcggcc

SEQ ID NO: 36814 - DNA, 249 bp, Zea mays
  Clone ID: MRT4577_13357C.1
catatactatgctgatgtatgttgcgatatactatcttagattaaatctggtcactttgttgcctgtttaaaaagtgtggtatttcaagtagagttattttcctgaaatatatttgcaaactcaagctgcttataatcaaggaatatttttattgattgaagaaaatgactgctgcaattcaaaagtgaacttattttattatatagatgatttcttaaaagctatgtataccatgatacaaaatcatg

SEQ ID NO: 36815 - DNA, 369 bp, Zea mays
  Clone ID: MRT4577_133580C.1
tcgataaaacccagccgccgccgcatcggcctcccaggttagcagtagcgtacaccccagccggcggcgtgaagcgcatccccctgcgtgacgagctcccgccggaagtgcctcatggagcactttacgggcccgttctacgttcgacgcgtgctcatgtccgcggggctatagacggatcttcgccacaagtacaatgtgcgttccatgccgattcgcaaggacaacgaggtgcatgtcgtgcgcggcacctacaaaggccgtgagggcaaagtggtgcaggtgtaccgccgtcgctgtgtcatccacgttgagcggatcacccgcgagaaggtgaacggctccaccgtgaacgtgggcatccaccct

SEQ ID NO: 36816 - DNA, 839 bp, Zea mays
  Clone ID: MRT4577_133581C.1
ctcgagggcctggccggaaaaaaaaaaaaaaaaaaaactccactcgctcccccacacagaaaaccctagccgccgccaccgaagcggcctcccaggtaagcaagagcgtccaccccgccgccgccatgaagcgcaatccccgcgtcacgagctctcgccggaagtgccgcaaggcgcacttcacggccccgtcctccgtccgccgcgttctcatgtccgccgggctgtcgacggagctccgccacaagtacaacgtgcgctccatcccgatccgcaaggacgacgaggtgcaggtcgtgcgcggcacctacaagggccgtgaggggaaggtggtgcaggtgtaccgccgccgctgggtcatccacgtcgagcggatcacccgcgagaaggtgaacggctccaccgtgaacgtgggcatccacccctccaaagtgatcgtcaccaagctgaagctcgacaaggaccgtaaggctctcctcgaccgcaaggcccggggccgcgccgccgacaaggctaagggcaagtttactgccgacgacgtcgctgcagccgccgctggtggcgccgccaccggcgcctctctccaggagatcgactagactcttcacggtcatctgatggttgtcgtaccgccttttcctcatctcttttgtttttgctaccaatgattatgtgatagaggttttatgttatttgaaaactgctctgtgcctggatgagagtttttggaacataatgtgaacctgtgtgtctgtgacctgagctttgaagatctcattatgtggttaatgtctccttgtagtatcttctaaatggttgctgtgatttgtcttcactct

SEQ ID NO: 36817 - DNA, 523 bp, Zea mays
  Clone ID: MRT4577_133582C.1
gaaggggcggatccagcaccccatcccaacatcttcctaaaatccgcggatccgccgcctacctctgcaatttgggctgtctctcttgtaaacttaagcttcatcttcatgcatgggtacggagaagtcccgcatcaacattgtggtcattggccacgtcgactctgccaagtagaccaccaccgggcacctgatctacaagggggggggcgttgacaagcgtgtaatagataggttcgagaaggaggctggtgagatgaacaagcggcccttggagtatgcttgagtgctcgacaagctcaaggctgaccgtgagaggggaatcaccattgatattgctctgtggaacttcgagaccaccaagtattactgcaccgtcattgatgcccctggacaccgagacttcatcaggaacttgatcactggtacctaccaggctgactgtgctgtgcttatcattgactccaccactgagtggctttgaggctggtctgttcgaggtatggcagacccgtgagcatgc

SEQ ID NO: 36818 - DNA, 644 bp, Zea mays
  unsure (1)..(644): unsure at all n locations
  Clone ID: MRT4577_133583C.1
agtttatgagataaggagtggggcaatccttccgccgactacaccagccgcctccactcgctctcccacacagaaaaccctagccgccgccaccgaagcggcctcccaggtaagcaggatcgtccagcccgccgccgccatgaagcgcaatccccgcgtcacgagctcccgccggaagtgccgcaaggcgcactttacggccccgtcctccgtccgccgagttctcatgtccgccgggctgtcgacggagctccgccacaagtacaacgtgcgctccatcccgatccgcaaggacgacgaggagcaggtcgcgcgcgggacctacaagggccgtgaggagaaggtggcgcaggtgtaccgccgccgctgtgtcatccacgtcgagcgaatcacccgcgagaaggtgaacggctccaccgagaacgtgagcatccacccctccaaggcgatcgtcaccaagctgaagctcgaccaggaccgtaaggcgctcctcgaccgcaaggtccgtgagccgcgccgccgacaaggttaacgtgaagtttactggccgacgacgtccacgtcgccgccgggtgnggttgcctgctctcacttctactttgctctgattcatcatactcatcgcagatatctaatggtgggct

SEQ ID NO: 36819 - DNA, 194 bp, Zea mays
  Clone ID: MRT4577_133584C.1
tgaatgccgactagagacgtcggtacaagaacactcggttctaaagggtgagttgcttcactttcttggcaatctgcttcttgcttcgtagaacgcaacttctgtggagctggggaagagagaggaggtcagcgaacaggaatggaggtatggaacagaactacgtcgtgctagagtaggtgaggcaagcacag

SEQ ID NO: 36820 - DNA, 392 bp, Zea mays
  Clone ID: MRT4577_133585C.1
cccgggtcgcccagcgtccgataaaacctaccgtcgccaccgaacggcctcccagtaagcaagacgtccacccgccgccgccatgaagcgcaatccccgcgtcacgagctctcgccggaagtgccgcaaggcgcacttcacggccccgtcctccgtccgacgagttctcatgtccaccgggctgtcgacggagctccgacacaagtacaacgtgcgctccatcccgatccgcaaggacgacaaggtgcaggtcgtgcgcggcacctacaagggccgagaggggaaggtggtgcaggtgtaccagacagcgatggatcattcacgtcgagcggatcacccaaaaagaaggtgaacatctacaccataaacgtgggcatgcaccaatccaaagt

SEQ ID NO: 36821 - DNA, 689 bp, Zea mays
  Clone ID: MRT4577_133586C.1
ccggccggggcctccgccggctcccccactcagaaaacccagccgccgccgcatcggcctcccaggtaagcagtagcgtccaccccagccgccgccatgaagcgcaacccccgcgtcacgagctcccgccggaagtgccgcaaggcgcacttcacggccccgtcctccgtccgccgcgtgctcatgtccgcggcgctatcgacggagctccgccacaagtacaatgtgcgttccatcccgatccgcaaggacgacgaggtgcaggtcgtgcgcggcacctacaagggccgtgagggcaaagtggtgcaggtgtaccgccgtcgctgggtcatccacgttgagcggatcacccgccgagaaggtgaacggctccaccgtgaacgtgggcatccacccttccaaggtcatggttacaaagctgaagcttgacaaggaccgcaaggcgctcctcgaccgcaaggctcggggccgcgccgccgacaaggctaagggcaagtttactgccgatgacgtcgctgccgccgccgctggtggcgccgccaccggcgcctctctccaggagatcgactagactcttcacggtcatctgatggttgtcgtaccgccttttcctcatctctttagtttttgctaccaattgttatgtgatagaggtcttatgttatttgaaaactgctctgtgcctggat

SEQ ID NO: 36822 - DNA, 169 bp, Zea mays
  Clone ID: MRT4577_133587C.1
gacccacgccaggggacgcatgcttaacgcgatactaatgaccggcacattgtaaagtgtttgaagaccccgtatgtgaaacacccgaggaacgaatgggcttcgcttcgagctttttacctttataacccttggtactggaacaaaccgcagccctattacagcaatt

SEQ ID NO: 36823 - DNA, 839 bp, Zea mays
  Clone ID: MRT4577_133588C.1
cttcccaaaaaaaaaaaaaaaaaaaaaaaaaaaaaaaaaaaaaactcgctctcccacacagaaaaccctagccgccgccaccgaagcggcctcccaggtaagcaggatcgtccagcccgccgccgccatgaagcgcaatccccgcgtcacgagctcccgccggaagtgccgcaaggcgcactttacggccccgtcctccgtccgccgtgttctcatgtccgccgggctgtcgacggagctccgccacaagtacaacgtgcgctccatcccgatccgcaaggacgacgaggtgcaggtcgtgcgcggcacctacaagggccgtgaggggaaggtggtgcaggtgtaccgccgccgctgggtcatccacgtcgagcggatcacccgcgagaaggtgaacggctccaccgtgaacgtgggcatccacccctccaaggtgatcgtcaccaagctgaagctcgacaaggaccgtaaggcgctcctcgaccgcaaggcccggggccgcgccgccgacaaggctaagggcaagtttactgccgacgacgtcgccgccgccgccgctggtggcgccgccaccggcgcctctctccaggagatcgactagactcttcacggtcatctgattgttgtcgtaccgccttttcctcatctctttagtttttgctaccaattgttatgtgatagaggtcttatgttatttgaaaactgctctgtgcctggatgagagttttggaacataatgtgaacctgtgtgtctgtgacctgagctttgaagatctcattatgtggttaatgtctccttgtagtatcttctaaatggttgctgtgatttgtcttcaaaa

SEQ ID NO: 36824 - DNA, 797 bp, Zea mays
  Clone ID: MRT4577_133589C.1
gccggccgggtcgggctccagtcgctcccccacacagaaaaccctagccgccgccaccgaagcggcctcccaggtaagcaggagcgtccaccccgccgccgccatgaagcgcaatccccgcgtcacgagctctcgccggaagtgccgcaaggcgcacttcacggccccgtcctccgtccgccgcgttctcatgtccgccgggctgtcgacggagctccgccacaagtacaacgtgcgctccatcccgatccgcaaggacgacgaggtgcaggtcgtgcgcggcacctacaagggccgtgaggggaaggtggtgcaggtgtaccgccgccgctgggtcatccacgtcgagcggatcacccgcgagaaggtgaacggctccaccgtgaacgtgggtatccacccgtccaaggtgatcgtcaccaagctgaagctcgacaaggaccgtaaggctctcctcgaccgcaaggcccggggccgcgccgccgacaaggctaagggcaagtttactgccgacgacgtcgctgccgccgccgctggtggcgccgccaccggcgcctctctccaggagatcgactagactcttcacggtcatctgatggttgtcgtaccgccttttcctcatctctttagtttttgctaccaattgttatgtgatagaggtcttatgttatttgaaaactgctctgtgcctggatgagagttttggaacataatgtgaacctgtgtgtctgtgacctgagctttgaagatctcattatgtggttaatgtgtaaaaaaaaaaaaaaaaaaggccccta

SEQ ID NO: 36825 - DNA, 247 bp, Zea mays
  Clone ID: MRT4577_13358C.1
tctagcgtacccaagatgacacatacaaagcggcgacgtcgtatatcatttatacaacaacgtaaatcaaaataactggcctacttatgcacaacgggcttgactgcataaactgttaacgtgcccatcttaactgaatggtcacacattcctatttcgtccacttaattatctattcattacatcaatgccagctgcagtatgcaacaacccagctcttcaaatgtataagctcacacaagctata

SEQ ID NO: 36826 - DNA, 1611 bp, Zea mays
  Clone ID: MRT4577_133590C.1
ggccggccgggaaaaaaaaaaaaaaaaaaaaaaaaaaaaccactcgccctcccacacagaaaaccctagccgccgccaccgaagcggcctcccaggtaagcaggagcgtccaccccgccgccgtcatgaagcgcaatccccgcgtcacgagctcccgccggaagtgccgcaaggcgcactttacggccccgtcctccgtccgccgcgttctcatgtccgccgggctgtcgacggagctccgccacaagtacaacgtgcgctccatcccgatccgcaaggacgacgaggtgcaggtcgtgcgcggcacctacaagggccgcgaggggaaggtggtgcaggtctaccgccgccgctgggtcatccacgtcgagcggatcacccgcgagaaggtgaacggctccaccgtgaacgtgggcatccacccctccaaggtgatcgtcactaagctgaagctcgacaaggaccgcaaggcgctcctggaccgcaaggcccggggccgcgccgccgacaaggctaagggcaagtttactgccgacgacgtcgctgccgccgccgctggtggcgccgccaccggcgcctctctccaggagatcgactaggctcttcacggtcatctgatggttgtcgtaccgccttttcctcatctctttagtttttgctaccaatgattatgtgatagaggttttatgttatttgaaaactgctctgtgcctggatgagagttctggaacataatgtgaacctgtgtgtctgtgacctgagctttgaagatctcattatgtggttaatgttaaaaaaaaaaaaaaaaagcggccgctttttttttttttttttagccatataatgagttcttcatatctcagatacactccacattaagttcaactcccatcgaggctcaaagcagtttataagtaacataaaactcctagcacataatcattgatagcaaaaactagagcgataaggagtaataggcggtaggaccaccatcagatccccgcgaagcgcctagtcgatctcctggagagacgcgccagtggcggcggcgccaccagcagcggcggcgacgtcgtcggcagtaaacttgcccttagccttgtcggcggcgcggccccgggccttgcggtcgaggagcgccttgcggtccttgtcaagcttcagctttgtaaccatgaccttggaagggtggatgcccacgttcacggtggagccgttcaccttctcgcgggtgatccgctcaacgtggatgacccagcgacggcggtacacctgcaccactttgccctcacggcccttgtaggtgccgcgcacgacctgcacctcgtcgtccttgcggatcgggatggaacgcacattgtacttgtggcggagctccgtcgatagcgccgcggacatgagcacgcggcggacggaggacggggccgtgaagtgcgccttgcggcacttccggcgggagctcgtgacgcgggggttgcgcttcatggcggcggctggggtggacgctactgcttacctgggaggccgatgcggcggcggctgggttttctgagtgggggagccggcggaggccccggccggcctcgaggtacccaatcgccctatggagtg

SEQ ID NO: 36827 - DNA, 377 bp, Zea mays
  Clone ID: MRT4577_133591C.1
aaacaacaggggggtgccccttcttaaggtttccaattttgccaccgtaattcaagcaaactggcacgtttttttacagcgcccccaaaggaaaaaccctggggcgacccaacacaacggcctggcgggaaaaccccttttggcccccaggttaattccctaagaggccatccccgttcgcccttctgaacaattgcccaacaggcctggccaatgggaccctcccaacagcggcgcattaagatgggcgaatgggacgccccctggcagggggacctatccgctggggagggccctgttacccgctccttgccctttcctccttgcctttccctgaccgccggtctttttgccccaaaaacctccattttgggggc

SEQ ID NO: 36828 - DNA, 267 bp, Zea mays
  unsure (1)..(267): unsure at all n locations
  Clone ID: MRT4577_133592C.1
gcgagcagcagtaggcagcggcgcgggcgaggagcataccagcacccagcagccctcgtcggggggcggnagttgtagttttaccagcctccgcctttcctcgtctcttttgcctctgcctctccccctaacctccttccatttctccaccccatcccgcttccgtttccgcttcctcgccacttagttcgttccgtacccgcagtcgtggctgcgttctcattgggggcacgcattgtagcttttctagatggtggtgaagatctg

SEQ ID NO: 36829 - DNA, 268 bp, Zea mays
  unsure (1)..(268): unsure at all n locations
  Clone ID: MRT4577_133593C.1
cggagccggaaaaaaacaacaaaagccaagcgccggaacaacgcccggaaccccaaaaggacacacacagggacacggaggacacgagggccaggcccccccaacagaaaggaaaggaaaggaaacgaacgcacaaggaagcccacacccgccaaccagaacaaccggaaaggaacacagcacggcgcgcggggggggacggacaaaggcggaagnacaccgaaggagcggcgcaaccaccacagacccgggccccgagcagacaggg

SEQ ID NO: 36830 - DNA, 448 bp, Zea mays
  Clone ID: MRT4577_133594C.1
tttcccaaattatatgtttcttttcctctttgtttattaatttactgtttgcttttggcttgttggtttaaaaactttggtgtttggggaggaagatacaaacaaggtcaattcaaattttatggtccaaaaggggggggaactcttaaattctgggaaaagagggggggcccttatccccctcccccaaaaaagcaacccactaaatatttgggggggaggccaacctccccagggggaggggggcccctggaaaacttttggggcggggaaaattcaaatttttttttggaaaagaaacctttgggggctccccgggcgtttgcccacacccggacagcggggccttcccgggagggccgtaccgacacaaaaaacacaaccagggttaactttaacacacccattagaaaactggcaaaattttttaaatcccgggggggggggg

SEQ ID NO: 36831 - DNA, 616 bp, Zea mays
  unsure (1)..(616): unsure at all n locations
  Clone ID: MRT4577_133595C.1
gtaggattcagactggcgccacacgacggaacacaaccgcaccctgccttcccgtcggcacccatctgttcctccgttaaagctcccactttataaatcacggctcattggctcgctcctcacacgctcatctcgcctgggaccgattggccgcggaactggctgagggcactgcaggggtctcaggtagctgagatgtggatctaaggagatgtctggttacggaagnatctaggcggcagggcgggcacactggcgacacgcgcgggaacgtgatcaagcgcaaacctgcggcggcatgggaggccggcaagccactggccaccgaggcagcgcggcacgtagcccctacgcaggccatggaggtgcgcgtcaagatcctcttcacctcgctctgccacaccgacctatacttatgggaggccaaggggcacactgccgtgttccctcggcatctttggccacgaggctggacgcctcatagagagagctggagacggtgcgactgacgaacctcctggcgaccatgtgcttactgtgtccactggggagtgcaaggagtgcgcccactgcaagtcagcagatagcaacctgtgtgaactgcttatgatcaaca

SEQ ID NO: 36832 - DNA, 202 bp, Zea mays
  Clone ID: MRT4577_133596C.1
cccacgcgtccgctagttctagatcggtaggctacctttcgtacacagttaaggatgggactccttactctgctaatgtcaaaactacagacttatgaacacatgaattccaatcaacattttctggctgaaaaaaaaaaaaaaaaaaaaaaaaaaaaaaaaaagaaaaacgatataaaagatccaaagctaaaaaacgcaa

SEQ ID NO: 36833 - DNA, 481 bp, Zea mays
  Clone ID: MRT4577_133597C.1
actaaacaccattccaatacatgtagggaattagaggtgattcatgggcataggggcaaaaaaactaacaacgaaggaaggaacaagaaaaaaaaaaaaaagggcgaaggacctatcgagacggacagaccagaaaaagctaggctctggaaaaggaaataaggagcaaaaaaaaagaaggggggaagcaaagaaaaaagggaagggatgctgggaggaagggggcctggccccataggaacaggtcttgaaaaacgggccagttgcccggatgcccaatggaaaaatgcaagggtggggcaaaggccaaaaaagccacctggaggtggggccatctccatggagccaaagactaccagtttattagaactaaaaaaagcatcctcatcagcctgccacacattagcatggacaggggttgaagcacaagcgcacaaacaaacaaggacagaatagccaccatccccatccttgaagccaa

SEQ ID NO: 36834 - DNA, 521 bp, Zea mays
  Clone ID: MRT4577_133598C.1
tgacgtccatgcgcgcgccgcgtgcgcgggcctctgagcgggcgcgcccttttttttttttttttttttttttttggttggttattgtgttatttttggttttttgtttgtatttatgtgtaccaaaactcacaggaaaaattcatttcttatatcggctggcacatttgcttaaaaaaacttacggggcactacccccccctttttggagggggggctttactaccctttggtccacaccgtcatgggccaacaacattgccccttttttgcagggggtgctggacttttttccaaccaattctgaaaaagaaaaaaaaccccgggcccttacacttttttgaaggggaaacgcacaacttgacaatccccgaaagggggggctccatatgttataggctggtatctactttaaaatgggcagcacgcttttctaacccctcaaagtgggaaaatccacgctaagcttatgtttccgggaaatttccatctccacatgtaaacagacccaattttgccat

SEQ ID NO: 36835 - DNA, 345 bp, Zea mays
  Clone ID: MRT4577_133599C.1
caatgggtacattcaaagatcaaaagtgtgtgatcactggcaaggaaatgattgtgatcaattatgatggttggtatatgagcacgagctgctagtggaaccattatgactgaatggtaataaggtgctataggttcctttctttccacataattataacaaaatgagtgttaagtatgtgaatatcaaatacttcaatcctacacgttgcaagagggaatcgctataggcatgtaacatgatcagtgttgagagtatacaacctggacgataataagcagatagatgtgtgcattcgcagtacaataaatactgtacgataactgaataatttgtgctaggaaa

SEQ ID NO: 36836 - DNA, 516 bp, Zea mays
  Clone ID: MRT4577_13359C.1
aaggcatttgccttttgcaatattccatcagtaaaaaattggttcagctagcactaagtcagaacattggatacgcccctaatttctcaatttaaagagccgaacataaatgttttttatattgatatacaataggttagagacagctgttgatttgtcatttaacatgtttaaaacagtgaaaagaataacaaaacttagcgcgcttaaaattgcgaggtgaatacttaaatatagtaaatagttaaactgcaaccaggaagtacagtgtcatttaaacatacgaggacactctactgaccaaatgtggtgcaggatcctgccaatgcttccataatgtaactgtcagctccctaggtgaaggagctgctgtccaggatttgcagtacaaaaaaaggcccctctctggcaaccctaaaaaaatagtggcaaggccactgcccagtggccacctgtgataatggtgcagcccaacagggatagtggcggcagtggtcatccgacagcaacggaatt

SEQ ID NO: 36837 - DNA, 161 bp, Zea mays
  Clone ID: MRT4577_1335C.1
cgtttcttcatgccaggctctctgtaccagcaactgttcctgccgcggttacttctacgacgactcgtcctcgtcgtgctacttggtgaagcacgagctcggctccttcatgaacgctgactccaccaaaggctccgactagctcggctacatcaaggtgc

SEQ ID NO: 36838 - DNA, 997 bp, Zea mays
  Clone ID: MRT4577_133600C.1
aacggattcgactggctcgccttctccgacctctccggcttcgcgcgcctgtcgcttggctccgccgtcatgctctgcctggagttctggttctacatgttcctgatcgtcatcgtcggcaacctggagaacgctcaggtcgccgttgctgcagtctccatttgcacgaacctgttcgggtggcagatcatggtgttcttcggattcaacgcggccatcagcgtgcgggtgtcgaacgagctgggcgccgggcggccccgcgcggccaagttcgcgatcctggtggtgctcatgtcttcggtggccatcgggttggccttcttcgtcctcgtcctggccttccgcgacgtgtacggcgcgcccttcacggaaagccccgaggtggtgcgcgccgtggccagcctcggcgtcgtcttcgccttctcgctgctcctcaacagcgtgcagccggtgctgtcgggcgttgccgtcggggccggctggcagtggctggtggcgtacatcaacctcggctgctactacctcgttggcatccccgtcgggtacatcatcgccttcccgctgcgcggcggggtgcaggggatgtggggcggcatgctcacgggcgtcggcctgcagaccctcatcctggtcgccatcacgctgcgcaccaactgggacaaggaggccagcgaggcccattccaggatacagaaatggggtggatcggcggcggccaaagtttcacatgcatgactagtctgaatgacgcgcgccaccatgagaatacaatacaacagatgccatgcgagcagaatggcatgctgcggtgcgtaagcttgattgtacgtgcaggttgcgttttgggctgcttaagtagttggagacaaagtcatacttaggttgttttgtttccagcagatatatgcttgtaaaacaccgtattgtgccatagactgcatgattcttagcagagtttgaaatagaaaataataatatcctccctactacttaaggc

SEQ ID NO: 36839 - DNA, 610 bp, Zea mays
  Clone ID: MRT4577_133601C.1
attggtgtctggtctcacattccagagttattgtttgtccagttgattatcagatctactgtacaaaataaatattataagcctaagacatttctaatattattttttcaagtcttctctcgcatgagtttcctctcaagtgacagcaactgctggacaaatccagcattaggctttgatgcaggtcttttctcttttacgagtgcattcgcgtcattaaatgtcagaccacagtaggtcattaaataggcgattactacagttggtgcccgagatatgcctgcattgcaatgcacaagcacacaacctccttttctaataacttcttccatagaaggcaatgctttattcagcatgttgtcaattggctcatctggtacatcaagggcgggaataaaactgtaaaccaagtttgacatgtgtggaagagggggaaccggaacacctatgctaacaatatgagtgattctacaatctttcattagtttcaaatcttgggttacatcctgtgatccaaggtatagtgaggacttgattatttcagctacttggagatcgggttttgtgtcaatcacaaacccaggacatgactgcctactatcttgaatct

SEQ ID NO: 36840 - DNA, 491 bp, Zea mays
  Clone ID: MRT4577_133602C.1
ggttctttataccttttaattccttctttggtaccatgttgcatcggatgcatgtcaccttatcctgattccctatttctgtccaataaccgtacttccagcctgggtcattgaattttgcctctggatcttgcatggggtgataaggatcaacatcaatgggagcagcagcagcggatgcggatcagacactctccatgacaatggcttactctgtacaggtggatagtaagaaaaaggcaaaggttcagctcactaattaacatcagagagtggggaacagagcagcacggaggcccattatcttgcaccggatttaaagcagagggctgctgctaggatgctggcctgcccgccctgtctggctgcgccagcgccacccctcctgcgtggccacaccccactcctccctgtctgcgcctgcataccttgcttggcccgtgccggccacctcgctgtgccgcccgtcctgcctggccacgccactcctc

SEQ ID NO: 36841 - DNA, 654 bp, Zea mays
  Clone ID: MRT4577_133603C.1
ctgaccagcaccatggcggttggcaagaacaagcgccttacgaaaggcggcaaaaagggagccaagaagaaagtggttgatccattttctaagaaagattggtatgatgtgaaagcacctgctatgttcaatataagaaatattggaaagacgctcgtcaccaggacccaaggaaccaaaattgcatctgatggtctcaagggtcgtgtgtttgaagtgagtcttgctgatttgcagaatgatgaagttgcatttagaaaattcaagctgattactgaagatgttcagggtaaaaactgcctgactaacttccatggcatggatcttacccgtgacaaaatgtgttccatcgtcaaaacatggcagacaatgattgaagctcacgttgatgtcaagactaccgatggttactcgcttcgtctgttctgtgttggttttactaaaaaacgcaacaatcagatacggaagacctcttatgctcagcaccaacaggtccgccaaatccggaagaagatgatggacatcatgacccgagaggtgcagacaaatgacttgaaagacgtggtcaataaattgattccagacagcattgagaaggacatagaaaaggcttgccaatctatttatcctctccatgatgtcttcgttagaaaa

SEQ ID NO: 36842 - DNA, 169 bp, Zea mays
  unsure (1)..(169): unsure at all n locations
  Clone ID: MRT4577_133604C.1
cccagcgtcctgnaaaactgtgaatgcctaagggctactgtttctaatttgagcaagttttctaagggtgaaattgctgcgcccaagctaaaggccctgttgtttaagcctttgaaccaggttaacccagtctctaatccctgtcngaaaactgttgagaggaagcgtg

SEQ ID NO: 36843 - DNA, 1438 bp, Zea mays
  Clone ID: MRT4577_133605C.1
cctcgaggccggccggctacctgtgtacattcctttgaagcttgttaagaaggtggtggcgaggcagatcccactgataaagctgcacatagagaagaaagtctgtagcgagttcaacgattggctcgtccatattagaagaatggccaagcagattgggcaggcctccataagccaggcgtcgttggctcaccaaaagggcgaggagatgtgtgcaccacatgcacacatgtcttgggatggaggacaagtttagagactattactacaagaacaggctgatgcaactcaacttggacatgcagatctccacttcgcagcccttcttggagtcccatcaacccttccttgcccaggtagctgggttcgtcgaagaacgtgttcttcgaaccgcagatggattgctgttggagagtcaggtggaaacaacatgggagacatctattggtaagataacgtctatactggaggaacagttctctcgcatgcgtaagccagccacttccttctcataaaagactatgtcactcttctaggcgcagctgtgaacaagtacggctatcgaatcacacagctgattgaagttctggagaagagtagggacaaataccaccagctgctgcttctggaagaggtgaactggatagcggaggaagcccccgacaacgcgaacgactacatgaacgaggtcctgatctaccttgaaacgttggtgtcgacggcgctcctgaacgacggcgtgaagaggttcaccgtcaacgcggtgttagggatcgatattgacctgaagacgctggaagcgtttgcggacgacaagttcgatagcacgggctgtcagatctggggaaggaaacgactttcagggactgtttggttgagatcaggcagctcacgaatctcctgctcagcagccagcctgagaacttcatgaacccggtgatcaggcagagaaactacgggtctctggactacaagaagctggccatcatttgtgaaaagtacaaggactctgcagacagtctgttcggaagcctttcgaaccggaacaccccccagcagagcgcccgtaagaaatctatggacgtcttgaagagaaggcttaaggattttagctaaggtcaaatcggttgcattttatatataacaaatgaataaattgctggcactagcgtataatatctatcttttagattttaacttcctcgactacttttctaggtaggtccatttgtctttgtaggtgaagtgtcgatttgtctgtgagagtgagaccataatcacgtgaagctagagagagaggcaaagggattaagatttatgtgtggtgcttactgtatttgtttttattattttattgtgctttgtacatgtaccgtcattcttactctggcgttcttttactgcaaagtttgacacaatatatcaaaggttacttagt

SEQ ID NO: 36844 - DNA, 918 bp, Zea mays
  Clone ID: MRT4577_133606C.1
gtaacgtactcattccgccttccttcctctcgcgtgtgcgccgtgttcccctcctttccccagaccccagcagcgggccgcggcactgcccgccaccaccgcgccatggccgcctcccaccgcctaatcctgctagtcctctgcctcaccgccaccgcggcgtccgcccacaacatcacggccatcctggacgggcgctccgagtacacgctgtacaacagctacctctcggagaccaaggtgtgcgacgagatcaatagccggagctcggtcaccgtcctcgtcctcaccaacggcgccatgtcctccctcgtcgccaacctctccctcgccgacatcaagaacgcactccgcctcctcaccctcctcgattacttcgacgagaagaagctgcactccatcggctccagctcccagctcaccacctcgctctaccagaccaccggccaggccgcgggcgacatgggccacgtcaacatcaccgacctccgcggcggcaaggtcgccttcgcgtccgccgcgcccggcgccaagttccagtccacctacaccaagcgcgtcgccgacttcccgtccaacctctccgtcctcgaggtctccgaccccatcaccttccccggcctcttcggcgccccgtcggcgtcgtccgccaacatcacggacctcctcgagaaggccgggtgcaagcagttcgcgcgcctcatcgtctcgtccggggtggtcaagacgtaccaggccgccatggacaaggcgctcaccctgttcgcgcccaacgacgacgcgttcaaggccaaggacctgcccgatctgagcaagctcaccagcgccgacctcgtcgcgctgctgcagtaccacgcgctgccgcagtacgcgcccaaggcgtcgctcaaggtcgccagcggccgccaccgcggtgga

SEQ ID NO: 36845 - DNA, 1016 bp, Zea mays
  unsure (1)..(1016): unsure at all n locations
  Clone ID: MRT4577_133607C.1
cccacgcgtccgggcagatcccactgataaagctgcacatagagaagaaagtctgtagcgagttcaacgattggctcgtccatattagaagaatggccaagcagattgggcaggcctccataagccaggcgtcgttggcttaccaaaagggcgaggagatgtgtgcacggcagagggaagccgaagcgcatagccatgctggaccagatgagcatctgtatgccttggacctggagaacacggaagaggaatcgacgctttattttgatctcacaccggtttatcgggcgcaccacatgcacacatgtcttgggatggaggacaagtttagagactattactacaagaacaggctgatgcaactcaacttggacatgcagatcttcacttcgcagcccttcttggagtcccatcaacccttcctttgccaggtagcgtgggtttatagtcgaagaacgtgttcttcgaaccgcagatggattgctgttggagagtcaggtggaaacaacatgggagacatctattggcgcagctgtgaacaagtacggctatcgaatcacacagctgattgaagttctggagaagagtagggacaaataccaccagctgctgcttctggaagaggtgaactggatagcggaggaagcccccgacaacgcgaacgactacatgaacgaggtcctgatctaccttgaaacgttggtgtcgacggcgctcctgaacgacgacgtgaagaggttcaccgtcaacgcggtgttagggatcgatattgacctgaagacgctggaagcgtttgcggacgacaagttcgacagcacggggctgtcagatctggggaaggaaacgactttcagggactgtttggttgagatcaggcagctcacgaatctcctgctcagcaggcagcctgagaacttcatgaacccggtgatcaggcagagaaactacgagtctctggactacaagaagctggccatcatttgtganaagtacaagtactctgcagacagtctgtt

SEQ ID NO: 36846 - DNA, 568 bp, Zea mays
  Clone ID: MRT4577_133608C.1
attcggctcgagacgccttcttgtcaactgcacgacactggatgacgacgcgctgctgtccatccttgcccacctcgcgttgccccgccgccgctaccactgcatgcaacatgctcctggcaccaactcatcctcgcctcttccgctcactctcacgctccgcatcagacattcagactgccacagccgtctcgcctcgctaatcccagccgcccctgccccaccgacacacacatgcccttatgatcgctccaccacctcgtcggactctggcgtcgcctccccttcggcttcggctactcttcctcgtccctcgtcgattccttctgaacatggatgcatacagatggtgtaggatctcagagactacttcaaggcaccttgctacaaggcaggaagactgcaaagttccagataacaccaccaagagaggtttcgtgtctgaaaccactgtcgaggagacaaattactaccatgttggccatgtagtgcttgggtccttcatcttcgttgtcattggatcatgtatgcggtccaaccatctcagagatatatctttttacatatt

SEQ ID NO: 36847 - DNA, 597 bp, Zea mays
  Clone ID: MRT4577_133609C.1
cgctccctatgggcgaacgggagcatagcgaccgagggcggccacttacccaccgacggtgagcacgacgacgaggaccctacggtggcggcggcgaggcggcaggaggaggaccgcaagttctgggaggcgtgcctggcgtcgggttacccatgaacctgcaggtgcttgtcgtgcttcttcttgattagaagtttgtttgtttgatcgatgccgacggcgacaagaagaaggctgttgttaggacaaagttaaaagttagtgcatggtatgtatggcgtgtaaattgcaatcatgaaacaaagatgcatggatggccaaacagctgcgctactggtagattgtcacattgcttcattcatcagaaataataagagcgtgtgggcaatcctgctgggctggcaatgttgatgcgcttctttgtggttttggccttggtttatttttctgtgtccgtggtacaagacggggataatgtggaaatcgctaaaatttagatgtctagatttttagcttcgtttcatgtgatggctattgtatatattttggattaaaattatagttttagtttgttgcaattgaaaaaaaaaaaaaaaa

SEQ ID NO: 36848 - DNA, 1319 bp, Zea mays
  Clone ID: MRT4577_13360C.1
ggcaaaggccgggtgaaaaaagatgagtacatagctaggtacaggcacccagtcctgtcatgacgtaaaagcttatagaattcagatggcataaatactactatgcagggccaaaggttggtgggacgaacggaccagcaggctagcaggtcatccagaaagctttcgtgctcctccatttctaggctagctagcttagctggggctggacgacctttcaggcatacgcatgcaagtacctgcagtcggttcataagaggaggaggaggaggccatgtggacgacgaaggagccaagtagaaaaggcaggcaccgcaaccaacggtaaagctggtgatcgagcaagttttgtcaagagcgagctcatggaggatggcagcagtgctccaagacgggctactccggcccccacccgcaggagcagatctgccgacttccacaatttttcagaaaggaggagaagggacaggatcaacgagaagctgagagcgttgcaggagcttcttccaaactgcaccaagaccgacaaagtttccatgctagatgaagcgatcgactacctaaaatccctccagctacagcttcagatgctggtcatggggaaggggggaggaatggcaccggtggttcctcctgagctgcagcagtacatgcactacatcacggccgaccccgcccaccagatgatgcctccgccgctgcggccctccgccgggcagctgcagcccgccgccggccggcagtttcagataacccaagcagcagcagcagcagccaacaacgacaacgacccccagcgacgacgacagtccaacgtcgagtcggacttcttgagccagatgcagaacctgcacccctccgatcagccgcctcatcatcacaacttcctcaggccgccgagattgcagctctttacgccggaacagaggggcggcggcggcggcctgcctaacacgagccacaacgccggctggatttccgggaggagttcctcgtataattttatggagtgacgtgtgtgctcctgatgatgctgccaaaattaatttgaaacaaccgttctcatcttgaactcagaagacggcgtcagcgcactctgggaccttcagctagcgtgtggtggtgtccatgcatgaatgaatgcagtagtagttatatatatattagcaagctagttgtgtcattaaataaaggaacgctgtgtgactgtgatgctgctgctgctgctcgttttgctatctgaatcgcacaccgttcaattcctcccaaaaaaaaaaaaaaaaaatttgcggcgatcgtacgtgttcgattcatgcaaa

SEQ ID NO: 36849 - DNA, 2733 bp, Zea mays
  Clone ID: MRT4577_133610C.1
caattggtatgttcagaggatggtgatcagctcgcgatgcgtcttatttctgcactcatggagtactatattggcccagagggcagaggaactgttgaagaaatcagtactaaattgagggagggttgccctagttacttcaatgagtcagactacaaatattacttggcagtggaatgccttgagagagcatctatgactaataatgctgatgagagagatattcttgctagagatgctttcaacctcttgactaaaattccagactctgctgatttgagtgccatatgcaagagatttgagaacctaagattttatgaggctgtagtccgattgcctctgcagaaagctcaagcacttgactccaatgctgatattatcaatggtcaaatagacccaaggcatcatgatacaataatgttgcagcgtgaacaatgctataggattgttatggatgcgctgtgcactctcaagggtgttgggcatagtcgaatgcaaagtgcagacaagtcatctgctctagcaactgctgctgatccagcttctcgaagcaagtatatcaaacaaatcatacaacttagtgtccaatggccggacacagttttccatgagcatctatacaggacacttattgagcttggtctagaaaatgagcttttagagtatggtggatctgatttggtttcttttctgcagagtgctggccgtaagcatcaagaagaggttcgggcagtttcttcagttacacctggagctgctaagatgcatgatttaggtgcacctatctcgactagtcaaacaaagtatctcgagctcctagctaggtactatgtccgcaagggggaacatattgctgctgccaggatgttgttaatattggcagagagacagtgctctaattctgaagaagctccagctcttgacaagcggtatgaatatctcagagatgcagtgcttcaggccaaaagcgcaggcatcgctgctgatttgtccaaaaatcctgttgatagcagcacagtggatttgcttgaaggaaaacttgtcgtgctacgcttccaaattcaaattaaagaagaattggagctcatggttgcacggctcgaaaatattccaagcagttctgaattacctaatgttccgttccctcgtgacaacattcttgctaatgcagagactgctaaggctgctaaggataaggcaaaagaactatcattaaatctcaagagtatcactcaactgtataacgattatgctgttccatttgatctctgggaggtttgcttggaaatgctgagctttgctaattactctggagacgctgatagcaaaattgttcgagaagtttgggctagactccttgatcaggcacttactaaagggggtgttgcagaagcttgttctgttgtgaaaagagtaggctcgaaacttgatcctgcagatggagcttgtttacctttagatatcatatgccttcaccttgagaaggctgcagtggatagattaagttcaggagaagaattagttggtgatgatgatgttgcaagagctcttcttggtgcctgtaaaggtcttcctggacctgtactttctgtgtatgatcacctgttatcgaacggtgcaatcataccctcactaaatctgaagttgcgcctgctgcgatcagttctagcaatcctccgtgagtgggggatatctgtcattgcacacaggctaggcaccacaagtgctggggcttcattctttcttgatggaacattctcattgaaccaaacagggactgcgaatcaaggtgctcgagataaaataattagtttggcgaacaggtacatgactgaggtgaggcgattaaaccttccacagaaccaaacggagaatgtctaccgtggtttccgtgaacttgaggagaaattactatcttcttattaggcagattgcagtcattcctcaagatagtgaagaatgatcttgcatctgttgtaccacaaaaccaaggaatagagtcgagggcttctggattcacctcagcatgatctgtattgttccttacacttatctgcaagaaccttctggattcacctcagcatgatctgtattgttccttacacttatctgcaagaacccggggctgctgcaggactctagctgaggtggttagatggctctagtaccactcatgtgatcatgtcctggctgagttggttagatggctctaatagcacttctgatgtcctgggtttgacttctaggtaaagatctagatctggtctatagggagcggattctcttgctgcatgggaggcagttttcgtgacttggtcgtactccgattgagcttcttaatataataacgggggacagtcttttctcaccgttcgagttcttttcttttttgaacccaaggctgctttaatcattattaatcagatgtttttcatgactaagtgcagccttcttttatttgacttgagtcagtatggactgcagagccgtagatttggaaaattgtttagatgtcttcattacttgctaatctagtggtagatactgccgggcctgttttaagggtggactttgtccctgaacaacattaaactgttgaatacaagttgggttttgatgcaggaatcggaatttagtatgtgccatgacattgtacagttctatagtagagtattctgagtgttgtaagcttttatgctgtgtttgtttgtatgaagataccgtttcagtagc

SEQ ID NO: 36850 - DNA, 1499 bp, Zea mays
  unsure (1)..(1499): unsure at all n locations
  Clone ID: MRT4577_133611C.1
agatgcttggggcaaataaacaagaattggagctcatgactgcacgggttgaaaatatttcgagcagttctgaatcccctagtggtctgttcctcgggacaacattcttgctgatgcagaggctgctaaggctgctaaggataaggcaaaagaactatcattgaatctcaagagcatcactcaactgtataatgattatgctgttccatttgagctctgggaggtttgcctggaaatgctgagcttcgctaattactctggagatgctgatagcaaaattcttcgagaaatttgggctagactccttgatgaggcacttacaaaaggtggtgttgcagaagcatgttctgtagtgaaaagagtaggctcgaaacttgatcctgcagatggagcttgtttacctttagatataatatgccttcatcttgagaaggctgcattggtagatagattaagttcaggagaagaattagtcggtgatgatgatgttgcaagagctcttcttggtgcatgtaaaggtcttcctgaacctgtacttgctgtgtatgatcaactgttatcgaacggtgcaataataccctcactaaatctgaagttgcgcttgctgcgatcagttcttgcgatcctccatgagtgggggatatctgtcattgcacataggcttggcaccacaagtactggggcttcattctttcttgatggaacattctcattgaaccaaacagggactgcgaatcaaggtgctcgagataaaataattagtttggcgaacaggtacatgactgaggtgaggcgattaaaccttccacagaaccaaacgggagaatgtctaccgtggtttccgtgaacttgaggagaaattactatcttcttattaagcagattgcagtcattcctcaagatagngaagaatgatcttgcatctgttgtaccacaaaaccaaggaatagagtcgagggcttctggattcacctcagcatgatctgtattggtccttacacttatctgcaagaacccggggctgctgcaggactctagctgaggtggttagatggctctagtaccactcatgtcctggctgagttggttagatggctctaatagcacttctgatgtcctgggtttgacttctaggtaaagatctagatctgggctatagggagcggattctcttgctgcatgggaggcagttttcgtgacttggtcgtactccgattgagcttcttaatataataacnnnnnacagtcttttctcaccgttcgagttcttttcnnnnnngaacccaaggctgctttaatcattattaatcagatgnnnnncatgactaagtgcagccttcttttatttgacttgagtcagtatggactgcagagccgtagatttggaaaattgtttagatgtcttcattacttgctaatctagtggtagatactgccggtcctgttttaagggtggactttgtccctgaacaacattaaactgttgaatacaagttggg

SEQ ID NO: 36851 - DNA, 430 bp, Zea mays
  Clone ID: MRT4577_133612C.1
gacctgggctttttcccaaattcccaacgttgatcctatagcttaaattaaagaaaaattttttactaatgtttttaaaaaagggtttccaaccaaaaaaaaatttccgcacactacatacttaaaaagtcaaaaaaaaaaaaccaataaaaaaaggggaccctcggtccctaaaaaagggtactaaaagggtttggggggttttggttaattgtccaaggccatgggtgaaaaacctaacccctgttggcctgcaaaaagggcaatgttgccggggctttctgcaaatgttgggggggcattggtcaacgcaaaaaccttaaccttaatcggttgcaagtttcgggaggaagaaaaaaccaaaagggctggtttaaaaagaacaaattgggtgttttaaaagaacttgataaacttttcctgggcaggg

SEQ ID NO: 36852 - DNA, 1253 bp, Zea mays
  unsure (1)..(1253): unsure at all n locations
  Clone ID: MRT4577_133613C.1
gcagtggatagattaagttcaggagaagaattagttggtgatgatgatgttgcaagagctcttcttggtgcctgtaaaggtcttcctggacctgtactttctgtgtatgatcacctgttatcgaacggtgcaatcataccctcactaaatctgaagttgcgccttctgcgatcagttctagcaatcctccgtgagtgggggatatctgtcattgcacacaggctaggcaccacaagtgctggggcttcattctttcttgatggaacattctcattgaaccaaacagggactgcgaatcaaggtgctcgagataaaataattagtttggcgaacaggtacatgactgaggtgaggcgattaaaccttccacagaaccaaacggagaatgtctaccgtggtttccgtgaacttgaggagaaattactatcttcttattaagcagattgcagtcattcctcaagatagtgaagaatgatcttgcatctgttgtaccacaaaaccaaggaatagagtcgagggcttctggattcacctcagcatgatctgtattgttccttacacttatctgcaagaacccggggctgctgcaggactctagctgaggtggttagatggctctagtaccactcatgtcctggctgagttggttagatggctctaatagcacttctgatgtcctgggtttgacttctaggtgagagcaaatttcagacgggttgaaaaaggtcatttgttggttcctctgtttgtgtgcacacaacggactgaccaatggatcctcgtgtaggtaaagatctagatctggtctatagggagcggattctcttgctgcatgggaggcagttttcgtgacttggtcgtactccgattgagcttcttaatataataacgggggacagtcttttctcanannaaaaaaaaaaaaaaaaaaaaaaaaaaaaaaaaaaaaaaaaaaaaaaaaaaaaaaaaaaaaaaaaaaaaaaaaaaaatttaaaaaaaaatggtcttgctttcattttttgactacgtggagaacgagccattagcttatttgagaactgggggagctggatctcgtgtgagtggccatgtagcaccaccaaaatcaccagacttctttcaagagtatgggatgggtaatagggttccagaagaaatctaacaatgcctcaaaaactcaggttgaggaaactgatgaagcaaggaagaaattctctaatgccaaggcgatctcgacatctcagttttttggt

SEQ ID NO: 36853 - DNA, 2556 bp, Zea mays
  unsure (1)..(2556): unsure at all n locations
  Clone ID: MRT4577_133614C.1
cctgcatcaaaacccaacttgtattcaacagtttaatgttgttcagggacaaagtccacccttaaaacaggcccggcagtatctaccactagattagcaagtaatgaagacatctaaacaattttccaaatctacggctctgcagtccatactgactcaagtcaaataaaagaaggctgcacttagtcatgaaaaacatctgattaataatgattaaagcagccttgggttcaaaaaagaaaagaactcgaacggtgagaaaagactgtcccccgttattatattaagaagctcaatcggagtacgaccaagtcacgaaaactgcctcccatgcagcaagagaatccgctccctatagaccagatctagatctttacctacacgaggatccattggtcagtccgttgtgtgcacacaaacagaggaaccaacaaatgacctttttcaacccgtctgaaatttgctctcacctagaagtcaaacccaggacatcagaagtgctattagagccatctaaccaactcagccaggacatgatcacatgagtggtactagagccatctaaccacctcagctagagtcctgcagcagccccgggttcttgcagataagtgtaaggaacaatacagatcatgctgaggtgaatccagaaggttcttgcagataagtgtaaggaacaatacagatcatgctgaggtgaatccagaagccctcgactctattccttggttttgtggtacaacagatgcaagatcattcttcactatcttgaggaatgactgcaatctgcctaataagaagatagtaatttctcctcaagttcacggaaaccacggtagacattctccgtttggttctgtggaaggtttaatcgcctcacctcagtcatgtacctgttcgccaaactaattattttatctcgagcaccttgattcgcagtccctgtttggttcaatgagaatgttccatcaagaaagaatgaagccccagcacttgtggtgcctagcctgtgtgcaatgacagatatcccccactcacggaggattgctagaactgatcgcagcaggcgcaacttcagatttagtgagggtatgattgcaccgttcgataacaggtgatcatacacagaaagtacaggtccaggaagacctttacaggcaccaagaagagctcttgcaacatcatcatcaccaactaattcttctcctgaacttaatctatccactgcagccttctcaaggtgaaggcatatgatatctaaaggtaaacaagctccatctgcaggatcaagtttcgagcctactcttttcacaacagaacaagcttctgcaacaccccctttagtaagtgcctgatcaaggagtctagcccaaacttctcgaacaattttgctatcagcgtctccagagtaattagcaaagctcagcatttccaagcaaacctcccagagatcaaatggaacagcataatcgttatacagttgagtgatactcttgagatttaatgatagttcttttgccttatccttagcagccttagcagtctctgcattagcaagaatgttgtcacgagggaacggaacattaggtaattcagaactgcttggaatattttcgagccgtgcaaccatgagctccaattcttctttaatttgaatttggaagcgtagcacgacaagttttccttcaagcaaatccactgtgctgctatcaacaggatttttggacaaatcagcagcgatgcctgcgcttttggcctgaagcactgcatctctgagatattcataccgcttgtcaagagctggagcttcttcagaattagagcactgtctctctgccaatattaacaacatcctggcagcagcaatatgttcccccttgcggacatagtacctagctaggagctcgagatactttgtttgactagtcgagataggtgcacctaaatcatgcatcttagcagctccaggtgtaactgaagaaactgcccgaacctcttcttgatgcttacggccagcactctgcagaaaagaaaccaaatcagatccaccatactctaaaagctcattttctagaccaagctcaataagtgtcctgtatagatgctcatggaaaactgtgtccgggccttggacactaagttgtatcaattgtttgattaacctgctcagagaatccgggcctcttcagcttttccttgagcagaattttgatagccccaggttccccgtgctcggtgttcttcgcaaaccggcccttggcgaaggtcccttccccaatggtgcgtccgagctcgtacttgcgtacgcggcgcttccccttcggtgacaatgcagccctcttagcccgatacatcttccggcagatgaaggtgactgtgaaccttcaggttattctcttccaaccccttccagcgctgagcccgagcgcaggctgatcggcggctgctgcgactgcgaggagctccgtcccacggctgggggagaagcgaagcgagtctaccaggttgattggattggagccccccccgcgtccccgtgtcctcgtgcngaataca

SEQ ID NO: 36854 - DNA, 294 bp, Zea mays
  Clone ID: MRT4577_133615C.1
atgcgttggttaggactatgatcatgacaaaaggaatcatactgctcatgctgccggtcgcggcgccggcgccagatgcacgtctggacgcataaccagtgtccccccttcacctgcttatgtgcactccgaagagtgggaggagcaaggagatcatcataacatagggcgcgtgagaacgcggctacttgcacgaggagggagagggccaggtggctactactgaagtggcaggtcgtggtgtctaccgttatgattatggctatgcccgcagaggcgggtactatgaagagc

SEQ ID NO: 36855 - DNA, 302 bp, Zea mays
  unsure (1)..(302): unsure at all n locations
  Clone ID: MRT4577_133616C.1
aacggatatcaagatagaaatgcattaatgtttttgtgatgtgtagtataactgatattgaccccttgatctctaggtacaatagtcgngnnngnnangnnctnnnnnannnctnnancngnnnctgcataccgggggttgggcatatcctgcagttagatgatcaatggtgattagatacatgttctggaaccaatggtcagatgacagatggcatactaaacaccctattggtctctaatattattattgtcttggaattgcaatgcctgtgaagtacattattaatggcaggcccaggc

SEQ ID NO: 36856 - DNA, 700 bp, Zea mays
  Clone ID: MRT4577_133617C.1
ttaggcccttaattttcggagtccctcacaagacgacggaggctccgtttcctgccgttggcgattttttttacagaactgacatcatgcagacggggtcaacagaccccttgtacatgtcctgacaggacgcagtcgcagatttctaccataccagtggagtagaacaaagcgctgatcgcatcagggaggaggtgagaacaaaatgattaaacaaatgaagcaaaatttcatcaggaaaatataatcctagggctctggactaagggctgattcctcattggcgatatgtacaggtcgagttcttctttctcggccggatggctaaggttaaagctgacggcggatcagtgagctcgccgacggaacgcaacaaggacacgcaccggcggcggcgtcacatcacggagcaagcgttggggttctcgtcgctgaagagctgcggcgccggcgccatgtcgaattggtacgggtatggcgggtacgccacctgcggctgctggttcccgtcgggctgcggctgcggctgcggctggtagtaggaggggttggcgtggcccatgccatcgccactgccgtagccgtagtacgggtagggatagtagctggcgggaggcgggacctgctcatacgccacgtacccgtgcggcggcgccacttggtacgtgctcgcccccgccggcgcagacatgtacgccgc

SEQ ID NO: 36857 - DNA, 376 bp, Zea mays
  Clone ID: MRT4577_133618C.1
aaaaaaaagacaaaaaagaaagatgcagacttgccggactcatatccattattcagtttctcggcggatgagtggctgggatgggactgtgccgtctgcgcgtctaacagatgcagtgatgggcgctcgtcgtcctccagctgtaccgctgcgcgctaggacctgcgtcggctatatacggctgttcggcagtgagctgccaggttgtacagtctgggtaacagcctaacaggaataaccttcttgtgcctaactgaaaccaaagtaaaaagacatagttaaaagggctaggggctataggtcttatcaggctatattctgaacaacaccttttaacctgatcaagcgccacaccttttacaagaacattatgggc

SEQ ID NO: 36858 - DNA, 2128 bp, Zea mays
  Clone ID: MRT4577_133619C.1
ccacgcgtccgagcagagactggagggagcgacgttttataaccacgaataaattttaatattagcaatccaccgtgttcagctgatgatgaataattacatctctagttggcctgatatgggattgtagccggacgccgcttcatatagcggccgtcaggaaccccggccgggaacccagccgcccattgccggcattgctcgcagcgctagcttcttgcgctcatcagtcgtctccgaccaagatcagcaaggacggcatggctctcgaagcagcgtacgactacctgcacgtcgccgtcgtccagtgcacgcccacacaagcagcagcagtcctcggcgtcctcctcctcctcgccatccggctagccgcggcggcgaggagctcgtccgcgacgtcccccaaatggaagcagcacaggctgccgccgacgcctccggggaagctccccatcatcgggcacctccacctcatcggctcccacccgcacgtctccttccgcgacctccacgccaagtacggccacaacgggctgatgctggtgcaggtcggcgccgtgcccaccatcgtggtgtccacgccgcaggccgccgaggccgtgctccgcacgcacgaccacgtgctggcgtcccgcccgcggaaccccgtcgccgacatcatccgctacaactccacggacgtggccttcgcgccgtacggcgagtactggcgcacggcgcggaaggtggtcaacacgcacctgctcagcgccaagatggtcttctccaagcggcgggagcgggaggaggaggtgcgcctggtggtggcccggatccgcgacgccgccgaggcgtccccggggacggcgctcgacatgacggagctgctgggcggctacgccagcgacttcgtgtgccgcgccgtgctcggcgagtcccaccggaagcagggccggaacaagctgttccgggagctgacggagaccagcgccgccctcctgggcgggttcaacgtggaggactacttcccgaagctggcggacgtggacctgttcctccggatcatctgcgccaaggccaagggcgtcagcaagcggtgggacagcctcttcaacgagctgctcgcgctctccggcggcaagcagggcgaccacaactctgaagacttcgtgcacctcttgctgtcgctgcagaaagactacggtctcaccacggataacatcaagggcatacttgtgaacatgttcgaagcagccatcgagacatcattcctggtgctggagtactccatgagcgagctgatgaacaaccgccacgtcctggccaagctccagaaggaggtgaggacggcgacgcccgacggccgcatggtgatggaggaggacctgagccggatgccatacctgaaggccaccatcaaggagtccatgcgcatccacccgccggcgccgttcctcctgccgcacttctccacccacgactgcgagatcaacggctacaccatccccgccggcacgcgcgtcatcgtcaacgcgtgggcgctcgccagggacccgacgtgctgggacaaggccgaggagttcttcccggagcgcttcctggaacaaggccgcgacgccgaggtcgacatgtacggcaaggacatccggttcgtgccgttcggggctgggcgcaggatctgcgcgggggccacgttcgccatcgccaccgtcgagatcatgctcgcgaacctcatctaccatttcgactgggagatgcccgccgagatggagcgcaccggggccaaggtggacatgtccgatcagttcgggatgacgcttcgccggacgcagaaactttaccttgttcctagaattcccaaatgagtgtcgtcgtcgtcgtacaaatggcatgcatcttattgtaagttttggagtttgttgttgcacacgcaacgatggaccgcctgtgatatctttaataaatgtaaccgcagataataatgaaataaaaagaacgcatggctattgtattattaaaaaaaaaaaaaaaaaaaaaaaaaaaaaaaaaaaaaaaaaaaaaaaaaaaagaaaaaaaaaaaaaaaaaagcggcccctctttaaagaaaaaaatttttttccccgggtgttcgggagaaatataaattttt

SEQ ID NO: 36859 - DNA, 238 bp, Zea mays
  Clone ID: MRT4577_13361C.1
cccctcctccctcccctcccctccgtccgctcgccgccacgtccccggtcgacccctcgccgccggaccgcatctcctcccctcacctcccacctccagatccgcgcgctccccgcccgccgccgccgggaactttcctccgagcttgatccatccagtggtcggcgacagtgatcgaccgccgcgcggatcgatccagcgaccaacctggagcacggctgctagacgtcccctccca

SEQ ID NO: 36860 - DNA, 2032 bp, Zea mays
  Clone ID: MRT4577_133620C.1
ttgggtacctcgaggccggccgggggggcgtttttattagataaaaggctgacgcgggctctgcccgccgatccgatgattcatgaagccgcccattgccggcattgctcgcagcgctagcttcttgcgctcatcagtcgtctccgaccaagatcagcaaggacggcatggctctcgaagcagcgtacgactacctgcacgtcgccgtcgtccagtgcacgcccacacaagcagcagcagtcctcggcgtcctcctcctcctcgccatccggctagccgcggcggcgaggagctcgtccgcgacgtcccccaaatggaagcagcacaggctgccgccgacgcctccggggaagctccccatcatcgggcacctccacctcatcggctcccacccgcacgtctccttccgcgacctccacgccaagtacggccacaacgggctgatgctggtgcaggtcggcgccgtgcccaccatcgtggtgtccacgccgcaggccgccgaggccgtgctccgcacgcacgaccacgtgctggcgtcccgcccgcggaaccccgtcgccgacatcatccgctacaactgcacggacgtggccttcgcgccgtacggcgagtactggcgcacggcgcggaaggtggtcaacacgcacctgctcagcgccaagatggtcttctccaagcggcgggagcgggaggaggaggtgcgcctggtggtggcccggatccgcgacgccgccgaggcgtccccggggacggcgctcgacatgacggagctgctgggcggctacgccagcgacttcgtgtgccgcgccgtgctcggcgagtcccaccggaagcagggccggaacaagctgttccgggagctgacggagaccagcgccgccctcctgggcgggttcaacgtggaggactacttcccgaagctggcggacgtggacctgttcctccggatcatctgcgccaaggccaagggcgtcagcaagcggtgggacagcctcttcaacgagctgctgtccgagtacgcgctctccggcggcaagcagggcgaccacaactctgaagacttcgtgcacctcttgctgtcgctgcagaaagactacggtctcaccacggataacatcaagggcatacttgtgaacatgttcgaagcagccatcgagacatcattcctggtgctggagtactccatgagcgagctgatgaacaaccgccacgtcctggccaagctccagaaggaggtgaggacggcgacgcccgacggccgcatggtgatggaggaggacctgagccggatgccatacctgaaggccaccatcaaggagtccatgcgcatccacccgccggcgccgttcctcctgccgcacttctccacccacgactgcgagatcaacggctacaccatccccgccggcacgcgcgtcatcgtcaacgcgtgggcgctcgccagggacccgacgtgctgggacaaggccgaggagttcttcccggagcgcttcctggaacaaggccgcgacgccgaggtcgacatgtacggcaaggacatccggttcgtgccgttcggggcggggcgcaggatctgcgcgggggccacgttcgccatcgccaccgtcgagatcatgctcgcgaacctcatctaccatttcgactgggagatgcccgccgagatggagcgcaccggggccaaggtggacatgtccgaccagttcgggatgacgcttcgccggacgcagaaactttaccttgttcctagaattcccaaatgagtgtcgtcgtcgtacgtagccataggtaacgagtcgtcgtcgccattgttgcctgttgctctctcatgccagtcctagccatatggcaacaaatggcatgcatcttattgtaagttttggagtttgttgttgcacacgcaacgatggaccgcctgtgatatctttaataaatgtaaccgcaaataataatgaaataaaaagaacgcatgattattgtattattaaaaaaaaaaaaaaagggcgccgctcgcgatctagaacccacgcgtccg

SEQ ID NO: 36861 - DNA, 2003 bp, Zea mays
  Clone ID: MRT4577_133621C.1
attttcctaaaaacgggggcgcacgggggtgtcacgatctcccccgggagaagcggatcttgcggagctctcatgtccgccgggagggcgacctgtcagtgattggacagtgcagctgcacctcgtcccggcagcatgctgcccgcgtccgcgtcttttctgctgcccacattccccaacgccgcgcccgtaccgtgtactggtggtggtcgccctcccctcctcgtcctcccagcttgtcctcttctttccaccagcttgcttttggtcgctccaacgccgccgctacgtgctaaaccatgggggaaaggaaaggttgagaggctagtgctgagccgcgcctgctagcaggactagtttactgctgctgagggaacacgctgttgtggagcaggtgagtgagctccttttagtcggggtcaggtgaactcacaagcaaaacggccgcccattggattggcgcctgtccgcctcttcccctttcgttgtgcctattcgttggcgtgcactacccgtctggtcatttcgtcctcccttgggcttgtgctgctgcctgctagtggttctcgatttcgcctgggaaaagttttcaggtagaacacgcgtgcatttggcaaatctgcaggtgttatcttgtgatatcgtctgcaaagatgagattgtgatggatccgctccaagattgcttcggtccctggaggagttaggagtcctagaattcaaatgcagaaaccagtctcctgacagaaaaaaaggacagtcgcgcacgtggtgttcgtcaaaaagccgcaccgcactgagggagtcgcagcttgcgaccatcagaatcgtcacaatgagagattttgcatcttgcctaagccaaagtgccgtccaggttgcgcattcctcttcctcaagtgggcagaacttcgtgcagtctgcgtacgtggcacgcctgcgtgacaagcgttgcgtggtcacggtcacctggagcaaggtggccatggggcaggctttcgccattgccatccatgactactccaaccgttgcctctgcaaggcagaggtgaagccctggctgttctccaagaggaaaggttccaaggtcatggaattggatagtggcaatgtggagatcatctgggacctgtcagctgcaaagttcgcagcagggccagagccactcgaaggcttccatgttgctctgctctatggtcttgaagttgtccttgttttaggtaacctaagcaaggaggaggatcaccgggttttgtcagatgcttctcattgtgatgcagtcatgatagctaggaaagagcacatttatgcgaagaagatgtattccgcgaaagctcgatttttggacattggtcagattcatcacatctccatagagtgcgacatggcaggggtgagggatccctgcctagagattaggatcgacaagaagaaagtgttgcacttgaagaggctggcatggaaattcagagggaaccagactatttatgtcgatggacttccagtggaggtgctatgggatgtgcatgactggctatttggttccacaaatggatgtgctgtgtttttgtttcaatcaggccagtccatggaaaaaatctcgttcagaacatgctcacagaatgaaaaggaggctcaagcacatcgtcttggtttcacattgatattaaaagcgtggaagactgagtaagcactaggctgaaacatgatggcaggtttcttcaaccactctgctcttaatgttgaattagcaacagtaggaatctaggatctagcaagtgtaacaagatccttcacaagaattctgtgcttgttacatatgctgtcctagcggtagttgagaagttgagattttgaatatgcatatgatctttgatatatcatcaaagctagttagataggatgtgggactctggtgctcaggtcatttgacataatgtctcacaatttatactttttgatgggaagttcatgatagaatattgaaaatgatgtctacacttc

SEQ ID NO: 36862 - DNA, 447 bp, Zea mays
  Clone ID: MRT4577_133622C.1
ctaaaagcaaaagcggggtttttttctgagggtccgtttctaaaaacaaggccacagagggtcaaactttacacaaattccaagcccccacaaaacatgcggggagcccaccaagaacgcttgggctaaacacgcaacctgctggcctccttgtggaccccgggcagggggagggtgccaccctagcaaccggacccctggacaaacctaatgaatagcccgctaggagggtgcaaaaacttcactttaccctgggacaccagaccccggaagccgggcctgtcaatccactttaccaacccaccgagctttatttgggggcacaagctttctttttacccgtggccggaagcccactagctttaaaagaccctaggggaaatgtggcgcccgggaacctagtaccccgagaactccgctccgaagactgcagtcccaccaagttta

SEQ ID NO: 36863 - DNA, 378 bp, Zea mays
  Clone ID: MRT4577_133623C.1
gaatgaaaggtttgttcgccctatcgataactaacacgcgaaggcattgcacattcttcaaaccctcccatccagatgaccatcccgcagaaatcaaagacgggatgcagcaatacatgactagccacagataggcggcgaggagtccatacttacagggtaggcgtcctctctcaaaagccagagataaccgtgagcagataggtgcccaaaaggcaaatgccgtgcttggggaggttatccacggggccttctcaggtcacttaggccttggatgaaaacaccgaacatttagaacatggccaggcggtcgttcttgaaaaaacttacctggagaatggcgggctaccgaaaggctctggccagaaccaaggggat

SEQ ID NO: 36864 - DNA, 1289 bp, Zea mays
  Clone ID: MRT4577_133624C.1
tgtttgtttttatcttacgcgttggttgggggttgggaatcacaggatgcgcctttctggtccgcgttcttgatttgttgctatctcagttttcaggtcgaacgaacgcgcgtgcattcggcgggggttatctcgggataatatcgtctgcaaagatgagaagatgacggatccgttccacgattgcttcggtccttggaggaattaggcgtcctagtagaatccaaatgcagaaaccagtctcctgacaaagaaagggcagttgcgcacgtggtgttcgtcgaaaagccacaccgcactgagggaaaccgtcacattcgtcacaatgagagattttgcatcttgcctaagtcaaagtgctgttcaggttgcgcattcctcttcctcaagtgggcagaacttggtgcagtgtgcatacctggcacgccttcgtggcaagccttgcgtggtcaccgtcacctggagcaaggtggcgtcggggcaggctttcgccgttgccatccatgactactccaaccgttgcctctgcaagacggaggtgaagccctggctgttctcgaagaggaagggttccaaggtcgtggaattggatagtggcaatgtggagatcatctgggacctgtcagccgcaaagttcgcggctgggccagagccactcgaaggcttccgtgttgctctactctatgatcttgaagttgtccttgttttgggtgacctaagcaaggaggaggatcgccgggttctgtcggatgctttgcattctgatgcagtcatgatagctaggaaggagcacatctatgcgaagaaggtgtattcggcgaaagctcgatttttggacattggtcagattcatcacatctccatagagtgcgacacggcaggggcgagggatcccagcctagagattaggattgacaagaagaaagtgttgcaggtgaagaggctggcatggaaattcagagggaaccagactatctatgtcgatggacttccagtggaggtgctctgggatgtgcatgactggctatttagttcctcgaatggatgcgccgtgtttttgtttcagtcaggccactccatggaaaaatccttgttcagaacatgctcacagaatgaaaaggaggctcaagcacatcgttttggtttcacattgatattaaaagcgtggaagactgagtaagcactaggcagaaacatgatggcaggtttcttcaactactctgctctgaatgttgaatagtaacagtaggaatctaggatctagcaagtctaacaaggccctttgcaag

SEQ ID NO: 36865 - DNA, 443 bp, Zea mays
  Clone ID: MRT4577_133625C.1
gggggaaaaaaacgggggcccaaaaaggagatgaggccgcacaggggttttaaaagggaagggggggcgaaaaaaaaaccaacagcattttttgacaacgggaaaacaaaattttagaagtcattaaaaaaacaactagcacccttggatagggggtgattgcaaattgctactgccataatgttaaaaaagccttttaaacgttttgaaatcccaggggaaaactggtttttaagcatcaccaaataaacaagctttattccttgttatccctgcctgggctgggggagcttgcacccttcggggagggaaaaacactgggggaaaaaggggaattttttccattgggatgcttttaaggaggggggctcctttgggggggggggcttttgggaggactaaaactggcccgggcagggaaaaaactgtggtataagggggtt

SEQ ID NO: 36866 - DNA, 392 bp, Zea mays
  Clone ID: MRT4577_133626C.1
gactagtacgcggtctaagagcgcaataaggagaagttgtccagccttaccctgggggccatcgctggataagcaggaaatgtgaatatatgtgtgcttatgaaagtcataggaggagggcctaccctttcaacaataaagcttggagaactgcacagcgagcgatatgacgagtggggacataaacaggtcttcatgacgcgatgaaccgggaggctggtcctgcacgaatacatagtaacagaaaccagactgatatacaacggcggtggtgctgacgcagaccacaggatggacccgaccgcggagatagcacggatggacgagaccatgcgcacagatgtatctagtctgtagattattgcattgacatacgagtgcgagatgagaac

SEQ ID NO: 36867 - DNA, 638 bp, Zea mays
  Clone ID: MRT4577_133627C.1
ggggacaagccatggcgttcatgaagcggactttcgggggcgatctgcccgatcgagcgcgccctcaacaggccagcgaacgggcggctgccgcagggcttgcggccggcgcaggccggcgcccgcgggcgcggctcggctgtgggcactagatatacaagaggagcctatgtgcaggcagcgcacgccgagaccgacaacaccatccaagcatgccgagccgcgccgacggcctctggtagactctggcggactctgaactctgaccatgtagggattcaagaactccccttgaatgagcggttatacacttcaaccgctgccgcccgatgaagctgtcgcggagggtgcaagacttgccacgcaggacataatgatactaaagcccttcataaaccaaaacgcgtgggacggcgtccagaactacttgctgctcctgtccttctacctgtgctacgaactgaacaccgagatgcctttcaagtaccaaggaggataatctatatctcaatgagctcaccggtaagttcttgagcaccatcgacaataattgaccatgccttatagatcaagagctccccgtacgtctaccaatacttcgcagcaaccaaatatgcgctcggcgacgtgctcgacaa

SEQ ID NO: 36868 - DNA, 144 bp, Zea mays
  Clone ID: MRT4577_133628C.1
tcattaaccttcacactgctgctcgccgaacgacaactcatagccgcctgggagctccacaataccatcctacgcatgcgtacatatgccgccgatgctacgcactcatatgctacctcgagacttggtggcgccactggccca

SEQ ID NO: 36869 - DNA, 394 bp, Zea mays
  Clone ID: MRT4577_133629C.1
atgggttgttccgtttaatgaagggcaccatataaaaacaacaggtggtaagcaaatatgctggctgcctggttttttttttcccaagccaagggtgggggacaaattggacaaggaaacaaaaaggggggggaaggaaaaaaaggggggaccgcaaaaagaacggaggaacttcagaagggcccgggggggggaccaacattttgccgggagtggaaaccacgcccactggacgcgggggcaactggggggacggaaaaaaaaaacccgcggggaatttcaggaacaacccaaaggctggggggggaaaagggcccaaaaagaccccggcgaaaccgggccccaaagttgcagggggcgttaacgggggggggcaagaaacccaaagggccct

SEQ ID NO: 36870 - DNA, 252 bp, Zea mays
  Clone ID: MRT4577_13362C.1
cagaggagggaagaggacagaagagcgggccaggaatgagcggacgagacagcggaggagtgagacataggaggaggatcgtgcacggagacgacgaggatcagaagcagctggaggatggtagtaatagagatggaagatagacaagaactgcatacggagtacgaataaggtccaatccgacgtcgtatcgaaccacagacggatgacgaaggcggtgatcaaccagcataccggttgtccaagaagctg

SEQ ID NO: 36871 - DNA, 200 bp, Zea mays
  Clone ID: MRT4577_133630C.1
tttatgttttaccactccatgcggacccatcgtgggtggattctctgcgtgggacgcccggtcagttcggtggcaagcaagtacaccgtctaaggcagggtccggatttaccgctaaaagaagaccacgagcgtacagaactcgaatctagacaaggagtgagtcgacaaagaaggtgccgtatgagcccaaagacattc

SEQ ID NO: 36872 - DNA, 390 bp, Zea mays
  Clone ID: MRT4577_133631C.1
tacttacgtcgttacttcgagtggcaaaaaggtgaaacctccaagtccgaattctccgtcaactttgctcggttgggctagtgagttccaagcatgctcggttgagctcgtgcaccagcaaggcgctcgatcgcggcgaagaagaaaccaatggacagcaagccggcgacgcgggtgtcccgccggccgccgccgcagccaccggcagccacgaggagcgccgtgtggctcgtcggactgctcgtgacgctctgcttcttctccctgccgctcttcctcgcgctctcccccaacctctccgacgtgtggcatctgggcctcagcgtcacctctttttttcgagaacgcgacggctcagtcagactacttcggactcggagccggcgatcc

SEQ ID NO: 36873 - DNA, 209 bp, Zea mays
  Clone ID: MRT4577_133632C.1
gcttgtgttcattataacaaggggacccgcgcaaagcactggcccaaacaaaataaaaaacggggcgggggttcctttccgggcccccgcgaggcctcaaaaagtcacacccacaagcaggacatgaatgttcctcacacctcaagattttgctgtcccttgggggcaatggaaatggcttttgtttgaacccaccccctttgggaaca

SEQ ID NO: 36874 - DNA, 2173 bp, Zea mays
  Clone ID: MRT4577_133633C.1
attcggctcgagctaacactttcaaagtgctaacacttgaacctatttgggcaaatgcaatgcttgatcgaattgttagcatggtggagagagataagaatcatgcatgcattattgtttggtctgcgggcaatgaatcttcatatggacctaatcatgcttccatgtctggttggattcgtgaaagggatccaacaagactcctccattatgagggaggtggttccagaacatcatccacagatattgtgtgccccatgtatatgcgtgtctgggatgttggtaagatagcaaaagatccctctgaaacaaggcctctaattctttgcgaatattcacatgctatgggaaacagtaatgggaatattgatgcgtattggatggccatagacaacacttttggactccaaggaggttttatatgggactgggctgatcagggtttactgaaggaggactcagatgggtctaaattttgggcatatggcggcgactttggagatactccaaatgactccaatttttgcctcaatggcattgtgtggcctgatcggacgattcacccagctcttcatgaagtaaaataccttcaccagcctatcaaaatatcatcagcagataatatgcttaagattgaaaatggacacttttttgagacaacagaagctttggacttcagttgggttcttcatggagatggttgtgtcttgggctctggtccattgaatattccaactttggcaccacaaactagtcagctcatcaacatggaatcatcaccttggtttgccctttggagtgcctgtgcagcaaaagaagtatttttgtctgtgaatgtgaaacaaaggcatgaaacacgatgggctaaagctggtcatctcttggcttcagcacaactgtgtttgcctcagaaaaatggctttgtccccagcgtgatagcattgtccagtagccctttggtctgtgaacgcattggtgataatgtaaccatctgcaagaataatgcctggaaaattaaagtaaacagtcagttgggaacaatcgacagctggaaggtcaacgacgttgagcttatgagcaaggggatactcccatgcttttggcgcgcaccaactgacaacgacaaaggaggtttcttcaccaagccatatgactcgcgatggagagaagccttcctcgacaatgtctcgttccacagcagccagttctctgtcaaggagttgccggacaacaccgtggagttctccaccctctactacggtgttcccgggcacctacccaagcctgacgacgaagcctccgagtccattctcttccgggtgaagatggtatgccggatccacgggtcaggcgacgtggttctcgactacgaggtaaaccccaggagcgacctccctccccttccccgggtgggcgtcgtgttcagcgccgggaggtccctgagccacgtcacgtggtacgggcgcgggcccttcgagtgctacccggaccgcaaggcggcggcgcacgtcggcgtgtacgagagcagcgtggaggagctgcacgtgccgtacattgcccccgtggagtgcggcgggcgggcggacgtcaggtgggtggcactccgcgacgccggcgggctcggcctgtacgcgtcggcgcacggcggctccccgccgatgcagatgagcgcgagctactacggcgccgcggagctggacagggcaacgcacgtccacaggctggtgaagggggacgacatcgaggtgcatcttgaccacaggcacatggggctgggcggcgacgacagctggtcgccgtgcgtgcacgagcagtacctgctgccgccgacgcggtacgccttctccctgcggctctgccccctgctgccgtcgtcgtcgtgccatgacatctacaggtctcagctccccagctgatggtgccgtgtgccggagacccgtcgacgtcgagccttgggaaacaacaatgaacgcaatggcctggccagtgaatgaaagtatataatattgtaataaagcagagacgtattagctcctgcaacggcctcgcgatcgcctggatatgtctatgctgagggggtgtttagttaactaataacctaactacatatggcgccaagttactaaaacttaataaataactattactaactaataaaaaaaaaaaaaaaaaa

SEQ ID NO: 36875 - DNA, 625 bp, Zea mays
  Clone ID: MRT4577_133634C.1
gagaagggagcttctgtggcatctgaaacgtaagcaaactaatctttatgctattgggggcatggtcaatgccaaagggacagctatatctctgccataactattatttggatatttgttcatgcatcagctggcagtagaactagttccatgtttacttgcccttacgcgaatagggtcactgactcttttaatgttttgctgctaatatttttgctcacctgcatgtgtgggcgatcataaactagatctcctgaatagttagatgtctgggttatggttaagtagtgtgattctctgatttcagtgtgattctaatcaggaccgagcattggctttggttcttagtttgctatgttcactccacagttgttggagttgccaagtatactcgcataatgttaatcaaattccatcttagggagtgtttgaatgcactagagctaatagttagttagctaaaaaattgctagctgaattagctagctaacaaacaagtagctaattattagctaatttactaaaaagagctaataattagttgaactaattaactagactggtttggacgttttcaaactaatttttagccggctaaccaattaagcttttagtgcatttcaaa

SEQ ID NO: 36876 - DNA, 131 bp, Zea mays
  Clone ID: MRT4577_133635C.1
tccgtacccgaatttccttttcgacccaccccttccgtaacttattgaccataacccttgtgcccggtgggaaaataaaatgttgtggggtgttctaatacaaaagcccttggcatggattggtggttgtt

SEQ ID NO: 36877 - DNA, 994 bp, Zea mays
  unsure (1)..(994): unsure at all n locations
  Clone ID: MRT4577_133636C.1
cggncgcgtggggagcacagnagctgtcaacaaagttatattacatcattttaccagtgacttgaatcaacaacaacagcaacaacaaagccttttagtctcaagcaagttggggtaggcattaaaatttaactngaaaccataagtcaaagttgaaggcttcaagcacctggatagttgttttccattccttgcattcccattcaaggctagatctttgggtatattccatcctttcaggtcttgttttactgcatctttccatcttgcattcccattcaaggctagatctttgggtatattccatcctttcaggtcttgttttactgcatctttccatgtcaacttcgaccttcccctgcctctcttcccattgctatcacgccttaggattccacacattgttgcttctggaggtctccgctggaattgtccaaaccatcttaaccggtgttggacaagcttttctcaattgatgctatccctagcctatcatgtatatcattgttctggactcgatcccttcttatatgccgcaaatccaacgtaacatacatatttccacaacacttatatgttgaacatgtcgtctttttgtaggcctacattcgacaccatacaacatcctataaaacttgtcttttgacttctgagtatgtctaaaattgtttttctattgattgttgtttctctttaccataggatcatatcttactttttagttatggtacttttgtgacaagacttgctttgcagatttcttgtttagattcacttcatttctcgatcctattacactgtaatgaactggtttagctcgctagtttccagctgttactcgtcggatcttaatttatttgtgattatgtctggtcattctgcactattccaggtcttctaaggactttgctgatgtccatggacttgtcatgcatgcttaccacccaccaaatgcagattcacttggtgatcatccttggtttgcacaaggcat

SEQ ID NO: 36878 - DNA, 227 bp, Zea mays
  Clone ID: MRT4577_133637C.1
ctgccccgcccacccaacaccaagaacaattaaacgctttgatcgatagatcaatatcagtcgctagcgtgcgcatacgcagacgacgcgaaggcatatatggagggaggtcttctgggggcttgccttcctagcttcctcgtgccggatcactacgccttccctcttccgctcccgccgctacaacttcctagtagccaaccgaacaataagcctttccagatgcc

SEQ ID NO: 36879 - DNA, 563 bp, Zea mays
  Clone ID: MRT4577_133638C.1
attgggaccctcgaggccggccggggatccgttttcttaggctggccaacccttgcgacggaaggcggagtcgacgaggatacaggcgtacctgaggtatgatcgatggccgcctccacttcctaccaccgcgagcaacccggcgagggaaaggatcctgcatgaggccaaggagatgcaatccaacccctcactacgacttcatgtccgctccaccctccagcgaggacatcgtccagcgacaatttgctatccttcacgccgaggagatcgcggagactgatggaggaatttatcatgggaagatccagctaccttcgcgattatctatttaagccactgctattcatgctacttacacaaagagaacgctttgagattcacaacaacacattgcttgaacatatcagattaccaccctgaggactgtcatcctctgtgtagcgtccgccaggtttgcgagcgcttgatatgacttcatgccgcaccaacccagatggcgcattgggctcactggatgacaaactcccaagacagaccaacactgtgctataaaatcacga

SEQ ID NO: 36880 - DNA, 429 bp, Zea mays
  Clone ID: MRT4577_133639C.1
aaaagagagatgagcatcgttgtattcaaaagatcatagatttaatacgtttaccggtgtgcataaccttaattcatcaatactagggtgacggcaagcgtagtacggcctaaatcttaccttacgagccgcaaacccgatgacgttttacacatatatacattacttaatttcatggaccaccctgaagtggttacaatccatacatatagctgttcgagatctggtacaacaaatatgacctttaaccataagcttacccttcttgggagagattgaggaggccctctttaccatggtacaaagaaatgccttttgatttggaacgtattaacccccaaataaggttgaagtcagggttcttcacccaggttttgtcccttgagttcttgaagaaggccctaattgttgtccctcaaaagaatgttg

SEQ ID NO: 36881 - DNA, 641 bp, Zea mays
  Clone ID: MRT4577_13363C.1
gggccggcgacctgtcatctcgcgtgtctacccacaggcatgacaacatgacgtaatggacttctattcaaatacatgatctcttgttaaccagagtgaactctcgaccattggactgccgatggtactgagagaacttgctcaatgccaaaagtagtttaacaagttggttttactaacttgtaactgcccaatgaacaaaggttgagtttagagatcgttttatcgagtgtctaaactcacttttgtacaacccctctaaaggaagtgcttgcaaaaaaatcaagttaagccgactggtaacaacctagtcatcactctagtcatgcctcgatcgcgtcacgtgtgcttttccagcatgtgtgaataaatcgagccgtgctaagtatttgatgaaataggttggtcgtgaagtcaacatcaacggatctcttcattgattttttgagtatctatcatttttcttgaacttggattttctggctaacacgagttaactgtgatgttgttcgacatccacacccgtctcgtgtgctatgaactaaccgtgaccacttgttggtaaacctctttctatgagttttacccaagaggttgcatctgattctgtttgggtaaaatcgcgtatttgctgcttgctc

SEQ ID NO: 36882 - DNA, 334 bp, Zea mays
  Clone ID: MRT4577_133640C.1
acctttctttccgcggagcgccgacacaaaaacggggggggatttaaatgcaacttaccgtgcgcatcacacaccaacatcgggagcaacgccggcaacggaggcgtgctgcagcaggcacaaggagcaggagacgcgcatgtgcacgaacgcgcgcgaccccaagctgcagccgacaacaaacgcggccaaaggcaagaacgccatggccgcgagcacggtgcccgcgccaaccggcaaaggacaacttcagaaagcgccgccgccgcgcgaacgcacgcgagtggaggataacatatgacgacagcagcgtgtgccactggacagggacaga

SEQ ID NO: 36883 - DNA, 416 bp, Zea mays
  Clone ID: MRT4577_133641C.1
gggaaaggactcaaagcagctcgatgtctttatttcaaaaaacagtagctggggcaacccaatgggatgcgcaaaccccggacaaaccctggtgttacgagtaggaaaaaagcgaaaaaaaaaaaagccagcgaggaaagggatggggggggcccccctgcccggccggcagcctttggatcaaaactacagggggaggggacctcctctttccttttttttttttttggaaaaaaaaaaaaaaataatgcaaatcttccgcaggttcccaggacgaccggggacaatgaccccccttgagcccagcagagcttttcaccgtttttttccttttggggtcctccatcacgtagcacagtttgccgaaccaaaggcaacaaactggggacaacaacgggggcgatgccccctgaacc

SEQ ID NO: 36884 - DNA, 587 bp, Zea mays
  Clone ID: MRT4577_133642C.1
atgtcggcacgagggaagggggagccccgccacgacgcgacgaccggtcgacggaccctcgacctgcccgcctagcttactccgacgcctagggttttctaccggacgccgcccccgccacagcacgggcccgggatgcaggcgcgcccgcacagccaggcgccacaaccaacggggcgaggggaccgccatgctatctgcctagcgctgcaaccacacagcacaaggaccaggcgcgaactggcctgcagcacccctccaccggtgaccccacaaatgtccgtcacattgtcacatccaatcatgcaaactaccccaagggccaggagcccgccgagaacttccacatcgggagcggcagcatcctcaccgtcaaccgccaagcctgccaccaccaacgagggatgcaccagaccgtcccgaccaaccaacgagtactcgagcagacgttccgatgctcccgacacaaggtggcgcatcacctgctccacttcttaccccccatggagagtactgcaacaccgttcgacacgcaagactcgatgacgaagctcatattcgacctcactgccaccccaatcatagga

SEQ ID NO: 36885 - DNA, 414 bp, Zea mays
  Clone ID: MRT4577_133643C.1
ccgcccgcgccccgaagcagaggcacaggctcaacaggcaaaaaaaacgcatgatggcgcaatcaaaggaaccgcatgagggccatcaagcgagccgggcgcaagaactgggagctaaggaaacccagaagataacctcaactatactggaggagggaagcagactcaatatactagctacaactacaactgaggatacattcatcattgcacaataaaaaagagggaggaggacacaaaggattactatgctgttgggattggacaaaccgcgaggaagctagtggttgaagacccctccaaaaagcgggccagatgttccatatacaactcggcctcatagagggagcctggacagagctttgattccaatgatacgctcacccattatgagcccaaagcaaaagccaggga

SEQ ID NO: 36886 - DNA, 134 bp, Zea mays
  Clone ID: MRT4577_133644C.1
tttggatacggaacctgtttctcaaacaagtttcaacgagttaagaagatatgagttggtttcagttggatcttagtcctggttgctcgtaatacagcaatctagatagctcaattgaatatgaaatttgatgg

SEQ ID NO: 36887 - DNA, 452 bp, Zea mays
  Clone ID: MRT4577_133645C.1
cattatcaccgagtggaacaagggagagctcgactcgtacctcattgagatcacccgcgacattctcaagtttaaggacactgatggctcgcctttggttgagcacatcaaggacacagctggccagaagggaaccggaaagtggactgtcgtctctgctctcgataacggcatgcccgttaccctgatcggtgaggccgtctttgcccgctgcctgtccgccatcaagaacgagcgcgtccgtgcttccaagatcctttccggccccaacggcaagttcactggtgacaagaagcagttcatccacgatgtctccaaggccctgtacgcctccaagatcatctcgtatgcccagggcttcatgctcatgcgcgaggctgccaaggagaaccgctggcacttgaacaacgccggtattgccctcatgtggcgcggcggctgcatcatccgct

SEQ ID NO: 36888 - DNA, 309 bp, Zea mays
  Clone ID: MRT4577_133646C.1
ggttagaaaaaataggagccgggtgattaaagcctcaaccaacaggctgaagtctggacccctggtcacaggctgacctttttacatgttttgatgggactccgttcaaaccgagtagcatcctaggcatattccctggtttttttttctttttcggggcaaattctgaaggggatccgagatgggaactaaacatatatgcagggcaatggcacaaatgcgaacatgagctaagaaaataatggtcgggttaaattaaaccaacagggtttacaaaactttccatagccattggccagtggtgggctg

SEQ ID NO: 36889 - DNA, 548 bp, Zea mays
  Clone ID: MRT4577_133647C.1
gcttctgaaaatgaaccagcagcacacatataatattagttaatatgagtttctttccttcaagtagagagcttggcgatttcaaggcattccccaggttcgattgcaggttttgcaacaacggttgtccctagacattggggatgcacaaaggtagcagaatcaatggctgcacccgtaaatgataaatacatagcccctgatcttctccacatatatcttgcactcggggcaccttgccacttgctctcttgttcaaccttcctcggcagtaggtcctctctgccctgctcatccttcctcggtcgttggaacttgaactcatgctcaggatcatcatccacagagcaaagcattccgtcaaggggcagtagaatctgagtgaacccaatgacgagtcacagagtggaaggcatcttgtaggggtttcagtagaaccattttattcttgatctccaaagacatatgaatctcgaccaagcgacttagattgtagcatttcatcggcaacatgaagaaaatggtactccctagaagtacacataaat

SEQ ID NO: 36890 - DNA, 367 bp, Zea mays
  unsure (1)..(367): unsure at all n locations
  Clone ID: MRT4577_133648C.1
actcgggggaataaatgttctattcgtgagtantacccttaaatgataaatacatancccctgatcttctccacatatatcttgcactcggggcaccttcccacttgctctcttgttcaaccttcctcggcagtagggcctctctgccctgctcatccttcctcagtcgttggaacttgaactctgcgcaagcaacaccagtgtgtcatggaaccttacactgggcacagaacatccggcagcagtgtgggcactccacatttgctatcaatgcctcaccatgctcaggatcatcatccacagagcaaagcattccgtcaaggggcagtagaatctgagtgaacccaatgacgagtcacagagtgga

SEQ ID NO: 36891 - DNA, 294 bp, Zea mays
  Clone ID: MRT4577_13364C.1
tttgaatatatttttgtattaaaattattcgaagacacaaatgttgctaatatattctataaatctaatcaaacttaagaaagtttgaccgacacgaataacatagcgaaacatttgtggacggagggagtatcagacatggattctgaatctcttgttcataatgtttaattaaaagttggaacagaaaactacctgatgttttatgagtagtgttgatcatgggctacagcatagccttgtaggtttcagtttatcatgcctgatgcaccagggttcttagcataaaagtgt

SEQ ID NO: 36892 - DNA, 416 bp, Zea mays
  Clone ID: MRT4577_133650C.1
attgggtacctcgaggccggccgggatactacttccaaagagaggcagaaagagattgagtcgcaaacgcaacggtgagatagaagtatatgaagcagactaggtatgggcggccacagggaactatgatgtggtaggagaaggaccacgacttcttcgagctccagcaagaaggacctacctagcatcccgccggggatgacagcttctcctacaccaaggagcgaacctctacctgctgagtgcaaaacgagattcacaagacagacgagactgaggacaagaactagatagacatctcagagggaagtgccatcgccgtcgggacattcccactctactctaagcacgaggcgaagaacgaccccgacctctggctgacgtacgagattgcggaggacgtcaatgccgtggcg

SEQ ID NO: 36893 - DNA, 125 bp, Zea mays
  unsure (1)..(125): unsure at all n locations
  Clone ID: MRT4577_133651C.1
ccagttctggctcggcggctcgtcggacaatctccagaacttccttaagatgatcggcggctggtacntgcctgccctcaaaggcgccggcatcaagtacgacgacccccgtgctctacctcgac

SEQ ID NO: 36894 - DNA, 758 bp, Zea mays
  Clone ID: MRT4577_133652C.1
gtcgatacaagcctctaaaatgaatcgtactatatattgtatggttatcacatacattgacatggctgtgcgcattccgatgggcgagggtttgtcatggccgaccgggcgcgcggcatcgacgggagcacagagctagctagccagccagccagcagccagcttgctcgccgcgcccgtccttcttcctcgcctccgttccgttccgttccgtcccgcccgccgccgccgccgcattcagggatggagatgaagaagatcgcctgcgccgtcctcgtcgccgcctcggcggccaccgtggcgctcgccgcggaggctccggctccgggccccaccagcggctcctccgccgtcgcgcccgccgtcggcgccgccctcggggccgccgtcgcctccttcttcgcctactacattcagtgagccggccgcggccggtcgcccggaggccgaggaagagacgaagcgggagagagagtgacatggctgcgcgcattccgatgcgtgggcatgtttttgattcgacacaccttttgtcctctttttctttgttccctctttctccttaatttaacgaattgatgcatgccgctgatgttcttccccctgagagagggattaacacttgtatcatcgcttgccatttgtttgaatccattcaacaattcgatttaatcaatcatcgcgtatataaaagccaaaaaaaaaaaaaaaaaaaaaaaaaaaaaaaaaaaaaaaacaaaccccggggggggggggtg

SEQ ID NO: 36895 - DNA, 1822 bp, Zea mays
  Clone ID: MRT4577_133653C.1
catctagcggccaccaagctgcgccatcttgtcctcttcccccctaaaacgcccgttcctggacggctggacctgcttatacggtgcctatgcccacgcatcgggctgtgggaggcgggctctgtttctgactcgctggagtggtgggcgtacgcgggcatctccttcttcctcgtgcttttcgccgggatcatgtccgggctcacactggggctcatgtcgctcggcctcgtcgagctggagatcctccaacgcagcggcactgacgccgagaaggctcaggctgctgccatccttccagttgttcaaaagcaacaccagcttcttgtcaccctgttgttgtgtaatgctgctgccatggaggcacttcctatatttcttgacagaatgtttcatcctgttgttgctgtggtattgtcagtgacatttgttcttgcctttggagaggttataccgcaagcaatctgtaccagatatggcctagcagtgggtgctaactttgtatggctcgtacgcattctcatggtcatttgctatccaatttcttaccctattgggaaggtcctggactgtgctcttgggcacaatgagtctgcactttttaggcgagctcagttgaaagctctagtttcaatccatggcaaagaggctggcaagggcggagagcttacccatgatgagactacaatcataagtggagccttggacctgaccgaaaagactgctgcagaagctatgacacctattgagtcaactttctcactagatgtggattctaagttggattgggaagcgattgggaaaattcttgcccgtggtcatagtcgtgttcctgtatactcaagaaaccctaaaaacatcatcggtctcctattggtgaagagtcttttgactgttcgtgctgaaacggagacgccggttagtgctgtttcaattagaaggattccaagggttccttcagacatgcctttgtatgatatactcaatgagtttcagaaaggaagtagtcatatggctgctgttgtgaaggctaaacctaaaactgaaccaccgcctgacagaactgaaccaaatagggaagcagttgggccagcacagttgactgttaccttgttatctaatgctgaagaaagtgcagacaatgtggttgtggatatcgaaagaccacataacaggcagattaatgggatcccagcatctaacgcagtgcctaggtcatcagaggatattgaggatggtgaggtcgttggaatcatcacacttgaggatgtatttgaagaactcctacaggaggaaattgtggatgagactgatgaatatgttgatgtccataaaaggatccgagtagctgctgctgctgctgcatcatcggttgcaagggctccatccgttaggagattaacgggccaaaaggctgcaaaccttcagggagcacagaatcgccaaggacagcagcctcctggaattctcaagaaacctactgagggtgattcaaactcatcaaaacaagtgaaccttgtcgaacctcttcttgaaaagaggaggtaactctaaaaacgtagccgataaaacgcatggaatcaagccggaagagcctatggttcttgctattataacaagaggtaaatatagatgaactcgttgttgtaaattccaacaggagcttttggtgtcatggacattagtcatgaattctttggatccccccccctttttttttgtgttttgggcttcgaaagtagagtcgccatttttgaatgtccccgctaaccgcagtagcaagttagcaactgctttatatatatgtgcttccaattcgtcg

SEQ ID NO: 36896 - DNA, 321 bp, Zea mays
  Clone ID: MRT4577_133654C.1
gccggccgtttcgggttagggtccttgttaactgtttgcttgattcaaattgcgaatatgcattatacaaacgagaaggagttgtgggatgtacttactactaagtatagtgcatcggatgctggtagtgaaatgtatatcatgaagagctttcatgattataagatggtcgataatcactctattgtggagtaaactcatgagatacaatgtattgccaaggagctcgaccaaaaaaaaaaaaaaaaaaaaaaaaaaaaaaaaaaaaaaaaaaaaaaaaaaaaaaaaaaaaaaaagaaaaaaaaaaaaaaaaggccccta

SEQ ID NO: 36897 - DNA, 1909 bp, Zea mays
  Clone ID: MRT4577_133655C.1
ggctggacctgcttatacggtgcctatgcccacgcatcgggctgtgggaggcgggctctgtttctgactcatcggccgagggcgatggcggcggcggcggggaaggcgcgggcgatgagcctggcggcggcggtgcgtgtggtggcggcgacggcgcggccggcatcgagcgcagccgcggcggcgggtgtgggtgcgatggcgttgatcgtgcagggcgaggacacagccttcgggtcgctggagtggtgggcgtacgcgggcatctccttcttcctcgtgctcttcgccgggatcatgtccgggctcacactggggctcatgtcgctcggcctcgtcgagctggagatcctccaacgcagcggcactgacgccgagaaggctcaggctgctgccatccttccagttgttcaaaagcaacaccagcttcttgtcaccctgttgttgtgtaatgctgctgccatggaggcacttcctatatttcttgacagaatgtttcatcctgttgttgctgtggtattgtcagtgacatttgttcttgcctttggagaggttataccgcaagcaatctgtaccagatatggcctagcagtgggtgctaactttgtatggctcgtacgcattctcatggtcatttgctatccaatttcttaccctattgggaaggtcctggactgtgctcttgggcacaatgagtctgcactttttaggcgagctcagttgaaagctctagtttcaatccatggcaaagaggctggcaagggcggagagcttacccatgatgagactacaatcataagtggagccttggacctgaccgaaaagactgctgcagaagctatgacacctattgagtcaactttctcactagatgtggattctaagttggattgggaagcgattgggaaaattcttgcccgtggtcatagtcgtgttcctgtatactcaagaaaccctaaaaacatcatcggtctcctattggtgaagagtcttttgactgttcgtgctgaaacggagacgccggttagtgctgtttcaattagaaggattccaagggttccttcagacatgcctttgtatgatatactcaatgagtttcagaaaggaagtagtcatatggctgctgttgtgaaggctaaacctaaaactgaaccaccgcctgacagaactgaaccaaatagggaagcagttgggccagcacaattgactgttaccttgttatctaatgctgaagaaagtgcagacaatgtggttgtggatatcgaaagaccacataacaggcagattaatgggatcccagcatctaacgcagtgcctaggtcatcagaggatattgaggatggtgaggtcgttggaatcatcacacttgaggatgtatttgaagaactcctacaggaggaaattgtggatgagactgatgaatatgttgatgtccataaaaggatccgagtagctgctgctgctgccgcatcatcggttgcaagggctccatccgttaggagattaacgggccaaaaggctgcaaaccttcagggagcacagaatcgccaaggacagcaacctcctggaattctcaagaaacctactgagggtgattcaaacccatcaaaacaagtgaaccttatggaacctcttctggaaaaggggaggtaactctaaaaacgtagccgataaaacgcatggaatcaagccggaagagcctatggttcttgctattataacaagaggtaaatatagatgaactcgttgttgtaaattccaacaggagcttttggtgtcatggacattagtcatgaattctctctccccctctccccttctcccctctttggttatggactgcgaaagtagaatggccactcttgaatttatttatcaccgctcaccgcagtagcaactgcattatatt

SEQ ID NO: 36898 - DNA, 1321 bp, Zea mays
  Clone ID: MRT4577_133656C.1
cacagtcaacaaaagctacggcctacgacggatacggtctcccctccactgcctcccttgccgtattgtcttcttcatctcatcgcatcccatagttgtgccagttggagacgcttctgttgctgaaggagacctacataaactatagtcagccgctaagttaaacaagccacgtgctggccgggatcggatcggttggtttatgcaccagcgcccagcggtttctcgaggtgcgtgcgtgcgtgagagagaggcgacttcccggaggtttagcatcttcttctctctcagtctcaccctgtccctcgcgaaagcatctccattcttccctcctctcttcccgcactgttctcggaatcgctcttctcctccgcgctgttcttggaatcgaaaggtgggaagcgcaatgagcaacgagttcgattacctgttcaagcttctcctgatcggcgactcctcggtgggcaagtcctgcttcctcctccgcttcgctgacgactcctacgtggacagctacatcagcacgatcggcgtcgactttaaaatccgcacggtcgaggtggagggcaagaccgtaaagctgcagatttgggacacagcagggcaggagcggttcaggaccatcacgagcagctactacagaggagctcacgggataattattgtttatgacatcacggacatggagagcttcaacaacgtgaagcagtggcttgacgagatcgaccgatacgccaacgacagcgtatgcaagcttcttgttggtaacaaatgtgatctggccgagaacagggctgtcgacacttcagtagcacaggcttacgctgaagaggtaggcatcccgttcctcgaaacgagcgctaaggagtcgatcaacgtcgaggaggcgttcttggcaatgtctgctgcaattaagaaaagtaaagcagggagtcaggcagccctggagaggaagccctccaatgtagttcagatgaaagggcggccgatccagcaagagcagcagaagagtagatgctgttcaacatgaggcacagcaatgtctgtctttggagaatcagtaaaatgattatctgctagactagatgtgtttctctgtcttcgtttgttttgagacacatatatatagttgcgaaaatgcggtggtgagaaactcgaaatgaatctgagccagaactcggaccgccaaatttcatcatttttactcacaaatttctaccatattgaacagcgagataatccaaccttgaaaaagtagtttataaaaaaaaaaaaaaaaaaaaaaagcggccgccgactagtgagcccgtcgatccgggca

SEQ ID NO: 36899 - DNA, 179 bp, Zea mays
  Clone ID: MRT4577_133657C.1
gaaagcaactaacgcccaatcacctgtatatttaaggtctaaaggcttaggttacattttacaacatggtggcagggcggttcttattggtgcgccacaacctttggtaggcatacccacattatgtcaccagggaggaccccaaacaaaggattacacttaaaccttacttatacacc

SEQ ID NO: 36900 - DNA, 369 bp, Zea mays
  unsure (1)..(369): unsure at all n locations
  Clone ID: MRT4577_133658C.1
acagattatcaatatggccaacgngcggggggccgacgtgtttaaaattatgggcctcccagaacaccaactaaagaagcagctgtaacaagcaaagaagtgctccatacacgttcaatgagatccacccataacatgaccatttctacatagaaaccatctggattcacatacaaaaaacccagcatgtctctacgctttaccactatccgatatacaggcacatagacagcattaatacaaggtacagaaaaatgaactcaaccaacgcagactcttaatttgcattgacatcttctaaagaaaagaaaaagggtccgtttggaatgattatgaaagacaacaaatgaagctaatcaaaagaaagtg

SEQ ID NO: 36901 - DNA, 321 bp, Zea mays
  Clone ID: MRT4577_133659C.1
caggatataaaggcccattatggaccaatcatggccagctaaataatttggcctcttagggttccttgtccttcttgcagttcctgtaacggcaaccattttcccccattgctaacaagctccaaaagctcccatagttcccctgtccttttaataactgtgaccttcggtttgtgaaaccccagttttcaacccttccggatcctacaagctatcgcaagttgcatcttaacgtttataaccattgtcatcctacaatcatcaaccctattacagcctattactttggtgcacttattggcacaaaacatcacggcacat

SEQ ID NO: 36902 - DNA, 709 bp, Zea mays
  Clone ID: MRT4577_13365C.1
ctcgaggccggccgggtcactcgttctgcgcgtcaattgctcgtccccagtgacagtcattcgttttcatattgtgtttaatccttaattgaagtcgacaaccacactcgctattcgaaccgtaaagttttccttaggaacgaaacagtaatatcatacacataatgcgtttctctgaggttttcgccgcctcctcggtggcctccctcgtcgctgctcatggcggcattcagggagcccccaagctcttcggtctgcccaacgacatcaagatccggatgccttctcctcgcgctgctcgcgccgccgctgctatggagggccctcaccacctccaggctcgtcagggaggtgatgccaacaaccgctgcggtcccagttttggcaacgctgtttgtgctgccggttactgctgctctggagctggatactgtggaaatactgcagagcattgcaacgctcctgactgtcttttcaatttcggccctggatgtgatgccaacaagacccctgctggagctagcactcgcaacgatgctcgtcctcagaaaggcagcgttttcgtacgggtggtgctggcatctacgcttgccgcaagccaggaactgttgccattacctatgacgacggcccgtacatctcacctgacgaaggttctgaacaagttcaagggcagctggtttcaaggctacttttcttcgtgactggc

SEQ ID NO: 36903 - DNA, 286 bp, Zea mays
  Clone ID: MRT4577_133660C.1
tcgcgacaggtagttcaattgtgatcttggactattacgaatccctcttgttttaatgttttatttgcctttttattttaaaaaaaaaaaaaaaaaaaaaaaaaaaaaaaaaaaataaaaaaaaaaaaaaaaaaatataaaaagtaaaaactagaaaataaaaattccttcaagttcgcttgaaaaaaactgactctatgttaaagagaggaaggccaccctaccattgatctgtctaaacaaaaggaagggggggcgcccatccagtgcttccaagactaggaag

SEQ ID NO: 36904 - DNA, 258 bp, Zea mays
  unsure (1)..(258): unsure at all n locations
  Clone ID: MRT4577_133661C.1
gggncgggncctcattctttgtcatcccggcggcggcgcgtagaacaggagaaggagcaggcggcggcggtgcccgaagaggagaagcncggcgacctagcccgagctcgcnaccntgggtaggggnttgaagaagcatctgaagaggntcaatgccccgnctcnctgnatgcttgncnagcttggtggagcttttgcccccnagncntcatctggggctcncnaggccannnagtgcctgcctctgntccccatcct

SEQ ID NO: 36905 - DNA, 346 bp, Zea mays
  Clone ID: MRT4577_133662C.1
cgcacgcgtgggtccacagcacccgcacgcacgcctacgttcttctttgacttcgagaaagggaccactaggccacagaatcgtggtcgctagcaacccacatgtggggaagatgtcatcgctgctgtatgccagcccgccgtgcgctaactatgaatgcgcccattcggacgccacgaagacgattgggcttttggagaaacacaaggactatgctgtccgggcgcagagcttaccccatcacggaggcaccatggctaacttgaccgacaaggcggcattcaggagtaccgatgacatgtatcacaagatgctgaccactaagcactggagggggaattcatag

SEQ ID NO: 36906 - DNA, 640 bp, Zea mays
  Clone ID: MRT4577_133663C.1
gacacgcttatattgtcactggttcgttgagcatcatcatatcgattctctttgctctgatccatgtgaagtacccaaggccgcaaggtgaccccaattgcctatcctggaacaggaaaaacagcaatagctaaggggcccgcctgtacctaccatctatgtgggcgcctgtgtaccaacatgaatcagtattacacatctgtatctgaaacatgtcagacactgtgccgcaaggttaatcccagatgatgaaaagaaactgcgtacaccatgtccatcagaaatactagttccaattccaacacatgcgctgtgcatcaaggtcaacaccgggagttttttcgcacggtaatttgaaaatgaaattgtggtggaaactgtgtaatccgccaatccggtgcggatctgcacagagaaactctggtggctgctgtgactaatgaaaagtggttattctggcttggccgttgtccatcgagggagatgtaatacctgatcagccctgaaatcttaaagggctcccttctttcctcatgctgggacaacatttatttacatcgggtgtgttcttggagttctctccatcaccgaatatatgtcggcgtgattgctcaagaaaaaaaaaaaaaaaaagaaaagt

SEQ ID NO: 36907 - DNA, 1702 bp, Zea mays
  Clone ID: MRT4577_133664C.1
cggacgcgtgggcggacgcgtgggcggcctcgagggcggacgggtgggctccactcttcttctgcggtcggatcccccggcgggtcggactgcggagcacgggctccggcgagccgctgacgagggcctgtgcggcgaccgagctcgtggcgggagaagatggacgaagcgagcacctccgcgtccggcgccgcgacgaggcgcggcttcgtgcctgcgagatcgggagttttctataggttcacccagcagaacctcccagcttggaagccagcaatgacacctggatgtataatagcaatgttcttgattatcggaataattttcatacctttcgggcttctttgtctccaaacttcaaatcatattgcagaaatcatctaccgctatgatgttgactgtgtgcctgatgcttacagaggaaataggcaagcttatattaaggacagctcgatttctaagaactgtactctggaagcgaaggttctggaatacatgagagcaccaatttatgtttattatgaacttgagaatttctatcagaatcaccgcaggtatgtcaaaagtagaagcgataaacagctgcgttttggggcaaaatacacggccgactcgtgcagtcctgttgagtgggataataatggttccccaattgttccctgcggcttgattgcctggagcttattcaatgatacatatggttttactcgtgggtccaaggaaataaaggtcaacaggaaaaacatttcatggaagagcgaccgggagcataagtttggcaaacatgtgtttccttccaactttcagaacggaaccttgattggaggggggaaactcgaccctactgtcccgctgagtgaacaggaagaccttattgtgtggatgaggacatccgctctccccaaatttcgaaagctctatggtgtgattgaagacgacctgcatgccgatgagaccataaatattttcgtaggaaacaattacaacacctacacttttggtggaaagaagagcatagtcctgtcgactgcgtcctggctaggcggcaagaacgacttccttggacacgcttatattgtcactggttcgttgagcatcatcatatcgattctctttgctctgatccatgtgaagtacccaaggccgcaaggtgaccccaattgcctatcctggaacaggaaaaacagcaatagctaaggggcccgcctgtatctaccatctatgtgggcgcctgtgtaccaacatgaatcagtattacacatctgtatctgaaacatgtcagacactgtgccgcaaggttaatcccagatgacgaaaagaaactgcgtacaccatgtccatcagaaatactagttccaattccgacacatgcgctgggcatcaaggtcaacaccgggagttttttattattattattccagaatgcgcacggtaatttgaaaatgaaattgtggtggaaactgtggaatccgccaatccggtgcggatctgcacagagaaactctggtggctgctgtgactaatgaaaagtggttattctggcttggccgttgtccatcgagggagatgtaatacctgatcagccctgaaatattaaaaggctcccttctttcctcatgctgggacaacatttatttacatcgggtgtgtacttggagttctctccatcaccgaatatatgtcggcgtgattgctggtatct

SEQ ID NO: 36908 - DNA, 431 bp, Zea mays
  Clone ID: MRT4577_133665C.1
ctcctcctctccctcgacgccgccggcaggagggcggaccggcggtccacggccgcggggcccgggctgttgccgcacgagtccggcggcgagtgggagggccgcaagtgcccgccgtcctcgccgtccgtggcgcgcctgccgccgctgccgccgctggcgaggtggaagcaggggcggggctcctcgcgccggccgtcgtcgcgccgcctggccagcagctcgtcgtccgacgacgagtacgacgaggactcgaggaacctcttctcgtcgcggagcttgtcgtccgactcgtccgacttctacagctgcccgcgccggaacgccagcgccagcagggggcgcgcgttcgtctcgggcccgtgccgcgcgctggcgctggcgccggcgccggcgcccccgcgccgcggcgcgtctcaaagctgccggta

SEQ ID NO: 36909 - DNA, 477 bp, Zea mays
  Clone ID: MRT4577_133666C.1
aaaaaaatctttatttctcttctccaaaagagttattataaaaagaaaaaaagaaagatgagaacgtttatatatattcccctcaaatctctctctgtctcaaactgtttgtctacagacgacaagtagattccttttgctttgctttctcagcatgcaataattgtcatattatttctccattaagattcttgtttctttatttcccgagattattttcttgatttcctcctctgcttgctcttcccggagcttgttttttcaaagaatcaagatttgagatttgatggaatcaagaatggaaggagatgtgtattctggatttggagagagataccaaatggatggtaagttgttgcataatttccagaagagctttgttcaagttcaagacattcttgatcagaaccggcttttgatcaacgagatcaatcagaaccatgagtcgaaacaagctgatcacttgggaagaaatgt

SEQ ID NO: 36910 - DNA, 310 bp, Zea mays
  Clone ID: MRT4577_133667C.1
tgatggcaacttgcctgaagtccagtttcttaaaaaaaataatgaccccagccaactcatcaataagctcatcaactattggcattgggtgttttttttattatttgagcatttaaataaactatactccacacaaaacttgcaaataccacctttctttctgaccatcagcacaggagagacataaggactagccgcttagtttggaaattgcatttttaacatactgctctaactgcttctgagtctgatctttttctaaaggcgaatatctatatggccgagtgagctgcagggagcaactcaatat

SEQ ID NO: 36911 - DNA, 475 bp, Zea mays
  Clone ID: MRT4577_133668C.1
ggcccttaggggaaaaaggaaacaagcaacatatttatgccattggtaaaggggaccccatcacattaacaggactaggagccatcggcgccggccccccaaaaaagcaacacatactcaaacatgccaaagctgccggggacgagattgatatataggggacacatttatcacacgacacatggcccagcagtataacaacggaaatcaggaggagactaacagtaccccccaggcccactgggggagcccccaggccgggggggggggggttgattgattataaaacggggcggggggtgggattgaaacccaagggaattggcccccatgcaggggggggagccaaccaagcccaggaaggttactttttgagggtgccccggaccccgggcttgggcttgggggggggggccttggaaggggggggggaaacgggggggggggcggcaaaaacgggggggggggagtgcag

SEQ ID NO: 36912 - DNA, 231 bp, Zea mays
  Clone ID: MRT4577_133669C.1
aaacaaaaccattggctagccctaacaaaataaacattaaggtcatcagaggggtgaaccacacaatcagacgggcctccatggccaccctgggggggggtgaaccctgcgggggggcattccattacccgacatacccgaagcacaaatgaacatgcctttgggggtgcatacaaaggaacaaccattgagccactccggaactcattattgccttgaaaacgggaaaat

SEQ ID NO: 36913 - DNA, 527 bp, Zea mays
  Clone ID: MRT4577_13366C.1
aaataaaattaaaaacctttattttcccaaatataaaattactaaattaatgtctgaaaaaaaatataacatggtgaaagtttgaaagtacaccactattcaccacaggatttatgatttaccaattacatactccaccactttggcaaaaggatgaaaattttaaaatagtttataaacctaacatagcaaagactgtatacatctccatattgcacttttttatgtacaaggataaaacagtaaagtcaagtatattgcatatactaagagcggcacaagtttgtcacaattgaacttaatgcaaaagctgatgtgaagagtattaaaaatgtagaaatgtatgtacagaatgagagactgtattaacaaactatgtacataacaatatactgtactacttttaaatttttagcatagttttgtttattaatagaggcctttggttctaaactgcttgactagttttaagctcatgtagtttcttaagctttcatgttttttaaatgcaagtctatgagtataaa

SEQ ID NO: 36914 - DNA, 628 bp, Zea mays
  Clone ID: MRT4577_133670C.1
cctcgagggcctggccgggcatcttgaaagccctagtcgccgtgctccatctctcagccggcgtcaatcccttcccgtgctccgcaaccgctgagtgagagaaagagatggtcggcaaggccgatggcccgggtatagtcatcgatctgggcacgacgcactcttgcgtcggagtgtggcagcacgaccgcgtcaagatcattgccaacgaccagggtaaccgcaccacgccctcgtacgtcgccttcaccgactacgagcgcctgattggtgatgccgccaagaaccaggtcgccatgaaccccatcaacaccgtctttgatgccaagcgtctcatcggtaggaggttcatggatgcgtgtgtacagagtgatatcaagctgtggtccttcaaggtcatttctgggcctgcagagaagccaatgattgttgtccagcacaagggcgaggagaagcaatttgcagctgaagagatctcctctatgggtcttgcgcagatgcgcgacgacgctgaagcttaccttggcagcacgatcaagaatgctgtgatcacaggccctgcctacttcaatgactcacagaggcaggacacaatggatgctgaggtgattgctggacttaatgtgct

SEQ ID NO: 36915 - DNA, 370 bp, Zea mays
  Clone ID: MRT4577_133671C.1
ccgacggctgcctctacgttggcttctggggccgggaggcgcccagcggtgccgtgcaccagaagggcgtttactacccgtccccggcggcgatgggcaactccccccgggcgcgcgacccgagggaggtgttcgcacgtgacctgccggagtgcgtgcgctccggaaccgaggcccgtgccccacggcgccggcaagtacctctgggcggacgggtgcatgtatgagggcgagtggcgccgcggcaaggccaccggccgcggcaggttctcctggccctcgggcgccacctacgagggcgagttcctcgacggcttcatgcacggcgccggcacctacgttggtgcctcgggggacacctaccgcggcg

SEQ ID NO: 36916 - DNA, 757 bp, Zea mays
  unsure (1)..(757): unsure at all n locations
  Clone ID: MRT4577_133672C.1
gtcgaggagtacggtagctcggnacttcgtcggagagcgacccgccaccgccacgcttgaccgcaagccgaggaggccggagacacagacgatcgatccatcgtcggcggtgcagattcggtaatggcggagacggcggacatggagcggatcttcaagcggttcgacaccaatggcgacggcaagatctcgctgtcggagctgacggacgcgctgcggcagctggggtccacctccgccgacgaggtgcagcgcatgatggccgagatcgacaccgacggcgacggctgcatcgacttcaacgagttcatcaccttctgcaacgccaacccggggctcatgaaggacgtcgccaaggtcttctgatgcatgcatcacatatcatcatcaattcgataccaaccatcgatgatcctgcttacatatatatctttataatatctacgtaccattctccagcttcatcaacatatcatttctgctggcctgcctagccggtctcttataagcactagctagtactaggattttttttattttaattcttcttgaattccaatccaatccaatatatgtggacttcgttttatttcttttatttgtttttgccttgatctgataagtgtacctgagcaggccaggccagctttttatgtaattcattccccggagactattggagaagcgatccatgcatctccttaatttgtaaacaaagtactgtgcatttcaatggaaactgagtgatttttttcag

SEQ ID NO: 36917 - DNA, 495 bp, Zea mays
  Clone ID: MRT4577_133673C.1
gggggtgggggggtttttttttttttttttttttttttttttttttttttttttttttttttttttttttttttttttttttttttttggggaccagagcaaattaaagcccaggggggggcaaaaaaggattattggccaaaatgacaagggggggggggggcccggggaaaaaaaaaaatatcccttttcaaaaaaaataaacccgggcaaattgaactttcatgggggcaaacaaacacggggcaggcggggtccacccccccctccaggggccccgggccaaccctgaatttatttatcccgggggttccccccccgaaaaccccccccaacagcgggggaaaaaaccccattccttaggagcaggggagctgccctggcccccggccccaaatttttcaacgggggcgggggggtagtacccagaaacatcggggttgacccggcccccgccaacgggcttaaactctggcgggggggcggggggagggc

SEQ ID NO: 36918 - DNA, 281 bp, Zea mays
  Clone ID: MRT4577_133674C.1
ggtggacttcgcgcgggtcctgcgcggcgcgctggcgctgccgggcgaccggaccgcggccctcggggagcaacccggggcgcggccccggatgctgatcgtctcgcgcgccagcacccggcgggtgctgaacctggacgacgtggcggcggcagcggacgagctggggttcaacgtgactgcggcggaagcccgcgcggacctgccggcgtttgcggtgcaagtgaacgcggacgacgtgctggagggcgtgcactgcgccgggctgacgaaccaggagt

SEQ ID NO: 36919 - DNA, 478 bp, Zea mays
  Clone ID: MRT4577_133675C.1
cgccccccattggacataacccctaaacataaaaaacaatggagcaactagcaagggaaactagtatgagcccgaccttattaacaaaggccccaaaaaggggcctgttttggggctctaaagtctagaaaacctgaaaaaccaatttaagcacacacttactttttttaccacacaaaacaaaaaaaaatcttttgaattgccattggagcaagtcactcagaagctaaatctctgccttttaatcttaaggggggaaacgggggcttacaaaccagggcttaaaacttacacttaatttgagtaggcaccatgttcaccgcctgggtccttgctaacgctggaaggcgttttcccttgaagctgggcgcacacaagcttgctaaaaaggagcccagcgaggagagccgccgccataagaatgggaaacacggggctccagttccttaagaagacgtaccccgtaaccaggggcccg

SEQ ID NO: 36920 - DNA, 392 bp, Zea mays
  Clone ID: MRT4577_133676C.1
cggacgcgtgggcggacgcgtgggcggacgcgtggggttggtgcacacattagtttgtttgtggttttatatgacctaggcaattttatcccagaaataattttgttaaaagactctgtactgttctcatgttctgtagcatggtgattttttgctagatgtcatgtttccttttaggaagatgagatgagatattttgatgtgccctcgtttacaattaccatgttatagttgctttacatttaaaaaaaaaggaacttactccatcagccatttggttaaacagcttgtttctgtctgagataggaagcatgagacttaaaaaatctactgaaatcatgttccagggtttgattgcaactgcctggatattggctctaatcctattagtg

SEQ ID NO: 36921 - DNA, 720 bp, Zea mays
  Clone ID: MRT4577_133677C.1
ccggccggggacctccggagaggcagggtgagctgctataaagctatttctcctgtccacccccacttcttcctcatgcaacatgagcagctcttaagagcataggaggaggggttgattgcggctcggagattcttctcgcgtttctcctgcactttccgtctgatatttatcagcttcttactccagtccagcagagttcctttgcttcattgctcgctttgaaggggatttttactgctagtctcttgtgagccgtcaaatttttcaccactcagctgtactcccccacgtccaccaggaaacaacgtggctgcttgttgagtccagtgtgtcagtgtgtgccacttctctcccaaacactgcgagcttgtccctatcctgcaagaaacagcggaccaaagcatccgctccatttctccgctagttcgtgcgtcgatccaaacgccagtcttggatttctgccgcaaggactgtgcttcttgtagcaaaagcccccaaagatttgatccaagccagctctcggaatcggatccctgcgaggaccaggcggcctgccatggcgtcccgctcctactccaacctcctcgacctggcaaccggagcagcggaccaggcgccggcggtcgcggcgcttggcgcgctccggcggcggctcccgcgcgtggtcaccacccccgggctcatcgacgactcgccggcgtcgccgtccacgccgcc

SEQ ID NO: 36922 - DNA, 1266 bp, Zea mays
  unsure (1)..(1266): unsure at all n locations
  Clone ID: MRT4577_133678C.1
gccggccgggtccggatattattttcctcccgtttcttgtttttctcctctcgcttatccgtctcccagaaggagagggagagggagagccgaaccggggtgatcgttgccgtccctgtcacccccacaccccgctgtcgtggtgtcctatgcgactcgtttgttgccgtcggtcgcctggttgattaatccaaggccaaggatctcccctccacgaggacctccggagaggccagggtgagctcctcgtgctgctataaagctatttctcctgtccacccccacttcttcctcatgcaacatgagcagctcttaagagcataggaggaggggttgattgcggctcggagattcttctcgcgtttctcctgcactttccgtctgatatttatcagcttcttactccagtccagcagagttccttgcttcattgctcgctttgaaggggatttttactgctagtctctgagccgtcaaatttttcaccactcagctgtactcccccacgtccaccaggcaagaacagcaacgtcagtttgcagcagaagaaaaggctctccctccctttgtattgaaagcacaaaaaatcctctttatctctctgactccttcccctcactcacaggtggctgcttgttgagtccagtgtgtgtgtgccacttctctcccaaacactgcgagcttgtccctatcctgcaagaaacagcggaccaaagcatccgctccatttctccgctagttcgtgcgtcgatccaaacgccaatcttggatttctgccgcaaggactgtgcttcttgtagcaaaagcccccaaagatttgatccaagccagctcggaatcggatccctgcgaggaccaggcggcctgccatggcgtcccgctcctactccaacctcctcgacctggcaaccggagcagcggaccaggcgccggcggtcgcggcgcttggcgcgctccggcggcggctgccgcgcgtggtcaccacccccgggctcatcgacgactcgccggcgtcgccgtccacgccgccgcggncgcgcaccatcatcgtggccaaccagctcccgatccggtcccaccgcccggagtcgccggaggagccctggaccttcgagtgggacgaggactccctcctccgccacctccaccactcgtcgtcccccctgatggagttcatctacatcggctgcctgcgcgacgacatcccgcaggccgagcaggacgccgtcgcgcaggcgctcctcgagacccacaactgcgtgccgg

SEQ ID NO: 36923 - DNA, 443 bp, Zea mays
  Clone ID: MRT4577_133679C.1
gccacataaataatcttgtatacactgcaaaagttgcgatattgaataaaccaaacagccaaaaggacatgaccgtcatctcgatcgatcctgggtatctttctctctctctatgtctcacacgtcacacacacatacatgagacttcttcttacatacatgctaccatgcacatgcatgcgtacgtgcacaaacagcgagattttatttagtactacatagcagtcgacaagtacttcatcgatcatcacgcgtagcattgatcagatatcatcatgactacgatcgttgaaccggcccgctgcgacaagcgaatggttggtcgatccatcacgcgggcttgaaaacccgtgggctaggttttatttcaccctggcacaatctgtgaaggtgctgatagggtacgtgatgctgactccgcacttggaggggattctggccgc

SEQ ID NO: 36924 - DNA, 551 bp, Zea mays
  Clone ID: MRT4577_13367C.1
ccggccgggatcatccgtgagaaagcaagcaacacgtgtgcacttctggagacgcgatgcctgaacggaaacaggatcacgcgagcacttgctgagcgtgcacctagggggcctggtcctctgacacctactctcacacaccgcctccgtccaccagaatgacatccacgggctcgggagcgaccacggttaccttgacggcagcaggcgcaacaacgaatgccgcgtgatctacacggacatgaagctggctgttacggaatccgatgcgccggagccggcgccggagccgtcgtccgttagaactagagaagggcgcgaccagcccatgaaggcgggcacacaccgggaactaattaaggcctcgattgcgtgcgctgctactactggtcttgccatataccatatatagatacgcagagagtggccaagcctacccagatgcatgctattgcatgcctccctatatatatatattatccgactctgatcctgccaaattgaaaagaggactccatgtatgtatatgtccatccgtacaatttaatgga

SEQ ID NO: 36925 - DNA, 307 bp, Zea mays
  Clone ID: MRT4577_133680C.1
aaaggagaccgcatgaacttcctacatgagctcactactccaggtgccatatggcacaacgcactacacgtgcagcacagatgcaagtcacatgcactggatgataaaaataagtcaacagagggtacacgcatccagccatcgacgatcttatactgggacaagaacacatgctcctatcccgtctcataagataaacgctacataccacattatgggagtcaagcccataacggaaaagctcccaagggcgatatctgcggctgagcccttcgccacctctgtcactgtctctgctgtcactacc

SEQ ID NO: 36926 - DNA, 149 bp, Zea mays
  Clone ID: MRT4577_133681C.1
actaacaaacctccaggcggcaaccgttagacgcatgccattcttcggctattggaacctcttatgtgatcatttgttgagaattattgatccgttacttgtaagaataaacatgtttctagtatctttgatggtgatcttcattataa

SEQ ID NO: 36927 - DNA, 554 bp, Zea mays
  unsure (1)..(554): unsure at all n locations
  Clone ID: MRT4577_133682C.1
tctgttatggggggggcgcgcagatcaagtggtgccagacagccaacaatgctctctcccttttgtctacaaatgatacaaacaataataatacttggaaggttcatagagaagtaaagctaaaacgaatttgctagtcattgaatttgcgacagtgtggggggtttttttttttttttgttaccacatgcgtattagcaagctacgcaggtggggtgtaaggncnatcctcttccataatggctggcatggctcctgatatgacttgagttggcgctgaactaactgatctcactatttccctcctggnagggctatcccatacacttgcgatttggccaggttgtgtatccaagttctatgaagtcataatccctggttgtctatgatgatcgtacgttgtgattgtgcttcatggcttctacgattatccatagtaatatttctattttgcgaaatcaatatgtggatgggtgtaggacatctgcatatgcagtcagtatggtatctctcgcaatcaaattctatgggaacccttggaaactaaaccagcc

SEQ ID NO: 36928 - DNA, 293 bp, Zea mays
  Clone ID: MRT4577_133683C.1
atcattctgtcttcgcacatttttttttttttatgcaataaagatatacaagggtggtgtcttctgctcctgggtctgctcattctgacatttgcatttcaatatgtcatcaatactgctcgatctagtgtgagaaccaagggaaatttatattgaaaggtttatgaaacataccgacactgggaaatgacgaactatcatagacgtttacggtcgggagtcttccatgctgaactctatcatgcacttggactttggacttaatgcggatgatctacgactagagttatcta

SEQ ID NO: 36929 - DNA, 109 bp, Zea mays
  Clone ID: MRT4577_133684C.1
cggaggatgcagctcagtagacgcttgacgggagctttctacgttcagacacagaatgggcgtgattcgtcatatgctagttctctcagcgaacaggcatctacaatca

SEQ ID NO: 36930 - DNA, 761 bp, Zea mays
  unsure (1)..(761): unsure at all n locations
  Clone ID: MRT4577_133685C.1
ttgggtacctcgaggccggccgggngtcgtacacagccacaccatcagagtgcatgcacgcacgcactaccctactccacgaccacgtacgggtgtagttataatcatcacgtacactctgcttaatcagcgattaattacaagctttgtaattattacacgggtgatatcacacgtacacgcattagattagaatggagattatcacgacggcaagcacgatggtgaagcccgtctactctaccccgcaccctctcgccggcgagaaggtcccgctgaccgtcttcgaccgcgccgccttcgacatcttcgtgcccatcgtgttcgcctacccggcaccggcgccgtccaacgaggccctcaaggagggcctccgcagggccgtggcgctctaccctcacctcgcgggccgcctcgccgtcgacggccggggccgccggttcttccacctaaacgacgagggcgtgcttgtggtagaagcagccgtctcgggcgacctggccgnacgtgctcggcgacggtatggccaccgccaacgtcgacgagctgtaccccacgcctccagaggacaactttggcgcggcactgctgcagatcaagctcaaccgctacaagtgcggcgggcctcgtgatcggcatcaccagccaccaccanagtcgccgacggccactccatgagcacttccttgaccacggggggctaacgcggtgcgcgcgggcaaggacttcagcgttcccggggnggcggcgaaggcgccctt

SEQ ID NO: 36931 - DNA, 606 bp, Zea mays
  Clone ID: MRT4577_133686C.1
cattgggacctcgagccggcggggcttctgttaccgaattcctaatccatccccttgccaagctctctctttgctgcgggaggtcgaggccggagaggtcttctgggatgggatcaagaaaggggtggttccccgtggccctcctgctgttggccgcctctgccctctggccgccggtcgccgccgccgccgccggaggcggcgaggccgaacacgccgttcagcagcatagcgagcgcatctcaggtgccccaccttcttcccctcttaatttccgaagttgattctggtgtgatttaggaacttgatttttcccctacccttcgacgtgttgcttctcgtagcctgccttggaatccgaggcctacgtagctgttaatttcttcgttccgtgcgatactaatctcttgtaactgtggagttggagattgaataggtgatttctgaatattcttagctgttgctgttgattagacttgtggactaggacgtctttgaggccgatagacaaatctgtatcagtgcagcctgaatttgctttccattttttgccttcttttttactttttctccgtgaagattttcaggttcagctcgatcgtcttt

SEQ ID NO: 36932 - DNA, 598 bp, Zea mays
  Clone ID: MRT4577_133687C.1
ggccgcttttttttttttttttttgtttttttttttttttttttttttttttttttttgttttttttttttattgttttttaatatttaataaatgttttaccactgtgctggggcccgaaactttcttgggtggaacaattttctaaacctggagtggccaagagagaacgaggataacaaagtgggggggggttttaatatttaccgagaggcggcgcaagaaagagtggggttaacacggtcaaacgcgagcaatctgaaaaaactttacaagagccgaaaggggggttttaaagagccaaagctccccaggcggatacttgtccttcaaaggaccgggcctgatttctcggaacaccggaccacagccaagcgggtccggactagaccaggcaatcgatgtacaccagagaaccgcgggcgccagcctccaccgggaggaaccctagcctaatcccgccctacaaccttgcccaccttgagaggcaccggaaggggaaagtaggcgccttggccgagcgctgcccccccaccggaagagaaaggactccaaccgagcggtgtacgaacttgcccaggagcttccccgcgccgag

SEQ ID NO: 36933 - DNA, 167 bp, Zea mays
  Clone ID: MRT4577_133688C.1
acgcactgacatcgtggccaggtcaaccaagctgatcgctactcgcactcgcaattgtggccttgccagcatgcaactgtaactcagcccatgcatcatactcctaatcttgacaagtacctagcaaggaggtcctaaggcaaggcaatgacaggccatggcgctat

SEQ ID NO: 36934 - DNA, 308 bp, Zea mays
  Clone ID: MRT4577_133689C.1
gttacacatgggcagccgcctgtgttgtagatcgaaggctacctacgcttacgttccacgctttcgctctcgtgcatgggaacctatatctaattcattgggcgacgtaattcaacgtcactacccgtaaaaccacaacgtcacgactgttaatacccttgcatcacataactttatcgcctggtagcacattagcgtttaggcaggtagcgttctagcttacaagcacgtgcgcatcgtgcatggcaactgttacgcaccctgtatcgccactttaacccccgctggtgcggcgcattcaccccggg

SEQ ID NO: 36935 - DNA, 161 bp, Zea mays
  Clone ID: MRT4577_13368C.1
gtacgtaagctaggatccatagagtcgaccccgcgagcgggaaaatagcactgcagcaagacgtggacaaactgacgaagaagctgaggcaataggagacaatcatataactctagagcagacagcacaaccagacgataggaactatgaatcccctacct

SEQ ID NO: 36936 - DNA, 1705 bp, Zea mays
  Clone ID: MRT4577_133690C.1
atttttcggcccaaatcctctcacccaagccaacaatttcaggcaaattcgcaacgcctctccagcataggcccgggaaaagcataggcatagctcgccgaaacgccgacctaaacgcccacaattcgcctctccgatccggcacgacaccgccgccgatccccatcgtcacggtagccatgtccaaccccggctcgttgcccgcctccgctcaccacgagcacgagcacacccctctctgccgctcctgcggggcgcccaccacgtcgccgaccccggcaccctggtcagggaccaccgactccccgccgccggcgtaccgccccatccgtctcccagccatcaacgcgcccaccaacacagccgccatagtcctctccccggtcccacagccgctccccgtgcctcccgccgcgccgccccacgccttcctggtccctgccaagcggatcacctcaccggacgatatcgcccgcttccatgcctccgtccacggccttcacttcctcgggttcgtcgccgcgctgtccgcctccgtccacggccgcaagctctcggacccgctaccgtccccgccatcccccgccatagctgcgctgctcgatctcgtctcggctctcgccgctctcgtcgcttccacccctccgcttccacacagctctcggtacggcaaccctgctttccgcctgtggcacgagaagctcaccgactccgccagcgagctgatctcgcggatcacggccaccgcgtcttcccctgcggacctcgcaggcgccgatgtcgagctagcaccgtacctcctcgactccttcggcaacgccacccgcatcgactacgggacggggcacgaaaccaacttcgccgccttcctctactgcctcgcgaggctcggcctcatcaccgagcccgactacccggccgtcgttctgcgcgtcttcacagcttacctcgatctcatgcgcacgctgcaggacacgtaccagctggagcctgcaggctcccatggcgtgtggggacttgatgattaccatttcctgccgttcatatttgggtctgcacagctgattgaccacaagtacatgaagcccaagtcgattcacaacccagatatcttggaaaatttctccaaggagtacatgtatctggcgtgcgttgcatatgtgaagaaggtaaagaaggggccctttatggagcattcaccaatgttggatgatatcagtggagtggccaattggaagaaagttaacagtgggctgctaaagatgtacaaggctgaggtgcttgagaaagtaccgatcatgcagcatttcctctttggctcactaatcaaatgggaggattaataacatctttagggaagctcaccaatgatccgtgagaaactcatgtatgatgtgaagactggcggtatagtggtgctactcaaagtttgtagaaaaaggaatacatatagaaggtcattttccatctagggtgaatgagcgttctatatgtttgcatagtgtgccatcacacttatcttctggtgctctaaattctgggaacctgtttgttagttcacgatcagctcaggattcccttggctccttgagggcaatgtaatgttagttgaacaacacctttgcactgaaactttcggcgtagatgacaagagcagtctctttggttttcctgaatggaagcctgtgctgtgcttgctatattc

SEQ ID NO: 36937 - DNA, 2540 bp, Zea mays
  Clone ID: MRT4577_133691C.1
tcccacgcaaacctctcctcaactcgatcaaaccggggacggaaaaggcccaccaaaatcccccaaaatttcgtacctcctcagccccagcaatctcgaatcccgatgctcacagcctccaccgaatccctggcggtcgtcatcagcgcatgagctttcttcgctcgctagcggactccttctcatcgctgctcttctcgtcgggaggcggggcggtgtccatggacgcggcgggggcggccccgtcgccggcggcggtggtgggggagcgcgtggcggtgaagctcagggggtacttcgacctcgccaaagaggagatcgacaaggccgtgcgcgctgaggagtgggggctccccgacgaggccaccgcgcactaccgcaacgcgatgcgggtcatgctcgaggccaaggccgcgcgcgtccccgatgccgtctcctccagcgagagggggcaggtcagggtgtaccaggagaagatcgccaagtggcaggcccaggtcgaggagcggctcagagtgcttggtcagagaagcggtgaaggggccactgctgcagaagtgcccaagaaggttgctgcaaacaatcctatcattaggactgcaaaaacagcgtcaaatagcatccaaagatctcccttgcaaaatagccctaccttcaacaggggtggccaagcatctacacatcagaagatagggagcggagcttccagaccagttcagaaggctggtggaaactatgatgacaagcttgttgaaatgattaatacaacaattgtggacagaagcccttctgttaaatgggatgacgttgctggtcttgacaaagcaaagcaagcactcatggaaatggttattttgccttctaaacgaagggatttgttcaccggacttcggagacctgctaggggtttgcttctctttggcccacctgggaatggaaaaacaatgcttgccaaagctgttgcatcagaatctgaagcaacattttttaatgtttcggcttcttcattgacatcaaagtgggtaggagaagctgaaaaacttgtcaggacacttttcatggttgcaattgatagacaaccatctgttatttttatggacgagattgatagtgtcatgtctacaaggttagctaatgagaatgactctagcaggcgtctgaaatctgaatttcttatccagtttgatggggtgtcctcaaacccagatgatctagtaattgttataggggctactaataaacctcaagaattggatgatgctgttcttcgaaggctggtaaaaagaatatatgtgccactacctgatccaaatgtacgaaggttacttctgaaaaatcagctcaaaggacaatcattcaaactgtcgaaccatgattttgaaagacttgctgtggagaccgaagggtattctggaagtgacctgagagccttgtgtgaagaagctgcaatgatgccaataagagagctcggtccacaaaatattcttactatcaaagcaaatcagctgcgacctttgaggtacgaggacttcaagaacgcgatgacggtgatcaggccaagcttgcagaagagcaaatgggacgagctggagaactggaacgaggaattcggttcgagctgacggagacgcgcgctgcctgatgatgatgatcaagcggccctatttccagatgtacatgatttatgtctcacacacacatggtggcttacacacacacacgcgcccatcggccatcgatgcgtcctcagtctggacagcgcgtcttcaacagaagcagaaggtacaatataatgctgggaacagccctatatgtatacccattgaaatgccgctgcccaagttatttaaaaaaacaaacctctagtgtgtgttattattagcctatagctgctctgggccgccgagggcgaaatcgaagtatcgtcgggcgtgttcggcaggctgcaagctgacactgttgcagctgtttggactgctgcagctgcaatccatagagagaaaaatactgtagaagccgcagccgcagccggattgtagccgcagcaagccgcagcgaacaagccgattagaagtttctgaagctcaaccaaagagaccaagactggaagcattatgcatttttaagcacctgagaacaccaaaatatacacttggatggtctgacaagaaagaacaaatcctactgatcactattctcataaaaaatactagtggtcactatctgaaattaatacatatatatctattggaatgtgatacatgctgtgtggttggtgtgagacctgatagaaaatctatgaccttttgaaaacagtacgcaaaggtaccagtcatgaacaatccgaagttgctgtcataagtttacctgtattagtttatctattctcaatttaatcaccttttgattgtacaaagctacgactactctgaagcctttatgtaaataactgattgtgtttgtaatgacgttaattttcgtgttcattaatcaaattttttatgactacagttatatacaggcaccagtcaagccttttt

SEQ ID NO: 36938 - DNA, 487 bp, Zea mays
  Clone ID: MRT4577_133692C.1
ggccgcttttttttttttttttttatttgtttttttttttttttttttttttttttaggtatttttttttttttttttttttttttttttttttttttttttttttttttttaaaaaaaggactttctttttttggggaacccccaaacctcagataaaaaacttttttattgacctatcccttacaaaaaattaaaaagggggcccccccaatgaagggttggggggaaaacactggtggctttgaaaaaccaagtgggttgaaagcaaacaattgttacattttcaaaagggggccccttatgggcccaaccggctgttaaaaccgcaccaactggggttgtgtaaaaaaggtaaccgggctcacccccactagctggataaaaggtacaagttttcgccggctgaaaaaaaccggaaagtacaattcgtctatttggttgaatgaaaaaaaatgccgggggtagcaaggacgaaaccgtctgaa

SEQ ID NO: 36939 - DNA, 836 bp, Zea mays
  Clone ID: MRT4577_133693C.1
cattgggaccctcgaggccggccgggatttccccgtccgcttctcaaataagcaccttttatttttcaagggtctttattttaaattttcattcgattctttactttgtgtcatattccatttcttgcttagatacttgtgtataccctggcgctgttacttcaagaacgacccggatttttggcgcacccacttatggactctgaaatctcgaaaactcaaccttcgagtatggcttctgcagccctgcctgtgtctggcggtgcttctgtctccaagcctcaagcgtcgagatctctagttgccgctgccgcactacctgaacgtcctgcagaggacgacggcgccgacccagcaacactttcgccgaccctaactgcttccagtgaaactcatgtcgaccctacctgggtttccattttgccaaatgacgtggttccacctttggcgctgagtgaagtagcatccgagtatggacaccaaccatctcatgacggtcttttgcttagcgcggtgtttgtgttaccctttccggcacctgttaattcccaccgcggaaagaacactcttcctttcctcatgtactcgcctccccgatcagtatatagtcagccgcccaaaaatgaggaaggcaagcgtccgaaggaaaagattgttaagaaagtggttcgaaagtggcaagaggaagtagttatgggggaaaaaattaagcgaggtgaattggaaaacccatctcgcttcaagaagattcgtggaggatgcatccgggtggcttcacccttaacaatggctcccgaaagctgcattgagacgctgagtcgtttgccccccagcgc

SEQ ID NO: 36940 - DNA, 288 bp, Zea mays
  Clone ID: MRT4577_133694C.1
cccacgcgtgcgtaaatttatagcacacccgagcgcaacgttggggggcttttttaataacatcagggcggtgggtgccccccttgcagcgctcgtagccggcgggtcatgcgggccccctaaggtgccgcccggtcccaacatcaccaccaactacaacagatcgtggctcaccagctgagacggcggtaacaggactaagatcgggtctttcaagaaaaaagcaattaacgcggtgaacaaattcaagcgtgttcctgtcaccctacagcggcatgacaccctgcg

SEQ ID NO: 36941 - DNA, 635 bp, Zea mays
  Clone ID: MRT4577_133695C.1
gccggccgggtccgagatccgaccatctcggacgcagaaggccgatatcctcgaccctagatcactatctcgaggcggaaccttccatgccttcttcggatggctcgatgcgatggctcccacgaaccggatcgagatgagcacagtacgccatcgaggcgacctgcacctggtagaattcagcgcgctgagcccctgcgatacgggagcgtcctcgacaggctagccgattccctacgaaggctccatccttctaccgcgccattgcccaccacttgtgacagctgggatagttcaccagcgcatgcgtgaccgaggtagagtgcatctactccaagaagatccccggacaatcaagttcactgcgctggcacaccgactaccggtgtgctctgcctgagcatcgtcgaccccaacgactccgacttccacatcatcatccgtgccgcccagagaccttggctcgacacccattgcggctgcttcgcctatctcaacaagagattggacgtagcgctccgcatctataaccggttcctccgtttatcttccacctatgaagtgttgctagcatgtgactgtctaccatactgatagatctccctaatatggctggtatgcacggcctatccctg

SEQ ID NO: 36942 - DNA, 222 bp, Zea mays
  Clone ID: MRT4577_133696C.1
gccacgcgtacgggcgcttttcctcgtcctcgatccattccagtgccgcttgcaggtaggatcgatctgatccatgcgagcaccacgcccatggcgcgaccaactcaccgacgaccacatcgacgacttcaaggaggccttcagcctcttcgacaaggacggggatggctgcatgacgaccaaggagctgggaactgtgatgcgatcactggcgcaaaaccc

SEQ ID NO: 36943 - DNA, 385 bp, Zea mays
  Clone ID: MRT4577_133697C.1
cgatggactacctggtgaaacaggagtactacctgatgcgcaacgtcgtgcataccctgcctcgagttccacaaggtccagcttcgtgtaccgcgagaactccacctcccagtgctactacgacggccgctacaggaccatgtggaacctgaccatgatcggctgcaacgactccacccaggtgtacaacgagctgaaggaggacatcaaatgctacccggaggccttccaccgcaacatcggcgtcaacaacatcaagcagacgcagtgcgtcggcttcatcgcccacgagccctttttttttttctaccccgcccccgccggtcgccccccgcccagatagtacgtagctcctgcgcgagctaaaaactagctagtgccatgc

SEQ ID NO: 36944 - DNA, 274 bp, Zea mays
  Clone ID: MRT4577_133698C.1
ccacccaaacaccaccaggaacacccaacagaaccagcccgagtggaaaaaacagcgcgggcagggggagccgctacagaaaaccaccacccggtgggatagaaacaaagcacgcgaagacgagcgagaaaacgggcggacaaaaaaaaaaaaaccacgggacgcgcgaaaaagaaaaaagccacggcgcacaaggaacagaccacacagcaagaaatacaaacggggccgccgatgccagcaaggaaggcaggaaaacacgacgacgcaagaa

SEQ ID NO: 36945 - DNA, 807 bp, Zea mays
  Clone ID: MRT4577_133699C.1
ggccgactcccgacaatcttaacatcaaactcgtcgtccacgcctcctcggcaaggttgcgtacggcgtggccctaaggcataccagcgggatcaagctattttgctggccaaccgaacggtcaagccgacgatgacgctcggatcggcggcacacaagatcccgctggaggttgcgcacaccctcgtcgagatcgccgaggtcgcgcgctacgcctaccaccaccgccccggccgccctgcaacccacgagggggacccgactgcgccgcccgcaggggctgatagcagcgggggcaccaacgaggatgccgcgcggctgctggaggagaacgccatgctccgcgcccgactcgcagatgacctcgcgctcctgcgtgagctccacggcgcgccctgcgtctccaaggagtgccctcctgatctatacaaccgattgatggcggcggtcaacaatgttagcttccttgctcatctcgagaaattacaggatgagtcagcacgtcaacttaatgaactaacttctggcgacatgacagaggtggaagctgcagacattccggacaaagcgggtaacgggaagaaaggattgtgggtcttggtcccttgtgatacagctggagctaatttggaggaaattagtgggattgatgatgaaaattatgtcatagtaaatgaagacgatatagtcgatggtattgccgcctttgttgctaggtgcattcttgaagatccaaaatccaagtcgttatcgccaatgcagctccaaaaggctgttgcaaaggcattagatagcatgaaagctcga

SEQ ID NO: 36946 - DNA, 454 bp, Zea mays
  unsure (1)..(454): unsure at all n locations
  Clone ID: MRT4577_13369C.1
gtcccagcgactgaacccgccggcaggcggcacggtcgccaacaacccnnccaccttccangccgacttcgccgccgccatggtcaagatgggctccgtcggcgtgctcaccggcaccagcggcaaggtcagggccaactgcagagtcgcctgatccatcatcatttttcactcggggtggggttgtagattcnttatattgattgatttaaaaccaaaccacttcgacgggatggcgtancataacatagtctgcttgcgcaattgtatgtattgcctgtacttgcccctttatgggtttccctgtgcaaattttccttggctccccccattgattgaagcctgtgtgcctgtgtgtctcttctgaatcttaatggaaaatctttaaccctcacttaaactgctcctgtactactactacccaataattgcttcaaactaccaaatttttttt

SEQ ID NO: 36947 - DNA, 359 bp, Zea mays
  Clone ID: MRT4577_1336C.1
gggtcaaaaaccggggccaaattttattttcgggggccccaatacagaatttttcatgaaaagggcccggggtttattacaacgggggctgagaattgggggagcccagcccccgcggggtcatgggtgaagcagataaattgggggaaacacttgggacccaaaggtcggcttttggtggttcgaagcagtcctcatcccaaacgaaggggaatttcagtcccggggtgtatgagggatgctccaatcatcatataaaaatattttagcaggggggctcgatttgatcacaagaacttgcaaatttttgggctcgtcaaaaatcccaacctggggggggtcatttacagggattgaaa

SEQ ID NO: 36948 - DNA, 1287 bp, Zea mays
  Clone ID: MRT4577_133700C.1
cccagtggacctccctaccggccgggacacccgacaatcttaacatcaaactcgtcgtccacgcctcctcggcaaggttgcgtacggcgtggccctaaggttcatctcgccgcctccctcaacctcttgattccgcctccctcaacctcttgattccgcctccctgaaggcataccagcgggatcaagctattttgctggccaaccgaacggtcaagccgacgatgacgctcggatcggcggcacacaagatcccgctggaggttgcgcacaccctcgtcgagatcgccgaggtcgcgcgctacgcctaccaccaccgccccggccgccctgcaacccacgagggggacccgactgcgccgcccgcaggggctgatagcagcgggggcaccaacgaggatgccgcgcggctgctggaggagaacgccatgctccgcgcccgactcgcagatgacctcgcgctcctgcgtgagctccacggcgcgccctgcgtctccaaggagtgccctcctgatctatacaaccgattgatggcggcggtcaacaatgttagcttccttgctcatctcgagaaattacaggatgagtcagcacgtcaacttaatgaactaacttctggcgacatgacagaggtggaagctgcagacattccggacaaagcgggtaacgggaagaaaggattgtgggtcttggtcccttgtgatacagctggagctaatttggaggaaattagtgggattgatgatgaaaattatgtcatagtaaatgaagacgatatagtcgatggtattgccgcctttgttgctaggtgcattcttgaagatccaaaatccaagtcgttatcgccaatgcagctccaaaaggctgttgcaaaggcattagatagcatgaaagctcgatggagatggtcaaccttttgggaggctggacagattatatatatcttggctacttggggcatcacattagcagggttgtacaagagccgccatgtcctgaaggtggcagcaaagggtgctgctgtgtctgccagatttgttatgaaggccatttgagtgtaagaggcactcatgtgggatcagcaatttgcaaaatgtaaatacaaaactcgtcccgtcagttgtgcatatggttgtggcatgtttatcatgatgaagttatgatcatccagacatgaaaaactgtttcatttattttcgttgtatggacggtggtgtgattgcagaaaaaaaaaagatacatatgtgattacttgtaaaaacaaaaaaaaaaaaaaaaaaggccccta

SEQ ID NO: 36949 - DNA, 587 bp, Zea mays
  unsure (1)..(587): unsure at all n locations
  Clone ID: MRT4577_133701C.1
tagatgatgttggagggggcgnnagtgtgatggatatttggagaattngnnnttaaggagtggtaataagggagagtatgnggggggtttgtggatntnataggtttgtgatttttgttggaaaaaatttttatttgtgatgtttggagagatgagttgatagtgtatgggagnatcaaagtatatgatttgaaagtgtgtattnaaaggtggggtatggattgtgagggatngtgtggggtatttaatatataagagtgattggggnnatagttgaggggtatatttggtgtggagtagggagttgtgaatgtattgtgtgttggntgagatttgtgagtttgaagtggagagaatggtgatgaggattttttaatgatggataaggggttgggaggatgattgangagtgatttgtggaggggntgatgttgtatgaggtggaaatagaggaaggtgagtttttagttgaaattgagatttttggtgtgaagggtgatgggattttaaatgcctgggaaatttgttggggggatgttataggtgagtgatggatgggttagagtgggggatatttgtggggtgtg

SEQ ID NO: 36950 - DNA, 1896 bp, Zea mays
  Clone ID: MRT4577_133702C.1
ttgggtacctcgaggccggccgggaaatgtttcggactttcgggttttggccgacacccgacaatcttaccatcaaactcgtcgtccacgcctcctcggcaaggttgcgtacggcgtggccctagggttcatctcgccgcctccctcaacctcttgattccgcctccctcaacctcttgattccgcctccctcaacctcttgattccgcctccctgaaggcataccagcgagatcaagctattttgctggccaaccgatcggtcaagccgacgatgacgctcggatcggcggcacacaagatcccgctggaggttgcgcacaccctcgtcgagatcgccgaggtcgcgcgctacgcctaccaccaccgccccggccgccctgcaacccacgagggggacccgactgcgccgcccgcaggggctgatagcagcgggggcaccaacgaggatgccgcgcggctgctggaggagaacgccatgctccgcgcccgactcgcagatgacttggcgctcctgcgtgagctccacggcgcgccctgcgtctccaaggagtgccctcctgatctatacaaccgattgatggcggcggtcaacaatgttagcttccttgctcatctcgagaaattacaggatgagtcagcacgtcaacataatgaactaacttctggcgacatgacagaggtggaagttgcagacattccggacaaagcgggtaacgggaagaaaggattgtgggtcttggtcccttgtgatacagctggagctaatttggaggaaattagtgggattgatgatgaaaattatgtcatagtaaatgaagacgatatagtcgatggtattgccgcctttgttgctaggtgcattcttgaagatccaaaatccaagtcgttatcgccaatgcagctccaaaagggttcgtctatcctccatgcaaccatgctgcactcaaacattgcaccgttaaatagctagctgtctgggtttctggggttcatcatttctgaatagttacataaattctcaactccgctactatatatcttactatgcattgatgatgattgtagccttttgttttatttatctagttttctgattacttgatgatatgtgagatatagtgtattgtacaagatgttaatccttatggtacctgagagtgtacacctatggtgtatgatggacaacgttgctaagttttgccactgtttaaagatccattgctgctttgacgagaaagcatatgtgatgattgattaagttgattttaagattgctatttgatgaagttgtactgtgtaggacatgttgggtacttttttctttcaatttctcattaaattaaccccactgggggtgtaacatgaatattagacagtatacatgaggttgaactttgtatttttttactcgccaacatcagtttcttattcatggctgagcttgagctgtgttcatgtgcaatctgatattttgttggatttaacttgtaagcagctgttgcaaaggcattagatagcatgaaagctcgatggagatggtcaaccttttgggaggctggacagattatatatatcttggctacttggggcatcacattagcagggttgtacaagagccgccatgtcctgaaggtggcagcaaagggtgctgctgtgtctgccagatttgttatgaaggccatttgagtgtaagaggcactcatgtgggatcagcaatttgcaaaatgtaaatacaaaactcgtcccgtcagttgtgcatatggttgtggcatgtttatcatgatgaagttatgatcatccagacatgaaaaactgtttcatttaagatcgtaatatggacggtggtgtgattgcagaaacccccaagatatatatgtgattaaaaaaacccccc

SEQ ID NO: 36951 - DNA, 273 bp, Zea mays
  Clone ID: MRT4577_133703C.1
aacacacgtagcaacagaagatgcacggcgagatgcggaacgactagctttaatgacacatcctacggctgatcctgctaagaaacgcgatgaggagaaagctgccaaggagcaaacgcagtcgtaagcacggaattatctgcaatatcaccgacgatgcgtccactaaagcatgatcagagttagttgtatatcaatagctaatgcatcatatatcttgttataaacctggatcctaatctgtattgccatgacatatgcattgacagtatt

SEQ ID NO: 36952 - DNA, 207 bp, Zea mays
  Clone ID: MRT4577_133704C.1
ctctctcttaggcgtgagccatgatgagcaacaccggtcttatttgagcgataggggagttctacatcgctttaatagttggtgccaatcaaagaatgggacattagagggacaatgacaaaaagtgtgccaaagtgagtatatgaaacagtcagaatcttaccccaagttacaagggcgagctgaatcttactgatacacaacctg

SEQ ID NO: 36953 - DNA, 769 bp, Zea mays
  unsure (1)..(769): unsure at all n locations
  Clone ID: MRT4577_133705C.1
ggccgcttttttttttttttttttggggcaaactatttagaatgcaacctacccaacaatggcatatacacaataaaacagccctagaaactcaacacaaggatgcaacacaggaagaggattcgttaaaaattttggggcgtggcagtaggtagggaaggaggaccaaagtcgcgcagcactcgtcaaagtggatgatccggagcttgcctgccgtggacgccatgtatgccccgcggatgagcatgacgagtgcgagacgggagctcgcgccattgctcggtggcggtggcatgccccatcaagcttcattgtcgtctttgtagaactccttaaggatgtccttgacgtctgcaaactccttcttggcctgcttaatgatcttgcccaagttctcctgagcctgctcctctgtaatgtcctttgtgcctgcgtcgtccttcaattgaccgtaatgttggatcttctcgcacgagtccttgactttggtgaggccgagcgtggctgacgagcccttgaggaaatggccgagctcactaagctccttgaggtatttgccttccttcttttctagctccttgtccatcttcttgaaagtctggtctgcctggccaaagaagtcgtagacgatgcttttgctgaactcgcgctcgtcctcgtcctcgtccatctcgagaatctgctcaaaggtggcaggngtcgatctggtcctcggcgccgggaatcgacatgatggtcgccgttctgcttgtacgtcgtagtcgacatg

SEQ ID NO: 36954 - DNA, 519 bp, Zea mays
  Clone ID: MRT4577_133706C.1
gaagccaatttttataggcaacaacttcctatacaagttttcaaatatataccctggcttttgaccggggcacataaaacaattgggtccatctaaaaattgcgaggagcttctaaaaagaaaaaaaaaaaggggcgagaatactaaaaggggatgatctaaacataaacagaaccggcctgagtaaaaaaaaaaaaaaaaatcacttgaattgtcggcacaagggctgatcgtaaacattaaaacaccccttctccggccaaaaaaaaaccacgccacgctaacaccggcctccattatttacaccggccaaaaaacacctccattttctattccaggcgcaggatcacccatggagtacctgcagctgtatcaaccccgagtatgccccctcggggctgtacaccagggccccgaggctgccctgctccaccacgcggccgtcctgcaccaaggtgatcgagtcgacgccgaaaataggggacagggggtgccccaccaacacagcggggcggccct

SEQ ID NO: 36955 - DNA, 353 bp, Zea mays
  Clone ID: MRT4577_133707C.1
cctcgaggccggccgggtaaggtattcccgagacgagccgtttaaataggtgtcaagtggaagtgcagtgatgtatgcagctgaggcatcctaactaacgaacgaaaaaaaaaaaaaaaaaaaaaaaaaaaaaagaaaaaaaaaaaaaacaacgaagccccaagatttcgatccttttaatccctaaaaaatagaacaacttgcgctattcggggaaataaatgacatcccgcgtccctggctatttttgctcccctccccggatcctacacagcctgggtggtcaaatgcataagccttagcccccgcgtggccgaattaactcacattaatcacttcaagctcactgcccg

SEQ ID NO: 36956 - DNA, 1502 bp, Zea mays
  Clone ID: MRT4577_133708C.1
agattttggatgagcgtgacagaatcttctctttaattgagacttcaccatttggaaagaaaaaagttgctcttggcggtccattaggaggaacttgagatctcaattcagtcgtgcgtggtgaagtctcaattctctgctcgccttctctctcttttggtcgggattcaccgcattacatggcggcgcctgtcctcctcactatccctaccatggacgaagaaggcgcccccccgcccgccccagcctccccttcccgcaccccaccgcagcaggagccgaagcccgcggtcctacgctggcgcccacccgtccgcgtgacctcggagtttgacagcgaacgacggctcttctcccaccgcctctcctgccgcgtcctcgacggcctcgccaagctccgcctccgcattagccatggtgctgggggaggagggattctctggggcccgactgatgtggggctcctggcgcggaacttctccgtcgtcgtcgaccctgcaacccgaggcgccgtgctgcgcggcgccgccgacctcgccggctcgctgcgactgcgcgcctcgcacaacaccaaagagcaacaaggagaagtggcaattactgcaaatttgagggattcaccatgcaagattgaactgtcatctctggttcctcctaatggaccgccaagagcaacttttttctttccaaatggtgaagtctcaattaaagagaagattttggatgagcgtgacagaattttgtcagtaaatggcctagtgaagtcacgtgttctgcatggagtttgcacagctgtgtacaatgataatgtaatgagcattaaataccgctacaaggatgatgaggtatcgtttatccccagcatctcattaccatccaattctctgtcatttgcattcaagcgccaattaacgcctttggacaagttgagctattggtacaattttgacacaaactactggggcgccatctacaaacacaaggctcacaagcatctcaagtggaaagctggctatgagtcagacaacaggcttggatgggcatcgctttgggttggagatgctggcggcagtacaaaggaggcgcctttgaaagccaaaattcacctcacgcttaaagtcccccaggacaatatacagaattcagttgtagtgttccatgttaagaaaagatgggatttttagtttctatttgtgagctcagatggtgttacgtcatgcgcacataagcaagcgtgtacagatggagagccaataagagatggatgcaaatttgtgatgtggtctgcaaaattgtttcatgcaaatgctagggagaaatcatgtaatgttagtcctcttttataggttccgtttggttcaaggtcttgttaagggaatgctaaagagctcaaccaaacaaaagtattggtaactactagaggtgtaatccgatcgaatacagatgaatatcactgaaattaaatttgttattcggatcccaaaaaaaaaaaaaaaaacaag

SEQ ID NO: 36957 - DNA, 235 bp, Zea mays
  Clone ID: MRT4577_133709C.1
cgttcttttttttttttttttttttttttttttgttttgttttttttttttgtttgatttgttcttttttaacaccccccaaattaaaatcccctggatgaatttatggctgcaacaatgtttccggggggcttattgcatatggacataaccccaaaaggaacatttttgggaagcccccactcccctttatacattggttggtttcaggtcaatgctttcaaaaccctttttg

SEQ ID NO: 36958 - DNA, 284 bp, Zea mays
  Clone ID: MRT4577_13370C.1
ggaattacgagctacgacgtacgcgtacccggacgcctacaggatccaattttacttccccttccattctacttcataggggacctgttgtatcacctacatgcaattcactgacacggatccttataacggcgttacttgtaaaacacctatgcttcccaactaaattggcttgcagcacataccaatacttcctccaagcctaatacacaaatacccgaacacatcaactttaacaacattctcgcatcctaaatggcgaattccacgcgctatgtcttctt

SEQ ID NO: 36959 - DNA, 726 bp, Zea mays
  Clone ID: MRT4577_133710C.1
acctcgagccggcgggagcttcccgcattacatgcggcgcctgtcttctcactatccctaccatggacgaagagggcgcccccccgcccgccccagcctccccttcccgcaccccaccgcagcaggagccgaagcccgcggtcctacgctggcgcccacccgtccgcgtgacctcggagtttgacagcgaacgacggctcttctcccaccgcctctcctgccgcgtcctcgacggcctcgccaagctccgcctccgcattagccatggtgctgggggaggagggattctctggggcccgactgatgtggggctcctggcgcggaacttctccgtcgtcgtcgaccctgcaacccgaggcgccgtgctgcgcggcgccgccgacctcgccggctcgctgcgactgcgcgcctcgcacaacaccaaaaactgccagactggagagcaatcatattatattcatgtcggctgttcagcactctgtttatctatgtcttgcaactatgaatatgacaaatctattgtttcttgcattcaattggataggtgctttcaattcaagtaccacagtgtaaaggagcaacaaggagaagtggcaattactgcaaatttgagggattcccatgcaagattgaactgtcatctctggttcctcctaatggaccgccaagagcaacttttttctttccaaatggtgaaagtctcaattaaagagaaaattttggatg

SEQ ID NO: 36960 - DNA, 581 bp, Zea mays
  unsure (1)..(581): unsure at all n locations
  Clone ID: MRT4577_133711C.1
agcgttcgcggnagcgtgggcgngagcgtgggcggaagcgtgggtcgcccacgcgtccgcggacgcgtggngaaaaaaaaaaaaaaaaaaaaaaaaaaaaaaaaaaaaaaaaaaaaaaaaaaaaaaaaaaaaaaaaaaaaaaaaaaaaaaaaaaaaaaaaaaaaaaaaaaaaaaaaaaaaaaaaaaaaaaaaaaaaaaaagaaaaaaaaaaaaaaaaaagggggggacggttttaaaaaaaatcaagtttaaacaccgggggctggcaaaagaaaaattttttttaatggggccccttaaaaaaaaatcagggggcggccttttaaaaagggtggaggggaaaaacccttggggtccccaatttaaatcggttagagaaaaacccctttttcctcggcggggtataaaaaaaaaggccccaaaaaaagcccctttccaaaatttgcccatctttggggggaaatgggaacctccttttaaggggcaattaaaacgggggggtggtggggtttccgcccggtgaacctttttttgttgcaaggccttaaagcccgggcttttttctttttcccctttttttt

SEQ ID NO: 36961 - DNA, 441 bp, Zea mays
  Clone ID: MRT4577_133712C.1
gctacgcgtggcttctcctgcaatttggatccaaggcatcctctctagacgcttggactcggggccgttatggctgatcgtctctgaggagctattccctaactgaagcagattcattatcacactctctcctgtcggtcattggtgactctgccgacggccatgattatagactcgtaaagagcttacaatgtgtctccagtaatcccactacgtaagctactgatcaacgatcgagcatccgatgcatgccttcacatggtgcatgagagctatcttacatgcgtcaacgattgtacaaatgatccttcaaagacatttggatcaccataggacatctcttatgcactgatcacgatcttagaaatagaactgtcaactagtcaatctggcgaatgcatagccttcacaatgatgatcaacattcgctatatgcatcga

SEQ ID NO: 36962 - DNA, 557 bp, Zea mays
  unsure (1)..(557): unsure at all n locations
  Clone ID: MRT4577_133713C.1
gaagcgggaaaccgtttttatcccacacaaaaacatcaaaccacctcttggcccgaaaaaccccccctaagcctacaggcagtacaagagttttaaccccagccggaaagccaaaaattttggccaaagttcctggggccaaattggaccctaccttagcaaaccacctttggatccgggaaaaccaagggccaggatttaagggccggggagggagggaccggcctttcaagggggcggaaacggggggggttctttctttcgaaaccggaccgggggggatgggaagggttttttaccttaggggacggttattacccgggtgggctggagcatggcccaaagggggaacaccagggccccgggctggatcatgcccctggcctttagcaaggaaaaggggcggttcaaggtggttttcctgtcgccggaaaaggggagggggaaggggaacaggccccactggggggttaggcggcttctggcgggcgttnacgtcggggaggggaaaaacgggccattgggggggcgccgggagaggaggggggccctgggcc

SEQ ID NO: 36963 - DNA, 282 bp, Zea mays
  Clone ID: MRT4577_133714C.1
accgcaaccacacggggaggttgtattgggctgaggtaccccaccctccgctggaggagatccaggagataaaccaacagcttatagatacagagctccatgtttctgaggatgaggctgagtcctccactacatctaaggggggcaaagggacggacattagatgcacacccactgctgttgctgttagccccagcttgaaatccgcgtttgcgtcagcgcaaatgagaccaattatgtcgccgaggctgcttgttcctgcttgctaccccaaaaggtccc

SEQ ID NO: 36964 - DNA, 507 bp, Zea mays
  Clone ID: MRT4577_133715C.1
tttccgccctttcattcgatctggacatcatcgggagcttgggcgttagtggggggggcgtcgaccgttcgcgcgccatggactgaacaacaacagcgcctctgctgcaaccgtccggcgtctcaagaaaggaggggccggcgtcgatggcgtgtaataacggtgagggcaaacaaaagctagaggctatcctggccgacgcgctcaagtcgtgtgctaggcgggcctgagaaggtgcccgcctggagctaccgctgctgctgcttgaggcgctgccggggtaggatctttacatgatcaacttcctcatgtccatgtgcacgcagatacttactgcggacagctcggcaacctgcagctagccatctcctagctcggctacaccgggattcagcccttggcctacacacacatgctgcccatggacagcaccgtggagacgctgtgctgctggtttacagggcgcacacacaccgcatgctgggggtgtacctgcacgcgctcgac

SEQ ID NO: 36965 - DNA, 378 bp, Zea mays
  Clone ID: MRT4577_133716C.1
agcagtggtaacaacgcagagtacgcggggctgcaactccccagctgagttatagacaccccgccttgactaatcttatgatcttaccggtggaggaagaaggcatgtacttaggacactcgcctactcctcggagcagcgctgccgtgcgctctccatattgagaatcggctaatcagaggttcgatgggagttttttgggtaccgactggatgtggtagaaaataacaactggttctagttgtttcgggtgtgattgatgcagcaactgacttgccttgccgctcctgattctgttcccatgtttgcagtctcgtgagaacgaggaatgcagcccgaatcggacggagtactctgcgctgggctcctgcttgcggg

SEQ ID NO: 36966 - DNA, 476 bp, Zea mays
  Clone ID: MRT4577_133717C.1
cccactcgacccccccatagggcggcggggggccggctgctcccaggaccgcttacatggaggatctactccaccacctcctcaccctgtatccccacatgcttccaaaactcttgaggaactctctagatgactttggctatgacttaaactctttaaacaagctattaatggagggggggggggggatactatctgctattctatgtgacactgagaaggacatatcataaggacattaaattatttgataactgatccaccaaaggtgcccatataaacgtacattcagacatagctcctgaaaatgcacactctaatgacaaactatcatacatgtcaatgtagctacctatgggttaaacaatttatcaaatacattaacatatattatgccctagatcatgcaccaactgcttcatacagggcttaaaagggcattaaaaatcccattatacctcaagcaggacctaaat

SEQ ID NO: 36967 - DNA, 264 bp, Zea mays
  Clone ID: MRT4577_133718C.1
atgatttctgcgaggacttactggagtcggcaattgggagtaatgtttcagaccagaacctgaaagtctcacagtttatctgtagatcaaagagcattcgcccttgaagaacctagaagaccagaccgctagattaaatggttacgcctattgtcttatggtttgtggttaaaaatttgtgccgtgttttccacacgagttctgtaccctccatttctgaggattttgagttgataatgaaagaaaccagtatcatcttacatg

SEQ ID NO: 36968 - DNA, 321 bp, Zea mays
  Clone ID: MRT4577_133719C.1
ctgagtctggagccagcagccgagtgcactatcctctgacaggtgctgacaggacagtcggcgggggtatgacttcgctctctatgaagaaccagccgaagcgcggccacgtgggcttcgagcacggctcggtatcgacaagcacaggaaggacccgggaggtcgcggttcctcctgtggcatgcacgatcatcgtatactctgcgacaagcgccatccagggctacttcctacgaggttggcatagctttacttgcattaagctccagcatccaagcactactggcctagcggccaatatgcgagcgccctctggtcgat

SEQ ID NO: 36969 - DNA, 646 bp, Zea mays
  Clone ID: MRT4577_13371C.1
aacgttaagtttggaagacaattcttagcaacgatgcaaaatagtcgtgataattatttgattttatgtggaaactgggagaacagttttcaaataatttctcttagtgatggaagaattatgcagagcatcaggcaacacaaggatgttgttagctgtgttgcagtttcgtctgacgggaacgtggttgcaactggtagttatgacacaactgttatgatctggcatgcatttcgtggaagaccaattgataagaaaatcaggggtgccaattttgaactttcagaaaaggaacaagttatagtggaaaggcctgttcatatcttatgtgggcatgatgacatcataacatgcttatttgttagcacggaacttgacattgtaatcagtggttcaaaagatgggacttgtatttttcatacactgcgtgaagggagatatgttcggtccatccagcatccttctggtgttggtttatcaaaattggtagcatcgcagcatgggagggtggtattgtattctgagaatgacctctctttgcacatgtactccatcaatggacggcatattgcttcttcagctacccttggacgtctcaattgcatagaacttagttgttctggcgatttcattgtttgcgctggtg

SEQ ID NO: 36970 - DNA, 848 bp, Zea mays
  unsure (1)..(848): unsure at all n locations
  Clone ID: MRT4577_133720C.1
cctcgccctcgcggccgccgcggaagagcgggtccacgggctccatcgcgcggtggcgccgcatcggtgagctcgtcgtcggccgcagccgcagcgacggcaaggacaagttcctcttcctctcggcgccgccgtccccggccagggacagggagcacgcccccgcctccaaggccaaggccaagctgccgcccaaaggaagcaaagccgccgccgcaaccgagctagacacggtcgccgcgggccgccggttgtcctacggcggcggcgccgccaagggcacgagcggcggccggcgcacgttcctgccgtaccggcaggacctcgtggggctgttcgccagcgtgcacgggctcagcaggagcccacacccgttgtgagccggtgagccacgaccacgacgcgccgtggaggacccgttccaaacagtgagacttcaggtttgaaatcgggatttgaaatttcagacatttgacttggagatctcctgcgagccgagtcaaaaagacaaggtgtgaagtcagagaaagcaggggaaatgtgagccttccctttcaggattcggctcggaatcgtgctctgcagtcggtggctaaccacctgccctgcgatttgtgtaggcgggtacacatatacgacacaaattggaccagaagtttacatgtgantgtccgatttgtnggnatatatgtaactgggtcatactgtacattggatagnattgcaattaagttttcaggaatagnggttnccaggaattcanaattcntcttnnattctacaattcgttttctctgtnncgccattttaaagctaactaataatggtttntgctaaaaaaaaaaaaa

SEQ ID NO: 36971 - DNA, 553 bp, Zea mays
  Clone ID: MRT4577_133721C.1
gtgggtgttttttttttttttttttttttttttttttttttttttttattttttttttttttttttttttttttttttttttttttttttttcaggggaacccatgccttttttcaagggggaaaatttgggccaaagtccaagcggggggggggggacattttgccccacgggtgggttccggggaccatacccccaccatgtccaggggctaaccccccgggttttgcaaatccataaaattgaaccaggggcattttaccagctgggagccccccatcccaaaatgcttgacagcttggggggatccattgttgcaggggccccctagctggctttcactataagttataactacaacccatcaaaaaaccttcactggccccagttgccttttaagtaggagcctgccacaaagaaccccgggggtggccacccccgcccgggagggaagctaaatgcctcctcctccggaatcgcctggggcccccttgggatgggcatagcccagctgaaaagctccgcccccccggacgcccgggggaacgggggg

SEQ ID NO: 36972 - DNA, 506 bp, Zea mays
  Clone ID: MRT4577_133722C.1
ggccttcagacgtaattagcatattaggaaatatttcacgtgtcacatgaaaacagtctggaatcagaaactattgaagtttcattttataaacatactacagaagtggatattaaataaacatcctatcctagcgcgacgtccaaatataaacctggcctccacttgtagctcctgctagcatcccaacctcgtaagagtgtgtatcaaatctgcaaggaatggcagacatgtgctggctctctagagtcataactattttcctttcaactgatgagacaacatcaactcctcttttcatgtttccaacaaagagatatgagtcatcccaaccccattttgctctgaaagtagaaagccatctgccagtcagattgttatgattaataacagctgcatcctccaagttaactccactgtaaataccaattgtgttgtccaagcttgtagttgccaggctacatccagaaggagagaagtaagccgattgcacagatcttttgtgg

SEQ ID NO: 36973 - DNA, 422 bp, Zea mays
  Clone ID: MRT4577_133723C.1
cccgaacaacccacagcgcggagtccagtatcatcaatcccacaaaaaaacagggtggaaaacctgggttggtttacgggctgggaaacaggggaaccaaaccttataccaatagaggttaaatggggctgaacctgggggcatgcatagcgactaaaggaaaggctaacaggaacttattaacaaacaccagggggggagcttaatggtggaaaagggaattggcatggggccgaaggttcagggccctaaaaaggtcctttaaaaaggaaaaccatcttaagggaacccggtcccggagaacctggatgcccacctccaaggggtcggccgcctggatttcgaagggaaacccggcaagctcggcctgggggcggcccttcgccggggtgtccagaatttgagcacgtttgcgggatggc

SEQ ID NO: 36974 - DNA, 288 bp, Zea mays
  Clone ID: MRT4577_133724C.1
aattcggcgcgagggcccagtgtagaccgattcaaacccggccgtgccccgagtccgaggccgcaagccgagcgtaatgcccatagagccaaagccagcgtggtcgagagctccacacagatggcacagaatgagacctgtggcagcagacggcgaggacgtgtccacccgcccgccggcgaccccgtcgcccctgcgcttgtccaagttctagcaggctaacctgcgggtgctggagcactggtggggcgagcttgatggagtcagacctctaggtacaggctcatg

SEQ ID NO: 36975 - DNA, 178 bp, Zea mays
  Clone ID: MRT4577_133725C.1
atggagccatgaatgttgcattcacagctgaggaagaagatatgggcaccctactggcatgatgaatgaaagacgcgacttggctcagttgcccacaggacgtaagcgtctgacatgtgattaaccactgtcgacttctatgatcacattgatctcagcaagatccatgcggctatta

SEQ ID NO: 36976 - DNA, 1520 bp, Zea mays
  Clone ID: MRT4577_133726C.1
gaaaccccaaatttatagtgctactgtttttcattccttttccaatgtttcttcacccagcagcattcgcaggtacatgaagcatagaaattcaagtgttttgcactctcacatgtttcacgttacacaaaatccgtacaccgacagaaatacagactaagatcctgttccaaacctctaaaactagttggcatctaaaattacctgaaaggtttaaaacagatcagataatagaccgactaattattagctatacctctcaaatagtcattagttgtagctgtctcaacccagctaaaatcaactaacaacttattagttagctaacaattagctctagaggttttaaccggggcctaactttaggaaagaaaaaacacgctttgaaattataaataagcacaaggaatactgatagagcaaatggaaaggccaatgcttccggatgcctaattctatcccgaccatggttgatcacacaagacgatgtgtggccgccattactttgtgcataagggcacttcaccaggccagattggtaagtgggttcccttggcagtcctgaatacagctcgtagctaaatctctcagtttttcttcaacagtctccatgggaaggaaaccatcaaccaccttccatgtcgaatcacggagtgaatggtaatgctctgcaactttcttttggaactctatcttttcatatcgctcacccccatagcctcctctttcagccgctttctctggctgtacatcaagatatattacaaggtctggagcaataagtccattttctggagccttgcaccactcaatgtcaaggcccttagcagctgaaaaggccactcccgaataggagtaacggtctacaatgagagtagttccactaagtagcttgctctccatcaaagctcttttctcccagcggttggcgctgaagagcagatgaatcgtcctgtcatcaagctgcgaatcgttcgcgaggtaggaagagatcatctgccccacactggtggccctatcggggaacctccatccttcggcattgtagcctttgcctttgaggaaggacagcagccgggcacactgcgaagttttcccgctccggtccaggccttccaggaccaccagagcgccacggccgcccttgctgccccccgtctccattctcacgccctggaacgccctccggcgctgcacggacaagccgacaggagggggtgccgccgccgccgctatgccgaccctgctccgcgaagctgctcttccggcgagccgaaccaatgcagtcatgcacggctgggtacaccggtttgatcaggctgaaaacctgagagctgatacgaggatacgcgggagggcgagcagtagcggcgaggagtgaagaggtcgagatctcaggcggggcgggagacctggatcgcggcggcagcggcggcggcggtagtttcgggaggggagtggggttcctagttttcagagagagtgagtcgggtcagtaaaagcgcatatctcccggccgg

SEQ ID NO: 36977 - DNA, 296 bp, Zea mays
  Clone ID: MRT4577_133727C.1
atttttaataacttagaggagattttaactttattaaaaataggtaaaattattgtacctaattatgtctaaagtttattcaggggtaatttccctgatgtctgtataaaatcaagatcttattttactgatgcataagtcctagtgggtcaagactaggcatatgctttcagataaataaggaattactccaatcagttttccccaatcaaagaagccatgtcattttacttttagaaacatacaattgggcccaatatgggaattttcataatagttcatacatttgtcagcca

SEQ ID NO: 36978 - DNA, 138 bp, Zea mays
  Clone ID: MRT4577_133728C.1
acatcaacgacgtactgtatctggttgatggtgtgacttggcctccattcctgacaccgggatagacggtcgagtgggtcactgcttccagcagttaggatcacgacgagtagcgtggccaggcttcgcgatgatact

SEQ ID NO: 36979 - DNA, 288 bp, Zea mays
  Clone ID: MRT4577_133729C.1
acgccgtccgggatttcgtgggaggtcgctcggtaccatggcaagcgtagcaggaaatgggatgtcctttgaaagcatgaaaggacctgttccactatgtgctgacgataccagaagagcgcccggatggccatgctagaatgaaggctgatcgctgcaacactgagagtgcagcagctggagtgtatcgccgagatgcagcatgttgctacttttcgagaagcaggcagcgtgaacggtatgaacacgaagaacgcggacttatgcttgtaccaccaacatatgatc

SEQ ID NO: 36980 - DNA, 226 bp, Zea mays
  Clone ID: MRT4577_13372C.1
cgggttgggtttaaacacattgccagaacgattgatacatccttccaaattactaccggcccctgcgggcggggcggctcttctcctatactagatcgagtaaaaaattgcgataaacaaggaaaagtatatcgccggggagaatttgattcttatccacatacaatctccaaaaaaaaagccgtaaagaaaaaggtaaaagactggcgtcgctacaaagggacca

SEQ ID NO: 36981 - DNA, 560 bp, Zea mays
  unsure (1)..(560): unsure at all n locations
  Clone ID: MRT4577_133730C.1
gggttttcccagcgttttttctgcgncgcgcgctagcccacccttgcggcggtggctnccaagatattatttcttcttgcgcttcttgcgctttttgcgggcgcgtctgttgcgtccattnttccacattgctcacttgctcctagttccattgttccacagttcctcccaccagtttcttcattggccttcgtggcggggggtgtgcaagccttttggctccaacaagcgattgcggcgagcgtcttaccccatccnnttgcccnnttgcggcagcgctccttggcgcatcttacagttcataccatcgcgtcgcatcagcaacttcagttcctaccagctctgagctccctagccgtggtgaaccctgtcgcctacttgcaacagcagctgcttgcctccaacccacttgctctagcagacgtngttgcttaccagcttcatcaacaactgcaacagtttctgctcgcgcttagtcaactcgctctggtgaaccttgtcgcctaccttcaacagcaacaactgctttcatctagcccgctcgctgtggccaatgcacc

SEQ ID NO: 36982 - DNA, 292 bp, Zea mays
  Clone ID: MRT4577_133731C.1
ggttcttcttttctttttaattttttttttttcaggcttggattacagaacaaggataacacactgagaataccaatggcaggacacgcgcaaggaaaaccagggggcccgcaagacaaaaaaacacagaaaaaccgaaaaaaggaccagggggtccctaggcggacagaaccaagcaataaaccagcactagaacataggacaggggggaagatttgctacagccgcataccgagtttacccacccgggaatgccaccttggaacactttcagagagggacctcagaccaa

SEQ ID NO: 36983 - DNA, 521 bp, Zea mays
  unsure (1)..(521): unsure at all n locations
  Clone ID: MRT4577_133732C.1
cactttttttttttaatttttttttttcctttcttttttttttttttttttttttttttttttttttttttttttttttttttttaaaaaaaacaaccccctaaaaaacctttattcaccattattactaattaaaaaaaatttttatttttgggggggcactccaaacccccctattcccaaacaccttaaaaaaaactcccaaccatccccccccttaaaaaccacacccttaaaaaccccttttccaatttctttcccatctaacacctccacaatncactcttccccatccaaattttttcccccttnccttacaatttcaaaaaagttttcctaatcaaaaaacccattttcttcggtggcccaaaaaaaaaaaacccaccttttttaataaaaaaaatcccttaaaaaaaaaagtctttacaaaactaaagcccccaactttctcaatggaaacccctcatcccccactcccttaaacaacaaaacatcctcaaaaatcccaatcatttcccctt

SEQ ID NO: 36984 - DNA, 737 bp, Zea mays
  unsure (1)..(737): unsure at all n locations
  Clone ID: MRT4577_133733C.1
catactgcctggcaccgtggtggactcgaagatctgccatccaactgagtttatttctacctgtgcagccatgctggcattcagggaacaagccgccctgcccattaccatgttctgtgggatgagaacaactttacggctgatgggttgcaaactctcaccaacaacttgtgttacacgtatgctaggtgcacacgctcagtatcgattgttcctcctgcatactatgctcacctggcagccttccgagctcggttctacatggagccagatacgagtgacagtggatctatggcaagccgtggccctccaccaggggggcgcaacaccaaggctgccggtgttgggaatgttgctgtgaggccattacctgccctcaaggaaaacgtgaagcgggtcatgttctactgctaagactgatgctattaaggcagggctaccttttattattacagtatatcgtgaagactagagtattttttttccatgtacttgatgatgctgagctaccttttattatgtcgtacgatatatatgggtggtattgtatactggttacagtaactttagttgtgtgttccatcgtgctagtctctagctggtgggcgggtggtgttacgtgaaaaacattctcctctaaaattcatcaaatttggacacccccccccacatatcacggggtggggtggaaaattaaaatgttngtgtgtggttgggcggccgctctagtggctccc

SEQ ID NO: 36985 - DNA, 4120 bp, Zea mays
  Clone ID: MRT4577_133734C.1
tgaagcacatgtggactcaggaggaggctcttctaaggatcagcaaagagaccaacgcatacaagagtgagagcagggagcacgagcgctctgagtgagtggaagacgagaggagttggagtcccccagggcgtagggtttcacttcgccacccgcgccgcccttcccttccccagcatccgtccgccatggtgaggaagaaaagaactggccctggagagagttctggggagtcttctggagcgcctggtcatggctcctcacagcgtcctcaggcaacacaacagggtacccgtggtggagggcaacaccagggccgtggtggatatctgggccctggagtgccgccttcacagcacccaggtggtggcccacctgagtatcatcaaccgcttgactaccagggacgtggtggatatcagggccgtggtggaccaccttcacagcatcctggtggtgggacaccccctgggtctcaaccgcgtggcgttccaggggcacggtggataccagggccgtggcgggccaccttcacagtatcctggatggctgggacaccccctgggtctcaaccacgtgactaccaccggacgtgtaatttgtaacccgtcccagaggggggaatgccacagtcataccgtggcgggcatgtgggaggtagtgttgtaccaagtgttccttcaggtccatctaggccagttcccgagctgcaccaagccccagatgtccaacatcaagcccctgtggtggcaacaccatcttcgccaggagctggctcgtccttgcagcctgggaaaggctgaggtgagcgctggacaagtctagcaacagttccagcaacttgcgattcgtatccaaagcataactatccaggatggtcagttggcaccagcgtcaagcaaatctgttaggtgcccattgcgccctggcaagggtacgcatgggtccaggtgcattgtgaaggcaaatcatttctttgctgagctgcctaataaaggccttcaccaatacgatgtatcaataacaccagtggctacttcacgcgggatcttcgtgcgataagggagactgatcttggattggtctcccactgctgtctgaataaacatgttttcaaggcgaacaagcatcagtatcttgcaaatcttgccctgaaaataaatgttaaggttgggggaaggaatactgtacttgttgatgcgtcttggaggagaatccaggttgtcagtgatgtttcgagtcttaaccaaatttgctgctcgcgctgatctccaccattggaagatgtttcttgctgggttgcagccatgtgcccctcaaaaggctgtccaaggacttgacatcgtgctacgtgaaatgcctactgccaagtattgtcctgttggtagatcattttattctccgaagttagggagccctcagcagcttggtgaaggtttggaaacttggcgtggtttctaccaaagcatacgagccacacagatgcaaatttctctgaataatgatatgttatcggctgcggtgtcagagaccgtacctgtatatgattttgtttctgtacttcttattatagatatcagagtgagaccattgtctgattctgatcgcgtgaagatcacataagcgctacaaggtctgaaactggaggtgcaactccggggacacatgcgtagtagacaccggatatctggtcttactgcacaatgaacaacggagttctcatccacgagtgaagatagtggcactgttaagtatgggatgcaatacttcctgaagacttatagtttgagtacttggtacaccaccttaccttgtttgcaagtgggcaatctgcaaagaacaaacaatctgcctatggaggtctgtaagatagttgaggggcagcgctactcaaaacgacttaatgataaacagatcactgctctactgaaggtgacttgccaacgtccccaagcacgtgagaaggacatcttggagactgtgtatcacaatgcctactccaaggatccttatgcccaggaatttggtataacgattgatgagcgtcttgcatcggttgaagctcgtgttctgcctcccccaaggctgaaataccatgatagtggcagagaaagggatgtattgccaaaagttggccagtggaacatgatgaataagaaaatggtcaatggtggtagagttagcagctgggcatgcattaacttctcacggaatgtgcaagatggtgctgccgggagtttctgtcatgaattggctttgatgtgccaagtatcaggaatggattttgtacttgaacctgtgctgtcaccttgctatgcaaggcctgaacttgttgaaagagcactaaagggacgctatcaagatgcgatgaacatactcgggcctcagggccgagaactcgacttgctgattgttatactgcctgacaataatggttctctttacggggatgtcaaaaggatctgtgagactaatcttggattggtctcccaatgctgtctgactaaacatgttttcaaggtgaacaagcagcagtatcttgcaaatgttgccctgaaaataaatgtgaaggttgggggaaggaatactgtgcttgttgatgctttggcaaggagaatcccccttgtcagtgacatagcgactattatctttggtgctgatgtgacccatccccatcctggggaagattctagtccttccattgcagctgtggttgcttctcaagactggcctgaggttacaaagtatgcaggattggtgagtgctcaagcccatcgtcaagaattgatacaggatcttttcaaggtatggcaagatcccgaaagggggactgtctctggtggcatgatcagggagcttctcatatctttctggagggcaactggacagaaaccaaagaggatcatattctacagggatggcgtcagtgagggacaattctaccaagttctgttgtatgaacttgatgccattagaaaggcctgtgcgtcattggagtctgactaccagcctccagttacttttgtcgtggtccagaagcgtcatcacaccaggttgtttgctaataatcacaatgataatcgtgctgtcgataaaagcgggaacatactgcctggcaccgtggtggactcgaagatctgccatccaactgagtttgatttctacctgtgcagccatgctggcattcagggaacaagccgccctgcccattaccatgttctgtgggatgagaacaactttacggctgatgggttgcaaactctcaccaacaacttgtgttacacgtatgctaggtgcacacgctcagtatcgattgttcctcctgcatactatgctcacctggcagccttccgagctcggttctacatggagccagatacgagtgacagtggatctatggcaagccgtggccctccaccaggggggcgcaacaccaaggctgctggtgttgggaatgttgctgtgaggccattacctgccctcaaggaaaacgtgaagcgggtcatgttctactgctaagactgatgctgttaaggcagagctaccttttattattacagtatatcgtgaagactagagtattttttccatgtacttgatgatgctgagctaccttttattatgtcgtacgatatatatgcgtggtattgtatactggttacagtaaaaaaagaaagaaataacatggaaaacaaaaaaaaaatgtaaggattaaaaaaatttctcttcggcaaagaatataaaaaagtaccgtattccatagactaaaaaaaatgacgaatcagttgcagcaatcctttgacattatgaaacttgaaatcaagtactttccttacaagagcaacttcatccacctgattcttcccaatgccagaaagataagctgaaaatgaagtttgtgattttctggttccctcaaatgaattatttgtgtcctctgcataagaaagcaatcccatcaaatgatgattgttccgagatatggaattgctagcaatctgaggagagtatacacctcttgcagaaacagccttagcaactgtgctctggttatttaacattatcgatgtctgaagcggaagatgatgaaaactcagctggagcaacccggacgcgtggg

SEQ ID NO: 36986 - DNA, 292 bp, Zea mays
  Clone ID: MRT4577_133735C.1
gctcaccctcgcggtgggcgcccgtcgtgccggtccgcttccggggtggcgcgctttctttgccgccctctctccctttggtggtggggggggggggcggttctctgctcttgctctgccctccgcaccgtcgacgtgtacgtcccggttccccttgtcgtgtttcgcgtgttcggaggcgtcctctgtgttgcccccctctctttccttctttttctctcgcccgtgcgcccgcctgtgctcccccccccgttcgtgggtgtggtccggggtgcctttgtcaccctgctgc

SEQ ID NO: 36987 - DNA, 1620 bp, Zea mays
  Clone ID: MRT4577_133736C.1
ggtaccctcgggtctcggccgggaactatcagtacagtcatcagatcctgagagcaatgcatctgtcagtaagccatcagagtctcaaactgatgtgactaccatggaggcactggaacctcaaattgatgctcctcctgataaggcaactgaccagccagtgaaacctcaagatgatgcatctgctaagaatccaacgggaactgaaagtgatgctgtttgtgataaaccttcagaaagcagctcagatactgaaacacttcttgtatgccatcagaacagcagcataaccactgatgaacctgtacaaggtggcatttcttatgatacaccacatcagagaagtgcacccatagaaacaacaccaggaagtgaaacagttgttgacgattgcatacaccacgaagataccagcagcaaaccatcagaggaaaacaaagctattgaggagccagaagaggtgagtgccaagctgccagatgaccatgtaacttctgagaagtcgtcagaggaagacaaagaaaacgcagaggcatcagtagacagtgctcccctggggaacccattggaggtcaatgaggagagctccaatccttcaggggatactgtaactcctgagaagccactggaggaggataagacgagcgcagagccatcagaaagcgatgcatcctttgggaaaatattggaggccgatgaagtgagtgccaacccatcagaggatattgcaactcctgagaagccactggaggaaggtgtgggaagtgtggaaccatcagaagacaattctgttcttgataaaccattggaggaagaagaggttgatgccaaaccggtgaaggacgttgtaactcccgagaagccattggaggaaggctcaacaactgcagagccattagaagacaatgctgcccatgaggaagcaaaagaagaagatgaggtgattgccaagcccctgtccagtgtggcacttgagaagtcactggagggaagtgaggcaagtgtagagccatcggaagacaatgctgctcttgagaaaccatcggaggacgacgaggcaaatgccaagtcatcagaggacagtgtatatgtggagaagccacaacaggaagaagatgacaacggtgtcaaggcattagaggagggcgtgtcccctgagaaatcagccgctggcaaaccattagaagaagacccagtccatgagaagccagcggacgcagtagctgagccgtcatctcaggacgacactgccactgaaaagccctcagctacaactgacactgcagaaactgcatgagacatcagttagctggttaaagttagttagcaacagttttaaacggagtgtggatcgaatactattggtcatagttcggcgtggcttctgtttgttttttttttggtggggtgggggtggggtataatgcttgagttgtaaaatttgagggaaagaaactatagtattgatttggtttttttacaagcaataatcccctccacatgttaggaggaggataccattgaagttctatacataggatttgtgtgcggtttgattttttgtttggaagttgtactttgtaatcgattttgtgcaaatatgactgtgcttgctcattt

SEQ ID NO: 36988 - DNA, 342 bp, Zea mays
  Clone ID: MRT4577_133737C.1
cttgcaaaaccgtatttgcgaaccactacttatcagccgacgttagcactcttgctggggccattgatgactaggagcacgaggtgttcagccataagatttccgttgactgcgaggacgtattcatggatgccggcgactatgccacctaactgcaggaacttgtctatatgaaacacctgctcaaggaaatggatgaggaggtatacggactccgtttgatgcacgccaagggtgcctaggggatacaaggtgtacattcaaatgcaagcacatgtactttcacatgtacaatggacagtgggccatgatccattggaaatgtggtctatgcctgcactt

SEQ ID NO: 36989 - DNA, 442 bp, Zea mays
  unsure (1)..(442): unsure at all n locations
  Clone ID: MRT4577_133738C.1
ccgggncgacccagcgnccgggctgggaagggagggaaaggcgggcttgccgcgaacccacggcggccaagnccgccgagagaggacaaggggaagaaggccccaancncacgcnccncccgcgccggcccccagnncccngnnggacgnanccaccgncagcngaagcagaggacccaggcaaanggncgaggggagcggaccgcanccnncnacnccgcngccaaccaggagnacccgaccgccgaggnncnggagccggcngggaangccagcaaggancngaaggngaagcgnancaccccncgccannngcagcnagccanncggggagacgaggagcnggacacccncancaagggcaccancgcaggcggaggggncaacccgcacaaacacaagncccngancaacaagncccccaaggagagaagaccagggg

SEQ ID NO: 36990 - DNA, 786 bp, Zea mays
  unsure (1)..(786): unsure at all n locations
  Clone ID: MRT4577_133739C.1
cttctggggacactccggcttccggggcgtaancagtctatacctaaataccttgaccctttgaccatcttcacttgcatacctatcgaatcacattccccacacaagcagcacagggtgctcacacgctgactcgaaccgcctgtctttcatccagtacatgccgcgcccgctgcacgacagctcacactcgcacacgaccaacaacaacacagtggctccggcccgtaaatcttcacacgccgttcggccatccttggactacctccacgtcaactcgaaccactttcaaataccgcagcgggatggccagcatggcgaacgctgcgccgggaaagcgcaaaggagcgacttccccgagtaactcgacgtatccctcgccttcaacacaacccatccagctcccccggctcaagctgtcctttcgcaatactccacccccgcagccgcagcctgcatcccgcgcaccggccaaggtctacgctaggaacagggcggggccatccacgcagaggcggaatgtgttggacgactcggactcggacttgacgcccgaggagacggatgatgatgaggatgaggagcacgacgatgatgaagatatggaccaggatgatgaggacgaggacgagcagcagttcacgccgcggaatagcaagagccagaaggggaagaatgccgagagcgccaccaaggcagctccaagctgcgtcgaaatccgcagccggaagaaagagctcgccgatagggagaagaccagcagcagtgccgcgactgcagcgggca

SEQ ID NO: 36991 - DNA, 1536 bp, Zea mays
  Clone ID: MRT4577_13373C.1
cacagaggctggctcattgtttcgccatgggactggaggcacggcttgcaggcacggggagccaggcgtaccagtcgctcatggcacaacacacttcggtcgtggaatttctcaaggcatatagcctttacatggcagccagctgcttcatgaaggtgaggttcatcttctccaacatgaccatttgcaatgccgtggcagggaggagcaagttgcacattgtggagtatggtgtgcagcatggattccagtatccaggtctgttccatctactagcaaggagggaaggtggaccgccagaggtgagggtcaccgcgattgctgtcccacaacccgggtttcgcccagcacaccagattgaagaaacaggccgccgtctcagcaacattgcccgtgagatgggtgtgccattcaagttccgcggtattgcagcaaagtgggaggccgtccgtgctaaggatctcaatattgatccagatgaggtgcttgctgtcaacagtgagtgctatatcggcaacttgatggacgagagtgttttggtggacagcccgagccctagggatacggtcctcaacaacatccgcgagatgcggcccaatgtgttcgtccacactgtcgtaaatggaacatatggtgcaccgttctttttgacacggttccgagaggcactcttcttcttctcggcacagtttgacatgatcgatgcaaccatccctagggacaataatgaacggctgctgatcgagcgggatatctttgggacatttgccctgaatgtgattgcttgtgagggtgcagacagggtggaacggcctgaaacttataagcaatggcaagtgcgaaaccacagggctgggctgaggcagctgccactgaatccagaggttgtcaaggcttccagggacaaggtcaagaactattatcacagagactttctcatcgatgaggataaccgttggttgctgcttgggtggaagggacgggtgctctatgccatgtcgacatgggttgctgaggataataagcccatcttttagtgtgcctgaatccaactgtagattatattgatattttgatcgaagggttatgttgaaccatgatccaccacatgttgtggttcagtggacttatgtttctagagagtttattgctgaaacctgtgaggtagaagcaattagatgcttagagctacataggctgtagatatagttcttgatatattcctgcagagttgtaatcatgtgccatgtacactagaattaaaaccctgcagctgacaagtggttacacgtttgacctctgaaggcttaaaccctgaaaagtatctaatgatgcatggtatgaaggtagatgatatatgttcaaactatgtttctagagggtttagtgcagaaacttgtcaggcagaaataagtagatgcttacagctagctacaaaggttgtggatatagttcttgatatattgcagagttgtaatattatatactatgtacaccagaacttgtaatagtatagtatactatgcacacagaatt

SEQ ID NO: 36992 - DNA, 399 bp, Zea mays
  unsure (1)..(399): unsure at all n locations
  Clone ID: MRT4577_133740C.1
tcgccgtcaacctcaacccccttcctcctccctcccaccggcgggcggcggccatggaccagcaagtgttcctcggcgtctcctggggcaatttgctcacctacatgaagcgcaacagcggcatggatcccgacatggatctcgacatgggcgactactataacgtggtgctctccttcgtgtacaactacatccccgaccctcccgtctcccccacccccacactcccgctctccggcttgccgtgggtccccgacggcgtcgaccgcatcagctgcctcccggacaaggtcctccgtaacatcgtctcccggctcncccgccaaggaggccgcgcgcaccgccgccctcgcctcgcactggcgccccctctgccgctcggcgcccctcgctcttgtc

SEQ ID NO: 36993 - DNA, 495 bp, Zea mays
  Clone ID: MRT4577_133741C.1
aaacttataaattttttaaacaacttacacatatttttgtatcaaagccaaccctgaagtgtctctatttgcggcgctccaagtatacagcaaaaccggggcggacacacttttttgtgcccacttggctgagacaaactccaggggagcacaccatacaaaaccggaggggtctcgaggacacagggccctgggcgtcacaaggaaaaaaacaggcccagggggggacagaaacacagcagcgccagcaatgaatttggacgggcgggggccaacaaccccaataagcggggggggggggggcacaaaaaggccaagcggggccgcccgaaaacaggaacaagaaaaaggcgggcggaccaaagagggcaaacccaaaggcggggagggggaaaaccccgcccaagagggaaagaagggggcatccccccactttcacattaaaaggaagaaagaacggggggagcacccccccagggggaaaagaaaggcccc

SEQ ID NO: 36994 - DNA, 484 bp, Zea mays
  Clone ID: MRT4577_133742C.1
aaaacagggggccaactcgggattggggcaccggacaaacaaacaaacaaacaacaaacccccccgggggactcattttcaggccaaaacgacactgggcggggggggaacagtcaagctcactttccgggggcgggagcgaaaacttttgaaaaacatgccgggcagcagcagcagcaacatcaacagggggggggggcattggagccggccggccgggggccccccactccttcagcttaggggggggctccatggccacggccccgccgggggggcctttttcgacaggggcccacccgcccagggggaagggggccaccacccgcctgaaccaggggggagaatttaaccccgtcctcgccaggggcagccttccggaggagccccttgagccgggggggggtcacgtcctttacgtgggggacttaatcggggggggggtgggccttcacggcccgggcggaggaaccggggggggggg

SEQ ID NO: 36995 - DNA, 368 bp, Zea mays
  Clone ID: MRT4577_133743C.1
tgtacttcgaagatatagctggagtgattgtgaatcccaatggtcagaagaaaggtcggtgtctgggtgtacctatggaccgggagggtgctgacctttgtcctactatcgatcgtggatcacatgctatcgttcgagaactagccgtaattgagctagacttgcatgtgcatcatgtcaaatgtgtgaagcagctgctgtcacggtgctctcggactcgttggattctttgacgtctagacacttaatttcggagagaacacaaatacggcttccgtgattaggatccgtgatgtagctcagatgggtgtagttgacgctgagtacgttgtggagtccaccggcgtcttcactgacaaggacaaggc

SEQ ID NO: 36996 - DNA, 1517 bp, Zea mays
  Clone ID: MRT4577_133744C.1
cattgggacctcgagccggccgggccggagtagtgggtaaccttggtctccactacctgctgccaagtgccgacgcgagtccgtccctcttctcctccgcatccaaagaaaccagaccacaagacatcgagagaacagttgcggccttgctggcacggggatagatcttctccactccaatggcgggcttctcacggccgaacaactcgctcctcctcaagatgcctgcgactttggccagtagccacaccccgaacctctcaagcctcctgttctacgaccagaaccatggccaagctgtaaatgcaaatgcagcagcgatgacgatggtggaggacgacgcctcactccagagctcatctgcagtgctcgacacctccccgcagccacagggcagtgctgctgctgcgtctccgatggagaggaagaggaagcctgcagaagacagtgctacactcagctctgctcaatccaaggaggattgcaagcagcagcaggagagcaagagcaggcggggaaagaggccccacaacaaggaggctaatactgaggagaagagcgctactgaagacgaggccaccagggggtacatccatgtgagggcgaggaggggtcaggcaacggacagccacagccttgcagagagggtaaggagagagaggatcagtgagaggatgaggatgctgcaagcactggtccctggttgtgacaaggttactggaaaggccctgattctggatgagattatcaactatgtgcagtccctgcagaaccaagttgagttcctttccatgaggattgcctccatgagcccagtgctatatgggttcggactggatagtgatggcctccatgaccacgcacaaaagatgggagtcatgttccaggaagcccttgcaatggcaggtccagtgctgagccaagccagcccagcagctccatctgaagccatcatggacaccaccacaccttactcactgcatggccatggccagggttccatctctttttcccaggacaatggcagcagcacttacctgatgcagcatcagcaagcagcgggggagccaacaagacagcaggagctgctcagccagttggtgttcaacaacatgtgctctttccagtaggggtggggagcatttgggtgagaggaagcgaggaatggaccccacattgacaataggaaggaaataatgctgcgagatttggtaggagcatgcacgtaccagatgagtttgagatgttggatctagtccatccccttgtctggatttggagagagcagtagcaagtagatcgagcctgctgtttgtttacacattttgagagactttgtagtatttgtaactcctttattgggcattgtccatgaggattttctcagcggctgcaccttccatctcaccgtgttgttgtagttcttgagcaatcggttgttagtacatacgagagctattttgttctttgccaaacagtgattgactgttccatccaagaaaaaaaaaaaaaaaaaa

SEQ ID NO: 36997 - DNA, 123 bp, Zea mays
  Clone ID: MRT4577_133745C.1
agactcggggcactatgttgcatcgtctacatgacgggagaaatatgttacgtcaggcacggtagactagtcggagtcgtaactcccatgaggtcgggcaattctacgaaggtgatgtgcaga

SEQ ID NO: 36998 - DNA, 386 bp, Zea mays
  Clone ID: MRT4577_133746C.1
aattgaaatttcgtcttacactggtttatgtattgggggaaacacacatgataaaggggggtcgtatcaatgcatgaatacatgcattaagacgacacacaagaacaaaggggggtttgaccaaaaatagaagcaggggcaggacagagtggcgggggaatggcccccggggagggggcaccagcccgggggggcggcggaaagggggaaggggggaaatacccaacacaatggcggccgcccgggggggcgtttaaagggggcacacccccccggtgggggggccccttacaacggaccggccggggggggccaacctcggggatgggaaaaacagggggggcccaacataatggccttgggggacaaacccctcccttgggggg

SEQ ID NO: 36999 - DNA, 388 bp, Zea mays
  Clone ID: MRT4577_133747C.1
atcttctccctcagctcaccagcaaacgaggccaattattgtgggctcacgacagagaggagagatagacccgtctcgaggtggcggctatgccacctcgcggctggtgcgtgaatggcttgctgaatggtgaagccaagcggcaccggaaggtgctccgctactacatgcagtgcatcacctagccgagagatccgcacgcatgatgcagagcagcggcctgatagcggatctcatggctcatctacgaggagacccgatgcgagctcaagatcttcctcaagaacgtgatgcgcgacgtacgtgacatacatcgagcacgcagagtagcaagacagacctcgacatggatgtcttctacagatgaagtgccaggtacgaaccctct

SEQ ID NO: 37000 - DNA, 279 bp, Zea mays
  Clone ID: MRT4577_133748C.1
ctgtgcatcatagtgcttgcgtttaatatgatttattgtagaatctcaacttttcttggtgtttgttgtctttgaaacattgtcttggtcattagggctggtgttttcacatttctgtggtcaaggtggatttcttatgtgtgcctttttgcttactttgtatatgaattttgtaatttaaattgcaagtaagttatatatatgtatttaccataaatagtattaaaagatgagaaactgttagactgaagttctgttgtaacataaccattatgtcca

SEQ ID NO: 37001 - DNA, 1434 bp, Zea mays
  Clone ID: MRT4577_133749C.1
cctcgaggccggccgggcacaaaaagacataagccagttgtagggaagggccaagggaaacttcaagatagtatggcgaagaactatcgagagcgccgcttaaagagggcgatgaagatagatgagggagaggacgactttgaagctgattaccaagcattctctaagaagtacgatgagaaggatgagtgccactataagttcatggctttattaccattcaagaatggtcttcctaatgtctcaccgccaacaaaagagaaagttggacttcattttgccatgaaagatgttgtgattagtcaaaaaccaaccaccaccaatgaaggtatcattgtaaggccgaagtgcaagcgaaagaccccatataggggcatccgccgacgcccttggggaaaatgggctgctgaaatccgcgatcctacaaagggtgttcgtgtttggttaggcacgtataaaacaccagaagatgcagctagagcatatgacgctgaggcccgcaagattaggggcaataaagcaaaggtgaatttccctaatgaaccaccaaacatggtgagcaatgcaccaaaactaattgttactgcaatgactacaatggctatcccagcagacaagttgaatgccaatgaattgatgtgccataaaaactactcaaatgaggattttttctcaatggtgaactttagtggaaacaatggtaactttatttctactgcggcctttggcttacaatgtatcaaaaagcctcgtgttccttatgacatcccaaggatgggtgagtgttcaaatcaaaacagaatgacatatggtttaagtaatggattgggcaatgaagctagtaggaacctgaatggatgctctttcttaccacaagctggcatgccaattttcattcaacctacttttgatggtccttcaaggatgataggaagaaatgatggcgtgattgttcctactttgactaatgcaacacccatggctggtgttgatgctgcgaaaaagatgaatcaacaacctattttccaagagatggaaagtgaagatattccttctattttgcaaggtgatgtcagtgaggacgtggcagctgagattagtatgtgggagttttatgacaacctattagataataaggaaaattgatggatcttgacatcatgcatggtccatatggcttctgtcttgatgatactagcaagtggttcgaagcatgcatgatggggatgtagtcgcaaatgacatattcgttttataatgtcaagtaaaatgcagccatttgttatccatgtgtatcagtttggactgtttatttatgctttgttgtaagcttacaggcaacggaacctgattgacattgtgggtgttattgtaatgtattgataattttcaaaaaaaaaaaaaaaaagggcgccgctcgcgttctagaactag

SEQ ID NO: 37002 - DNA, 500 bp, Zea mays
  Clone ID: MRT4577_13374C.1
agagataaatgttacaatatcataaaagtatttattacatagcggaagtcttacaaaataaatgataaatataaaagagaaataaagtccatccttggcgccataaagtcgactgggagacgccacctagatcaagtcgaactccttattgtgtggctcctcctgggccacctgttcatctccttcaatgagctcctgctcaacaacttctacctgctgaacacctggatcctcagccattggctcttcggcggtgacggtgtgacgcgcctggaccacggagatgcgcggattcacggcggcgcggtgtccccgggaagcaattaagccgacttcgacgacgctccgaggcaaataccgccaccccaacgtcccacgaaccatggtgaagctctgggccgaaacgtcgaaggtagttcgctagtacaggcagagattcacggcggtggcagctctctcctctcgcggagctcacaatcggtggcgagttccacgatgat

SEQ ID NO: 37003 - DNA, 173 bp, Zea mays
  Clone ID: MRT4577_133750C.1
ggctgcctacacttgcggactaacagccgacgtctacctttggtacagctgccatttcaatcacctgccccaaaataacctaacattccacggggtgacatggtatataaacagggtacatcgggtgaccccaatatcctacaccacccaaaaaaacggctaagggggcccac

SEQ ID NO: 37004 - DNA, 691 bp, Zea mays
  unsure (1)..(691): unsure at all n locations
  Clone ID: MRT4577_133751C.1
ccgggnngttcgaagtcaaggcaagctagcacctcgatatatcgggccgtatcagattcaagccagacgcggagaagtggcttaccaactcagcctacttgagaatctgtccgctgtacacgatgtgttccatgtgtcgcagttgaagaaatgctttagggtgccagaacagtagttaccagcagatgatcttgaagttcaagaagatctgacttatattgagaagccaactcaaattctagagacagcagatcaggtaacttggagaactaccattaggatgtgcaaagtcaaatggggtcaccactcagaagaagaagcaacctaggaaagagaagatgatttgaaagccaagtaccctgagctcttttctagccagccttgaatctcgagggcgagattcttttaagggggataggtctgtaacaccctaaatttgggggtataaaatttctttctaatgatcacccaaattcatgtgttactcttctctctctcaccctaggttctatctctctctagatcctctcttcctttttcccttttaagtagaattagttaaagttagggggaggttaattatctatttttgccaaaacactatgggtcatgacatgttgcatcatactgagtttaaatattctttgagttgttgcacatggttgaattaatttgaattgaatttggattg

SEQ ID NO: 37005 - DNA, 398 bp, Zea mays
  Clone ID: MRT4577_133752C.1
ctccactcgtccgcggacgcgtgggaaaaagggcggcacaacagaatacacacctcgaggggtaattctgctgcatgttgaggtgcctacatgacaagtctataatagcataggacgctgagattctcatggtctgatgcacatcctgtaactgaaggtcagatgcacagattctacagtgagcactgcattctggtgactctgtgctcattaagcgaacctgaatcatgcatataggccaaagattttacacctacagatagcactggagcattccaattgctggaagatcccataaaacctaaccaatgtccatgcttacaccataggctattttcagctgtgaatcttatgtcaagactaagtcatcctaggagcactttattgccccatgtgct

SEQ ID NO: 37006 - DNA, 495 bp, Zea mays
  Clone ID: MRT4577_133753C.1
tttttttttttttttttttctttttttgtggcaatacagtagcagaaatgttgtatttatgtaaaaataacaataatccaacaagcaaattacaaacgacgaccacgacgaccaccctttctacgggtagagtcggtagggatgggagtaacatcttcaatacgaccgattctcataccagcacgggcaagagcatggatagcggcttgaccaccgggaccgggggtcttggtaccagtaccaccagtagctctaagcttgatgtggagagcattgatatcgagttccttacatttggcagcaacttgttgagcggccaacatggcagcgtagggagaagattcatcacgatcagccttaacttgcataccaccagtgatacgagagatagtttcacgaccagaaagatcggttacatgaacaaaggtatcgttgaaagaggcaaaaatgtgggcaacaccgaagacgagttcaccttcacggacttgagggcca

SEQ ID NO: 37007 - DNA, 444 bp, Zea mays
  Clone ID: MRT4577_133754C.1
ctctagggagtgatgctatgatacgactgaaggaacaacatggatgtcaccacaccccaaggctcgacagggccgaggtgcatgatagtgatgagaggaacggtatcggtacgtggccaaggtaacctacaaccctagccagatccactatggttgcatgctgtggttgcgccatacacaacacaggtggatagggcctaccacccattatgctggtccaagggcccaacactacttgaagctgcgcacttagtacatgacccgcataggcattgaaataaacccgtgtgtctcaccctacctgatgtgtgcaaaactggatgtatagctactcttcattctggacattctcgagacttaatgatcaaacctggagtgtttcatagcctttaggcctagagaatatactactgagatgctccatctttacaagcatcttgatga

SEQ ID NO: 37008 - DNA, 389 bp, Zea mays
  Clone ID: MRT4577_133755C.1
attcggctcgaggaaatgcaccccatcttttactatatgatgaactggaaattgttgcagacaaattaccggttgaccggctcatccttcttgggaggctgctttacatgggtgattaagatggcaaatggggcgcacacgagtgagattaccttctgatcatgggttgtgacgtgaagctcaacctgaatcctggacaggtggtcaaccccaagttcgtcaaccgtgatcagctaatggagctgatgaggaaagctgatgcttaggaagatggctttaagatgtgctctcggttcacgctggtggaggacaacttcctgatgggttggagggatcatgtctagcatgggactctactgggggctgcggacatgaataccattcattaa

SEQ ID NO: 37009 - DNA, 1024 bp, Zea mays
  Clone ID: MRT4577_133756C.1
gctgctggtgccgaggcgcccgagctgagaagatatatgccgcccagcctcacttacattacatatgcacattctgttctcagttctcttcctctctctcaactcaactactcaaagcggtagattaaccggctctagcgtagcgagtgttgctacatctctcttggccatgggggcatgcgcgacgaagccgggtgacctcaaggtcaagggcgaggcgcctctggtcgcggaggacgccgcggcgccactggcggctgccgacgagaaggcgaaggccgccgaggtccccgtggccgccgctgccgaggtcgaccaggccgatgtcagccgccggaggtccctcagcgacctgcttaaacgggacgccgagggcagtgacggggaggaggaggtcgaccaggaggcggagaaggtcgtggctggggagccagcgagtgctgccgctgccggggaaacgatggggtcaccgcaagcaacagtgcaggcctcggtcgcaaccgagcaggacgacacggccgaagaactcaaggatggtcttccgagtggtggcgacgcgcatgcggcggaagaagagaagcggatggatcctgaatcaatccaagctgctgttgctgctgatgccccaggttctgaggaaagcaaggttgctgctgctgctgatgccccaagttctgaagaaagcaagcttgctgctgctgctgatacctctgcctgaaaaatggggcatcgtgttgtgattctttgttcttttcgtctctctcggggtttttttttcgtggcgaaatacgctttaatgacgcgacgagattcatagcaggcagcttggttgctgtctggctccgtttgtgccgcggtcaggatgtgcatggctggattttactgttgttttatttctcttggaggtactccgtgcaatcaagctgtctttcctataatggcggactcggccggcaatcaaagctataaatttctaaagtttaattaagcgtaaaaaagaaaaaaaaaaaaaaaaaaagggccc

SEQ ID NO: 37010 - DNA, 248 bp, Zea mays
  Clone ID: MRT4577_133757C.1
tcgcacgcctaaaaatgtgttatgtggagtacagagaggttatgctgccgaaactaagcaggagcacatgcttttgtcataaacacagactctgtcggtcaccccgaggctgtccaataaagggacaattgcggcccaacatacctcacatgcgtcgcttgtaaggtgtgctgggccgaaacaggtgacgcctatgtttcgtttgttcacactacgatacactatgattaactataatcatggtgcat

SEQ ID NO: 37011 - DNA, 428 bp, Zea mays
  Clone ID: MRT4577_133758C.1
tcggttctgaattcccgactcaacccacgcgtgcgccgacgcctgctaccactcttcttaccactcgtatgagccttcgccgcatagggatggactatctcatcaatcgccacatcacatctatctctcgatcttacccatagtggatgtacaacaactacaacacacccctaagctgttcatacgttgtacattcgatcatctacatgtgaacgacatatccctgaacgactaccttgctgctaactcgacgaatcacgcaatgtacctgccacacaccccagaacattactccaagaatcgactccccattgctcagtgcacgatcgtgcagcgccttacaaactccctcatgattcacggactcaacaaccgcaagaaggtcatatctgtccgcatcatcaagcataccctgtagatcatttaaa

SEQ ID NO: 37012 - DNA, 585 bp, Zea mays
  Clone ID: MRT4577_133759C.1
cccacgcgtccgcggacgcgtgggcggccagcggcggcggccaaggcgcgatgggagcggctcccctggcggcgtggtgggcgcagccccggcggctgtgggtgctgccccggcgtcccatggcgcgctaccctgagccccgtccccggtggcggcgccccctagccgcggccctggcggcacgggcatggcggctccggcccagtgccggcgcatggcgcagccgctgcccttgcagcgcgggcggccaggccctcggtggcgcgcgggcagcctgggcgctgccggccctagccacggcccggcggcccggccccggtggctccccgtggagcggcggctatggccccgtccctggctcgccagcgggcggccccggcgcggtacaggcgcgcggcccggccacggctcggcgcgacacgggcgctctatggcggtgcggcctaggccaggcacgcgggcgcggcaccgacgcgggcgcaaccgcgacagcccgaccacagcagtgcgggggcgcggcccctggtaggcgagcgggcgcgacccccggtccgggcgcgacggctcggcggcgcacgggcgcgc

SEQ ID NO: 37013 - DNA, 350 bp, Zea mays
  Clone ID: MRT4577_13375C.1
ataggactaagggattcaaacaaaaagacatgccaacgcattgggacagaatagcacagggattggacaacttaattagaatcggaggaattagaaacttcaacgatacaaggaatacgcttagaagggcgctgactgtagcttaaatgatccttctgcaggtctttctgatcaacacgctggagcccgtgagcggcgagatggcacccatcttgaccatgccaggcacgaagtccgagaagaacgcgctctggctgatgacgtacgcctggacctgggcgataggaggccgagccattgaagagctcctggtccgagattaggagcccctttctgcagacaagggtcct

SEQ ID NO: 37014 - DNA, 271 bp, Zea mays
  Clone ID: MRT4577_133760C.1
ggtccccagagcaggtgcttttaagaaccctgtttcctctcagagcccagggagagtccaaggacatggcgcatcaggaagtgggactgcaggagttctctggtggcctcgtgctgtccctctggccacttctcactttagggtggtcagcggcagctcgccatggcagtgcccattggtgcacactaacctcagtggaaaagtaaccattccctgcctcttagaaagaactcattcttagttttaggagggttctgtcgctgaatcaagt

SEQ ID NO: 37015 - DNA, 2350 bp, Zea mays
  Clone ID: MRT4577_133761C.1
atcccggtctcgtcgtgcgcttgtccctttccggccgggacggctccaaacaaatgcggaggtctccactcttctctcttcctccatcttatcatcgcccacgtacacacccaattcctcgcaactgggctcccccgcctccaacgacactgccccccgcctcaagtccgccgtctccattcttcagctctcctctcctctgtagtctgcctgtacctattggctgaagcagagctgacccccactttatcaagagttgctcaacaatggacactggctgcctgtcatctatgaatattactggagctagccaggcaagatcttttgcggggcaacttcctcctcagagatgttttgcgagtagtcactatacaagctttgccgtgaaaaaacttgtctcgaggaataaaggaaggagatcacaccgtagacatcctgccttgcaggttgtctgcaaggattttccaagacctccactagaaagcacaataaactatttggaagctggacagctctcttcattttttagaaacagcgaacgccccagtaagccgttgcaggtcgtggttgctggtgcaggattggctggtctatcaacagcgaagtatctggcagatgctggacataaacccatattgcttgaggcaagagatgttttgggtggaaaggtagctgcttggaaggatgaagatggagattggtacgagactgggcttcatatcttttttggagcttatcccaacatacagaatctgtttggcgagcttaggattgaggatcgtttacagtggaaagaacactctatgatattcgccatgccaaacaagccaggagaattcagccggtttgatttcccagaaactttgccagcacctataaatgggatatgggccatattgagaaacaatgaaatgcttacctggcccgagaaggtgaagtttgcaatcggacttctgccagcaatggttggtggtcaaccttatgttgaagctcaagatggcttaaccgtttcagaatggatgaaaaagcagggtgttcctgatcgggtgaacgatgaggtttttattgcaatgtccaaggcactcaatttcataaatcctgatgagctatctatgcagtgcattttgattgctttgaaccgatttcttcaggagaagcatggttctaaaatggcattcttggatggtaatccgcctgaaaggctatgcatgcctattgttgatcacattcggtctaggggtggagaggtccgcctgaattctcgtattaaaaagatagagctgaatcctgatggaactgtaaaacacttcgcacttagtgatggaactcagataactggagatgcttatgtttgtgcaacaccagtcgatatcttcaagcttcttgtacctcaagagtggagtgaaattacttatttcaagaaactggagaagttggtgggagttcctgttatcaatgttcatatatggtttgacagaaaactgaacaacacatatgaccaccttcttttcagcaggagttcacttttaagtgtctatgcagacatgtcagtaacctgcaaggaatactatgacccaaaccgttcaatgctggagttggtctttgctcctgcagacgaatggattggtcgaagtgacactgaaatcatcgatgcaactatggaagagctagccaagttatttcctgatgaaattgctgctgatcagagtaaagcaaagattcttaagtatcatattgtgaagacaccgagatcggtttacaaaactgtcccaaactgtgagccttgccggcctctccaaaggtcacctatcgaaggtttctatctagctggtgattacacaaagcagaaatacctggcttctatggaaggtgcagtcctatccgggaagctttgcgcccagtccatagtgcaggattatagcaggctcgcactcaggagccagaaaagcctacaatcaggagaagttcccgtcccatcttagttgtagttggctttagctatcgtcatccccactgggtgctatcttatctcctatttcaatgggaacccacccaatggtcatgttggagacaacacctgttatggtcctttgaccatctcgtggtgactgtagttgatgtcatattcggatatatatgtaaaaggatctgcatagcaattgttagacctttgggaaagcaaaagcgataaagagatctcaatacctgttatggtcctttgaccatctcgtggtgactgtagttgatgtcatattcggatatatatgtaaaaggacctgcatagcaattgttagacctttgggaaagcaaaagcgataaagagatctcagatagatattgtgttctttca

SEQ ID NO: 37016 - DNA, 254 bp, Zea mays
  Clone ID: MRT4577_133762C.1
gcacaggcagctaccggctgcatcatcgaccctgaggagaaccggaagctgaccgcagaggaggcgttcaaagcaggaatgttcgggaaagaaacctacgtgaagctgctgacggccgagcgcgccgtcaccggctacaccgacccctataccgggcagcagatcttcctcttccaggccatgcagaaggacctcatcgtacgcgagcactggatccgcctgctggaggccagatcgcacgggcggatcatcga

SEQ ID NO: 37017 - DNA, 2589 bp, Zea mays
  Clone ID: MRT4577_133763C.1
ctccaaatgcggaggtctcgactcttctctcttcctccatctttatcatcgccccacgtacacacccaattcctcgcaactgggctcccccgcctccacgacactgccccccgtctcaagtccgccgcctccattcttcagctctcctatcctccgcctagaatatcttcatcggtattttaccaacctggatcaatttactcacgatactctgaagcgtatacatatgccatatgggaaatgacttcatagctgtgggttgtcttatggctccttgaatttgcagtagtctgcctgtacctattggctcgagcagagctgacccccactttatcaagagttgctcaacgatggacactggctgcctgtcatctatgaatattactggagctagccagacaagatcttttgcggggcaacttcctcctcagagatgttttgcgagtagtcactatacaagctttgccgtgaaaaaacttgtctcaaggaataaaggaaggagatcacaccgtagacatcctgccttgcaggttgtctgcaaaggattttccaagtcctccactagaaagcacaataaactatttggaagctggacagctctcttcattttttagaaacagcgaacgccccagtaagccgttgcaggtcgtggttgctggtgcaggattggctggtctatcaacagcgaagtatctggcagatgctggccataaacccatattgcttgaggcaagagatgttttgggtggaaaggtagctgcttggaaggatgaagatggagattggtacgagactgggcttcatatcttttttggagcttatcccaacatacagaatctgtttggcgagcttaggattgaggatcgtttgcagtggaaagaacactctatgatattcgccatgccaaacaagccaggagaattcagccggttcgatttcccagaaactttgccagcacctataaatgggatatgggccatattgagaaacaatgaaatgcttacttggccggagaaggtgaagtttgcaatcggacttctgccagcaatggttggtggtcaaccttatgttgaagctcaagatggcttaaccgtttcagaatggatgaaaaagcagggtgttcctgatcgggtgaacgatgaggttgttattgcaatgtccaaggcactcaatttcataaatcctgatgagctatctatgcagtgcattttgattgctttgaaccgatttcttcaggagaagcatggttctaaaatggcattcttggatggtaatccgcctgaaaggctatgcatgcctattgttgatcacattcggtctaggggtggagaggtccgcctgaattctcgtattaaaaagatagagctgaatcctgatggaactgtaaaacacttcgcacttagtgatggaactcagataactggagatgcttatgtttgtgcaacaccagtcgatatcttcaagcttcttgtacctcaagagtggagtgaaattacttatttcaagaaactggagaagttggtgggagttcctgttatcaatgttcatatatggtttgacagaaaactgaacaacacatatgaccaccttcttttcagcaggagttcacttttaagtgtctatgcagacatgtcagtaacctgcaaggaatactatgacccaaaccgttcaatgctggagttggtctttgctcctgcagacgaatggattggtcgaagtgacactgaaatcatcgatgcaactatggaagagctagccaagttatttcctgatgaaattgctgctgatcagagtaaagcaaagattcttaagtatcatattgtgaagacaccgagatcggtttacaaaactgtcccaaactgtgagccttgccggcctctccaaaggtcacctatcgaaggtttctatctagctggtgattacacaaagcagaaatacctggcttctatggaaggtgcagtcctatccgggaagctttgcgcccagtccatagtgcaggattatagcaggctcgcactcaggagccagaaaagcctacaatcaggagaagttcccgtcccatcttagttgtagttggctttagctatcgtcatccccactgggtgctatcttatctcctatttcaatgggaacccacccaatggtcatgttggagacaacacctgttatggtcctttgaccatctcgtggtgactgtagttgatgtcatattcggatatatatgtaaaaggacctgcatagcaattgttagacctttgggaaagcaaaagcgataaagagatctcagatagatattgtgttctttcagacggtggttcctattcctatcaatcggttaatccatcccacatgggaggatttgtggtaagcttagtcagcaaacctctggtggtccctgaaggcctgaactttatcgggagagctgctgtagcaatccccgaagccgtgtgccgtttatcttgtcgggcatactttatttgctgagttgcagttattaagcatagggaggtgcggaatgcacttcgggcgtcgaagatatttttgctcagattccttgcgtctcaataattgtccttttgaatcccagat

SEQ ID NO: 37018 - DNA, 362 bp, Zea mays
  Clone ID: MRT4577_133764C.1
cggacgcgtgggcggacgcgtgggctgactcgtgctggtggcttggcttctcgtccccctgcagttcgggaccggattcctgaggctctcacgtgttaagcttcgatggtgagcagatcgatgatgccctactcggatgttgagtaccgctgcttcgtctgcggcctcgtctgggacacggaccaccagtcgctgcataacgacttgaacatctatggcgaggtcctcctagccaacatcatcctccatccggacacgcacagtgcccgcggcttcggcttcgtcaccttctccacggaggatgcgatgcctaacgacatcgagggcatcaacagcaaggagctggactgtcgcaacatcac

SEQ ID NO: 37019 - DNA, 255 bp, Zea mays
  Clone ID: MRT4577_133765C.1
ggggtggggggtggtttttcaagaaatgaatatatggtgtcaataactatatatggcgttacaggacagagactaactcaacaggagtcaagatacagggccatccatgcatggctaggactgcaccacacgagctcctcccaattatgaagtgctggtgggggggaaaaacaaccaaaaacactacaaccacatggattaaattagacttcgagtctgcgacgccccaggcacatcgggctcggggccatccat

SEQ ID NO: 37020 - DNA, 210 bp, Zea mays
  Clone ID: MRT4577_133766C.1
agcgcgctagaatgccttaatctgagtggtgttagagctgaccgtaattatggccatacctgcggactatgagacattggtctccgctgacggcgaagacaagctaacactcgaaggcatcagctgcaacgacggcggcgcctacagactgagatgactcacataaattgcgccccgcgcagtgggcactgtacaaaactgaaacctgag

SEQ ID NO: 37021 - DNA, 703 bp, Zea mays
  unsure (1)..(703): unsure at all n locations
  Clone ID: MRT4577_133767C.1
ccggccgggaggctccgcaaattttggacatcataactcaccttcagagctctaggcattgaaggttgttgcgatcgcgcgcaaacttaccgcgatacaacaccaatttttgaaacattgagcaactgcatcagcaagttctcacaaataccgccaatatgtcgaacaaacaaggaaagatggccggttacatcaactggcgcatgcgagtcaccctcaacgatggacgagcaatgaccggtcagatgctggctttcgacaagcacatgaacctcgtccttgccgataccgaagagttccgacgcgtcaagcgcaagcagaacaagcccgctgcccctggcgcaagcggctcgggttccctcgtcgagtccgaggagaagcgaacactcggtctcacaatcgtccgaggcgctcacatcatctccctctccgttgagtcgcctcctcctgctgaccccagcgcccgacttggaaagagtgctcctggcggtatctcctctgctctggctgcntggtcccggtgttgcccgacctgctggccgaggagctgcccctccctctctggctggtcctgccgcttggtgttggtggcattccccctcctggcttccccggtttcccctggaggtgctcctggcttccagggtcctggngggtcgtggtgctcctcctcccggcttccctggaaacttcctcctcagct

SEQ ID NO: 37022 - DNA, 490 bp, Zea mays
  Clone ID: MRT4577_133768C.1
gtgaagacatatatgtcaggcttctaccagacaagctactactttgagacacactgatgatctgccttggtctaggcatactcatgaggtgctattggatatctagggtcaaccctatgtgtaaggagaatctacagacatatcatatgtgattaaatacctgctactcgcagcaaaaagatctatgtatagccagaggatgcaatgcctgagaaaaatggattgtaatgggagaccctgaataggtttttgaatctgctgatgacttgaccccgttgctcttatacgcacatttctgatagcctgcttattgctgtgagatcgacctcatatggtatatctgtgatagttgaggattatcctgaaacacctgatatcatgatcattgcttgattctaagcacttgatacgatacgatgtaatctgtgaatattgatgcgagcgcgagtcaaatgatgactgctcggacccaaccgattggtgactgttg

SEQ ID NO: 37023 - DNA, 684 bp, Zea mays
  unsure (1)..(684): unsure at all n locations
  Clone ID: MRT4577_133769C.1
ggtaccctcgtcgtccgccgggnactgctctcgattcctctggcaccaaatttcggtttccacagtgtggtaccactcgcactcgcagtgtagtgtgtctccatccaaataccagacatgcggccactgtctttccattgtgcagcaatcatagtgatagtggcatgctctctattagaaagtatattctgattcttgctaggtgatgcattttgatttttttttttcttgcacctcaccagtcagaagtattttttgtggccaaaactacggctaatcattcactcaccaactccaaattaaatgatgcagacagaatgtcatatgtctccatctagctgtgtgttaggcttatcacgaaggcttgtctccatctatgtagcttgtctccatctgtgccataacctcttcctgtttctatacgattgtttgcagtggatcttctgggtcggccccttcatcggcgccgccctggctgccatctaccaccaggtgatcatcagggccatcccgttcaagagcaggtcttaagctgccgcgggtgtgctgagacatgtggggaatgtattgtctgcccacgcctagtttctctgctgaatcttncatctctcttcccttcaagactgctcactgctgcactgctctgttatctgaacccagaacttcgtgtactcctgtaccgag

SEQ ID NO: 37024 - DNA, 358 bp, Zea mays
  Clone ID: MRT4577_13376C.1
ggaaaagtgagcacattcttgcacgaagcttgccgccgccgagctggggaactgggaagaggaagagatcttgcctaggtctagcgaggaggaggtcgatcgatcgattggctaggactctaggaggaggagctggctcataagcaggtcagtgcgcccctttctactatcgctctaactattactcgatctccctcgactgcacattcctgacaagatcctagaaggtgggaaggtttctccgaggatgttttttagggaacccgccgtttcaattcgattcgtgcgtgtctctcttcttgtagacctactgacccacccatcgactgtacttgttcggaggaagggatggccgatc

SEQ ID NO: 37025 - DNA, 511 bp, Zea mays
  Clone ID: MRT4577_133770C.1
cccacgcgtccggtgtaatatatgctgctgcctggtgggtttgcaaggtttgtaatcagatgaacagcgtccaagataaagttagcagctcgttcttgatgtgcaggaatcaaaattgctgtcactgtcccatgtggctgtgctgttgaaccggtgggcggcagcacgtcatctcgccttgcagctgatcccggtctagctaagcaagaatggaatgtgtttgatcttgagttcttgacgtcagtaactggggcatgtgagtaaacacatcacatagataactggagggttgcagctcccatatgcattgtatagcagttaggctaactaagccatgtagcaattagcaacatatgttcaaagaaggagaaggcacgcggacggaggcacgcaacattgcagcaagggcagggaatgtgtgcatggatagaggcaactgcaacgacagcttgcattccttgattccacaagctgacctctcagtcactcagttcttactcactcattccat

SEQ ID NO: 37026 - DNA, 325 bp, Zea mays
  Clone ID: MRT4577_133771C.1
gccggccgggtcgggcatcggcgccgccctggctgccatctaccaccaggtgatcatcagggccatcccgttcaagagcaggtcttaagctgccgcgggtgtgctgagacatgcatgccagttcggaaggacgagcgtcttcctgtggggagtgtcttgtctgcccacgcctagtttctctgctgaatctccatctctcttcccttcaagactgctcactgctgcactgctctgttatctgaacccagaactttgtgtactcctgtaccgagctgtgtgtatgttttttttttcttcctaaaaaaaaaaaaaaaaaaggccccta

SEQ ID NO: 37027 - DNA, 341 bp, Zea mays
  Clone ID: MRT4577_133772C.1
ggaaatgaatcagggctcagccaacttattggccgggcagtgcagggaccagtacacagacatttttccagagcctagtaggttcaaaagggtccggaacatttcacgggcgagcaaacaaaatgcttcccattttccaatcccgtaaacatttgaagttctggaagaacagattaacatcgtcgttacggccaccagacaaggggatggactacgtgcgtggtccaacatcacagactcacccggggacacacacgcttgccacctgaaatagagcatatcctcccagtcccagccaggattatctcctcctgcgagtttgcttgctgcatcattacctg

SEQ ID NO: 37028 - DNA, 237 bp, Zea mays
  Clone ID: MRT4577_133773C.1
ctctcaaatttatagaaaagcatttattgtgtcagacaatctcttactatacttattatatattttccatttttttcatataaaaccacgattaatccttttcataaactcccccaaatacccaatattggtcccaagtttcccaaaatatacttatttacgtcattacaccccattcttaaaaaaagatacaaataattgctctaaaaatgagaaatcccccaccccccccaaaaa

SEQ ID NO: 37029 - DNA, 219 bp, Zea mays
  Clone ID: MRT4577_133774C.1
tcgaaaataaagcaagcaccagaatctcatatttcccaaactcgcaagtcgcaacggccatgtgtgcacttccccaccgacttggggttctagtccttctagacgccgtcgtctcttctcactgctttcgtcgcatacctcatctgcgcgtctaactacctgctgtccaattacggcctccctaaagggctcattcctgactctgtcacctcctacaga

SEQ ID NO: 37030 - DNA, 878 bp, Zea mays
  Clone ID: MRT4577_133775C.1
ctcgaggccggccgggataccctcaaccaccccaggccaccacctctctcctcttccctcacacccgctcctctactctgcctctacccgcttctccgcgacttttcaacgctcgccctctccatacaccagcagatcgcgccagtcgatttcatgaccacggacatccagaatctcaagtccttcgatccgttcgcggaggtcgacgatgctggaggcgaagtaaagtctactcagcagaactacatccatatccgtattcagcaacgcaatggtcgtaagactctaactacggtccaaggcctacccaagaagtttgatcagaagaagattcttaaggtcatcaagaagaagtttgcttgcaatggcaccgtcgtcgcagacagtgagatgggagaggtgattcagttgcagggtgatcaacgcaaagatgttatggacttcttgaccgacaagaaggagggcctcggccttgatggcaagaccatcaaggttcacggcttctaaccgcgtcgaatacgctatgcctaccgccgctcctcacgccgagcgaccgcttcgagcctgacgacaacgagactcgtacggcggaggaggagcatgccgacacgttggacgcgtagcacacacgatccacgctgctgagatgcggtaacggcatagcaagtatcccgcggaggacccacggttccccgtatctcgatttctcttggaggaacagacgcggctatcggatggtttttttgtacgctgatgtatcaggtgctggcaggatgatgggaggatagttcgtacaagacaaacaagatattagtcttctagtcacggtcaatctaaagagtgtttttttcaagaaaaaaaaaaaaaaaaaagcggcc

SEQ ID NO: 37031 - DNA, 1597 bp, Zea mays
  Clone ID: MRT4577_133776C.1
cggacgcgtgggggctaggacacattgaggatgctctgaagcacttgtcacttgcaaccccacagcctgacctcctagaattgcacaaattgcaaacagtggagaagcactttgggagatgtctggatgcgcgaaaggctggtgactggaagagtgtgctaagggaaagtgatgctgctattgcggctggggctgactcctctgctctgctcttggctgctagagcagaagcccttctccgtctcaatttacttgatgaggctgatcttgcaatctctagtgcctccaaattggattatacatcttcatgctccccagacaccaaattttgcgggtttcttgccaacgcctacctgttttatgtacatgcccaaattgacatgtcatcaggaaggtttgacaatgcggtctcctccatagataaggctaggataatagatccaggaaacactgaagtggtaaacatgcataacaaagtgaaatctgtggccagagcacgttctctagggaacgagctcttcaattctggaaaattttcagaagcttgcgttgcttatggtgaagggctcaagcaacaccctatgaacaaagttctgtactgtaatagggcagcttgtaggttcaagcttgagcagtgggagaagtcaattgaagactgtaatgaagctctcaagattcaatccaattataccaaggctttgctcaggcgggcagcatcctatggcaagatggaaagatgggttgaatctgtgaaggattatgagattctcagaaaagaacttccaggtgacgcggaggttgctgaggcctatttccacgcccaggttgctctcaagtcatctcgtggtgaggaggtatccaacatgaaatttggaggagaggttgaaacaattataggaatggaacagttccagatggccacatctttgccaggtgtttcagtcatccatttcatgacgccttcaaatcagcagtgctgcaaggtttccccattcgtgaacacactgtgcgccagatacccatctgttaatttcctcaaggtcgatgtgaacgagagccctgctgtcgcacgcgccgaaaacgtgaggacaattccaacgttcaaaatctacaaaaatggtattagagtcaaagagatgatttgccccagccaacagctgctggaatattcagtgaggcattttgggatttaggccatgaagccccccgatgattcgatgttcgtttccttctgcctccagctagcttctctggagcgagcacagcacaggctttagccgggagcagaaccagtcaagctcatcttgacgaaggcaagcatgaaaattggaaagcgaagagcaactcttccccggcattttccacccccacagccccttacgtttttcgtcctattctccatttgttgattacctgcttaatttattctttcaatctgtctcgtccgtacatcattgttgccaaatttctttagaacaaaagaaacatcctctcctgattcatgtgaagaatgactgtacatttttttacttccatgtttaccagacaaccaaggaaagaaaggtatagattgcattttgtacgcaaaaaaaataaa

SEQ ID NO: 37032 - DNA, 369 bp, Zea mays
  Clone ID: MRT4577_133777C.1
ccttagccagtacaagctctttttttttttatttttttttttttttggtacacattacaatccggaaatgtaactccttatttttggttggccacatacattactccaaaaaactttattattgaattacaaccaataagcactctaaaaggagggcaccaccaatgatgtgttgttggtaggaggctgctgggtttttcaaagcaaggtgggcaaagggcaacaattgttgaatttgtaagagggttgcggggttagccacaaactgctggtagaacggaagcaattgttgttgtgtcaaaaaagaagcggggcttggttgtactagctggccaaagggaaccacgattccctgttacactacaacaa

SEQ ID NO: 37033 - DNA, 298 bp, Zea mays
  Clone ID: MRT4577_133778C.1
ttgacgcctgggccaccccaaacgcacctggggccgcaagtgatagagcacgcctctccacacctcaactgtgccacacgatgcacaaataacagggggaccctggcgctatgccggtttacatccgacctagcgtcgtctgagaccgaccagaccatggacaagatcctggacttatacatactgagctccgagcgggcggacatctgcgcagccggcctatcctgctactggttcgcccggttctggtggcgataacgagcggaggacgtgggggcaccacgagacgtacagggag

SEQ ID NO: 37034 - DNA, 245 bp, Zea mays
  unsure (1)..(245): unsure at all n locations
  Clone ID: MRT4577_133779C.1
gcttagaggctagtgacacgatctactanctagctagctgctgagagctggacacacttaagcgaccgagcggtcgagctatcttccaccatgtcttggagtcagagcgagaacgcgcggctcggagcgacgcgctggccacctacgattgggactctctcttttggggggaggtnnaggncgcccaggagcgcggagggaagaccgccgaggacgccgggggggcctacgcccacctcaggcga

SEQ ID NO: 37035 - DNA, 376 bp, Zea mays
  Clone ID: MRT4577_13377C.1
cgggcccacaggccaaaataatgggggggcgggaacaaacaagcgggggggcccatggggcaccagttaacaaaaaaaaaaactttgggggcccaaaaaagcaggcccccctttaaaacgggcaaaattggggtggcaaaatgaaacaaaaccccccccgttctaaaaaattgggcccctatgggtcaaaaaacccccaaataaaatatttaaaaaaaaggggagaggttttttaagcggggggtatgcccgggtaaaaaattttggttcaaaaggccaaaaaaaagggggggcgggaacaaacaacccggggggcacatggggcaccaattaacaaaaaaaaaaactttgttgttccaaaaaaaaaaggccccct

SEQ ID NO: 37036 - DNA, 490 bp, Zea mays
  Clone ID: MRT4577_133780C.1
gttctagatcgcgagcggccgccctttttttttttttttaagacaaaacatttaatccaaaccaattgctcggagagaaaaaaaaagatgaaaaacatataggttttgaacaggtaatggagaccaagaaaacagagcgactctctgtatccttttcaatcgatagaatatagatttaggaaaactgctctagagtaaaatgaatccagagaacgattttttatgtaaatcactctttaaatggtaatgtagagtaatttatggggtgaaatttaaaaagaagctcaaaatttgtacggggggggccaaaaaaggaaaagaatctttctctcttttttttcgggtgttatggttaccgggactcctcgccgccggcgccgggggggccgtacaggtcgaagggtgcccaaagcgcattgagcgggcacggccgccccgcgcccaaacacgcccatggtttgccggacccggaccaatgcagcaggctgac

SEQ ID NO: 37037 - DNA, 463 bp, Zea mays
  Clone ID: MRT4577_133781C.1
aaaggacaactagttggttttaaaaagtacaacccagtataggggaccatgttttatggaaaaccatatatgtagtattaatggggggggcacacaaatgactaaacagggggcgatctactaggcgggaattttgggggagagaaatcctgggccgaaagcttaaagaaaccccaagccgtttttttggcggctaaagaaaaaacggggggcccggttaagtcggggggaatgcaaaaatctggcccacttcctaaaagaacttcggaagggggggcctgcccttggaaaaaaaaaagttcttaaggggggaaaaaaaatctgaaacctttcgaggaaggggacaaacccaaggcccaccaaactgaactgaccaagggagaaaggaccctcgttgaatttcccgggggcgttttttattttatcaaaaggagggacggtttcctaaaacacattttcctgg

SEQ ID NO: 37038 - DNA, 879 bp, Zea mays
  Clone ID: MRT4577_133782C.1
ggtatcgtgcctgttctaactggcagccgaagcaaatctaggagccagagcacgagtgctaatcactccatgagcaagagcatgagtgtaagtcccagaagcccaatcaaaaggtcaaacgtcagcctggagagattggtaagcccgagtcctgttcatcagcgtagtagaagtcctgtccatgcttccaaacaaaaagaaagcaggagcccaccccgacagaggaatatgagcatgagtcctcatcgaagaagccccagcaagagcccacctggaagggcaagcagaagccctgttgtccgcaggaacaggagtcctgttgaagttcggacaagaagcattagcaggagctcagctaggtccttgcagcggagaagtccaagtaggagcccggaaagaacccatgtgcgaaaaagtgtcagtccaagccccacacctatggagaagggaaaaagcattagccgaacttctgcaagatctccgctgcacaagggttttagccggagccctgatatgcctcctagaaagactacaagcagaagccctcaaaggaatgctcatagaaactttagcaggagccctgtgggatcttctagaagaagcttgacccctgtacgaggtggtcgatctcgcaggaacgccagcagaagtcctagcccacctcgcagggcagtatcaccactcaatcacggtaggagcccatctaggagtgtctctcccgatggatcaaaacgcataagaagagggaggggctttactcaacgttactcatttgcaagacagtatcgttcaccttctgttgatcgttctcaccgctatgggggaaggagtgatcgtgacaggtatatcagtcacaggggcactcgttatcgatcacct

SEQ ID NO: 37039 - DNA, 516 bp, Zea mays
  Clone ID: MRT4577_133783C.1
tcgaacggccgcccgggcaggtataaaaaaaaaaaaaaaaaaaaaaaaaaaaaaaaaaaaaaaaaaaaaaaaaaaaaaaaaaaaaaaaaaaaaaaaaaaaaaaaaaaaaaaaaaaaaaaaaaaaaaaaaaaaaggtttttcctttgggccgaaaccaccttaagggcgtatttttggaaaatttccataaaatttggggggcgtttaaacctttcttttaaaagggcccaaattcgccctttatagggagggggtttaaaaaattaattgggccgggttttaaaaaacggttttgaattggaaaaaaccttggggtttcccaaaatttaataccctttgagaaaaaatccccttttttgcaagttgggttaataccaaaaaggcccgaaccaatccccttttaaaaaatttgccaaccctaaatggaaaagggaccccccttttaggggccaattaaacccgggggttggggggtttaccccaaagggaacctttaaatttgcaaggcccttaacc

SEQ ID NO: 37040 - DNA, 541 bp, Zea mays
  unsure (1)..(541): unsure at all n locations
  Clone ID: MRT4577_133784C.1
ngaattcacgagtcacgacgtntaacgagtacgccagcatcaaagccgtgcgtgagtaggccgatctcttggatgatggaggaggaccagcagatagtcgctggcgtggacgccgcggcccgaggcggcggcggcctgggccgcgcgggagccgtctttctcaccgcgacatgcgccgcagccacctacagcgcggcggcggcaggggacatcccgtccgtggcgttcgcggtcgccagctacggcgcgctcctgcttctgctgcgctccctgcgcgcctacgagctggcgccgccggaggcggctgcacgcagggaagcgctcaggcgcagggtctgggcgctctgcacgctactcagcgtgatgttcgcgtggaaggttgcgagcgtcgtcgcgacgccgtggccgggtcgctgtcgggcgtttgggccgcggcggccgtgacatctgccgctgggttcgttctgctgttacgacagcagcagcgttgccaatgaacgagtgatcggtggatgtgtgttccgtctgtaacttgtaagct

SEQ ID NO: 37041 - DNA, 462 bp, Zea mays
  Clone ID: MRT4577_133785C.1
atcttgtgtatcatttttctgtgatgagcaagcaacctccctgctatttatactttattacggggagggacatataccaagaggacatggccggcggagccgacaacctataggctgaggctctagcggacgcagggggggcgtctgggcaacggtcccgacgaacacgcggacacaaaaaaacccaaggggggggggcaccgcctgcgggggggtgggcacccccccgatgtcgggcgttcggcttgcccgccagaatcaccttcttgggttcctcgacgctaaagcggaccacctccggccacgacgtcttgccgccggtggttggcttggccgacgactctctcttggggggtgcccctgtttcctccgcgccgaattcctgccgcccggggggggctcttggtggagagcggcccgccccgggttgggccctcccgctggggccgcgtgggggggggg

SEQ ID NO: 37042 - DNA, 520 bp, Zea mays
  Clone ID: MRT4577_133786C.1
ccgccgccctttttttttttgtttcttttttttttttttttttttttcttttaatcatttcattcgtttgtaaggggctagcgcacaaaaatgtttatcagaatacaacagcgaaaattcctgcactgcacccaccgccgggagccaaaaaaagattcctgcattctcaggctacttcggagtctgaagcgtgtccatcgccggaaccgcgccgccgtggtgacgcgaccgcggcagatttcaggtagccgtccgacttgatcctctgcgtccgcctaatggtctgcggcggactcaccacgcccgtggatttggacttttccatcgacttgtgcggcggccctgcacctgcacctgctagcctggaggcgaccctgctgccatccaccttcctgttgccagcgcggtccggcagcgaccgcgtggtggtggcgccgcggctcgacacggtcagagccttggtttcagacagcgccgtgccgccgctctcgtccccgcacagcgagtttccgtccctgct

SEQ ID NO: 37043 - DNA, 376 bp, Zea mays
  unsure (1)..(376): unsure at all n locations
  Clone ID: MRT4577_133787C.1
ncgctcaaacgtatacgtaaattaatactagctcaatcccttttataccctcctcccctccggtaaggggcaaaatgatcgtaaaagcatgctgacagcctgagcgatcagagaggcctaaactcacacagatcctcagaggcgctgatagtaacaaggtgccggatactgtctgtgtgtacggaaagccccagttagactaccatactctagaacgaggagaacagaccaagagccaactgaacagaatcgaaacgaacacagataaaactgatgccaaacttggacagcccagactcaaacaacagtcacaggacgccatagagaaagctaggcattccgagctctgtcgacacaagcatcgtacggacgcacg

SEQ ID NO: 37044 - DNA, 432 bp, Zea mays
  Clone ID: MRT4577_133788C.1
ggggggcaagaacataggcccccccatttttgctggggaacttatacccatccaacaaggggtaaaatataggtaaacacaggtaaaaattagacaaagctccctatttacaggataagttttattttttacccaagcccttaaatatttctgggtccccccctgcatggaaacacaaaaaattcctccccctactgcaaggctggctaaacaaacctcctgcacttggggacaaggaccagcggaatcccccccggggttttaatccccggggccttgcccacgtggagggccccctttcccaccccgggggggagctcccattccaaagggggcaaaaggcttacaagcgcgagctccaaaaccggcagcgcaaaattgattccggggcaaaacctccggccggggccaaaagggaaaaactggtagtcg

SEQ ID NO: 37045 - DNA, 379 bp, Zea mays
  Clone ID: MRT4577_133789C.1
acgggcccgaaattcccgggcggaccacacccttccggccaaggaccgaatcggcttttgaaaggcctttttccgaaccgacggcttcaacaaggggagggtcttcaagttggtgggaactttccttggccagtcaatcaattttttggggccgttgcgtgcccggttttacaacaacaaggtccaacggtggttaagcaaaaccgccttcaaaaccatcgccagaaagttgttaaattccaaggagggcccgcccactttcaagcagccaaagataacgatcgaaaagcttttgaagtacggccacatcctggtggcggaccagaaaaacttaaagcgtgggcagtttgtttccaggttctttaacagggcttttttt

SEQ ID NO: 37046 - DNA, 863 bp, Zea mays
  unsure (1)..(863): unsure at all n locations
  Clone ID: MRT4577_13378C.1
actttcaaacgccctcgctctccccctcaccttaaccggcgggagaggagcgtgcttctccgctcgctgaaatctcgcggctcctgctggttgatgttctgctccgggcctggcacagcaagaggccagaggggggaggccggtggtaggtaggcttctgcttctccgtcgtcctcgccgggtcgagcggattctcttggccggtgtgctgctctgatgccgtcttccccgtgcgtactcaacgctgcacagagatggacactgagaatggttttcttgctgctaagctaactgatgatctagtcgtggagatcctctcccggctgccgttcaagtctttttgccgcttcaaatgtgtctgcaaggcctggcttgccttctcctctaatccagactactgcaagaagcttttgaaaattccgatgggtcttctgtatcaacgccgttatgatgaatttgataatgatttcgatgactctgctatcaagcttgctagcctgccccacaatgataaggaatttgatgaagctcttagtttcctaccacaatatgagcagttagagctgatggactcttgcaatggcctggtcctttgtaagtacaagagcagctgtactccttttggtatttgccgcttcatcgtgtgcaatctggcaacacgagagtggaaggtgctccctgatactcctcctagcgattatgacccatcatggtcgacaaagttctatatcttcaactttcaacggctgagtacccgctattgggcatttggcccccgtcaacttcaggtgntctcgtctgaccttaacacccggnntctggacgatacatcagtgctctctgagacaaaagtttatcgacta

SEQ ID NO: 37047 - DNA, 408 bp, Zea mays
  Clone ID: MRT4577_133790C.1
ctacgttcacatatgtattttaagcaggctcatgggcctttatcctccccttactttacaacatattcaagaatcggggaaacaaaaccatgcgttttttcaatccgtatgaaatgcttcatcgtaaacagcagtggcggtgtggctggcggaaacgcctgatcggtcaaggtttcagaaaccaaggtcgtcgttagggccgggaccctgaccacccagagggggccacggaagtcgggaggatccggacccggggcatacgaggtacggaaaatccgggagccccctcggtttcaggggttggagtgtccgaaacggcggtatttgcagtagcgggagccgcaacgggagcagttcaccaaatcctgccgaaccggggcgtagcttatgggccctaaggtgtataac

SEQ ID NO: 37048 - DNA, 462 bp, Zea mays
  unsure (1)..(462): unsure at all n locations
  Clone ID: MRT4577_133791C.1
tttcaaactaatatactcttctacatctttggggtatcctcgattaattgttcaggtctgatttgaataaacataatgtaatatgtgtgtgtgtgcaagaataatacaacttatgataaagttagcgtggtgcaacaataagctaaacaattatcctaatagtaaacatgtgtattgatattccttttttttacgaataggttccatgtttttggaattggaacaaggtcacttgggttcaacatcagggtacaagttaagaaaggttcatctgtatcggtaggatttgaaattctgcataagagttccaactagtatcacgtgaggactaaggcataaatcatcagattgctcatgccagtttcttgcttggttaagcatacattcccatgatctgtgctgagaaagttccacaaccttactatgttatttgtntattttgaaatcgttcttctttctaga

SEQ ID NO: 37049 - DNA, 274 bp, Zea mays
  Clone ID: MRT4577_133792C.1
gtggaattctgctgatcaggggcccggggcgaatgggcgatgggtttgccggattcgaccccacggagagcaacctcgactgtgtgggacttgggagccaagcagaccaccgacagaagaaacccgaaggtgatgtgcgctgctgcacgcgcggcgggcctgtccccaagttgacgacgctgtgcctcgtgtgggacactgacgcatcgccctgtggcttatccggtggcgcagtgccgcgtctcgctctcccacagaccacgaccacgagacg

SEQ ID NO: 37050 - DNA, 247 bp, Zea mays
  Clone ID: MRT4577_133793C.1
acgccctgtgcacggttagcctgacagcagttcaaaggatagtcatcacacctcattacaacaacactgacggacagcgtcagcccataataaaggtttttatgtactgtaacatcaaaactacaaacctaagaccagtcatatatttgacgaagcagtgaagagaacacatggtctataaaaaaaaaaaaaaaaaaaaaaaaaaaaaaaaaaaaaaaaatggcggaaaatattaaaaaaaaacaaa

SEQ ID NO: 37051 - DNA, 623 bp, Zea mays
  Clone ID: MRT4577_133794C.1
accgttgagcagaggatccacagatgaacaatctttctgctgtttgtctactaattctatctcacattgttaaaaaagaaaaaaaaaaaaaaaaaaaatttgcacctatatttatttttacatgccatcttttatgatggtgtgtacttaatttggtgcatagaggaaatgctgctcttgtagcagcggcggccagacaaccgttgagagatggatccacagatgaacaatccttctgctgtttgtctactaattctatctcacattgttaaaaaagaaaaaaaaaaaaaaaaaattttaatcctttttttatttttacctgccattttttatgaagggggggacttaatttggggcaaaaaggaaatgatagctttttttcaaggggggccaaaaaaccgttgaaagatggatccacaaaagaacaatccttctgggggtgggctactaattctatctcacattgtttaaaaggaaaaaaaaaaatgaaaaatttgcacctatttttatttttacatgcccctttttataagggggggtacttaaattggggcataaaggaaaagttttttttgtaaaaacgggggccaaaaaaccgtttagaggagggtccccaaatgaaa

SEQ ID NO: 37052 - DNA, 460 bp, Zea mays
  Clone ID: MRT4577_133795C.1
agccaacaaaaacaccaaaatcgagacacaaggctgggtcacagaaaacaaaactcaaacatccagcaaaagggcggaaaaatcttgaactcaaacaaggcccacatagcacgagtcataaggcccaacacccatggtgggggtttgagaggcaacccaactacatcactgccgctagcctaggcctctgaggcaaatacgaaaaacttatgagacacatcgttgcctctaaacggccacccccgggtaagactcggtgggtcactggcgaaaggcaactaactcctctttccgagagaagcccatctgaaaacccctttagaggcctacaggcccaaaaaacatgaacacacctaccgtaaaaactgcatcttaccccctcatgccacaaaccgagccccgaacagggacacggataaaatgcccgacctcaaggtgacataaaccatgtcttcctgga

SEQ ID NO: 37053 - DNA, 459 bp, Zea mays
  unsure (1)..(459): unsure at all n locations
  Clone ID: MRT4577_133796C.1
gcacgagcccggggcggaagaagagagagaagacgtctctctcctctcggcgtgccccgtgtccccaaccctcncgtgctgcgtgcctaggcctgccctgcctgtcctggcataaaaggtagtgttgtgcatgggcnngtctaaggcggcggggtgttttttgtagtcttgtaagcggacccctggcagtaaaggtgactcccccgcgcgacatgcgatgcccagctgcccaggatacccctggctggctgcacgggacccatggtgttccaatttggggccataggccaaccaaatctcatgggggcacccacccccctggacagagtgcacccctatggcnntgggtgnggtgcgtttatctgtatagcgtgcacaccnantgtgcantgtgtgcaccccggcaccagggantataccccgcacatgtgccanaaacncctgcgccnananagggng

SEQ ID NO: 37054 - DNA, 150 bp, Zea mays
  Clone ID: MRT4577_133797C.1
gaagacttcgccttctcttggcttgctcaccggctacgtctctttggttagatacatttttctcctttgtctttcgtcgtccctttcgattcggtcgatacctggatccagatccgttcgtcgatcatatcctgcctcttcaacttgaaa

SEQ ID NO: 37055 - DNA, 298 bp, Zea mays
  Clone ID: MRT4577_133798C.1
ccaatatttttttgaatcaaactatccgctgagcaaagggtggaattttttaaaggcttatggcaaattatcccacacaataatgaacagtagggccggtcgagccaggcagatgagcataaaaatctctagtgaatatgaactcgaatcacgttttacccacgctctattgaccgtttatagaaccacggacatcctgagtaggcctaaattgttgtactgcgcactgaactgtctgttcaccaaggaagtacaccctattttttggaactgctcggactgaacccacaggcctgct

SEQ ID NO: 37056 - DNA, 223 bp, Zea mays
  Clone ID: MRT4577_133799C.1
ttttgcctttttcccgcgccagcagcaggagcatctagcaatcgtcttggggtcgccggctattcacatatcgcaccccgtcatgggcgtaggcgcaccgcatattgcccctcccggggggcagcaacagcccatgtatcggatcttacctatcaaattatcagattttccccaagtacctgacacagatggctattatccacgctatgaataaagggcaggg

SEQ ID NO: 37057 - DNA, 174 bp, Zea mays
  Clone ID: MRT4577_13379C.1
ctcatgctctcgttccgcacgcgttctattttccgatcgcttcggtttgcgttgccacaggcttacctctgtgccccagtcgattcgcgtgagcctttcttggaaggaacgatcgaacacacctgcatgatgatcaagcgcgcccgcgtgcagagcggcctgatcgaggactat

SEQ ID NO: 37058 - DNA, 140 bp, Zea mays
  Clone ID: MRT4577_1337C.1
ttctctcgtacgcccacgcgttcgtacacttggggggattttgtaacacctacgcgttttgtataggaacaactaaaatcatcacttttcttgagcaattcaggaaatttcactctgaaatgagtaacagcatgagtccc

SEQ ID NO: 37059 - DNA, 334 bp, Zea mays
  Clone ID: MRT4577_133800C.1
gccagagagcgtgaacggtggcgcagccacggcggggttcatgtacggtgccgacgacgacgtcccggggtgcggctggatgtgcgggtgcagcccctgcgtgccgcgggcgaagcgcgcgagctcgtccaggtcggccggcagccatgtacggttggtggtggtggtggcgctctacgcagggttcatgcttcagcagcatgggcaggaggggcagagacatgtacagcgcatgcggatagctgtgcgacgaccttgcgtgcgcatcgttctgccgaggctcttatgacctactagctgtcttggaggatacccgacagaccattcactgata

SEQ ID NO: 37060 - DNA, 441 bp, Zea mays
  Clone ID: MRT4577_133801C.1
cacccactgcgggcgcgccactagggactccgagtctcataccgaggtggatgaacacacctcctacgtatgctccctgttactgatcgttacacactataataagccacaacgtaccctccgctgccgtttcaaggcatgcacagtgccctacagtgagtgagctgactaccagtagcccgcggctggatcgctgtccaatccgctgctgcacccattggagaaccgattatattgctgagttccaaaacaagcttcttgcagatgctctctgtcaaatctgttgatcggctcaccaggttaccaactccgtggacaaacgacatttttggttgcatcctctgaaactgctcttagatcacaagtgcaggtagctgacgaatgtaaccctactcctgctacacaacgaacttgcccttgactgcagctggccaaaagcca

SEQ ID NO: 37061 - DNA, 226 bp, Zea mays
  Clone ID: MRT4577_133802C.1
cgtattaagtagtagatggctaacggaaccctttgttttttttttttaacaatatcaacggtcatttttttcaagcagagatataaatcgtttctcttgcgagagtatttaccatgcataagcaacgctttagtgagtcttgcttattcaatataggttctacaaaagtggatttggataaggaactagtgcaatgtcgagaaactagactaagggcgtgtttgga

SEQ ID NO: 37062 - DNA, 837 bp, Zea mays
  Clone ID: MRT4577_133803C.1
atgacaagggaagctggacaagaatctggatcctcagagcgcatgggaggaggttttgctgttgtgctaaagcctgatccttttaatggtaaaaacttcttgattcggaaagctaaaatgaaattgtggcttactgcaatgtcttgttttcatgccgttgagggcaagcctgccaacttacctcctgaggatgaggctaagtttaaggctaaagacaacctctttcgaggagcagtaattagcgcacttgatacaaaatttcagaaaagctatatcatccttcctacagggaaagagctgtgggatgcacttgttggaaagtttggagtaactgacgctgagctcattggtactctcgatgttgaggaaagggctagaacgaaggacaatggaaaaggtgtggagacctctactgctaatgtggtgcagaagagaaacttccgtaagttcaacaagaagaaaaaccagaacaaacaagagaatacaaataaacctgttcaaacaacacagtttaaaaagaagaacaacaacaataacaagggaaagggaggatgctttgtctgtggcagtgatcaacattgggctagagagtgccctcatcgcaagttcacacaggacaagaaatcagctaatgttgtaaccactgaaactggagatggaacatctgggtatggtcaggaggtctggcgccttgttaatgggaaatgggtcatgtgcttatgttcttggtgttggtacggtcattctgaagtttacttcgggaaagacggtgtctgtcggtaccctgaaactagggtaccccttgtaaggaaaatggaccccgggccttttggctaa

SEQ ID NO: 37063 - DNA, 1609 bp, Zea mays
  Clone ID: MRT4577_133804C.1
gttctcatgatccatattgttatggatatatttgagatcatgatttctatgattaattatcttttatatgtcatcatcataatgttaatttatggaattaaaatgatatggaaaatgcctataattttaacacaccaaaaacctaatgttaggcatttttctgtcagtggttttgctgctgtgctaaagcctgatccatttgatggtaaaaacttcttgatttggaaagctaaaatggtattgtggcttactgtaatgtcttgttttcatgccgctgagggcaagcctgtcaacttacctcctgaggatgaggctaagtttaaggctgaagacaacctctttcgaggagcagtaattagcgcacttgatacaaaattccagaaaagctatatcatccttcctacagggaaagagctgtggaatgcacttattggaagtttggagtaactgatgctggtagcgagctgtatctcatgtagcagctgtatgactacaagatggttgagaaccgatctgtagtggaacaggctcatgagtttcaggcactagctaagcaactcaaactttttccgtgtcctttgcctcacaagtttgtggctggcggtataatcgccaagttgccaccttcttggaaggactttgctacctctctcaaacataagagacaagagttcaatgtggaggagctcattggtactcttgatgttgaggaaagggctagaacaaaggacagtggaaaaggtgtggagacctctactgctaatgtggtgcagaagagaaacttccgcaagtttaacaagaagaaaaaccagaacaaacaagagaacacaaataaacctgttcaaacagcacagtttaaaaagaagaagaacaataacaagggaaagggaggatgctttgtttgtggcagtgatcaacattgggctagagagtgccctgatcgcaagttcacacatgacaagaaatcagctaatgttgtaaccactgaaactggagatgaaacatctgggtatggtaattctttaccatttgttctttcagtttgtaattcacctgagtggtggatggacagtggtgcaaatattcatgtgtgtgctgatgcctctatgttctcctcctaccaggtcgggaggtctggcgccttgttaatgggaaatgggtcgcatgctcatgttcttggtgttggtacggtcattctgaagtttacttcgggaaagacggtgccattgaagagcgtgcagcatgtgccctttatcaagaagaatctcgttagtgcttccatgctatgtcgagatggatacaaagttgttcttgagtcaaataaatgtgttatgtcgaaacatggtacttttgttggtaaaggatatgactgcggaggcttgttccgcttatcactgcatgatgtgtgtaataaaatggtgaattctgttataagggatgtgccctttatcactcattcatggatggcaaagttcttattatgtcgaagtgttgtaaactccgcggcttgcttctatggtctgttttggacatgtgcgttcattgtttcatcggtctgtgcttagggttgatgcgctaagcttcgcactgcctgacttgtggctgtaaa

SEQ ID NO: 37064 - DNA, 1544 bp, Zea mays
  Clone ID: MRT4577_133805C.1
acccacgcgtccgaaaagagtaagattagatttgctggacatgatgaacaagatgatggtggtgacagggaagatgctataattgagcagatggcacaaaatctggtgattgatggcaatggtgatggtgggggagtagtgttggaaaaacctatcctgaggagtaaggatttcagatcagatttttctagagggcatcatgtatcaagtcagagaataagattccagaggagaaacaggccatgtcgatatgacatagatcgatttacacctaacttcttgtcaatttttgaatctttggtgccctctgaagaggaaattgcaaaccagaaacagttgttaacatctctaagcagactgataaacacagaatggcctaattcaaaactatacctctatggatcatgtgccaattcttttggtttctcaaatagtgatattgatctttgtctctcgattgataacaaggaaatgagcaaggttgatattatattgaaattggcagatattttccaagctggaaatctccagaatattcagccattaactcgagcaagggtcccaatagtgaagcttatggatccaaaaacagggctttcctgtgatatatgcgtcaataatcttttagcagttgttaacacaaaacttttgcgagattatggacaaatagataaaaggttacagcagttggcattcattgtgaagcattgggctaaaactcgacgtgtaaatgaaacttatcaaggaacactttctagttatgcctatgtgattatgtgcattcacctcctacagctgcgaagaatactcccatgtctacaggaaatggaggccacttattatgtcaaggtggaagaaatcaactgtgcatactttgaccaagtggacaagctaaataattatggtgctcacaacagagatacagtatcaaggctgctctggtcctttttccattactgggcatatgagcacgattacacaagagatgtcatatcaattcgtactggaaggattatcagtaaggaacggaaggactggactagacgagttggaaatgacaggcatctcatatgcatcgaagatccgtttgagatctcccatgatctcggtcgcgtagttgacaagttcaccatcaaaatactcagggaggaattcgagcgagcagctaatatattacagttcgatccaaaccccagcgtaacactctttgagccctacgtgccccctccatcgccgagcctgttgcaagaagaaactgcgaatgctgcagaaattgaactatgatagcgtttggttcgtccccaggtattgtaataggaaatagaatcaactcaaggattttgatccttgcatcactggttgcagcctttggttggatgtgtaaatggtattgtttaccgttacagctgtttggtttctatctcagggatcacaagtcagttcccgaacttaaaaatcattcgtggtatgttctatttcaactcaagggatcacaagtcagctaccaaaaaaaaaaaaaaaactcgaaagagggggccgtgtac

SEQ ID NO: 37065 - DNA, 451 bp, Zea mays
  Clone ID: MRT4577_133806C.1
tctttcttaaaaaaaaaaaaaaaataatatataaaaatttattaaaaaaaaaaaaaaaaaaaagataaaaattaaaaaaataaaaaaaatattaataataaaataaacaattataatttaaataaaaaatgtcccgcccccttttaaaaatccaaccttacttccccttttttcctacataattatctttttattattctccacaaaataaaatttatttaccttctatttacaatctctatatttaaaaaaccttctcttttcccaacttattcccctttaataatattccccctttcaccatttattttaaaatttataaaatctttaacacttatcccttttaaaaattattcaccccataattataattttatcctcctcctttatctatccttttaatcacctatctatttttttttttattcctcatatttatacttttattttt

SEQ ID NO: 37066 - DNA, 318 bp, Zea mays
  Clone ID: MRT4577_133807C.1
accgaccgtcctgtatgaacaggcacaattctctgaactcatagtgccatacacgtgggtggctcacaagcagacgatgtgcttttgggtgagagctttattgctttatgaacctccttgacagcgactgcaaaaggatggttgcgaagaactgacccttcgtcgacaagaccgatatctactctattccctaggcagtgtaccgttgacttgctatcccaagaaaactgtgcgccctgtctcgtcacaggatgtcatcaacggttctcactgtaacaggacgccttacaccatacggacctgtctctttggcacata

SEQ ID NO: 37067 - DNA, 365 bp, Zea mays
  unsure (1)..(365): unsure at all n locations
  Clone ID: MRT4577_133808C.1
aaacccggggcgacccacgcgaccgcgaagaagcaancgaagaggcgcaacgcccgcaagcancggaagcaagacaagcggggcggaggganagcggccaagccaccaacaggaccacacaagacgagggagagccggccaccgaaccagagcaccacgaacaggcacaaggaagcccagacagacagcgagggaaagggcaacccgaagcaacggcaaggacgggaagaggggaaggacaggacagacaagacccacccggcgggggagaaggaggggaacgggaaccccaagaccaaagagaacaacaggcggcgggacgagaccaagggccgggaacgacaaacgcaaacagggaggaggga

SEQ ID NO: 37068 - DNA, 827 bp, Zea mays
  unsure (1)..(827): unsure at all n locations
  Clone ID: MRT4577_133809C.1
gtacatcgagatcgagagaggctcttacctgcgaggctgggagagagcagtcaggcggcggcggtggctcgaagcacagtcaggcggtggcggctagcgcgacgcccgcagccacctcacgttccctcgatcttcatcctattagcttttgccaccgtcacgccggtccaggccctgcctctgcctgaggccacgctagggcgccgccacccacctcaccccctttgcacacccaatctctctttcagattcagatccaggctgctcatcggtgtggatccccagccgaagcatgaacatcgatccaggcagacctcctctccgaattcagccactggggcatggctcccctgcggtttgaatctgggcgctcgtcaacagagcaaccagagaggtgagctctggctttggatgcgtggagggtaggggccagagccaccacggcagccacgagagcgacatggacctgccatgctcgtcaacgacttcctcgagagcggcgatggaggtggagactcgcgcagcagcagcgacggcgagcccgacggtcccgacctcacccacgcattgctgttcacaaccatggcttaccccccacatcgtgttcgtctgctaggcatgttggttaggtagctggctctgcttcagaatctctgatcagtacatgttggaggaacatctctgcaatcacatgtatagcagtcgctaccagnnatatattttgggtagcagctactccctctggtcctaaaatatttgtgtttctagagatttcaacaagtgactacatacggagcaaaatgagtggatatacactctaaaatatg

SEQ ID NO: 37069 - DNA, 804 bp, Zea mays
  Clone ID: MRT4577_13380C.1
gtttcacccttttccaacccaaagacagtactagcagagagggagctgtcccgaatccgtcggttaccacgactgccgccggcgatggctccctccgccgacgtcgccgcgcccgccccgacccctccgctggcgcccctcatcgccgcgcagctcaagttcctcctcaccaactccagtctccccatcaaggtggtgcagatctggtccggatgcagcagcggccgctacgccgatcgcttcaccctcggcatccccttctgcctcgactacgtctactgggatttcttgtataatgcgatgcaccccaaggtggcgccggacgtcatattcgggcagggcgacgaggggttccagccgctggtcgattatgacgagtccgggaatgggggcaagagctgcttggcacactgggattaccgcgaccccggtggcctcctctgcctcgtggaggagctccggttattatacattgagtaccaaaagaagctggttgagaaagtggatgatgcaagactgaagtttgaaataagcacagttcttgctaaggaggggattgaagtctccatggtatcatcaactggtaggtcagatgaggtgaaatttgctgtcccgcttctggatttagacctcaaaatgatggtgcctggatgtccttggaaacttccccaaaagatccatctgcaggccatatttccggttagcagtagttacctctctgttccttcagcaccaggactgaaactaacctcaactcctgatttgaagtcacttttctctgtggatggtgttaagctccctgca

SEQ ID NO: 37070 - DNA, 1023 bp, Zea mays
  Clone ID: MRT4577_133810C.1
ggtacttcttgagcacctgtcatcggtgtactcaagtatcattggtgttgtcctcgctgtattaggatgtgctggttgcgattttgctgcatgagacatctgattttttttgaatgatgtattcttgctcttgaaatccgaatgatgtttaatggaagcactgtttggtagtcatttattcgattggttctgtgatgtcttgattaaccctgtccttttgaggatttagattaatatgacatttgctgccttatcaccttcattttaacctattttggtgtttttttaagttgacctacagggtaagacaatttctcgatattgtattgattgagaaacctctaaatctgccctacccatactcaaccggctaaccaaatcagctttacccatactcaaccgactaaccaaatgagctagaggccctttcttctattttggtgttttatctatagtgtaaacatgaatctgacattgatattgaggatgatgataggctatagtgaatattgactagttgtagtgattatttagtaatatcctgcaacacatttttggttacgaaattgaacatgcattgggaagatgttttctaacttcagttatgtagaactggaaggcaagaactgatatacgagaaaaaaatgcagcctaactccagttgtgcaagctggttcttattagtatttgcaagatgaaccttatccggaagaaatccaagatagttatctgttgaatttggagtgggctggatttaccaatgagcaaacaaaaggcagaagtgcacccgccaagaattttaggaatggcagaatatgggcccctccagacatatattgcttggagcatttcttctttcatttgcatctgcttttatttttctttctatattttgtttcttcatgctatgtaaagtaaaattaactttgtttgatttgttactaagatgtataaaaaacttggaagtaataatgtcatatacattctggctgtaaatctatttgatatatgagtgcctattta

SEQ ID NO: 37071 - DNA, 386 bp, Zea mays
  Clone ID: MRT4577_133811C.1
ttttttttttttttttttttttttttttttttttttttttttttttttttttttttttttttttttttttttttttttttttttttttttatcacaaacagaaagaaaagggggggtcttcccccaagaggctttttcatccttgggggggccgccaactagggcttttttgggaccctttttatcaccaacactgggggggggatgaacgaggggttcattatcatccccacctttttcctcagttttttcaggcccagaagggtcagcaaaaaaacccgccccaaaggggaaggtagctcccattgccccaccaattttttgaaaaggataaggggggttccagtactttatcattggaaaagggcccccattttttaactcat

SEQ ID NO: 37072 - DNA, 128 bp, Zea mays
  Clone ID: MRT4577_133812C.1
ggaccggttcctgcaggccgaccagcttttctctatcgtgagtcctatcacagcctgccgttctcatggtctcacctcgctcctgcgtgatattgctatccggctccaacttccacaccataccaccc

SEQ ID NO: 37073 - DNA, 360 bp, Zea mays
  Clone ID: MRT4577_133813C.1
tcgatgttgcggccagccgagagtatccatcaagccctgttgcgtggagagtgatctcactacttccacggctccgcttcaacttcaagtataaaatctgcagtatagtaggggtagggggctcgtattccttcagggaacggcttccatagcgttgaagcgaggcgtgcccaattgggttgttcgagagctcctactgctgccctactacatgcatctacgtcgacctcccctctccctaaaacgttccgcctcctcccacccatactcaccccccctccttcaatagcacgcctctcgactactgatcttgaaccaccccccccacttttttttttttcccccccccccccccccccc

SEQ ID NO: 37074 - DNA, 212 bp, Zea mays
  Clone ID: MRT4577_133814C.1
ttttcagattatacataatgttggattgaacttatatacaatagataatccttcactgacggaagacaaccctatgaaaattattacttaacaccactaccggagtacaggttgtttaaatagaaggaagataaataatacttcaagttctaaaggttgaagggtagaacatttcagataacatgaatcgggacaaggcaagcgcctcgtcc

SEQ ID NO: 37075 - DNA, 534 bp, Zea mays
  Clone ID: MRT4577_133815C.1
gttgctgtcggagaaatgagatatagaggatgaaatcttttagaagagactgtaaaagccaaatatagaggatgaatatagaggacgttgctggagacagccttaagggtaccgaggaaaagacaaaagcaactgttgaatacttgaattcttcctccttgctaggttatacagaagagggaatcgaaatttaagcacccccaactccagccaattctcctcccagaaacgcacttgggacccatcatgtacttgaaaggtgcctttaatgatgaataggtccttaatcttcataaggccactccaactgtgagtggtgcaacacactatattggaggaacctctccaaggtgctgataggtagatatcacaaaatgttgaaggaacagcttcaacgtgctagtaggtacagccctaaaggctagtctgaatccacagacagcgagagctcaatccaaagctcaaagcaaagatctagtccaagatctaaagaagaacatcaagttccattcatatagtggtgcgacagcaacg

SEQ ID NO: 37076 - DNA, 334 bp, Zea mays
  unsure (1)..(334): unsure at all n locations
  Clone ID: MRT4577_133816C.1
ttcctaaccttttttcnttaacctttttttttttttttttntatggaatttttaaaaaatttttgtcgttttaaacccccccttttccctttcaaataaaaatggccattcaaggaatggctcacaccaaccccgccccccaaggggatgcgggacacaatattacccaaaaatcgcccctaaataacccaacaagctagctagccaggggctatcccacaacaaaaagtttctccagggggggacaccccccgcaacaacataggggcatggagcccgctttttaaagcccaacaaccccctaagttgctgggcaatttgccccccccgaacc

SEQ ID NO: 37077 - DNA, 197 bp, Zea mays
  Clone ID: MRT4577_133817C.1
ttagtacacattcatcacccggggctaacggtaccttttaatttaggatccacatacaaacaagcgagagaatatcccctgcgccaaggctcccccttgttcatttccttgcacattcattcccaaacaaataacaccatcacatgaaacttctccatccactatggcttggcgacaaccaaatcacttgttttcat

SEQ ID NO: 37078 - DNA, 795 bp, Zea mays
  Clone ID: MRT4577_133818C.1
caggccggccgggccgtgcatcacagaacccttcagccattaccaccaccgtttctttcgaaatcctctctctgtctctgcgtgcgtggcacacaagcgcacggctattaccagagagccagctccgccctgcttggttccattccaagaagcaattaagggggcaggaaacaaagactcaggctgcaatgggggaggacatggacgcggccggcgcgggctggctgtcgtggcgagcggcggcggtcgccgttctcgcttggctggcgctgcacgtggcggcgcgcgtggcggacgcgctgtggtggcggccccggcgcctggaggcgcacttcgcggcgcagggcgtgcgcgggccgccgtaccggttcctgctggggtccgtgaaggagatggtggggctcatggcggaggcctcgtccaagcccatgtcgccgccaacctcccacaacgcgctgccccgcgtgctcgccttctaccactactggcggaagatctacggaccgaacttcttgatctggttcgggccgacgccgcgcctgacggtggcggagccggagctggtgcgcgagatcttcctgacgcgcgcggaggcgttcgaccgctacgaggcgcacccggtggtgcgccagctcgagggcgacggcctcgtcagcctccacggcgacaagtgggcgctccaccgccgcgtcctcgccgacgccttctacccggacaacctcaaacggctggtgccccacgtcggccggtcggtgggggctctggcggagaagtggcgcgccatggcgtccgcct

SEQ ID NO: 37079 - DNA, 215 bp, Zea mays
  Clone ID: MRT4577_133819C.1
gccgaccgacccgtccgtttttttttcacataacctccgcactagattatcgtaggccatacgtagtggaacagggagtaccctcctttatcataacctgtacacaaggagtatacacaatctctctgaggctgttgatcgagaatggtattactccatgcactcttaaacatatctactcaggcatttggatatttgcatgaacggactacata

SEQ ID NO: 37080 - DNA, 1206 bp, Zea mays
  Clone ID: MRT4577_13381C.1
atgaccattgaacagatgttcctaatgcagacccaagcagtccaagcgattggtcagaccttagcagcgatgcagcaggtgcagcagcagccacccctgacccccacctcaacctcaggtgcaagtctagatgcacaagtgcctagagacaagcgggcagaattcatgaggggccatccccctgtctttgcccattctgctgatcccatggacgccgaagattggatgcgtaccatggaacaagatgtcaatactgatgccaagaggcagtaccatttcctgagaggattggttgacccccttcactaccagctgatgaaccacactttccctacctttcatcatttgatcgacagagcaataatgactgaaaggaagcgccgggagatggaagacaggaaaccaaccaaccagaacaaccaagcagctccagcgcaaggaggaggtcatgcatgtttccactgtggggaacaagaccattggacaaattattgcccaaagaaagttgctcaggaacaaccaattcccaatgccacagtcaggcagaatgcaatgcaacaaggaggcaacaaccgtgggcagcctcgtgcccagtatggaaaggtgaaccacatggaggccgacacactccaggagacctcaggagtggcactagtagcacccatgtatccacctatgagggttagttcaattggtgggagaacccaaacagatagatttttccctagtgcaagagttcaaataagggggatagagttccccgctgatctaatagttatgggtaaccaggaagtgaatatagatgaaatcctagggatgaattggataaccaaatatcaagccagtcttagctgtaacaagagaacggtgaagttagtatccttatcaggagaggaagtgttagtggagttggtcttgtctagaccaaggaaaggaagctgtcaccaagtcaccgcccatgttgaggaaattgaaccatcaaaagctatcaacgtagtatctatcacggaacctcccaaggtattaggcccacctacagatgtccttgtcctaaggacctcggacaaccatatagatgcacataatcacttgacaattttggtcctctgtatcaacatcataccgcccaagagcgcttcacccatcacgcagacattacatcacatcggagggaagaataagcggaagcggattacaataacttaa

SEQ ID NO: 37081 - DNA, 1271 bp, Zea mays
  Clone ID: MRT4577_133820C.1
tggacgcgtgggctccacgccccccttgtccaactacccctcccactatttcatttcatttcatccccccgatccaagaaaccggccaccgggccggagcgaacccttagaagcgaccttggcccgtgaggaagccaatcagccagagacagaacaatccatccaccatgaacagcctgttctcgagctcatggaagcgcgacggcggggacatcgagtccggcggcgtggagatgtctgcgccgccgggcgccgcggcgggcgcgagcctggacaggttcttcgaggacgtggagtccatcaaggacgagctccgcgacctggagcgcatccagcggtcgctccacgacgccaacgaggggggaaagtcgatgcacgacgcggcggccgtgcgcggcctccgcgcgcggatggacgcggacgtggccgcggcgatcaagaaggccaaggtggtgaagctgcgcctcgagtcgctggaccgcgccaacgccgccaaccggtccgtgcccgggtgcgggccgggctcctccaccgaccgcacccggacgtccgtcgtggccgggctgcgcaagaagctccgggactcgatggagtccttctcgtcgctgcggtcccgcgtcgcggccgagtaccgggacacggtggcgcggcggtacttcacggtcacgggggcgcagcccgacgaggcgaccctggacgcgctggcggagtccggggaaggggagcggttcctgcagcgcgccatcgcggagcagggccaggggcgcggggaggtgctgggcgtggtggcggagatccaggagcggcacggcgccgtggcggggctggagcgcagcctgctggagctgcagcaggtgttcaacgacatggccgtgctggtggccgcgcagggggagcagctggacgacatcgagggcaacgtcggccgcgccaggtccttcgtcgaccgcggacgcgagcagctgcaggtggcgcggaagcaccagaagagcacccgcaagtggacctgcatcgccatcctcatcctcctcgtcatcatcctcgtcatcgtcctccccatcgtgctcaagggcgtcaataagaactaggccgcctggcctgcgtaattcgttctagttttttttttcgtggcctttgtatcatacatacggttcgttgatacggtcgtcttgattatattttcttctattgcctcaaccttcgattacatggttttgtttataacacatgattcattttcttttgcaaaaaaaaaaaaaaaaaaaccgatt

SEQ ID NO: 37082 - DNA, 292 bp, Zea mays
  Clone ID: MRT4577_133821C.1
cgttggactattaactttttgtgaacgatgaggaccccccatgcacgagacgagggcatgttcacgccgagcagaccatcagcgaccaggaggaagcacctaacaaactagcccgtggccccaccacaatggcaggaaactgagactctggcttgaccgatccgaggctgcggaaactgcacccgcctccacggttcccggttcaatgcccttggtggggcaccggctctggccttgggtctctcctccttgagcgcctgactggggagtaccgcaaacaaaacaaaaaggg

SEQ ID NO: 37083 - DNA, 430 bp, Zea mays
  Clone ID: MRT4577_133822C.1
attattttattgggattttaggtcgttttatacctgtcaccgtgacatcgttaaactaaactgccttacccactaaatagcaagaagctgaaaaaaccttttttaattacatcataattaactaataaaaaaaatcatcttccagaaaatgacaccacactaccacaaccctaagaacaaacaaccagcccggaagaacggggtaactacagccacaaaaacggagctccaggccactatacgctaaaacccttatatccggaaattaaccacatccgaaacagccccaaccccatcaaccaaccccaatccaaagggggaaaaccaaatagcaagtgcgacacctacccgaatacctaaaaagccaggaaccggatggctatcgctaagctacacccctaacccggcccaccaacccccccctaccctc

SEQ ID NO: 37084 - DNA, 273 bp, Zea mays
  Clone ID: MRT4577_133823C.1
gccgcctcccgcatccccaccggcgcccggctgcacgcagggcggcggcgccctccaagcacagcgaacagaggctggacctcgccgaccacaccgggcccataccgggggacagccccgtgagcgcgggggggcgggaagcccccttctccgacaaccttggcgcgcatctcggcaacaaagccaccggcgagaacgccggaagggcacccaccgaggcgaaactgaacggggcgaccaaccgcttcaggccccataagcacaaacctcctc

SEQ ID NO: 37085 - DNA, 612 bp, Zea mays
  Clone ID: MRT4577_133824C.1
gcacgccctactatagggtaagctcggtgccacgcatgctgcagacgcgttacgtatcggatccagaattcgtgtatatttaagtgtattcactatataaaaaactagaaacatatccttctcccatccagactatactgtcggccctagagtttcactagatccaccgttttcgagttgaaaacgggtcacggacttagaagttttcacttcatcaccgccggttgggaatttcacccgaccccgaaggatgctgtttgctcaaattatagcacaaaaaaaataaaaggctagtaaaaaatattcgaatgtgaagaattgtgtgaaaatatatgcaggctggaatggaaataaaagtattagaaatgttgtaaagagaagggatataacggagttgctaaaaagaaaaaacatgcacaaaaaaatgtgcatgtcacatgtaaaattattctgcctttggtgctctaacaacagactcgaatttacctttatgcgaagcgttccaataaggcatattttttgataaaccacaacggcataaagaaaatgcccggtttgctgggaatgcattcccttgtgagtcgactaattccacgtcccctgtaacgcgaa

SEQ ID NO: 37086 - DNA, 118 bp, Zea mays
  Clone ID: MRT4577_133825C.1
acgacgcccaacgttaaactcacacaacttcgtttttttcgacgaccaaatcatccggggcgggcactttttccacatctacaacaacatttacctccacttcatgaaccacaacaca

SEQ ID NO: 37087 - DNA, 360 bp, Zea mays
  Clone ID: MRT4577_133826C.1
aaaacaaattaaagacccatgcgtacaggttatacaaacaacaggggtaccccacacaaaacatgggtccctcccagggggggggggttattcatgcctaaagaacattaccaccggaccaccggggggtacaaccagggacaaacggggaaataaattaaacaccaaggttccacaaacagagactggcctaataggaaagcgaacccccccaaagggaacagatccaactttccaatgggggcgggtggttaaactaaaaagggggggaacacaagctttttttttagttagctagacgtacgggacctggaagggccaactactgcgcgtgtggggctaggggaaaccacaaaccat

SEQ ID NO: 37088 - DNA, 427 bp, Zea mays
  Clone ID: MRT4577_133827C.1
gcctataaaagtggttcgtgatagccgattgtcattcagagttgaatcttacatataaattcagaaacaacaaacggaacacaaaattaaagaatttgtatatgtgtgttgtcaatgaacatcggccatatcttcacattggcgtagatcattgttgtggtggagatatcttgagatctaggccaacattgaccccgttgtaggcgatcggagcaaacatccacatatcatccgagctcaacagcttgatctggagctgcaagaacttgacgtattggactgcttcttcgagcatcgtgctaatatctaccttgattccatttgggacaagattctgcgacacatcgactagtcgttatcctaagcctttctgcttaaaaaaaactactgcgagttatttctgttgtcgatctctcaagcactgctt

SEQ ID NO: 37089 - DNA, 478 bp, Zea mays
  Clone ID: MRT4577_133828C.1
gccgacgcagaaaccaaccatactagacctattgcgaaccgtgttgcaactttcccctgctgacgttcccatacggcctcaggagtaccccccgctgctgccctccgcacgaatccacatacagtcaccaaccgagactgcgcccttcatcatgtcaatcgcgaccgcgaagcatgtgctagccctgactctggctctcgtgctcgcgctcccaaacaccacctaggagagcaaacctctctcggcgctacacccaaaccttactgaccccggcacatgtcagaacatatgataccccacccttgaaaacccctgtacccgggtgcacgtgaccttataccggaacaaccgacttacccgcctacatcttgaacaaccaaacttatctaggcaaatgatgcctgagcttgtgaaactgaaacatattcagtatccaaactttagtagaataacattcgaggaacaatccctgctgagc

SEQ ID NO: 37090 - DNA, 517 bp, Zea mays
  Clone ID: MRT4577_133829C.1
tattattattttttttttttttttttttttttttttttttttgcctatctttttttctgccagcaaaaagggcggagacatgattagggggaaacagggtaactgagaaaatgcacgaatgggggcacttaaaaacactggtccacaactggaaaaccagcttatttaccctaacaaagggggcatcccccaaatggcgccctaaactatttttcaacccaaagggggcataaaagggaagggacttggggggcgtcaccctcttctcaaaggggtacacaagttccgaggggaaaagaatcccacgggaacagtttttaaacacatccggggttttcagccatggtttggaagcttaaaatgataatatcttgaaaaaaaacatttgtgataaaaaaatgctcggcttttgaagaaaattatccggcggcgagaattccaggccacctgacattctgggcaaactatggacgttatttttcttcagacgcattgggtaacccggaaatttcggacc

SEQ ID NO: 37091 - DNA, 521 bp, Zea mays
  Clone ID: MRT4577_13382C.1
ctccgacctagctagtcatcactagtcactgttcgtccaccagagacaacaatggccatggagacgtgcttcagagcgtgggcgctgcacgcccccgctggcagcaaggacaggctcctcgtcggcaacctggtgctgccgtcgaagcgggcgctcgcgccgctgtccgcgggtcgagtcgccacgcgccggccgcggcacgtctgccaaaccaagaacacaatagactatactgtgacgtcgacacacatcagaacagaccaccagacagtgatgacctcgtaagactctgacgctgcggcgaccctacaacccgctacagagcaagttcttcgagacatacgcggctccgttcaccaagagaggtctgctgctcaagttcctgctgctgggcggaggctcacttctggcctacgtcaacgcgtcggcgtacaccaggacctcctgccgatcaagaacggacctcaggagccgtcgcacctagacccgcacggcaagatctaagctccgcttctccattt

SEQ ID NO: 37092 - DNA, 278 bp, Zea mays
  Clone ID: MRT4577_133830C.1
ttgtctaagcctgaattcagtctgctttaaacggcttccgcggaagaacatatttccatctcttgaattcgtacaacattaaacgtgtgttgggagtcgtatactgttagggtctgtaaacttgtgaactctcggcaaatgccttggtgcaattacgtaattttagccgctgagaagcggatggtaatgagacaagttgatatcaaacagatacatatttaaaagagcgtaccgctaatttagcagggcagtattattgtagtttgatatgtacggct

SEQ ID NO: 37093 - DNA, 387 bp, Zea mays
  Clone ID: MRT4577_133831C.1
tcacaaacgcgtctcccaccacacatattcgcctccctggtcaaccacatgcctctcgtctcatccccgccagcatctgagcagccctatccgaccatgacgggagaactcatagctcgggcatgagagaggcgatgtgacactgtgtgccatcaaagaaagagacggactaggaactccaacggctggcctcgcagaataccgcgcgggaagatcactcgcgttcctcacgagccgtgaagtacgaacgaccacgagagcaacggcacccctgtctacctcgccgatgccctcaaggacctcgacgctgacgacgccgcagcttgcagcgaacacatgtaggcataacaagaatacccgcatcccgcctagtcctatccaggtcgc

SEQ ID NO: 37094 - DNA, 444 bp, Zea mays
  unsure (1)..(444): unsure at all n locations
  Clone ID: MRT4577_133832C.1
ccccttgtttgggtttttttattttttttttttttttttcctttcttctttttttttttttttttttttttttttttttttttacaaccaatttctttcggagtaaatctccacccatgcatttgctacggaaaatcccgaaacagggaatctttttangcagaggggggtacaaaaacaccccctttttaaaaggcacattaataaaccgaccatgcacctcttaaacacacaacaaaaggatacaatttgccataaaaaacccccacacctttgttattaatgcctggagccctggactggtcctaacgccccccaatccacggaaacccccgcccgtcccttgggccaaccaatcatcggcaatgcctggtccaaaaaccgcggcggcggaagccccgcacctccccccgggaaaccccttcaccctccaaactttggccc

SEQ ID NO: 37095 - DNA, 282 bp, Zea mays
  Clone ID: MRT4577_133833C.1
attcttaaattttttaaacaacccaacacttcactccattggggagactttataaaaaggtggggctatcatacacaccataaatacaactcttaaccaaaacaatatccaccttagttttcaccaaattcaaatacattccaatttaatctcttttcttatttattaaaaaaaaaataatttattacctatcactacattatcaccacataattttttaccttctaatattcaaatattttttacctagattcctcctttaacataaacaatattcttttt

SEQ ID NO: 37096 - DNA, 691 bp, Zea mays
  Clone ID: MRT4577_133834C.1
gtccagctgggcattttgtgggaaatggtggagtgacagtgctggtcgtggtgcggtggtcgtacggcgcccagccactgctggcaaatcgcttcgattgtctcttttcatgagccgtgaaccatcagcgctgctgcctgctgggagagttctacgcctctacggggacaaaacgctgttttgttcactaaaatagatagagctacgaagatggcctggccaaccctcaaatgaaaccatagcctggcctaaaaccttctgatttcatttcaataatatagtccatggaaacaaatcgttaatgcaggcagcagcgccgccacgcggcacagtcgccgcatgggccatcgcgacggaatcacctcgtcacgtacgcgacgagctcctccaggtcctgcctaaacaacccgccctcggccacggcgccgggaacggcctccccgagcgccccggcccgccgccggatctcagccccttcctccgaggccatgaccctgtcaatagcgtcccggatgtcggccgcgggggtcacgtcatggggccgttcccacgggcgcaccaggacgccggcgcggaggtacttgcacacgagctcggcgtcccagggctggtcgctgtgcatgggccaccccaggatgggcttcccgtggctgatgctctccacggtggagttccagccgcagtggctcat

SEQ ID NO: 37097 - DNA, 298 bp, Zea mays
  Clone ID: MRT4577_133835C.1
agcggaaatggggggtccacccggaagaatgatttaatgccccccggtgccctatgtacaaaaccccccgggccattttcaaaatgcatagcgaaaatgcggggggcgagggccatttccttcaccagtcactcaaaagcgagagcccatcgggaagctaacccatcccccctaatagctgatccccccccccccggggctcgagggcaacatttggcaacatcccccgtggcaggggggtaagtccaccaacaacacatccctttgaagttcttccccaacaaccggtgttgggccc

SEQ ID NO: 37098 - DNA, 227 bp, Zea mays
  Clone ID: MRT4577_133836C.1
cccacgcgtccgagaggaagggctcgtcgtcgctgagggacctcgcgaggcgcggggcgggcagggagaagaaggctaagaaaatgcggatggaggacgacgggttggggcgggagactgggatggtgagggctaggcggggatcaggaggaagggactcaggcggtagggatgaccaggatgatgattagagggagatccattagctctgggataccattgctggt

SEQ ID NO: 37099 - DNA, 1728 bp, Zea mays
  Clone ID: MRT4577_133837C.1
ttgggtacctcgaggccggccgggccacgtcacatgtacatttatttcctgctggaagactgcttctctctccctcctgtagaaactagaaaccaacaacaatggcagatgccatcatctccgccatcctcggtgatgtggtcagtagagcggtttctcttctcattgggcgtttcagtaacaaccaggagagcgctgaggacaagctgcaaaggatgaagcgtctggtcatcagaatccacagcgtggtagaggaagcaaaggggcggcagatctcaaaccacggcaccctccagtggctctccgatctcatcgacggcgactaccagggctgctatttgctcgactccgtcgggtgcggaggtgaagctgacagagatgacgatggtaaggcaatcccccaagtttcaaccttgtccttgtttaatccagcaaagcgcgtgagacttgcagcatcgtcccggcgccatgacgatacgggcggtgttgatgagatcgagagggtgctccagagactgcaggtcatgtctggtgatctgagggagttcatcctgctcttgcaaggctgcaagcccatccgccgccctctagccactagcatcttccgggacgggcagatgttcggccgacatgtcgagaaagaaaggatcatcaacttcctgctgcacgaggacgactatcggcggaccacggagctgggtgtgctgcctattgttggtgacagcggagtcgggaagacaaccctggtgcaatacgcctgcgacgacgctagagtgcgcgcccacttcccagtgatcatgctgtacagtttcacatctacctacgatgtcaaaaacaaccaaggaatatctccaagcgacgacccactggagttgatcaagagtagtgacgacagtttttgggacagacacaggaggtgcctgatgatatttgaggacgtggacatgtgcaggaagcagatgctggaggagttcttgcagaaccaccgacgcagcgaggcggcgggggtagtcaagatgatcgtcaccacgaacaaccggcgtgtcgcgaacgacgtcgggacggtggagccgatggtgctaaggccgttgccgtgcccagagttctggttcttcttcaaggcccacgcgttcgccggcagagacgtcgaggagaacccgaggctcatctctgcggggaaagcgatagcgaggaagctgaacggctcattcttcggcgccaagatcatcggagggctgctcagggatcacccggatccaagggtctggtgcaaggtcctgaggagcagcattggagggatgtctccccttggtgacggcgtcagttacatctcggacttggctgaaaacttgctgcccggccatgtgaacatgtggacggtgacgcgctctaagcccgacctttcctcctgagacagcgacacagcagttggctatgttcaaagatctgcacggcgctgttcctcatgacagcgggttggcctgctgggcagacgacgcccggtttgggagtgtgttgttgtgcaagtcagtactgccgttctttaaccattactatattgctcgttgctcttgcacttgcaccgtagctgcagtgaactcttgccgatcagtgttgatctatgtataactagaatgttggatatgcttgtacctatacctaccaaccatggaatacacccaagttttttaccctctatggttctatcagccgaattttttgttttag

SEQ ID NO: 37100 - DNA, 1143 bp, Zea mays
  Clone ID: MRT4577_133838C.1
cattgggacctcggcccgccgcgcgctggggccggccggccgggccgggatcaacaacagccctacaacttactgcttgctctagctagctagctgctcccggcccatatccactacacaagtaggctagcagcagcagcagcaatggcctcggtgacgaggttcccggccgtggccctcgtcctgctgctcgccgccagcgccttcctggccagcgaggtggcggcgtgcggcggctgcccgaaaccaactcctcctccatcgccaccaccgccgtcgcccaccagcacgccgtgccctccgccgccgtccagctccggcggcaagtgccccaagaacgcgctgaaactgggcgtgtgcgccaacgtgctgggcctcgtcaaggtgtccatcggcaaggtgcccaccgactcgtgctgcccactgctggacgggctcgccgacctggaggccgccgtctgcctctgcaccgcgctcaaggccaacgtgctcggcgtcaacctcgacgtccccgtcaagctcaccctgctcctcaactactgcgggaagagcgtccctcagggcttcctgtgcgcctaatatatatactagtggctagttcgtcactagcttcagttgccatatgcatatttgtgattcttcttctttccttctagttcaccactgtatgtacgtgcctcctccggatgttttctttggtattgctttctcttctactcttctcctaacttgcttgcattatacattgcgtgagcctgataatatataaatcattgggtgcaaaaaaaaaagcagaaacgacatatcgatccggtgcacacgagtctttggtgtacatatgctgcatatgaactaacaaaatttataaaaaaaaattcttaaaaaacatgcatattctttctatactaagcctattatatataaaaattcaagttcaaactcgttatgttttagttgtaataaaaaagagaacgttttaatttaaacttgtcaaacattttatctttttatttattacgtgtttaaagtataacaaatttgaacttaaagtattgtatataattatagtaagatgaaaaaatatatgtatgcatttttcaattttttttgtaaaatttattagttcacgtgcacatatatata

SEQ ID NO: 37101 - DNA, 689 bp, Zea mays
  Clone ID: MRT4577_13383C.1
gacgtaagcctggacccccaaaaacggccccccctttttttttttttttttacgttacaggctgttctatatcgcgagctgcagccctttttttttttggaatttctcgtatccaccgtaggatccgaaaaccgacttgatttactgccgtagcacacacgtacacattgctgcgacaagcagaagcacatcacaggtgcacaacacacgctaatccgaaccttttctttttggcggtttcgctgcacacacctttgccacgccgcggccggcggcgagcaagcaaccagactgggtggaaagtggaaagggaacagaaggaaggttcgggaggaagaaattacatcgagtagattggtcttcgatcctccggacatctcgcttgagaaaactgtacactcgctcgcggacgcaaacacgatgcttgctagtatttacacgctcacgccggctggccggcccggccgcgcaggctcgtctcgacgaagaagagaaggattcttggcacgcaccaccaggggggggggcgtcattccgcggcaacgactgccgctggccgcgtgcggaggctcgggctccgcggctgccgcagcatctcgatcagcgactccgccttggttttgagcttggggcgggcggaagaggactgggagagggcgacgaggggcgggatggcgccctcgcgggcg

SEQ ID NO: 37102 - DNA, 508 bp, Zea mays
  unsure (1)..(508): unsure at all n locations
  Clone ID: MRT4577_133840C.1
cacgattgatcatctacaaccacgaagacccgcaaaatacgagagggcactataaaccaagccgggcgggcctaaaggagnacggacagccagcgcagcgcgccaccgtccacaggccatgcgccaaaccgccaccagcagagcgcagccacaccggggatgggacagaccggaaccccggacgggccagctactgccgcacgaccaacctggcatggacggacctcagaaacagcccgccacagaagagcacaacaccggcggcatcctgcatcgctccggcaggtccagctccagcacgtcggaggacgacggcatgggcggaaggaggaagaagggaatcacggagaagatcaaagagaagctgcccggaggccacaaggacgaccagcacgccacggcgactaccggcggcgcctacggtcagcagggacacaccggcagcgcctacgggcagtaagaacacaccggcagcgcctacgccaccggcaccgagggcaccggccag

SEQ ID NO: 37103 - DNA, 123 bp, Zea mays
  Clone ID: MRT4577_133841C.1
gctccgagaataaaattcagaaatcctactgcagtacgcactgcttgctggcagaggctggccgcgcatccgtcagctccttcacgacggcagcatggagggcctttggctacctccctggcc

SEQ ID NO: 37104 - DNA, 251 bp, Zea mays
  Clone ID: MRT4577_133842C.1
gtgagagaaaccactgatctgacctgctgttgttcatctgaccacatgcgttcattgaggcggacgattacctggacccgacggcgcccaaaaccttccatggaaactgcctcttacctcaaaccaactgccaaatactatgtattccacccatatttgggcacaacacagcccataggtcccataacaccgcattttcacagttcaagccagaggagattaccaacatcattaaagacttctactagcct

SEQ ID NO: 37105 - DNA, 1357 bp, Zea mays
  Clone ID: MRT4577_133843C.1
cattttttaaccataaatacagcaggggaaacccccactgtagggttttttttattaaagggaaatgtacttattcagcggcatatggatgattgcttctctaaagaaaacttagagctttgataatgattgccaagaacttacttgcatttatgtttcttatggttcacaggaactggagcgaaagtatcacaaaattgtgttttgcttcatactcctttggaatcccatgatatacaagcgtgcttgagcaaaaatggtttcaatgggaataggatcagcttgtgggtactgcagggattacctctgtccacaaccacaagtttggaacatctcttgcttctcataagcaatctagcaatgaaaggaagtatcgtcataggagagctgccccattttacagactgtacagcaccaatggacatgggcttggaacaggacaaactagaaaagcttttctttactcatggctttcgagtcagctttgtgcaatatgatactgttgcagaggatattggcttagatctagctattacattggaacaatgtggcacaatgctttttgttgcagaacagctgcggttttcagatgcacagatggaaagcttccggattcattttggaagaatagaggaaggcgcggacgaagaaggattcgaggaactctagtcagttctatgacgaccattgatgtaactaaggtttgatcgcggtttgggctagaatccctgccagtttttattgttggaacgtagaacaatcgcctatcgtttatttttcatttagcttgttctgtaacgtttttttttggccttttgtttatgttggagcaaatgggtgaccgaactgaacatacgcatggtgctttactgcttattgtatttgtattcattgactacaattgtttttgaagatgatctgagaagattttgggatcatagccctgatttcgaattcctttgtcagaatgtttcctggtagagtcagttagcgaagtccgactgatttctggtagacaccatgaaatctaaattcaaatatttccaaaaaaaatacgacttctgtctagaactgcctgtaattttttctttcaagagccagacgaaaaggtacggggttctaccttttgatggcctaggtttagtttggccatcatttatgtatgaaatatattaccaacagtacatgagtaatcttgcataaaaaacacgtacatgtaaataaatcattgaggtccactgtgtgttgagtttgaagcgatttagaccgtaagaggaaacggtacaaatactaaaagttttgtcaaaaacccactccacctgcagcttctttaggttgtggctgcggctacagttgc

SEQ ID NO: 37106 - DNA, 666 bp, Zea mays
  Clone ID: MRT4577_133844C.1
attccgcgcgcgccgcctcctcaccgcggcctcagcttcctcaatcctctttggcgttcgtcgatctttgttcgatttctttctcgctgcgtagtttttctcgatttgatgttttttccgttgtacggttgtgcaagatcagcttcttgtctggatctcgttacccacggtcccagccaatcggcaaatcgtcctgccatcttgctagatcgaacaccaagccggctttcaactcacctggatctgattactcgatgattttccgggccctttccgtcggtacagtgcgtaaatttccgccatattttctcctttctggtgtgtgtggaagaaaagcaaactcactctgtcccaaagcttttccgtgttttgaggcaatttcttcgtttgcgagatggatttaatccgaacatctcgtccgcgagggaggtgctcctgtgatctcgtggagttgttttggagacattccatgcgcgaatcagcaatttttctctagtgttcatctcgttctttcgtgtgaagagaatttggatttggttggctggtgatgattcaggtccgaaaggatcttagcggatttcggtgaggcggattcgtccgccgctgatcgattatgttgttacacacactgaagcctcgacctttccatcatcttctgtcgatttt

SEQ ID NO: 37107 - DNA, 714 bp, Zea mays
  Clone ID: MRT4577_133845C.1
gccgggaaaaaaaaaaaaaaaaaaagcgccgcctccaggcgtccccgcagaccgcaattctgaaacaaaaacctcgcttcgtgtgcttgcttccagctctcgccgccgccctccgcagcgccgccgcctctccttcccgggagctcgtttcacacagagaatctcagatcttcggtccatcctccacgtgggactccgttcaagtattctgccattgtgcgccagcgtcgcaggaaggattttgagggattgcttggggaattcctccgagcgagctatataaagagcggagtgcgttctttctcaaattaaatcccgtgcaattatatcttgccatggttggttgctccacaaggaaatgtcacattttgtggacataagatgctgcggatgtggtatttggcttgccccggtgatcataaacgcgtctgcgcgctctttccggataagagcacggtctgtctctttggattatcccagtaggactgagcagaagaatgagactaatctagtggtggtacgaccagagcgaaggctgcgggatgattttgtcgatgcaggtgcagaccatggaagtggcagagcaactgcagatttcaagaaggcagttccatccttcgatgctaatctgagaaacctgttggatgagcaactaaaaccaggaaggccccttggatcataactcgggccaggtggcaaacagggcatgctttt

SEQ ID NO: 37108 - DNA, 437 bp, Zea mays
  Clone ID: MRT4577_133846C.1
gttatgtattatggctatatccatatccttccttaatgtaatgagcctatcctctatcctgtattttctgtttgcattccaatttacccaaacttatatcagactagatgactatttagaggactcttgcaactagataaaattctatcatggtcagcaaagatgtttttcttacttatgtttgctctgttacgtaaccatctcagattcattaagaaaaactaactaaataaatggaaaaacaaaattgatagaagtgcttttattattttcctcaaatccaaaaaatttctcttttttttatacataggtcgccgatttggcattggaaaaagggatgcttgcccttctagtaaatacgtcaaaatattctatcgatattagcgtttcatttaagacaaattttacactagccatcttccgtgtaaagcattttt

SEQ ID NO: 37109 - DNA, 540 bp, Zea mays
  Clone ID: MRT4577_133847C.1
aattcggcacgaggccgcatccggctgctgcccctgagcctgcccccaccccctcggcgcccccgccggagcgccgcctctacccttcgatcccggttccacgatgcagccgccgatggggagcgagaggaggacgccgcccggccgccctgtttcagccttcgtgccgggcgccgctgtcccgcctccaccgtttgccgccggtggcccgttcgctccgccgccgcggcagggagtgccgcctcctcagtctggtgctgcggcgcctgctttcggggctgcaccacccgccgcaatggggggtgggttcaggggtccaccgccgtcgcagggcccctacggtgcgggcacactgccccacggcccttttgcttccgcgccaccgcctcagggctctttcacctccgcgccaccgtctcagggctcctttgcctccgctccaccgtcccagagtccctttacttcccctccaccgtctcagggccccttcgctgctggaccaccgcctacgggcccttttgctgctacaccagcaccttt

SEQ ID NO: 37110 - DNA, 283 bp, Zea mays
  Clone ID: MRT4577_133848C.1
acattcttccccgagtcgccggcgtctgctccgggctgctgttctgcgcctccacaaggctttggcctctgttgtaagttttaagcttcacctgcagccatgggtaaggagaagtaccacatcaacattgtggttattggccatgtagactctggcggtgaaccaccaccgggcacctgatctacaagcttgtaggtgttgaccagcgtgtgattgagaggtggcttaaggaagaccttgaaataaacaaacgggagcttgtgagcacttgtgggcttgtcag

SEQ ID NO: 37111 - DNA, 268 bp, Zea mays
  Clone ID: MRT4577_133849C.1
gggcatatgtcatacttctggaatattgtatctgcttatgatttaatagaagtaggatcactaggctacttatcctcaataggtcaataatgttcttggctgggctgggggtaaacgaccatgttcaaattgttaattcatttttaaggcagcatactttgggtctgcattttaggtgctgctattaatgagttttgaccctaagttctgatagaagccatttgctgatgtattctcagcttcatgaatggatgttaaaaatgccact

SEQ ID NO: 37112 - DNA, 285 bp, Zea mays
  Clone ID: MRT4577_13384C.1
caatcctcttcaccgagttctcctcaaccaaattcaaggtcacagcggcgaacctctcggctatcatgtctggccgcggcaagggcgggaagggtctgggcaagggcggcgccaagcgccaccgcaaggtgctgcgcgacaacatccaggcatcacaagccggcgattccagttggcgagagggcgcgtcacgcatctccggtcatctacagaaccgggcgtccagactcctcgaacgtcatcgcgagcgtactaacgacagccgcgcagctgcacgcaggagtg

SEQ ID NO: 37113 - DNA, 225 bp, Zea mays
  Clone ID: MRT4577_133850C.1
tttgctcatcatcttcccatgatattgattccttatgtagcagcagtaaacaacacatcataacatcggaccaaaagaatcttgctagagacataaaaaaaataaaaaggggggacggacaacaaaaagaatatttgttatctaagaagagagcgtgacaacggagacaatagatgcaccaacctatgtggcctggggaacggggcacggcggccgggtcacgga

SEQ ID NO: 37114 - DNA, 333 bp, Zea mays
  Clone ID: MRT4577_133851C.1
gggggccccaacgaaaaaccatgcttgttattaccccccgaaggctcaggggggcggccaatatatttttggatccgccactagcatcgaggccattagccctagcgggcaggaccccacctcgtataacaccggggagggaaggggatctgcatctattttctattcaaaaaaagcaagcgaagcctaccccgaccaaaaaaccaagggacctcctggggcagctattcttttctttcttaatgggggaggggaccccctccgtttttttttagttgacgaagaataatggggccttggactatacaccctctgccggacccaaaagagggg

SEQ ID NO: 37115 - DNA, 443 bp, Zea mays
  Clone ID: MRT4577_133852C.1
ttccggtggctccaccactagcaacccgtgcagcgagcccaccccgaccactgccatgtcgaggcgcggcgactgggtctacgagaacaacggcgggacctgcgtggccatcgccggcgccgattactgtgtcgtcgcggcggacacccgcctctctgtcggatacagcatcctcacgcgcgaccactctaagatctgcgacctgtgagtccctgaacccgatctcgtgcttcgatctgtccatctgggctttagggtttgtggattgggaggcacgagtgaattttggtgtggcgtgggctaaaatatgggtgacaaggctggattcgtagcaggatttggtgctgccactggttcttttagctagggtttggtgcgtggaggattgtgtcgaaaattatgggggaaatacctttacattctatatggtttatacgtttttc

SEQ ID NO: 37116 - DNA, 358 bp, Zea mays
  Clone ID: MRT4577_133853C.1
ggtcctctttaaagttaaggtttccccggggctcggggctttctttttccagttttgcgttcccttccacctcgtggggggccccggttcccatttccccttattgggaaaggatttacgtgggcctacttgctgtctttttaaaacgtccggcttgggaaaaccggggtgttacccaatttatccgctttggtgccctttcccttttgtcgagttggcttattggcgaaaaggcctggccagatcgactttctcaatatttttcccgcttaaatgttgaagggaaattgcatctgttaaacttttggcaaaattccgggaaatttttttaaaaaccgccccttttttttttcccata

SEQ ID NO: 37117 - DNA, 172 bp, Zea mays
  Clone ID: MRT4577_133854C.1
ctcattcgttcggcacctcgaggagccgtcgagcatccttacatctacatcaggatcgataacgtcaccatcaatgaggcgcgggcttagtcactggctctatcccgacgcacagctgccgcgctcgaggagcgaatgtgctagtgctgggaacagttacgcggttgctcga

SEQ ID NO: 37118 - DNA, 243 bp, Zea mays
  Clone ID: MRT4577_133855C.1
cccacgcgtccgcccacgcgtacgaggacgcgtaggcggacgcttttgaagaggcgtctaactgtcagaatattatggcttgctgattaccatagatatatataaatgtactgaacatatggatttattgaaatcaggttaatgattaatgaacatcaggatcatttaatacatgaattagctgactaatcattagatatgtaaattgagatattatgaggaagttagtataacacatgatag

SEQ ID NO: 37119 - DNA, 430 bp, Zea mays
  Clone ID: MRT4577_133856C.1
tttacgcgtgggctagatcgcgagcggccgcccggttttttttattttttttttgtttttttttttttacaaaaaggcactcccactcccgttcctttttgcagtcatgagcttttctcattatacaatgatacagacctttgcaaccgagtaaaatataagagaaatgcttggaagacaggaatttgtcgtggagaaacaactcatttgagcagaaatcagaaaaataaaattcacggtgcaaacaatgaggcgctaattgaagaggggaccccattcatgagggtcctctgccttttgcccttctgccaacaacgggtacttccagttatacttctccagcttctccgcctccgttcgaccctcgacgattcctatcctaagcttcgccaccttgctgatgacggcggccaccgtgatgtcgaacgca

SEQ ID NO: 37120 - DNA, 242 bp, Zea mays
  Clone ID: MRT4577_133857C.1
tacaggcgtgagcacagttgggagttttccttaaaaggcggttcgtttttctctgtattcttctttctttcaaggcatcgctacatagatacagcaaaaacattccaagctacctcaaaaacagctaccgacgtacaccctttcgacatctaagaccaaaatcatatatgcttactactagctattcctgtacttgattctgtctataatgatacctgataaacatgcaccaaaaccaacta

SEQ ID NO: 37121 - DNA, 158 bp, Zea mays
  Clone ID: MRT4577_133858C.1
gctcggaattcgcgttcgaggatctataacactcgtaagtacggatatataataaattagcagacgaggattttttaatatacagcactgtttgccccacagtgatgcaggagaaggcaaggaatactcgccggtctggcacaggaaacggacagcaa

SEQ ID NO: 37122 - DNA, 357 bp, Zea mays
  Clone ID: MRT4577_133859C.1
cattacttcataacaaccaaactgcacttttttaaacaacttgcaaacgctttgaatccccagacgtgctggtataatcggtacgctgccgacacaaagatctatcttccagccaacgaacgcgagcgatctataaaggagtataatcatcacgacgacagacagcatccgcaatcatccagaccttctaccacgacattcttccacagaaactgcaccgatatacttctttgcgtgtcatattaaatattaagtatgggaggctcactttcgcgaatgtggtctctgctctgggccaaaaaggagattcggattttgattttaggtcttgataacgccggaaaaacaacgcttttg

SEQ ID NO: 37123 - DNA, 272 bp, Zea mays
  Clone ID: MRT4577_13385C.1
accgctcgaggggatggtgtgaggacgggaagggagcaaagggaaagcagccaacgaccagagagacacggaggctgagagagagagagagagagatttgggaatcgagaaagcaacgaagaagaagaagatggagccacacgaagcgtgcacctcgtcgctgcggcagtgcaggatttgccacgacgaggaggacgcgcggcgctccgccatggtatcgccctgcgcctgttccggatccctcaagtacgctcacaagggatgcgtgcaga

SEQ ID NO: 37124 - DNA, 217 bp, Zea mays
  Clone ID: MRT4577_133860C.1
aaaaacaaccccccggcttccaaataatggcattccacccccaaaggccggcggggaaacccccaaacccaaagagggctaaaaaaccccggaaccggttccaccaaaccattaacccggaaaattccgaggcgccccaaaaccgagggccgggcgggctccaacccgcctgggacggacccccgtccccggtcccccggggggcccctcccgcccc

SEQ ID NO: 37125 - DNA, 233 bp, Zea mays
  Clone ID: MRT4577_133861C.1
gcacgagcaaagcggcagtccttgtccttttgctctctctgcccctcctgctaatcacaaatcgtctccttgggaaacaccgatgcgagcactgaagtcaggtggcaggcaccggcatgacactgaccagccgaacactgatgagtggcaagttgggggatgaggagtgaggatatcagccgttgcggtgaaggtcgtgggaaatgagcctcacttagtcacttagaagggtg

SEQ ID NO: 37126 - DNA, 504 bp, Zea mays
  Clone ID: MRT4577_133862C.1
ggccgctttttttttttttttttctttgggggttggggtgtttttttttttttttttttttgggggtttttttttttttttttttttttttttttttttttttttacccccccgcgggatgggtctccaatgggattgacaaaagtcccacctgccgaaaattgccaacatctctttaacatagggaacgatggccccctggttaaacccccaaaaatcatcggggccttttgcttcaaatgcttaccgcaaaaaaagggaccccattctctttttggcatccaaatattagttcttggatttaaagggccctttcccaaaaccaattggggggaattgttttgcaaattcccctacatcatgggaaaactttgcaatcccaacttgggtgccttcaaattgcaaaggggcaacaaaatccctcaactttgttccccccgtcggtgcaaccttaattttcaaagccaaattcactgctggatcgaaaaaatcaccaactttagc

SEQ ID NO: 37127 - DNA, 249 bp, Zea mays
  Clone ID: MRT4577_133863C.1
tcgaaaaaaataaatgaaaaatataaaaaatatttaagaaacactaagatattaaataaagggggtactacaatgtttatgtggcgatatcaagtactcttacatgcgaatgtataactttccaaaggagtatagtaaattaaggtaactggccagatcattacaaggtcctgattggcaaaacctatacctatctgatgttaatcagattaaagaaagatcgaatttccccagcttgcagtatatcca

SEQ ID NO: 37128 - DNA, 230 bp, Zea mays
  Clone ID: MRT4577_133864C.1
gccaccgtcgcgaccgtatcggaccggggatcacttatcagcatactcggcttgaggcacccatacgtaccctagatgttatctcattaccttgtaacccctgaatcacttgggtagtcgctatgctttacatggttttgggaaatcatttatcacctctatgttccattcttgtatttattctgttgagttcatgttgttatcataatgttaattggaacatatagctt

SEQ ID NO: 37129 - DNA, 226 bp, Zea mays
  Clone ID: MRT4577_133865C.1
ggggaatggaatgggattgtaatgttcaaatcagtcaacaacagtcagttaacgctgaatattggagggacaataataaagagagattggaataataatcactattaatgaattgattagaaatggatagtggtaatagcattatcaacgagcagaatagaataaattgcacaacgcatgggggttcaaaacaaatggattccattggaatgggaaggggacacca

SEQ ID NO: 37130 - DNA, 724 bp, Zea mays
  unsure (1)..(724): unsure at all n locations
  Clone ID: MRT4577_133866C.1
gccggccggttcgggtgcaaagctttatagacgcacccaatcttattgatgcgtttttaagatatcttgaactaagaaaagttgctccagaatatgccgacgatatcgcaaaggctcgtgccatttgtgctcaagccaaggttgagttacctaaatgtaaaatgcttactgttgacatgcctggtaaatttaatcaagcttgctcaatatattttggtgacatcccaacaacaatggacacttcttggatgagtgaagcaaccatgaaaacccaaaaaatgtttagctccttttttgaagaaacggtggggatgacaagagaagaagccaaacgtatagttcaatcacagatcaaggataccacaaatacaaaactgaatcatactttgaattgggtgcctattaaagtaacagatataccacctatcccttctaatgcagatccagagtctttttttaaagtaacttttaccaactatgaaaatgatcaagacaaatatgacattgtatttgagaggaagattatcgataatttgatattgggaatgacagctcatgcgactctttgtanactgagtaatggagattggtatcttgaagaagctacacgtattatgcccagcttttttatggaagacgactgtctccatgaagaaaagatatgatattaatannaaaaaaggataatgaaatgatatacganaaaaaaaaaaaaaaaggcccc

SEQ ID NO: 37131 - DNA, 204 bp, Zea mays
  Clone ID: MRT4577_133867C.1
ggtgatacttggtgcctatgccattgtaaggaatgatgtacgaatacgtggagtgagtggcgtgactgactagtccctaaggaaggaggatggctggtatattgggtagggcgtgtggggatagcaccagcgtgcaggatcacatccttgtccagactatggccaccctatcctgatccgtttatggttcttttgggaggaaca

SEQ ID NO: 37132 - DNA, 384 bp, Zea mays
  Clone ID: MRT4577_133868C.1
gccggccgggttccggccaaggaaattcacaaagcgatactatctagtccctaccaaagcatacttcctgaaacactcttgcaatccactgagttctgtttgttgagacgcatagagctggagtcgacaatgtcgctcgccggcgcgctcacggcgctcggcgtcggcttgcacggctccatgaggctgtgcagggccaagaggtggctcaagttcgaaggccagcattgagaacaggggggtcatgctgctgcacctgcacacacggtttgaatcctaagtttgaagattgaactatcacgacgcaggcagaccaatcgatacgaaaaaaaacaggatgttgcgtcctatatttctgaaaaaaaaaaaaaaaaaaggccccta

SEQ ID NO: 37133 - DNA, 235 bp, Zea mays
  Clone ID: MRT4577_133869C.1
ctatattttggaacaatacttttttctttacattccaatagataattcaggtgattgctcacactgacactgccacctatggtgatgcagagaacattatctacacaatcatcgtcggtgaatgactgaactagctagctagccaggggctattctacagcacattgtttcttcagtgggggacaccaccggcatctgcgtagcgggcatggaatctgctgctgcaggccacaca

SEQ ID NO: 37134 - DNA, 321 bp, Zea mays
  Clone ID: MRT4577_13386C.1
gtctgttttttttttttttttttttttttttttttttttttttttttttttttttttttttttttttttttttttttaaaaaaatttgctaatttttttcctggaaaaaaactcggtgtataaaaaactttaaaactatttaattaaaaaactaattaaaacccaatttaaccatgaacaaactttgttaaattattacagtctacaaatacttattcaggcaaaaaactttgaggttggccctactgttgggccctacaaaattgacctttttggaaactcccaattccaacaggattaaacaaaaccagttaatgcttt

SEQ ID NO: 37135 - DNA, 842 bp, Zea mays
  unsure (1)..(842): unsure at all n locations
  Clone ID: MRT4577_133870C.1
ccggcgggttgtgtgatggaattacgaaaaaatcttgattcgattttgcaatctgggctaaagcggatggcaaggttacatgtacatttctcaagtggcttaccatcagacggagaagtaatcagtggtataaggcagaatgtaaacatcttgatacatctggatgttagtaaagcacttaaagatgggatgaagctttatatttcagacaacaaagtgatcttgacagaaggttttggttttgatggcgttgtccctgtgaaatactttgaaagaatcgaaacatggccaggacgagctccaataccgttccaaagataacaggccatgtttcagcattgctagttcgtacgtactgaaaaatgatttgtcatgatgtatcccggagaaccattttttttggtaattcacatacactattttggggggttggcttttttttggggggggggagtcactttgattgtgttgggacctctcagatattcgtttgatgatttttgcatactctgtgaaaagccgtggttcttcgtgacctttttttggatttttgtgtgtaacgaaaccgaaagacgagcgagttcttttcttcgtgcttgtcaaccgtatatcctaattatctgaatgaggcgatgcaaatccatggcgcttaggacatgatatccgtgcatggagtatgagaagaatatccagaggatgcagcaagcagaccttgaaatgaaaagtatcatcgatctgagagttgcctgctggctgggctggtgtccttccctgaaagttcataccatctctgctcctgntgttaaagctgattgacgtgcggatgatgccttttaaatttt

SEQ ID NO: 37136 - DNA, 192 bp, Zea mays
  Clone ID: MRT4577_133871C.1
ttatcaaggccggagcaaccacttgggggggtttttttactggtcggtgagctcctccaattcaccgccggattccgaccgacaccaccaaagaagaccaaacgttcccaccccactcgtgcaactcggcgtagccatccccaggaaggtcagaaaatctctcttcgcccaccagatcagcaccttctccac

SEQ ID NO: 37137 - DNA, 1825 bp, Zea mays
  Clone ID: MRT4577_133872C.1
cttcctctccccaccgcacgcatccagtggctgctgccgcctcgcccccgctcctcctcctctcccgccacccacgccgcgcaggcctcaccaactggtcgtcgttgcctaggggccagaacgcaggatccacagccccgccggccgccaccgcctccaagcctgctgcgccgctcactgtcaacctgcctcgccaagtcgcccggatctcgacgccccacctgcggccggcggcggccccgccaaggtgccctgacagagttcgtgcgctggctggttgtctgcggaagactctccctctggcatgtaccgatgcgatctctcaactagtcataagcagctgaaagtagttcacatatatacttaaatactcaatcaatgaaagtagtgcactaaaatttgttccgacatcaagtttgctaaactattacggcaacatctaagctatgcattaacatacaccacgcagttcgattgtccagctgataaaaaaacgaaagctacgttgtctcctgctcctagagtgaactgagtcgacagaccacatactgacatacgccttgcattcttgtaaatatatcagattttgcatcatctggacgctagatagttttttcttgtgttcagactttcgaagttgaattgaacaaattataaggatgtttagaattgctactgaattgttagagaattatatagatatgttatgttaccgacttttttttacctgatgtgttcttttatctcggcaaccctggatttgaatcctagctccgccactgccgctacctccctgctccaaccccgcacctccgcttcgccatgaacccttcgtcgtcatccacctcctcctctggcgggtaccactctagggccgctgcctttgcttccccgcagccgcgcggcggtggcggtggcggtggcggcggccgagatgggagcgaccgcatcgacgccctcggtcgcctcctgacgagggtgttgcgccacatggcggcggagctgcgcctagatatgaggaccgatggatacgtgcgcgtccgcgacctgttgaagctcaaccttcagaccttcgccaaggtccctctcaagtctcacactgttgacgagatcagggaggcagtcaggcgggacaacaagcagcggtttagtctgttggaggaagacggcgagctgttgatccgggcgaaccaggggcacacaatatcaactgtcacatcagagagcctgctgaagcccattttgtcccccgacgaagtgtcagtttgtgtgcatggaacttacagaaaaaaccttgactcgattttgcaatttgggctaaagcgtatggcaaggttacacgtacatttctcaagtggcttaccatcagatggagaagtaaccagtggtgtacggcagaatgtaaacatcttgatacatctggacgttagtaaagcacttaaaggtgggatgaagctttatatttcagacaacaaagtgatcttgacagaaggttttgatggcgtcgtccctgtgaaatacttcgaaagagtcgaaacatggccaggacgagctccaataccgttccaaagataacagcccatgtttcagcattgctagttcgtacgtactgaaaaatgatttgccgtgctgtatcccggagaaccattgggtaaatttgattgtgctgggacctctcagtgattcgattgatgattttccggactccgtgaaaagttgtggttctttgtgagtcttttcggtttttgtgtaacgaaaccgaaagacgagtgagttagtttctctgtgcctaggatgtcaagatggtttgtcaaccatctatcct

SEQ ID NO: 37138 - DNA, 535 bp, Zea mays
  Clone ID: MRT4577_133873C.1
attcatatcaaggcatgatcgaccttcaagtctcagctatccgtaggagtgtcataacaaaagaggtcgcaatggtgagcagcaccatggtccctctcctccacggtgttgcgccggcagggtcgcgaacgtgccgacgacgtccgccttctgtgaggcccgcgtgtactatgcccaagacgacggtcaaggccaagccagcggctgcgtccggcagaccgtggtacggaccgcgaccgagagctgtgcctggatcctctgtcatggagagacactttgatacgctgaccgaccaccttccggaagtatacgattgggatgccgtaccacagtaggactggttaccacaacatgtacaaagactacagctagcacagattgaatcccgctgtgccatgcatgtacgcactcgatgtgctctctccccagctgctcgtccgcctggatacagatcatccaagacagcgacgtgcctcttgacggtgtcccagatcttacaacgagcgaggagctgcactaccttcgagatcccgat

SEQ ID NO: 37139 - DNA, 532 bp, Zea mays
  Clone ID: MRT4577_133874C.1
ccggcaccgtgcctactcgctcatactgactactcaaccatctgcacaaagcccaactcaacagtatatgcaggtcattcgccgaagatcacaacaggagctaacacaccctggtggagtcctggcgccaggctcaggctacaacgcaggggaatactcccacaagtccatcaaagtcaggtttgatggctcgcccgcgccaagcactacgccgtacgagagcaccgtcccggttaagccatggctggactgctatgagctgccgatatcatcacacatgggtgacgcctccaccctatactcaacgccgaacccggcgccaaggaaggctgacaccaccctgccgggagcgaggacccattcttgcatcctgtcgtcaaagatgatgacaccatgctgctgaatcgagccgcaaggcaactctacgcctaccacttcttgagaagccacctgccatcccagtgtgggaaagactttacaaaatgagacattctgatgacactgtcaagaggcacaaaggcaagagaagatc

SEQ ID NO: 37140 - DNA, 198 bp, Zea mays
  Clone ID: MRT4577_133875C.1
aatccacagcctccggactcctgctgcagcaggcagccttatgagtccacgacgtcgtgcataaggagtccgtttccagcagattgcgcaaaacttgctgtgcatccgttcagcaggccttggacacaaaaatcgaggacgtggcttggactgtgcgcgaccgcgagagctcgcagatatgcacgtctatgtgggggt

SEQ ID NO: 37141 - DNA, 569 bp, Zea mays
  Clone ID: MRT4577_133876C.1
cgcactaatgttaagcctaactttatatgaaataaagtctccacacttttgcgaccaccaaatttgaattctattctatgttttcctgtacaacaaataggagaaaactagacatagcaaaaagctccaagcagcacgtgaatggtctcaaagctgcccttgtgcttctccctgttcttgatgactcctacacgcccggtgttcctcccgccagtcaccatgaccacgttgccgacgtcaaacttgatgaagtccatgatcttgttggtctccagattgatcttgaccaacgcctccattgcttcgtatagttgcagatacactttcttttcttccatcttcttagctctttcctgccttctctgaagtgccagatttagcaatcgttccaaggttcttaataagatcttcctttgtcataccaatacccctatcccgaatggagaggattttcttctctttgtccaacttaatctgaatctcaagctttgcagtgtccccttcacccagaacttccttatcagtaagggaaaggaacctaatcttatccagcatcagaggcattagat

SEQ ID NO: 37142 - DNA, 817 bp, Zea mays
  Clone ID: MRT4577_133877C.1
atgctccttccaccagagaggaaaggggattgggtgtcagtaatgcgccgccgcctgccgtgcgcccatctccactctctcgccgtcgccgtcgccgtcgccgtcggatgcctcgaatgaggatccaccggtgcttgagcagaggcgaccaaataagcagcttcccctttgggagctgcagcccccaatcgaagcgctcctttccgagcaatcgaagcaatcaagcggcggctcctctctgagccgcagtcggaaatcgaagcgcctccctttttttagtggctaatccggaatcaaagcagtccttcacgggctacaatcagaatcagcagttaaatatctctggcctggcggcaccgcggcacccgccaatcttcggagaagacgcagcagcaactccttattaaacatcagtttttagactgaccggaggcaacttgggcgatggcgaggactagtagccggcgacgggctgccaaattgatggccaagccatccggttcgaccatggtgaaaggcagtccagacgataggatcagcagcttgcccaatgacatcctggtcaacattctcaaccggctcgatgttcgcgccgctacgagaaccagtgtcctctcgagacggtggagtcagcttcctgccatggtcccacagcttacaatcagtgctcgggacctcctgccgtcagaaactaaaaccagcatttccaaagttgaaattgttcggagggccactgcagctgtggccaaagatccggccaatgcagcactgtccaatgctgaatttggttcggaggaccagtgcagctgttgccaaa

SEQ ID NO: 37143 - DNA, 368 bp, Zea mays
  Clone ID: MRT4577_133878C.1
gcggcagcactgcagcggcgggtagcgggtgcatggctatggcgtccgcgctgccgctcctcctcgcgccgcgcgccgtctttgagatcgccgggccggcatcgcctcatctccgctcccgccgcctcgcgctgcgtctccctccccctacccgacccgccgacctctccgggccaccagccgtcgtgcagtcacgcaaggcccggcacgtacagccgcaccccgccaagtgctgcaaacaagatccctttcctgaccaaggaggaaccgcccgggactgccttttctccttagcatgacaccttataagtctggacaagaacccgatcgtgtctaaggtgttcacttcaaaatggcccaacgtcggc

SEQ ID NO: 37144 - DNA, 1199 bp, Zea mays
  Clone ID: MRT4577_133879C.1
attgaacaacattataattaatataatataaataagtaccattcaatatatcataaataaacattgtcaaacaatgcatacataagtgtactctaaatctaaactaaaatacaactgtttgcactaatgttaagcctaactttatatgaaataaaggctccacacttttgcgaccaccaaatttgaattctattctatgttttcctgtacaacaaataggagaaaactagacatagcaaaaagctccaagcagcacgtgaatggtctcaaagctgcccttgtgcttctccctgttcttgatgactcctacacgcccggtgttcctcccgccagtcaccatgaccacgttgccgacgtcaaacttgatgaagtccatgatcttgttggtctccagattgatcttgaccaacgcctccattgcttcgtatagttgcagatacactttcttttcttccatcttcttagctctttcctgccttctcgtatcagcttcgacaagagactcgagcagctcctgttcctgcactcataaacaaatattatgagtgcagtaatcagctggaaagatgaaaaggcagtacctgaagtacctgaagtgccagatttagcaatcgttccaaggttcttaataagatcttccttggtcataccaatacccctatcccgaatggagaggattttcttctctttgtccaacttaatctgaatctcaagctttgcagtgtccccttcacccagaacttccttatcagtaagggaaaggaacctaatcttatccaacgcatcagaggcattagatatgagctccctcaggaagatatccttgttgctgtagagtgagttgatgatgatgtccatgagtctggaaacctcagcttggaactcaaacttctcggctgagctcctgagagtcttcctagagatagactcggcttccctctgggcaacctcagagtcggtggacaggccatgagggacagcaccaagcttctcctctaccttgggtgggttagccaagtcatcgctgctctcctcggcattcacttgtagcttcttagctgggtcggggagtgtggtgaggagaaagaggaggaggagcgcggaggagagcgcccacttgcgcatcgtcgcctctcctggctatcgcttcactctgtggagcaccacgggcgccaccagtgcagtgatgagttcgtcgc

SEQ ID NO: 37145 - DNA, 491 bp, Zea mays
  Clone ID: MRT4577_13387C.1
ctgttttgttggtgctgatgctgctattgaaaaactggcggatttttttacaactgcgggccgtaatactgcggttaggagtggtatggtaccccttcctagccacgtgaagttcactatttcatacgacatgaggcgatgaacgagctctactccacctgtacttatgtgtacagtgtatgcgtgcacaattatcgcgtagaccttgaatggtctctctggtaggctaagcgcgctcgctctccttatggtactagggacctccagatatgcgttactctatgagctgaccatgctgcctgtgtttcggtgagtcatcactctatatcatcatgtagggatagtttggtcgcttgctacagattggtgaacgtatgatggtccatatgaaccagtttggcttgaatagttgaggatacaagccgatactatagagatgctttggacagaattctaccgcctttcaagttatgttgaggctacctacatga

SEQ ID NO: 37146 - DNA, 1325 bp, Zea mays
  unsure (1)..(1325): unsure at all n locations
  Clone ID: MRT4577_133880C.1
ggccggagagaataggacattgggtacctcgaggccggccggggcaacacacgcaagacccgaccttgcctcctcctgcagcagcagcataaccagaggggagtgcagcaagccgtttcgagagacagctttaggctactgctagcagtatggcttccgctgcgcgcttcctggtggccgtggtcgtggcgtgcgcactcctggccagcaacaactgccacgcggcgcgccacttggccgacacggccgcggctcccgctgctgctggtgccgtccctggcctccccgccgtgccgaccttgccaacggtgcagccagtgccacaggtggcgctgccacccatgccggccgtgcccgcggtcaccgtgccgcagatgacgctgccgcccatgccagcggctcccaaggtggccgtgccgctgccgccaatgcccgccatcccatccgtgctgcccaagctgaccctgccaccgatgcccgctgtcgttccatccgtcgtccccaaggtggccttgccgccgatgccgtcggtccccaccgtgaacgtgcccatgccgttcgcggcaccgcctccatcggcgtagacgcacgcggcgctcctgcaggtttgcgttcgccgtgcccaccatgcacaggtggtggtgaccggtgtacgcgagagtgatgtcattgtttgtcagtactctttgcacctgtgcgtctcgtgctttctttttgtgtgtagcgttgtaccgttgtacgtatgtatatcctttgtatttctaccacattcatttatgctgtatatgtctgattgctatcacattcattacgccgtaaaaaaaaaaaaaaaaaaaaaaaaaaaaaaaaaggcccaacacgaagatgaacgcagccggcagcctccttgcttctcctccgcgactgccaacaggcacagcgcaaccgcacgattccatagctcctgcacgccgcacgctcgagctcgacactcaccagtcccgcgaccttgcctccccacacggccgctcatccttacgtggcccgtgggttgtggccgcctgaccggccgcctggctagccgctggctgcccgagcacggccacgtctcgccacctcgccggtcaccgaggcagcgcgcccacgcctcccctgcaaacttcggtctgctcaacaactccccggcttgctacttgctctttggtctgctcaagtctcggtcgtgcgtcgctggtttgctcaactctcattctgtatntctctcacaatcaatagattttagaagaaagtactagaagtgaagaattgatagagaaagtattcaattttttttaatcacagcaatt

SEQ ID NO: 37147 - DNA, 1708 bp, Zea mays
  Clone ID: MRT4577_133881C.1
ccccttctcgagttttttttttttttttttttttttttttaatataatataaataagtaccatttaatatatcataaataaacattgtcaaacaatgcatacataagtgtactctaaatctaaactaaaatacaactgtttgcactaatgttaagcctaactttatatgaattaaagtctccacacttttgcgaccaccaaatttgaattctattctatgttttcctgtacaacaaataggagaaaactagacatagcaaaaagctccaagcagcacgtggatggtctcaaagctgcccttgtgcttctccctgttcttgatgactcctacacgcccggtgttcctcccgccagtcaccatgaccacgttgccgacgtcaaacttgatgaagcccatgatcttgttcgtctccagattgatcttgaccaacgcctccattgcttcgtatagttgcagatacactttcttttcttccatctttttagctctttcctgccttctcgtatcagcttcgacaagagactcgagcagctcctgttcctgaagtacctgaagtgccagatttagcaatcgttccaaggttcttaataagatcttccttggtcataccaatacccctatcccgaatggagaggattttcttctctttgtccaacttaatctgaatctcaagctttgcagtgtccccttcacccagaacttccttatcagtaagggaaaggaacctaatcttatccagcatcagaggcattagatatgagctccctcaggaagatatccttgttgctgtagagtgagttgatgatgatgtccatgagtctggaaacctcagcttggaactcaaacttctcggctgagctcctgagagtcttcttagagatagactcggcttccctctgggcaacctcagagtcggtggacaggccatgagggacagcaccaagcttctcctctaccttcggtgggttagccaagtcatcgctgctctcctcggcattcacttgtagcttcttagttggctgcagaaccgctgagcttagcaacatcctcttctattttagagaggacttccttccacttgtcatcagcagcattgagaaactccttcacaagaggattcaagcttggcacaagcccagcctacacaacaacaaatgaacagaatcagacagacagttcaggagcagcggttcctcgatgatggcttctggagctttgaacaggtccccttctcctcccaggtcatattctgataccatggatggctgtaccaagttccccatgactaaaattgactgtggatacgacgacgacagactacatgtttaggcatttcggcgaacacatgacacgtgaggtatgacaccaatggttagcggggtgaacaacgtcgtgaccgaggctgcgcaagcgcgacgtgctgctcgacaaccaccaaggtgctgctgcagggagggaaagaacatttgcctgcaccgtggggaacagatcaccaacatccagggggaacgccatggggtgggcgggcgcgtcgttaccgatctcctctagtgtggagaagttgcggcggccggtgggctttcccttgaactttcccctccccatggcggcggcgagcaaagggcgagcgaggctggtgcaggtagagagcgagctggaaggagcggagggcggaggggttctgcgtgggcggtgattgaaccgcag

SEQ ID NO: 37148 - DNA, 1035 bp, Zea mays
  Clone ID: MRT4577_133882C.1
aattaatataatataaataagtaccattcaatatatcataaataaacattgtcaaacaatgcatacataagtgtactctaaatctaaactaaaatacaactgtttgcactaatgttaagcctaactttatatgaattaaagtctccacacttttgcgaccaccaaatttgaattctattctatgttttcctgtacaacaaataggagaaaactagacatagcaaaaagctccaagcagcacgtggatggtctcaaagctgcccttgtgcttctccctgttcttgatgactcctacacgcccggtgttcctcccgccagtcaccatgaccacgttgccgacgtcaaacttgatgaagtccatgatcttgttcgtctccagattgatcttgaccaacgcctccattgcttcgtatagttgcagatacactttcttttcttccatctttttagctctttcctgccttctctgcatcaattcagagttcagactatatatcgaacaaaggtttcaaaccacaacgagcattggcctggccattggttagagaacatcctatacagttcctggtgaaaaacagacaaactatggattcaacgggctaagactctgagcagacacactgaaacccagtacaatactgagaccaatcatcacagagaactcactgtatcagcttcgacaagagactcgagcagctcctgttccatacttggattggcccgtctcatcactttccacccatccgtcagagagatggtcttgaaatccccgatgaccatccggacacaagcgagcgcgaggcggggcgcgtcacacagcctggcaagctgcagcatgtctaccacgttgtcaggagcgaggaagcccctctcgagttggtcgaagcagaccgtcttcagagacgcaccgagaagacatgggagagtacaagcaaatgcagagcgtgctccttcatctgttcctgctcaaacttggctgcagaaccgctgagcttagcaacatcctcttctattttagagaggacttccttccgc

SEQ ID NO: 37149 - DNA, 253 bp, Zea mays
  unsure (1)..(253): unsure at all n locations
  Clone ID: MRT4577_133883C.1
gccgggccgggttatttttnnnaaaaaaaaaaaaaaaaaaaaaaaaaggaccaaaaaggaaaaaagataataaaaaaaaaaaagatggccccgtaggtgcaagaggcgccttatgaaccttgggcgctcccgagctgtaggaatcccatatctgcctgatttttaccgtaggcttatagggtgggcccagctcccaggtcggcctgtaacgaagttcatcatatgcggacactggtcatcggtttacaatggc

SEQ ID NO: 37150 - DNA, 859 bp, Zea mays
  Clone ID: MRT4577_133884C.1
agaaccagcgagacccgaccctgcctcctcctcctgcagcagcagcagcagcataaccagagtgcagcaagccgtttcgagagacagctttaggctactgctagcagtatggcttccgctgcgcgcttcctggccgtggccgtggtcgtggcgtgcgcactcctggccagcaacaactgccacgcggcgcgccacttggccgacacggccgcggctcccgctgctgctggtgccgtccctggcctccccgccgtgccgaccttgccaacggtgcagccagtgccacaggtggcgctgccacccatgccggccgtgcccgcggtcaccgtgccccagatgacgctgccgcccatgccagcggctcccaaggtgaccgtgtcgctgccgccaatgcccgccatcccgtccgtgctgcccaagctgacgctgccaccgatgcccgctgtcgttccatccgtcgtccccaaggtggtggccttgccgccaatgccgtcggtcccgaccgtgaacgtgcccatgccgttcgcggcaccgcctccatcggcgtagagacgcatgtgctcctgcaggtttgcggtgaccgatgtacgcgagagtgatgtcattgtttgtgagtactctttgtacgtgcgtcgcgtgctttttttgtgcgtaacgttgtactattgtacgtacgtatgtatatcttttgtgtttctaccacattcatttatgctgttatatgtctggtcaacactcttctccttttttttgttcttctgttcaaatctgaacttttgcttccaccgtacacagggccggtcctgacattttggtagccctaaccaaaaacctatatggaagccctatatgaacgttt

SEQ ID NO: 37151 - DNA, 809 bp, Zea mays
  Clone ID: MRT4577_133885C.1
cattgggtacctcgaggccggccggggaggccgggaagacccgaccttgcctcctcctgcagcagcagcataaccagaggggagtgcagcaagccgtttcgagagacagctttataggctactgctagcagtatggcttccgctgcgcgcttcctggtggtcgtggtcgtggcgtgtgcactcctggcgagcaacaactgccacgcggcgcgccacttggccgacacggccgcggctcccgctgctgctggtgccgtccctggcctccccgccgtgccgaccttgccaacggtgcagccagtgccacaggtggcgctgccacctatgccggccgtgcccgcggtcaccgtgccgcagatgacgctgccgcccatgccagcggctcccaaggtggccgtgccgctgccgccaatgcccgccatcccatccgtgctgcccaagctgaccctaccaccgatgcccactgtcgttccatccgtcgtccccaaggtggccttgccgccgatgccgtcggtccccaccgtcaacgtgcccatgccgttcgcggcaccgcctccgtcggcatagacgcgcgcggcgcgctcctgcaggttcgcgttcgccgtgcccaccatgtagagcagaggtggtggtgaccggtgctggtgtgtaccggtgtatgcgagagtgatgtcattgtttgtcagtattgttgcacctgcgtctcgtgctttctttttgtgcgtagcgttgtaccattgtacgtatgtatatcctttgtattgctatcacattcatttaaatctgaactttaactttcactttaaaaa

SEQ ID NO: 37152 - DNA, 864 bp, Zea mays
  Clone ID: MRT4577_133886C.1
gcaacacatgcaagacccgaccttgcctcctcctacagcagcagcagcataaccagaggggagtgcagcaagccgtttcgagagacagctttaggctactgctagcagtatggcttccgctgcgcgcttcctggccgtggccgtggtcgtggcgtgcgcactcctggccagcaacaactgccacgcggcacgccacttggccgacacggccgcggctcctgctgctgctgccatcgtccctggactccccgccgtgccgaccttgccaacggtgcagccagtgccacaggtggcgttgccacccatgccggccgtgcccgcggtcaccgtaccgcagatgacgctgccgcccatgccagcggctcccaaggtggccgtgccgctgccgccaatgcccgccatcccgtccgtgctgcccaagctgaccctgccaccgatgcccgctgtcgttccatccgtcgtccccaaggtggccttgccgccgatgccgtcggtccccaccgttccatccgtcgtccccaaggtggccttgccgccgatgccgccggtccccaccgtcaacgtgcccatgccgtttgcggcaccgcctccgtcggcgtagacgctcgcggcgcgctcttgcaggtttgcgttcgccgtgcccaccatgcacagcaggtggtggtgaccggtgtacgcgagagtgatgccattgtttgtcaatactgttgcacgtgtgtctcgtgctttcttgttgtgcgtagcgttgtaccgttgttcgtatatcctttgtatttgtaccacattcatttacgccgtatatgtatggtcaacactcttcaccctttttttcttctgttcaaatctgaacttaagcttccacag

SEQ ID NO: 37153 - DNA, 249 bp, Zea mays
  unsure (1)..(249): unsure at all n locations
  Clone ID: MRT4577_133887C.1
atacatccanaaccagaattattcttcccccacnttaaaacaaaccgcccttntctcangtctcntaaagcatcactaaacatntantancatatatacacacatcncctttctcataaacacgggtgtaggcctttacctctttacnnnttactaaacaaaccatatccctatcccactcttcnaatccaaccctcancttnccatantcnaanaccntntnntanactcccatnaaaacatcaccca

SEQ ID NO: 37154 - DNA, 418 bp, Zea mays
  Clone ID: MRT4577_133888C.1
gctggctcgagcaggagagaaagaaagagacgatagcgcccgaaccccactcggggcgcccgtgccgatataatccaatcgaaaccgccacactgtttgccgccagcccgctagtaacctgcttaatttaggcatacgtgagactctgagagaaggtactgaccacacaagggaggccactcccgcccggttcgtccgcgtcgtcgccgatccgtacgcaactcccgtgatccgatccggacgtacggccgctctctctccgggctagctggcgatcgccgactgcatggggccggcggtcggcgacggcgaccgcggccccggcgccgcggcggagcacaaggtgaacctgtcggcgcggcagccgttcgtggagtcggtgcggacgtgcctgcccgagacgtttttccccgacgac

SEQ ID NO: 37155 - DNA, 733 bp, Zea mays
  Clone ID: MRT4577_133889C.1
cattgggtacctcgaggccggccgggggccggtctcacaggcacagcaagacccgaccttgcctcctactgcagcagcagcataaccagagaggagtgcataatcgtctcaggagtgctagcagtatggtttccgctgcgcgcttcctggtggccgtggtcgtggcgtgcgcgctcctggccagcaacaactgccacgcggcacgccacttggccgacacggccgcggctcccgctgctgctgccgtcgtccctggcctccccgccgtgccgaccttgccaacggtgcagccagtgccacaggtggcgctgccacccatgccggccgtgcccgcggtcaccgtgccccagatgacgctgccgcccatgccagcggctcccaaggtgaccgtgtcgctgccgccaatgcccgccattccgtccgtgctgcccaagctgacgctgccaccgatgcccgctgtcgttccatccgtcgtccccaaggtggccttgccgccaatgccgtcggtcccgaccgtgaacgtgcccatgccgttcgcggcaccgcctccatcggcgtagagacgcatgtgctcctgcaggtttgcggtgaccgatgtacgcgagagtgatgtcattgtttgtgagtactatttgtacgtgcgtcgcgtgctttttttgtgcgtaacgttgtactattgtacgtacgtatgtatatcttttgtgtttctaaaaaaaaaaaaaaaaaagcggcc

SEQ ID NO: 37156 - DNA, 677 bp, Zea mays
  unsure (1)..(677): unsure at all n locations
  Clone ID: MRT4577_13388C.1
ggggaatacagtatccaccagtcaagctaacctgccctgcaactcccttcctgttcgtctttggcctacctccagcgagggaggactaggagcaggagcaggagcaggggggccgcctccactccatccaatccgatccaatccgatccacgggagaaaagccaaagatttgacttttgctcgtgtgctacgcttgaccgaccgaaggattggcgttatggcagaagctgacatcacgcgctactggtgccatgaatgtcagcaggctgtcgaggaggccatggtggaggagctcaagtgtccattgtgtgatggtgggttcgtcgaagagatgaccgttgagcaggttgaggcattgacagagcaaggggcaactcagtgggaccctctggacaaccctttggagcaggcaggatcgccgggggacagcgatgatgaagagaatagtgatataggccgtgagtttgagggtttcatcagaaggcatcgacgggcatcggcactgcgccgtgtgcttgacagcatccatgatgaccttagagatgacagggaaagggacaactccgttctgatcagtgctttcaaccaggccctcgctctacaaggtgcagcgcttgaccctgacgnaggaccgaggtgaccatggtaacgcaaataatggatgatggtttgctaga

SEQ ID NO: 37157 - DNA, 282 bp, Zea mays
  Clone ID: MRT4577_133890C.1
gctagtgttggagagaagagaatacacggcagggctacatggcgaagcagctgcagcaaggcatggcggcagtggcgctggtagtgctggtggagctggcggcgacggcggccgagacggcgtcagcggcttcatgcaacgccgggcagatagcagcttgcgcgccggcgatcactgacggcgcgacaccctccgcgtcgtgctgcttcaacctcaaggcgcaacaggggtgcttttgacagtttcgtgaagaaacccacctacgggcgctacattaacaat

SEQ ID NO: 37158 - DNA, 807 bp, Zea mays
  Clone ID: MRT4577_133891C.1
gcacgagcaagacccgactttgcctcctcctgcagcagccgcataaccagaggggagtgcagcaagtcgtttcgagagacagctttaggctactgctagcagtatggcttccactgagcgcttcctggtggccgtggtcgtggcgtgtgcactcttggccagcaacaactgtcatgcggcgcgctacttggccgacacggcagcggctcccgctgctgctggtgtcgtccctggcctccccgctgtgccgaccttgccaacggtgcagccagttccacaggtggcactgccacccatgccggccgtgcccgcggtcaccgtgccgcagatgacgctcccgcccatgccagcggctcccaaggtggccgtgccgttgccgccaatgcccaccgtcccgtccgtgctgcccaagctgaccctgccaccgatgcccgttgtcgttccatctgtcgtccccaaggtggtcttgccgccgatgccgtcagtccctaccgtgcccatgccgttcgcggcaccgactccatcggcgtagacgcgcgtgctcctgcaggtttgcgttcgccgtagccaccatgcacaggtggtgcggtgaccagtgtacgcgagagtgatgtcattgtttgtgagtactctctgtacgtgcgtcgcatgctttcttttttttcgtaacgttgtacgtatgtatatcctttgtatttctaccacattcatttacgccgtatatgtctggtcaacactcttcttccttttttgttcttctattcaaatctgaactttagcttccaccgtaaaaaaaaaaaaaaaaaa

SEQ ID NO: 37159 - DNA, 925 bp, Zea mays
  Clone ID: MRT4577_133892C.1
cgaggccggccgggccgggacctgagtatatatatatacacgcccgcccgcgcctccgcctcatcgccgcaactgcccgtctgctcctgcttttcatccagtcgcaaaacaaagagaagaggtctacgcgtgcgcaaccgcatcgcttccctcccggcacaagaagaagattcggttgggttgtttgtctcttgcaaactgcaatggctgctgctgccactgctattgctactccgtccgtggcgccggaggccggcgaccggaaggcggtggcaccgccagtcgacgcggtggatctggagctggagctggagctggaggagaagcacgtgctggcggtggacgacagctccgtggaccgcgcggtgatcgccaagatcctgcgcagctccaagtacagagtgacgaccgtggattcggcgacgcgcgcgctggagctgctggcgctggggctggtccccgacgtgaacatgatcatcacggactactggatgcccgggatgaccgggtacgagctgctgaagcacgtctcccgcctctgcagccggatccggtgaccgcccgcgcaaggatggaggatctggttgcgcgctctgacttaattagaggagttgttaggatccaattttttgtgtgttcgttcgttcgttcgttcttttctttctttcttcttggacatagatctgctgccgccgctgctgccgtcgactgaaacaagaagctaacttagttttagggtccaggttgttgttgttgttgttaggaaggcgagtcgttgggggcattcacggatgttcttcctcgtttcccctccctccgtgcctgaggctgcaaaaatatgccccccagacatgaaaaaaaacaagacctgttaacacttcaaaaaaaaaaaaaaaaaaaaaaaaaaaaaagggggcgggcgcgg

SEQ ID NO: 37160 - DNA, 504 bp, Zea mays
  Clone ID: MRT4577_133894C.1
gtaccgaatcggagggtcgacccaggcgtacgcgcacgcatggcatcagcccgcaactacgccgagaatggagaaggaaccttccacaagcgcaagactttaaagggcggggccttaccattgttactcgccgtgggggtcggatgacatcacataaacaatggtcaaggctgttgctgtgcttgctagcaccaattgtgataagggcaccatctttttcacccataagggagatggccctacctttgtcaccgtgagtgtctaatcgatcaagcttagcccattcatgggaatcaactacatgcacttggctacaccaccaatgtatgcatgtgcactgatccacactacaatactgaccgcaatgagcatggggcaacacaagatgagaaccgccatgctggtgatctcggaaacacgacatggtggagcagatggtgatgctaatatcaatggccccgacagccagatcccaatgactgggccaaactcaatcattggcag

SEQ ID NO: 37161 - DNA, 310 bp, Zea mays
  Clone ID: MRT4577_133895C.1
aaaaataaaaaaaaaaaaaaaaattaaaattaaaaaaaaaaaaaaaaaaaaaaaagagaaaataaaaaagggatcaaggcactacacatgtcacctaccatcaattcgcatgcattcacctgtctgttctgtttgactctgtactcttcggttctccaaatctccatttcttttacaactttcttattcgctaattcccttaccttactcagctccttacattttcaccatttcccctttctgtcacttgctttactagccataagcgccttattgtcttccatttttatcatttgctcctcctaattgc

SEQ ID NO: 37162 - DNA, 163 bp, Zea mays
  Clone ID: MRT4577_133897C.1
gcccctcataaaaatttcaacattgactcagacccccctggcctaaaagggcagcctatccttaaaccggttgggaataccggggcttcctgagggggaaccttcgggcatttcctacaaacaggttaaggcgaaagccggttcttcctaaaaaaccttctgc

SEQ ID NO: 37163 - DNA, 360 bp, Zea mays
  Clone ID: MRT4577_133898C.1
ctctacagtgaatcgtattaagagatagagaagacagagataatagagagatagatcagaggagtgggagacccgcgagaggctgccgtgtacggaccgtacactcagcgtctgccaacgagggataacgggatcgccgggatccgaccgatcaagcatgactgggagccggtcgttgtgcggatgaatgcacccaccgccgccgccaacaaagatcagaaggccgtcaacgccgcacgccgcgcccgttcggacatccataccatgacgaactagcaacgctggtacgagataagcggcatccagcggtacaaccctcaatagcacacgcctctattacgacacctcctgacctccccc

SEQ ID NO: 37164 - DNA, 498 bp, Zea mays
  Clone ID: MRT4577_133899C.1
acttcgaagtccaaaacagctcatgcacaccacccataacatcactgaggaagagagtggatatagagagagagggattgatgacgacgactgtgagagagatgtactactgaaactatctatacatcaagctatcacggagcccggcagcaatcgcgtgccgcccttcctctcacgtacaccaccacacctcccaaacatcgctcaattcagtcgtagacgcgacaaataggtacaagaaacagccgcccctgtagcatatgttgcttcacctggcctgcagatgttgcgtgcgccacgcacgtacctgaataaagcagagaaggattgatctaccgggggttcgctgtcgccacggccggcatgtcgtcctcgtcctcgtcctcgtcgtcctccgccgcctccgccgccacggtgttaccgcggtccccgcagctgccgcctccggtcctgttggagaacggtctcacgccgctgcatcaacttacgccggtagcc

SEQ ID NO: 37165 - DNA, 1137 bp, Zea mays
  Clone ID: MRT4577_13389C.1
gccggccgggccgggttccagtcccttcctctcctgctgcctttctctcttctgcgttgaagcgtgtgttcatttcactgtactgctttcatctcccgctctttctttaccccgtgctccgcgcaagtgctggaaccaagaaagcctcatgcggcggcggctggccgacgggcggtagagaggcggagatgggctgggcacccaggtggctgcgcgggctgctcggcggcggcaggaaggccgccgtgacgaagccggtgaaggagaagaagcgctgggggttcggcaagtccttccgggaaaagccccccgcgccagtgccggcgcggcctccgacgcctccgtcgcatcccgcggcgacgcctcgccggggctttgcggcggcgccggatgaggcggacgacgagcagagcaagcgtgctatcgcgtgctgcccaggcggccgccgccgtggtgcggttggcgagctctgctgcccacccaccgccggccgccgcgaagcgggaggagtgggcggctgttcggatccaggccgctttccgtggctacctggcgaggcgggcgctgaaggcgttgcgggggctggtgaagctgcaggcgctggtccggggcaacatcgtgcggcggcaggcggcggagacgctgcgatgcatgcacgcgctcgtccgcgtccaggcgcgcgcgcgcgcctgtcgcgcaattcgctcgcagcatgtcacggcgcatccggatccgccgacgccggagaagtacgagcaggcgggtgcgcccaggcacggccgttccggctctctgaaggcgaactcttcgaggacaccgggcggcgagaggctgggcagggagaggtcggaatcctgcgggaggaactggctggaccgctgggtggaggagaggtacatggacgacgagaagaacgccaagattctcgaggtggacaacggcaagccacggcgccggtatgcttccaagaggcgcggcggcggcggcggaaaccaccaccaccaccaccagtcgccgtgctcgacgacgatgggttccgagcagaacagccggagctacgcgaccatggcggagtcgccgtccaaggactcgacgaccgcgcagcagtcggtgccgagcccggcgtctgtgggcatg

SEQ ID NO: 37166 - DNA, 386 bp, Zea mays
  Clone ID: MRT4577_1338C.1
cttagactctctctaccactgacactaaacgctatatcatcaatatttaactggggtcgcgggtctgtctatacagaacatgcacattctaaaagtatttactctcctttatggtacagtttattttaatgctcatcttcctatgatcacagataagatgccttcaaaacttaggtcaaggatttttgtcctgctagtcaactgtaatatatctcagctaaattaccattgagattggtgttctctttgtgatggctttagcatttggactattctctacatgtatcgggctgtctgaactttcaagtccaaatgtgttgcttctatgcaggcacattattaccacctactgtagtttttttatataggcgcgaattttatctgta

SEQ ID NO: 37167 - DNA, 672 bp, Zea mays
  Clone ID: MRT4577_133900C.1
ctcgaggccggccggggtccactttcgcacgctccacaccaccactcaaccgaccccactttccctttacacaagaacatccctgcgtgacgagggatgcccctcctgtctgggttcactccaccatctatcccggaagggtgagggagagatgacgtagactacgccaatgtctgcataacccgataccgaccccgctcctaccgccacatgctcgccctcactcccgagccctgcgcattccacataaacaagatcccgacccttcttgcaagacatgtgaccctgaaaagcacagtttactctgatcaatataaagatggctcttgttggcagcaacctgtagagaacttcttttcttctgatatggcactgatgatggtacatggagagatgataactcagctcatatttcactgtcccctcttctctggtgtcaatgcaccaagacagtccacataatcagatcaactgcactgtactcaactcaccactgtcaaaaactaatgctgagtatgcagatgagatacttaacaatcgctctcttgctacacatggctgcctatgagaagcgatacattgaggatgaaaaacactctgatgataacctgacagcccatgagattcctctcaaataccgggacactgctcacgatcctatgatgctcatct

SEQ ID NO: 37168 - DNA, 512 bp, Zea mays
  Clone ID: MRT4577_133901C.1
gaccgaacacattccgcattaaagtgttagaccctactctaacgcgttccatagaaagacggggaggggtcttacagcctgtgactgagcccaaaaaaaattataggatcgaaatctacatttatgggtcgcaagttatggatagggaggcacctacgcgggaggtatatacatagtacagagagcggatgcaacccacatatttatgcacatataacttacacacctacaattgtggcttcacgcatccacacaagccacccacacaagcgaccacgatgtccatccacaaaagtaaccacgatgtggtctgtcatacactcaaactttaggtttgtggaggctttctcaagtctgctataaataaaggagagtcactcctacatattacagatgtgtccatgaaaccaaaatctagctttgctatgtgcacatccatctcttactcgttcgcgttagatagaacaacacctacacacccactgagactcttgtttgctagctgctacaaa

SEQ ID NO: 37169 - DNA, 852 bp, Zea mays
  unsure (1)..(852): unsure at all n locations
  Clone ID: MRT4577_133902C.1
ccggccgggggcattcctcgtcgagtcactctctagctcagtgtccacggctcctctctttctctctccatgagctgctccatcgcagctgtcgtggtttccctcttcctttcactgaaccaaatcatatcgtgccgtgcggctggcgcagacgacgatggcgcagcacgcagcctcgcctcctgcctcatctcccacggcgtcaccaacttcacgctcccgacgtcccggagctacgccggggtcctcaactcctccatcagcaacctccggttcgcgctcccggacgtcggcaagccggccgccgtggtgctcccgggctccaggcaggacctgcagcgctccgtgctctgcgcgcggagcagctcgctggcggtccgcgtgcgcagcggcgggcacagctacgagggcctctcgtacacctcggagaaccgggtgccgttcgtggtgatcgacgtcgcgaacctgaaccgggtccgcgtggaccggggctcggccacggcctgggccgaggccggcgcgacgctgggcgaactgtaccacgccgtgggccggtccggccggtcgctggcgttctcggcgggctcctgctcgaccatcggcctgggcggcaccgtctccggcggcggcttcgggctgctgtcgcgcaggttcgggctggcggccgacaacgtgctggacgcggtgctcgtcgacgcggacggcagggcgctcgaccgggccgcgatgggccgcgacgtcttctgggccatccgcggcggcggcggcgggagctggggcgtaatgtacgcctggaagctccggctcgtcccggtccctcgcaacgtcaccgntgctctcggtggggcggac

SEQ ID NO: 37170 - DNA, 1936 bp, Zea mays
  Clone ID: MRT4577_133903C.1
ggccggccatgcgtctaacgaacccagattttcaaaacagaccgctcccggcggccatgcccatgccgatggtgcggcagcggcagcggcggcgctgagcccgactgccagaaaccggccacgggatcaggtccgtcagaccgatgcctgcgcccgtcgcacctgtaacctccaggctgaagcgggaagactgcccccgcaccaagcacgactccctcttttccccatggaaggtccttgtcgggccgtcggactggagggaccacgccgccggcaaggaaggggtccagaggtaccgcatccgcaacctcccggacaacttccccggcctctacgagctaggcgttgcctgcgcggccgacgagggcgtcaggtcccggaggcgtgacgcgcgaggcgtcgtcgtggtgtacctcggccaggccgacagtgtccgggcgaggctgcagcagtatggccgctcggggtcgcatctggacactacgaactcgccgggctcttctgatagagatgcggcgaatgcgctcgccgagggtcctggactcttcagagaagtgttctccagaggctactccgtcgtgtttcgatgtgcgctgatggacaataaacaagaagctgagaagactgaagcactactcctgagagtatttgattatgcatggaacaagcttcagaatggtgcttgtcgccggcaagaaatactgcataagttagaactgcgagcagccaaccataggtctctacttagcagagtaagtgacatgaaacaaaaaatatttggacagaaagcaggtataaatataaagggaagtgggccagctaacacctcgcctagcataattaaaagtatgctcccaagggttcgtacaatcgttcgtttcagacctcagttagtaaaccctaacaacagtgaaggtgggataactggtattccctatgcaaatagacaagcacatagaaggaagtccaaaggataccaagtaaaaaagttcgatgttacaaaacggagaactgtgccgatacatgattctaactctgtctgtggagtgctgctggaagatggtttttgtctggagcacccagttcatggaagaaagaggtgcagcttacacaaaggtaaaagagtcaaaggcagcccaaaaagttcgcctactagccatccttgccaagttgggattgcaattactgagttttgcctaactgaagatttggacagctcggtcccaaaacaggaaagcgaaatacggcccaaaaatatgtctacaactctgaaagaacctcagaggcaaagcgataatttggaatcacaaaaggtgaatactggagaagcttctacagaagatggaacacaagaagtttctagggatgcttgtatcttagaagagaaggccttcttccatgctgactctgagtctcaggagcagcagccttctgggagaatgtggtttgagctgctcaaatcacagaggaaaccggcgagcgcacatccatcaagaagaggcttgggatctcagataacagcaatgacagataacaggtcctgcaaaatggtgtcaattgcaggaatggaaaggactgagaaggacagtggagtagaggtcactgctgcttcgttttccagaagctcaggatggccctgtacctgtggcgcccgtacgtcggacggttcacgttgtatgaatatgccgattgaagggaggaagagatgtgcattgcacaaagggcaaagggcagcattcccccctacaccatcggcataatagacaggacgggttttttttcttacttccaattgttgttttcacatttctgttagcaaattgaaacacagaaagctgttttcatatttcatgtgccccaaaacgactacatacattttgtaactgtattgctcatcattgaatttttcacatcaatttttaatgttttgcgctta

SEQ ID NO: 37171 - DNA, 418 bp, Zea mays
  Clone ID: MRT4577_133904C.1
ggggggagatgaaaaaaaaatagccctgcaattttgggggaaaaaaaaacaactttgggaaaacaaaaacttccttgggtacaaaagggtttgggggggcaaaaacaaactaggaaccctttaaagaggggggaaacgccacagcttaatggggtttgaaaaagaccttgggccccaaccctttaaagccctcgggggggatctcccggacggggacaagggagaaaagttcctccttgggaaccccctaaagggtccttttgggggggaacctaaaaaaaacccttcgggggacgctcctgaaccccctgttccaaaagggcttggggggcttaaaaatgaaccttacgtccggggggcccaagggcttttgggaaaaattcctgaactccttgaggggggggggggcctttttttt

SEQ ID NO: 37172 - DNA, 465 bp, Zea mays
  Clone ID: MRT4577_133905C.1
tcagaccattgatgggggtgattcacgttctattcacgaatgctgcgatactatcctcatttcacttgactaactgcatcatgtacggcatctgcacgatgtagcacaatcctgatgctcaaaccggccatgctgatcctcccatcagatgtcatattaatgtggaattccagcctctggagtgccacttgttcgatattcagcccagggaaagtgaacttcccaatccgcttaatgatatggttccaatcaccccgggttcctgtgcatttcagcgcattaaatagttgacgcctcatgttcatgatcctatcagccatggccttgggttccagagcccattcggcgaatatctcgctgaccctcagcatagtagcaacaataaatgcaccatcacgaggagggtttgaatacataggcctcatgacaagtccgagttcactttgaaccctaacagccccacgt

SEQ ID NO: 37173 - DNA, 818 bp, Zea mays
  Clone ID: MRT4577_133906C.1
cattgggtacctcgaggccggccgggacgactaactctctcccaccgctttcaaccttagtctcctcatattcaatatggtgtcctttacttccctcatcactgctgctgttgctgcgactggtgctttcgctgctcccgccactgatgtagctgctcgttcctccggcgacctcgtcgctcgccagagcacccccaacgccgaaggaacacacaacggctgcttctactcttggtggactgatggtggctccaaggttacttacaccaacggtgcaggtggcagctacagcgtcaactggggaagcggcggcaactttgttggtggtaagggctggaaccctggatcggcccgcaccgttacctactcgggctcctacaaccccaacggcaactcctaccttgccatctatgggtggacacgtaaccctctcgtcgaatactatgtcgttgagaacttcggaacctatgacccgagttcccaggctagcaacaagggtaccgtgactgccgacggctcttcctacaagatcgctcagtcgacccgtactaaccagccatccatcgatggaacaaggacctttcagcagtactggtctgttcgccagaacaagcgctccagcggatccgtgaacatgaagactcacttcgatgcttgggccagcaagggcatgactcttggtagccactactaccagattgtcgctaccgagggatacttctccaccggttctgcgtctatcactgtgaactgcccgtaagccatagaatgacttcacggcttggtacttcaagtagtcgtagcggtgccgacttgat

SEQ ID NO: 37174 - DNA, 283 bp, Zea mays
  Clone ID: MRT4577_133907C.1
tgggcgcagagaaattcccagcaaactaaccgggtacagggacacgagaggagaggagacgataggttcggtctgggacatcatgggttcgaataagctgcactgggcggggatgtcgtggaacgtgacgacgtgcgcaacggttctgtaagaggctggctccgactactagatcatgcctatgtacttcctcaccgctgagtacaagagccccgagcagcttgatcgcaacccgttaggtcaggttccagctctgcatgatggtgacttgtacctcttcgaa

SEQ ID NO: 37175 - DNA, 302 bp, Zea mays
  unsure (1)..(302): unsure at all n locations
  Clone ID: MRT4577_133908C.1
nnnnnnnttttttttttttaaccacgcaaccacanncaggagacccgtttctttctcagntacatatctgccacccacctgaataggatttgtggtttaatgccacccaatctgcgaccactgcagtcggacgtctaccacttgctataacatatagatcgtcgtaaacgatgtgctattactgatcgtcgtacacacccgaatccaactgtttgagcaaccacgcgcaaatgggcagcggtacgttcttaaagtacccaagcgggttggcggtgcgcaagatttctcttatgcccacgttc

SEQ ID NO: 37176 - DNA, 358 bp, Zea mays
  Clone ID: MRT4577_133909C.1
tcgggaaaccctagtccgtcatatctcacgatccactctagcaccaatcctagggaaggtgaggagcgatggctctcggcgtggtgtcggcgaagggcggctcggtcgcgggcatgaagaaggggtcggtttctttaaggatggtcttcttatagccagttaaggacttgttcacggaagtcgtctctttttgtacgtttaagtatgtgactttcagaattgccgcgtcaaatacccattgccctgcaagttgtgcattatcgtatttatgcgtgattgactgcaatgaacatattactactgctttatgtatttgctattgacgcatgcgcatagtttattgggtttccatattttc

SEQ ID NO: 37177 - DNA, 113 bp, Zea mays
  unsure (1)..(113): unsure at all n locations
  Clone ID: MRT4577_13390C.1
gagaatctgatgttcttagctggcttactgaatgctnatgcgtgcttggctttgcttctgcccgagttctgttcgtcgttctcgctccctgtcgctcccttttgtgtccttcc

SEQ ID NO: 37178 - DNA, 270 bp, Zea mays
  Clone ID: MRT4577_133910C.1
atgatcctcccatttgtcccgctctcgctcacctttgacaacatcaaatactctgttgacatgccacaggaaatgaaagctcaaggtgtacaagaagatcgtttggagctcctcaaaggtgtcagtggatcttttaggccgggtgtgttgaccgcactgatgggcgttacggtgcaggaaaaactactttgatggatgtgttggctgggagaaagacaggtggatacattgaaggagacatccgtatttcaggatacccaaagaaacaag

SEQ ID NO: 37179 - DNA, 797 bp, Zea mays
  unsure (1)..(797): unsure at all n locations
  Clone ID: MRT4577_133911C.1
cattggatactggtgcggacctagttgccctctccgcatcaaaccagctagcgcgtccgtccccatggcggccgccgccgcggggtttacgccggcgactgcaaggaaggccctcttcactactacagtcaccctcctctcatcgccactctcacgtagggccagcagcatccgcagccgcaacctctcctgctctgccgcgttcaccgccgccacgcgcctcgcgccgcagccgccggacctggtccggtgggtgcagcgcgagggcggattcgtccaccgtgccctccgcgtagcgaatcatccggaacacgggctcggggtctcagtctctgccgccgcggcctacggcgacatcccaattggggacgtcctcatcgcgctcccgagccagcttccattacgactacgccggcccaccagtgccgcggacgacgtgcttgtgcagctcgcccaacaagtcccggatgaactatgggctatgaagctgggcttgaggctgcttcaagaaagggccaaatctgattcattttggtggccatatattgccaatttgccagagacatttactgttccaatcttctttcctggggaagacataaaaaatttgcagtatgcccctatcctccaccaggtcaataaaaagatgtcgttttctcctcgagtttgagaaagtggtacagcagaagcttcatactgtgcccttggtagatcatcctttttatggacaagatgtanattcatcttccccttggatgggctatgtcagctgcctcttctcgtgcattccgtttgca

SEQ ID NO: 37180 - DNA, 690 bp, Zea mays
  Clone ID: MRT4577_133912C.1
gcctgtactcagcccgctgcttctcagtccacttcatccacagctcctcttctctcggtctagagatccgtccgggcacggtagtctcgccttcgttttgggtaagcaatcatatccgagcttgcttggatgcctggattccctagtccaaagggttttgttgccaatcgaaccctaaaatccttcttctgcttcgttcagttagttgtagagttttgtgttgctggatgtcctgctaatccaatacatcaatccgcggtctgtctagaatcttgttcttcttgaaaacgggcaagatcgacatgagttgacagtgtacgagttcttgctttcttgttacctaatcaaggtgttggtgcagcttgttttccaaaattttgggggtcacgtgaagcccgcccctgcttccggagggacgtattcctgttgcgtcgcacctgagcttgttttttatatatttatagtaaagatgctggttttaaatgttctttcttcttcaagtttccaattccccgtgttttttgcgtatggatggttaatggtgcagtagctgatgtcaaatactattagaatagagcagtagcgagcatatacttcagttattattatccggtgcaaggtggtgattgtagaatccttctgcttggtcaacaaagaacaatgatgaattagtggcacatgttttcttct

SEQ ID NO: 37181 - DNA, 438 bp, Zea mays
  Clone ID: MRT4577_133913C.1
aattcggcacgaggccaccgagtcctactatatacgcgcggccgtgcgctcgatccatgcctccttccacggctgacgccttcctcgagcgttccatcccatcccctcacccgaatcccactcggctactccccgcttccctttaagaacgcgcccctcggcaccggaggttaccacccacccatcaatccagaatccatcgctcggtaatcgatcgacccgaacaacgccggtgtgctggtgtgaagagggtcaggatggtggtcggattccgccgcacgatctcgttccccgcgcccaggtccggcgcgggccccagcgccgccaacaacaagtccgtcgcctaccgcgcgcggtcggcgagcctgccgtgccggttccacccgctggtgctccagctcgacgacgacgtcgccgacctgcgggcgctggtgggcc

SEQ ID NO: 37182 - DNA, 380 bp, Zea mays
  Clone ID: MRT4577_133914C.1
gcgcggccccgttctgcggcgaactttttcttaatggtaggggcggtgaacgttgtggacttgcatctgtctcctcctctcctgtgagcgagcgcgtccgccgtccgtggcggtggctggcgtggtgttcgacgaaatgcaaatctcggcgatgtttgcatctctcgttacattagaggcaacagacaagtagtccttatattgcattcgtatatgttgttaacttgtcgggttggatgaactgcagttgtctttggaggtgcacattattttcgtcattttactctcctaattgatcctatatgttagtgttataatacttcgccactatagtatggtttccacatgatgctctgatgtagctatttataagatgggtt

SEQ ID NO: 37183 - DNA, 813 bp, Zea mays
  Clone ID: MRT4577_133915C.1
aactcctcctggcctcctgggtgtggaagcggcggcagcggtgcgcgattcagatcggcaacgacggcgacgcatggtccctcccgccaccagccacaatcgtcgccagcgaccttttccccgattgtacctgcactggttagagttggagaagaccaacccccaccgtcttgggacccggtaccatccccgagaggggttctccaagaatcagcatgctcttatcaaaaagtgcaacaaagaagccttctcctaaagctggtgatccaaaaaaacatggaggttctccaaaagagaaattaagagcaggtcgactctagagaagactcttgtggacctcttgcatgagcacaaaacagctgattattggggtcaaaatggatggacaacagaagcatggaacaaaattgttaaggaatttcatcagagggaacaatatgtctatttcacaaagacacaaatacaagataaggaaagagagctgaaaagggactataggttgctaaaggatgcaaaaaatcaaagtggagctcattttgatgagaagatagggaggattacggctgacccaactttatggaaaaatatactgacttctcatcctaaggctaaaaagttccgcaacaagtcttttcctctatatgaggcccaggagacagaaaaaaaatctttgcatatggtatgcaaagaatctttttacagtctctgatatctaccacttgatggttcgtataaataaaaaaaattactaaaacgttaagatccaaatcgtaatatgttctttggggagttcaaacgatggacgcgagagga

SEQ ID NO: 37184 - DNA, 2855 bp, Zea mays
  unsure (1)..(2855): unsure at all n locations
  Clone ID: MRT4577_133916C.1
acgtaccttctgtcctcctgggtatataagcggcggcagttnttcgcgattcagatgggcaacaacagcgacgcatggtccctcccgccaccagccacaatcgtcgccagcgaccttttccccgattgtacctgcactggttagagttggagaagaccaacccccaccgtcttgggacccggtaccatccccgagagttaacatgtttggaaggggttcttcaagaatcagcatgctcttatcaaaaagtgcaacaaagaagatttcatgagggaacaatatgtctatttcacaaagacacaaatacaagataaggaaagagagttgaaaagggactataggttgctaaaggatgcaaagaatcaaagtggagcgcattttgatgagaagacagtgaggattacgctgacccagctttatggaaaaatatactgacttctcatgctaaggctaaaaagttctgcaacaagtcttttcctctatatgaggccttgggggagctttatgatgggcaaacagctgaagggacctacaaaaacacattcacccaacttttagatcttactcaagtaggaaatagagatgagtttctcaacatagaacatgaacaagatgaagtggaagaaaccttcccggcacatgaagaaaatgatgtcttttttttttttttttttcctcggtaaggacctgtcctgttggatttcctggatttatgacaactgggccagccccccaagtccaacctacccccatcagcatcacgcattcacgcgcccgccccagcgccgtcatcggtcgccatccctgcatcgaccgcaccgcatcgcaccgtctccgccgccatgcgccgcttcgcagccgacagggcgcgccgcgcggtggccgcgtctctgcacggtgcagcgtccagatcagcagcgccgtcgcctcacgctccggcgccacgtcatccagcctccccggtgggggcggcggcgatggcggccgccatggtgaggaccatgtccacgacggccgcgggcacgcccccagtgtcggtcgccaccatcaaccccaaggtcttgaagtgtgaatatgcagttcgaggagagattgttacacatgctcagaacttacaacaagaattgcagaaaaatccagaatcacttcctttcgacgagatactctactgtaatattggaaatccccaatcacttggacaacaaccagttacctatttcagagaagttctctctctatgtgatcatccagctctcctggacaaaagtgaaactcatgctttgtacagttcagatgctatagagagagcatggcaaattctagagaagataccaggtagagcgacaggagcatatagccatagtcagggtataaaaggtttacgtgatgaaattgctgctggaattgctgcccgtgatgggtttcatgcaagtggagataacatctttctaacagatggagcaagcccagcagtgcacatgatgatgcagttgttgataagttctgagagcgatggcattctctgccctattccacagtacccactgtactctgcatcgattgctcttcacggtggttcccttgttccttatttccttaatgaagagacagggtggggactcgatgttgatgagctgaagaaacaactggaggaggctcgatctaagggcatcactgtcagggcgcttgtggtcataaatccaggaaatccaacaggacaggttcttgttgaggaaaaccaaaagaaaattgtcgaattctgcaagaatgaaggacttgttcttctcgcagatgaggtttaccaggaaaatatatatgttgaagataagccattccactcattcaaaaaaattgcacggtcactgggatacactgatgatgatcttcctttggtatcattccagtcagtttctaaaggctactacggagaatgtggaaaacgaggcggttatatggagataactggattcagtcctgaagtacgggaacaaatttacaaggtggcatcagtaaacctgtgctccaatgtttcggggcaaattcttgctagccttgtaatgaacccaccaaaggctggggatgaatcctttgaatccttcatgtcagagagggatggtatcctttcatcgttggctcggcgtgcaaaggctttggaagaagcattcaacagtttagaaggaattacatgcaacaaagccgaaggtgcaatgtatctgttcccacgccttcatttaccccagaaggcaattggagctgcccaagcagtcggcactgcgccagatgcatactacgcaaaacgcctactggaagccactggaatcgtcgtcgtccccggttctgggtttggacaggtccctggaacgtggcacttcaggtgcacgatactgccgcaggaggacaagatacctgcgatagtatccaggctcaaggagttccacgagaagttcatggatgaattccgtgattgagctgagtatccatcgccctggcgtgatttttatctgttcaaaataataatgctgccaattggttgcccccgctccctcgtcgtcccatggatgctacagccaaacaccatcccaaattgtgttacaggcagatccctatcgaaaaacctacagaatctcgggcactgcaatgccatggttctgtttgccttgtgagaagtgtatcaggctaggctctgagccctgatgtgtacaaacatacccgaactttgaggccaagttgagttgtctcggcgcatgctgaaactctgctcgccttgtgttgcggagaatctttgctgtccaggttgataaaaaaaaaaactgggctgactgctctgcttctgctcgtttgacatcgcatgaatt

SEQ ID NO: 37185 - DNA, 549 bp, Zea mays
  Clone ID: MRT4577_133917C.1
gccactggaatggtcgtcgtcaccggttctgggtttggacaggtccctggaacgtggcacttcaggtgcacgatactgccgcaggaggacaagatacctgcgatagtatccaggctcaaggagttccacgagaagttcatggatgaattccgtgattgagttgagtatccatcgccctggcgtgatttttatctgttcgaaataataaggctgccaattggttggccccccctccctccctcgtcgtcctatggatgctacagccaaacaccctcccaaattgtgttacaggcagattcctatcgaaaaacctacagaatctcgggcactgcagtctgcaatgccatgcttctgtttgccttgtgagaagtgtatcaggctaggctctgagccctgatgtgtacaaacatacccgaactttgaggccaagttgagttgtctcggcgcatgctgaaactctgctcgccttgtgttgcggagaatctttgctgtccaggttgatatgttcgcgaaaaaaaaaaaaaaaaaaaaaaaaaaaggacgtccgct

SEQ ID NO: 37186 - DNA, 1021 bp, Zea mays
  Clone ID: MRT4577_133918C.1
cattgggtaccattgggaacctcgaggccggccgggggccggaatgcaaagcgtccctcaacatttcagtgtgtgccaagaagttctcaggctcaaactgagcaatggcagctcagtttgcagcggcaacaggagtcttcctgagctgccttcttgctcttgcagcacttgcaagctgcaacactgaaggtgacatcctgtacaaacaaagggcgacatggaaggacccaaacgatgtgctcgtgagctgggatccgactcttgccaatccctgcacctggctccatatcacttgcaacaacgataacagtgttatccgtgtagatttggggaacgcaggcctatcaggcactctgattccagatttgggaggactgcagaacctccagtacctgatgttgtatgggaacaatctgacagggcccatacctgaatctctgggcaatttgacgagccttgagaggctggagcttcagaggaatgcgctgagcggtgcaatcccatcctctctcgggaacatcaaaacattgcagttcatgaagttgaacgcgaatatgctgaccggcacggttccattggaagtcctctctcttgtcattgctgggaatctgaccgagctaaatattgcaaacaacgacttggccggcacagtcagatcatctggtttgagagtgactgcaatcatccaggacaagctgaagactacatgatgagtccctgggtgtggacattggctttcttcatgacaatgtttgacaaaaaaaatagtaaataaataaatccagtgacatggattgatctagacatcttgtagtatgatgatatggctgctggataaattctattcttctccgatttttccctcgagcagcattagctaatgagaatatatggggcgtcactgtgctagagaaaaaaattgtacccagttttcttttttatgtaagttcttactttacataaatttctatagattattgaaacatcaaaaaaaaagacatatttaaaaaaaaaagcggcc

SEQ ID NO: 37187 - DNA, 314 bp, Zea mays
  unsure (1)..(314): unsure at all n locations
  Clone ID: MRT4577_133919C.1
aggccggccgggccgganttcctactccgacctccgtgacgcatgggtagcaaaaacctgtcatcttcccagatgatacgagcacctctgagcttatcagcatcacgcattcacgcgcccgccccagcgccgtcatcggtcgccatccctgcatcgaccgcaccgcatcgcaccgtctccgccgccatgcgccgcttcgcagccgacagggcgcgccgcgcggtggccgcgtctctgcacggtgcagcgtccagatcagcagcgccgtcgcctcacgctcaggcgccacgtcatccagcctccccggtgggggc

SEQ ID NO: 37188 - DNA, 374 bp, Zea mays
  Clone ID: MRT4577_13391C.1
aattcggcacgaggctcgggcaggtctccctctccccggctctccgccttcctcttccagtccccgcgcgcgagatcgccgccccgtgtgggccctagatcccgatggcctcgcgccgccgcaccctgctcaaggtcatcatcctcggcgatagtggggttgggaagacttgggggggggggactttctcaacaagaattccaccaccacatacaaagctaggggggggggggctagcgcggcgcggggggggcggcggaagaagagggggccgcgtcgtagatgaggatgaagactgtgacgtgctgcccggcgtcgtctgaggacttgagggttgttcgtggccagaggcccgccggggggcgaccgtgtgg

SEQ ID NO: 37189 - DNA, 396 bp, Zea mays
  Clone ID: MRT4577_133920C.1
gcccaaaatacaggaaccagaacggcttgtaggactacctgagcaaatttaagaagtgcgtggccttccatgatctacgacacattctctttttatgcattgtctaacatgttcggtacaaggtccctgttatggcaagccatcttatgttgcatccagccagcgcggttctgaactatagcgatcagggctggaggatggatatggagtactcactatctgtatcggctcttaaaactactaccatgcatctggcataagctattactatctgttgtatggaaactgtatagatctacgcagactaggttgtgatgctgtcactcactgatcacatgcgaggcatgactgttatattaccttgaggttcctgcaactacactaaaatgacatctg

SEQ ID NO: 37190 - DNA, 479 bp, Zea mays
  Clone ID: MRT4577_133921C.1
ctcgagggcgcggccgggaaaaaaaaaaaaaaaaaaaaaaaaaaaaaaaaaaaaaaaaaaaaaaaaaaaaaaaaaaaaaaaaaaaaaaaaaaaaaaaaaaaaaaaaaaaaaaaaaaaaaaattccccgcggttgggggggccgcccttccccgaaccgggatttgcccgccgggaaaaaccccgaagggccccaaattgggggcccaacgttcggggccccttttcccccgggaaggaaaaacggtccttttggcattggccccccacgccaaggggattataaaattaggggggggggtacagggcgttttcgtttgttgggggttgggccccttgccgggggggccgcccattgggcgagccgggggggaccccaatttttgccttgggaatccgcccggcccaaggggcgattttcaattggaccttcctaagaaggcctcttgcccaattattgcctttaaaagggggggggggg

SEQ ID NO: 37191 - DNA, 476 bp, Zea mays
  Clone ID: MRT4577_133922C.1
cgccatgctaggcagttgcgtatctggaacacgtgaggctcggggcctgtgacccgaccgccgaggggccacgagcgtgctgaagtacgtggactattcgggcccgtcgcgggcgaacatacaattattaccctaactgatcctatgggcacgcagctccgaaatagctgagccttgtggagccaatcggataccatacgagctatgagctaggtttactgcaccgactatactatccctcttcctaacgcgtactcctggaccctatggaaggtaatcaagtacaacctacaagcacctacatgccgtggtggccgtcgtacccgcagtaccagtcctgttcgcggagagcattcaccagaacatccaataccggcgccaggtcccgacagaagctgaagaactggaagccggggttcatgcaaacgcacaccggttcatttttggacttccggtagggtaccaaccacatgtag

SEQ ID NO: 37192 - DNA, 3086 bp, Zea mays
  Clone ID: MRT4577_133923C.1
gccggccgggttgcggaacccgatcgaatccctgcgaacccccttgtttcggacgtggaaacgacccacgaatgcgtagtcggggaactcctcccggcctcctaggtgtagaagagacggcagtggcggcgcgattcagagtagcgacaacggcgacgcatggtccctcgcgccgcccgccatcgtcgccagcgaccttttccccgattgtacctgcaccagttagagttggagaagaccaacccccaccgtcttgggacccggtaccatcgccgagaggtacttcttgggacccagtacccccatttttgcaatgagtatggggttaatggagcgcattaggaagagaagacaggaggatgatgatgatatgatgatgttcttccttcctgcattacatttgttgcgttctagttctcttaaagggaggagggttaagaagcgacgacacacatccaagctaagtggcgaggagcatgttttagagttgcttgaagggcatgtcaagaactgccgagtagcattcagaatggaacctgaaatttttagagccctagccagctatcttaggaaggaaaggttggtacgtgacacaaggataaaagttgaggagaagctcggcttctttctatacatgataagccataacgcttcatttgaagatctgcaagaagagttcgggcatagtagtgacacattccaccatcatataaaacatttttttgacatagttgtcccttccctcgccaaacgatttttgaagcctccttctccaatgcaagtacattcgaaaattgaaaggaatcctaggttctatccttacttcaagaactgcatcggtgcaattgatggcactcatgtgcccattacaatttcacctgacaaagctgctccttttagaaacaggaaggggactctcagccaaaacgtgatggtagcttgtgatttcgacctaaatatcactttcatgtctactggatgggagggatccgctacagatgctagagttcttcgatctgcaatgaacaatggattccatgtacctccaggaaagttctatttggttgatggtgggtatgctaacaccacgtcattccttgcaccttatcgtggagttagataccatctaaaggaatatgggcaaggtcaccgtagacctcagaactacaaggagttatttaaccatcgccatgccatactgaggaatcatgttgaaaggactttgggggttgtgaagaagcgctttcccatcctaaaagctgccacatttcacaaaataaggaatcaagtgaagataccagtagcagctgttgtacttcacaatattattcggtcactcaaaggggatgaggaatggttagataatcaaccagataatatttcgccacaaaactttgttgatctaccggatggcgatcaaggcaacgatcaagtaaatgtccaaggaaatagaccatatgttgctctgttctacattttatttactgtcacattgttacctctcttaatatttggtttaatccatttctcattgtttagtatcctgaaacataatatcatctaactgttttcataatagaaattttctttgttcctttagttccaatttcagaatagaaatttcagctaactgttttcagcatagaaatttggtttaatactgtgttatataatattagttaacatgtttggaaggggttctccaagaatcaacatgctcttatcaaaaagtgcaacaaagaagccttctcctaaagctggtgatccaaaaaagcatggaggttctccaaaaggtatgcaagtagaaaaatcaagagaaattaagagcctcttggaattatgcaactggtgtttcttccttgtcttatgtagagaaattaagagccgcttggaactcaactctagagaaaactcttgtggacctcttgcatgagcacaaaacagctgattataggggtcaaaatggatggacaacagaagcatggaacaaaattgtcaaggaatttcatcagagggaacaatatgtctatttcacaaagacacaaatacaagataaggaaagagagctgaaaagggactacaggttgctaaaggatgcaaagaatcaaagtggagctcattttgatgagaagatagggaggattacggctgacccagctttatggaaaaatatactaacttctcatcctaaggctaaaaagttccgcaacaagtcttttcctctatatgaggccttgggggagctttatgatgggcaaacagctgaagggacctacaactacacctccacccaacttctagatcttactcaagtaggaaatggagatgagtttctcaacatagaacatgaacaagatgaagtggaagaaatcttgcctgcacatgaagaagatgatgtcaatgtagttaaggcaggagatgcaaccggtgaaaggcatgatccgacgccacagagaaggactactgctgcaagagggaacaatgaggaaacgaggacaaagaggcataaaaagggcgataacctagaaggaataatgggaagatacattgacatgagaatgaagcaagctgaggaagaagccacacatctagcaaaagagagggaggaaaaggaagtgagtcaagctgcagacttctcaatcaagaagtgcatatccattcttggtacaatggaagttacaaaggaggaaaaagcaaaagcctacaatgccttcaaagaccttgacaataggcaaattttcttgagtgcctacgatgatgatgctgagtctgcactgatttggttgagaaacgagatggcttagctgaaattacaacaaggactgcagagaaatccagaatcgcttccttttgatgagatactctactgtaacattggaaatctccattccattggccaacagccagttacctatttcagaactagatcattggataactgcattttgttcatgctttaaactgctttaaactgaaatacgttacagctagaactagatcagctgtacatgcttctgcattgaactacattttgttgaacgtggactgcattttgcaaaaaacatgaactttactatactagagcg

SEQ ID NO: 37193 - DNA, 712 bp, Zea mays
  unsure (1)..(712): unsure at all n locations
  Clone ID: MRT4577_133924C.1
taagcttattgaatatcatangtgcgatttggggacccagaatgccaggttttgatgatgagattggagtctgatcttgcacaagtcctgctatccgcatgcagaggcgaactgggcaaggtttcactaacctggtcgcctgaaatcgcgatggtggttgtgatggcgagcgaaggataccctggctcttataagaaaggcaccgtaataaaaaacatggacaaggccgagcaggtttctccggctgtcaagatattccatgctggaacagctttggatggagacggcaaccttgtagctgtcggaggccgagttcttggcgtcactgcgaagggcaaggacatcgaagaagcgaggtcgagagcatacgatgcggtggatgtcgtcgactggccggaaggattcttcaggcgagatatcggctggagggcactgaagcaggagcagacggctaactactgacttgttaggttttcctaaatccggggtcagcttcgagcgtcaagtgaaatgaagacagtagagtcaccattgtcgtggttgcggaattgacaggagcatagcttctcccgtcgaacatgagcatcttttcaccatggttttggctccgaaccatttgtagcagtcttgtgttttccacaaggcaggcaactttgtcaagtgcaattatctcttgatgtgcaataataataccaccaactaattattttag

SEQ ID NO: 37194 - DNA, 603 bp, Zea mays
  unsure (1)..(603): unsure at all n locations
  Clone ID: MRT4577_133925C.1
atctggctccttttccttggagccgaccagcaggcacaggactagaggaatgctgtggccgccgcctcaccaccgcaaggatgcctacgaccaacctcttgctcgaggtcttcaacactgagggccttctcctcgagccctacgagttctactacttcgcggaggagaacatcatagcgaggaactcacaggcgctacgactggtccgtcaagacaatatgatgctgactaaagggcgcgatgctggccgcctcttccgatatcacggggggctcacgccgccgtcactcacccccagagcagtgcatacaatgagcgctcatcacatatgcgtccaagagcactttcctgtcctgtacctggtctgacaccgagactacggatgtggaatcgtcgacctgcagacagaccaccatcgcctgctgggacagtgtcccgtacgctctcttccctcatggagacccagaatcctcctccaatgtgttgcctgacgacttatctggactcgccagatgatccacacctgaaggatgaatattcatgccatgatatttgtcctcgtggctatgagaacacctcaggntggctgaaggcctatgaagt

SEQ ID NO: 37195 - DNA, 222 bp, Zea mays
  Clone ID: MRT4577_133926C.1
tgggcgccctttgtttttttttttgaaacaaaatactcaactgaatatcacacgcgtgtttaggctttaaacacgagagtatcgtgaatcctccgaaattggcaatagagcagttaacaatatgcaagccacagctatcccgtttaaattccaggaatcacaaacctggtgttttgagaaggggtgctatgccttatgaaaaataacatccctctgggagtt

SEQ ID NO: 37196 - DNA, 348 bp, Zea mays
  Clone ID: MRT4577_133927C.1
atagtgagtcgtattaatccggctggccgcgactgtggatcttccacggtcgcagagatgggtctacgtatccaaggtcccgtatgctaggatctgtgcatccacttgcactgccactcatcgtgcggctgacctgtcaaggctaccagtcgtgatgcatacagcacatcgaattacggccagtttgcgctcgcgggacacgctggatgtcaaggacgagctctggcgagcatcatgtatgaatctgaagctttttactgtgaatggacgatctagaatcaagatgctgctcagtgggtgcaacgttaggtatgcccgtgcggcgtcctcacttgaggtcaatttagg

SEQ ID NO: 37197 - DNA, 735 bp, Zea mays
  Clone ID: MRT4577_133928C.1
ccggccgggcaccgcaccacaacaagcatagagacaccaagcgtcaaacttgtcaagcagctagcaaccaacccaagaaagctagacaccatacccatggctcgcgctagcgtcgtcttcgtcgttgctgctctcctcttcgtcgccatggttgtggcaccgatggccgaggcaaagtccgctgatgccccctccgccgatgcccccgcccccgctgctgacgcacctgccgatggacctagcggaccggcaggtgcacctggtccccagggcgtcgagggactatcgggcaatgaggacgacgacgatgactccaccaactaaggccaagcacgtcggtccgattgcatttggaacaagatatgaaagaaaagtgagagcaatgttgtttaaaaccaaaaatccataataatgtgtggtcatccgtgatatgttcttgctctccctctttttctttctgtttgatttcgatgtgttatcatgttcttagcctctaattgtatcaattcttgatatcaaggactccaaaattatcgttttttgtgttttcgagccactgagattctgagacgactagcgattcatcattcacaacattagttttaggcttcccagcattcctctactacacaaaaacatgtcttcttgttccccaaaaaaaaaaaaaaaaaattcgaggcatatttatcatcgaaaatcatatggtactaatttatcccaaaaaaaaaaaaaaaa

SEQ ID NO: 37198 - DNA, 509 bp, Zea mays
  Clone ID: MRT4577_133929C.1
gcccgggactccccgatcgccgtctgctcttgctcgcctttgccccttctgtctcccatcgtctgtatcgtagcattaactcccaaggcgatagcgtctccaagatgtcgctgctcaacgacgttgacttactcatgccaccggctgagcttgtgaagctacagcacgtcatgaatcggctaatccagtcccccaactccttcttcatgaatgtcatgtgccagcgttgtttcattgtaaccactgtgttcaggcactcccacactgtggttgtagatccccgactgcctaactgttctctggcaaccatgcggtgctaagagcccatctcaccgatgtgtgctccttccatcgcaagggcgattaggtcctgcttctctcatcgcgacaagatgtctatcttcgtgctttccaactctgtcgggatatgtactcaactcgaggcacatcttgtgaatgattatggctggtatcgaggcctctctatgcgagagtgtgatgctgtactt

SEQ ID NO: 37199 - DNA, 431 bp, Zea mays
  unsure (1)..(431): unsure at all n locations
  Clone ID: MRT4577_13392C.1
gcacggcaggatccgccgacgccggagaagtacgagcaggcgggtgcgcccaggcacggccggtccggctctctgaaggcgagtgcctctctctctccctgtgtgttgcaaggtttcttcgtgcatcgtgatggtggtgacgatgggtgtggtgtggtgcggtctgtgcaggcgaactcttcgaggacaccgggcggcgagaggctgggcagggagaggtcggaatcctgcgggaggaactggctggaccgctgggtggaggagaggtacatggacgacgagaagaacgccaagattctcgaggtggacaacggcaagccacggcgccggtatgcttccaagaggcgcggcggcggcggcggaaaccaccaccaccaccaccagtcgncgtgctcgacgacgatggggtccgagcagaaacagccgagcta

SEQ ID NO: 37200 - DNA, 312 bp, Zea mays
  Clone ID: MRT4577_133930C.1
acccacgcgtccgggaaggacaatttcttcatgaatgactcgccctagaatcatgtagcctcttgccaacagcttatacatccacatatttaaactctactctgcgaacaaaaaaaaacaaaaaaaaaaaaaaaaaaaaaaaaaaaaaaaaaaaaaaaaggcaaacacacaaaaggaataaattcaaaacataaacataaaaaataagaaaaagctctataaagggcgtcacctaaatagaattcaatgtgagttccttgaaaatgtaatcactaggacaactagacgtttacacaacttaatgtcctaggg

SEQ ID NO: 37201 - DNA, 1694 bp, Zea mays
  Clone ID: MRT4577_133931C.1
catactatcgtgacaatggttttatgccatatgcccgttcagttcttgtgatacacaatatagcacatcagggccgtggcccgatagatgatttcaggtacctggatttgcctggtcattacatggatcagttcaaactttatgatccattcggaggtgatcatctaaacatttttgcagctggtattagagctgctgatcgtttgcttaccgttagtcatggttatgcatgggagctcaaaacacctgatggcggctggggccttcatagtatcattaatgaaaacgattggaaattccagggtattgtaaatggtattgatactgctgattggaatcctaggcatgatgtccatctacaatctgatgggtacaccaactattctctagaaaccgttcagactggtaaagcacagtgcaaggaagcactacagaaagagcttggactccctgttcgtggcgatgttccggtcattgcttttattggacggctggaccatcaaaaaggtgtagatctgatagcagaggcaatgccgtggattgctggtcaggatgtacaattaattatgttgggtactggaagacaagaccttgaagatacattgaggaggcttgagagccagcattatgacagggtccggggctgggttgggttctctgtccggttggctcatcggatgacagcaggggctgatatactattgatgccatcaaggtttgagccatgtgggctgaaccagctatatgccatgatgtacgggactgttcctgtagtccatgctgttggtggtctccgcgacacagtccaacattataatccctatgaggaggttggagttggatggacttttgagaaagcagaggcaaacagaatgatcgatgccctagggcactgcttgaacacatacagaaattactggagcagttgggaaggtatccaacgtagagggatgatgcaggacctaagctgggataacgctgctaaactctacgaggaagttcttcttgccgccaaatatcagtggtgactgttgttgaactgtccaaggaactgttgatatttgtcattcatagacctgaaggctttctgtcgcatagaagtcaccgactgtttcaattcttttggtgactgcttcacacagctgctgcatgctttgtcctgaattttgcaggacggtgtgcgtcgcaacagccaaattttttttgttgttgccagttcctaataatcgcatcagatgtgaatgtgaattctgagtctacctcctggacaaacacagtggatgaggcttttgctggaaacaggttaatgctggaggaaagattgaggggaagcgtcgtgcactttttgcaagtgtttacgaattcatttgttctacagggagagctcatttagacgctttggtacaggagggtggtagatagcagagaaactgatgctttgtatcttgagtagttttgttgtatctctaaattaggatacttgttacaatgttcagttcttcatattttttttccgtgcatatcctgtagatgatttagtgttccggtcttccgaatgatcgtaaaaaaggggtttgcaggttgttgagaataatatataattatgaaagggcatcggaatccctgaacaatactgaagttctctgaaagaaccggggccatgaatgtatgttttcggaagttctccggccccc

SEQ ID NO: 37202 - DNA, 234 bp, Zea mays
  Clone ID: MRT4577_133932C.1
taaagggatcaaagctaacgtccgcgggcaggcaacgtaaaagcttttttatggggcccccaaaatcaaatccacgggccggggtttaaaaacgtggggacgggaaaaacccgggggtaacccaactaaatggcctggaagaaaatccccctttcgccggggggggaaaaaccaaaaaggccccaaccaatcgcccttccaaacatttgccacacctgaagggcaaaggggccc

SEQ ID NO: 37203 - DNA, 155 bp, Zea mays
  unsure (1)..(155): unsure at all n locations
  Clone ID: MRT4577_133933C.1
ggtcctcaatctcaatcccacaccaccaccaccacctcctccggtccccaacccctgtcgcaccgcagccgnccgggcccatgggccctggcctcaccgactcgtcaactcaactctcngacacacgagaagacatcgcggaatactatggatcg

SEQ ID NO: 37204 - DNA, 498 bp, Zea mays
  Clone ID: MRT4577_133934C.1
attacttttagggaaggtggccccgccggaaggtccggttccgtaataccggggccccccaaccgcttccgttaaagcgtttttgcaaacaaaaggttctttaaacagaccatgttgaaaagggccatcgccctcggacaggggccgggctctgtaagctgccatcgcttttgaaatgcaaatgccttgcccctgggcgatgctccagggtttgaacaggactggcgccgccctaacaacaataataggccccaggcggtctgtacccttactgggagtacctaaggcagccggatagaatccacctatgggcggcaccttattacccctgatgtgggcaaacgagcgcaaactaccagccgctacgacaacattgttgtcatcaacaaatagaggattatgaacgtccattcctgcgcgcagcagctgcataaaatgatgcaatttgagcgagccgctgccgcaagaactagcctgtactagccatctttgatgcat

SEQ ID NO: 37205 - DNA, 453 bp, Zea mays
  Clone ID: MRT4577_133935C.1
attaaaaataaatttttaatttaaaaagaaaaaaagaaagaaagggaaaggagagaagagggggaaggggagggggggaggggaaaagaagggggggggaaaaagggagggggggaggagggggggggggaaaaaaaggggggggactggaggggggggggggcattgtttttgggccctcgagtataggagccggggcgtggggggcagggcccaacggggggggggcaccaaacccggccccaccgaacctagcactcaaaacctagggcccaacgaaaagttcgcacgggccagaaacatcagcacgttaagatgaacaagaaaattaaagcccgggaccaaaagcagaagagcgcccgccgatgagcggaaaaggaagagcgcaaaaagcaaaaaggacagcgaattgagcgcacccaattcggacgcccaactaaggaccaccgacaa

SEQ ID NO: 37206 - DNA, 703 bp, Zea mays
  unsure (1)..(703): unsure at all n locations
  Clone ID: MRT4577_133936C.1
gctcactgctcagtgctcactgctcactagctaaaacatctcctttcttatccatggagacggcagcgctcacctcccactccctgcagcgcccagcagcagcagcagctgctcccgcgcatggccagcggcggagggtcggagcggcgggcctgcggcaccggcagccgcgcgccggcggcaggatccgggccctgccttcggcggaggtcatcagcgagatcctgagccccaagctggtgcccggctcgcccgccgacaccggcgacgtctcctcgctcgtcccggccgtgaggaaccgacgcgtcggcgatggaggacggtggtggtgacattagtcgctccatcaaccacgatttgaggctgctcggagaacctggagtccctgagagccgtgctactaccactaccgaccatgctagtggcagtggtagtagtgctgcagttcctatcgacctcgccgtcggggaatctggcgctggcctaggcgcagaagctcctgctgaggttggtcagggctccagcgaccgcaagaggtgtaacacctcaaagttaaactacagaggaccactcctacaacatctattactggtaagaggaaacaacaatggagctggatctatggatctgaaaagagtatactcctcctattactnctnctaacttgtctaggggaacatcagcatctgaattggtacaggca

SEQ ID NO: 37207 - DNA, 303 bp, Zea mays
  Clone ID: MRT4577_133937C.1
gcagatattgaacatgacaagctggttaaggatggaccggaagtagcaccaaacgtgcgaggctggaggtattagtggtgtggtcgatatcaacatgagatgggcaatacagttcgtggtgagtgtatcatgctctaggatatcactctacaaggtaatgtcccattgattctgggggctgcaggagaggatgatgcatggatcgggtattgacttctatctaacggggtgaagccttcaatggtcaaagaaaaagtttgttaaactctgctgtataatcgtatgttaaagttccattttttt

SEQ ID NO: 37208 - DNA, 288 bp, Zea mays
  Clone ID: MRT4577_133938C.1
attcggctcgagctccactccaacttttttttttaaagaaacggaccctgctctggccggggtttctttatacgttcgtcgggatccacaccacgtcaacccaggctcgcttagctgaggcggtaagaaatctgtcttatccattatgaaattcaagcctgcgctatataagcctcccatctcgttcatgacccaaacatccctagccctcctaccttaataacacaatatgcgttagaccacctgcactctggttactattgagctcataaagagtgctggtcacca

SEQ ID NO: 37209 - DNA, 334 bp, Zea mays
  unsure (1)..(334): unsure at all n locations
  Clone ID: MRT4577_133939C.1
aggagttttcagagctgcagtacatatttttggagtacctcttttgctgctccggaaactctaaaaaaacaacctagacatggagtctggagttatttacttaccactgccaagattccagtggttataagaaaaccatttaaatctggaacaaagctgctccacccgagttttgaagtggagcagagccatgccgaacacgcccttaatttattctgtgccacgtttaacttgaggttgtgcttatttacgatggacacctatacattccatttctagtctanaataagggtgttgcatctgacaggaagagaaaaaaattgtaagttgataa

SEQ ID NO: 37210 - DNA, 1824 bp, Zea mays
  Clone ID: MRT4577_13393C.1
aattcggcacgaggcctctcctgctgcctttctctcttctcggtgaagcgtgtgttcatttcactgttttggtttcatctcccgctctttctttaccccgtgctccggccaagtgctggaaccaagaaagcctcatggggcggccggccgacgggcggtagagaggcggagatgggctgggcacccaggtggttgcgcgggctgctcggcggcggcggcaggaaggccgccgtgacaaggccggtgaaggagaagaagcgctgggggttcggcaagtccttccgggagaagccccccgcgccagtgccggcgcggcctccgacgcctccgtcgcatcccgcggcgacgcctcgccggggctatgcagcggcggatgaggcgggcgacgagcagagcaagcgcgctatcgcggtggccgcggcgacggcggcggtggcagaggccgccgtcgctgccgcccaggccgccgccgccgtggtgcggctgacgagcagcgggcggtgcgcgccgccggccgccgcgaagcgggagcagtgggcggccgttcggatccaggccgctttccgtggctacctggcgaggcgggcgctgaaggcgttgcgggggctggtgaagctgcaggcgctggtccggggcaacatcgtgcggcggcaggcggcggagacgctgcgatgcatgcacgcgctcgtccgcgtccaggcgcgcgcgcgcgcctgccgcgcaattcgctcgcagcatgtcacggctcatccggatccgccgacgccggagaagtacgatcaggcgggtgcccccaggcacgcccgttccggctctctgcaggcaaactcttccaagacgccgggcggcgagaggctgggtagggagaggtcggaatcttgcgggaggaactggctggaccgctgggtggaggagaggtacacggacgacgagaagaacgccaagattctcgaagtggacaacggcaagccagggcggcacggttccaagcggcgcggcggcaaccatcaccagtcgccgtgctcgacgatgacctccgagcagaacagccggagctacgcgaccatgccggagtcgccgtccaaggactcgacgaccgcgcagcagtccgtgccgagcccgtcgtccgtgggcatggctgccgaggccctgagcccgctgcgcgtgccagcggacatcgccgagctctgcgacagcccccagttcttctcggcgacgtcgcggcccgggagctccaggagggggggcgcgttcacgccggcggccaagagcgagtgctcgcgcagcctcttcggcggctactccgactgccccaactacatggcgaacacggagtcgttccgcgccaaggcgcgttcccagagcgcgcccaagcagaggccgcagcagcagtacgagaagtcgggctccctccgcagggcgtcggcgcacgccctcgcggcggggccggcagcggcacagaggtcggtggcctcgttgcacgccatgaaggcgtatccgggctccggcagattggaccgacttggcatgccggtcaggtactgatccggatcctacctagctcgcttcaggataatgtggtgctgcgcctgaactgattgatacccagtgtctcaactcaagcgatgaggatgaagtgaattctactagtggtcgttattagatcttgttccttcggtggtgcctattaccgtcaacagttttctgtttgttgctttgtgtagcgaagtgtaagttgctggtacgtagctggtaatactatgcgtgcttaaccgctaaaaaaccttttcctctaaaaaaaaaaaaaaaatagctgcctcgaga

SEQ ID NO: 37211 - DNA, 1654 bp, Zea mays
  Clone ID: MRT4577_133940C.1
gactcctatgggcgattgggttcctcgaggccggccgggatccatgcttaaggtgaagcaagcagcacacgagatatagagggagggatcatggctctctcccgtgccgccgcgtcaggagggttcgcgctgatccttctcgcgtgctgcagcctcatcatgctggcggcggcgtctggcggcggcggcggcggcgtggacgacgacggcgtcggtggtgacaggctgatgatggaccggttcctcagctggcaggcgacgtacaaccggtcgtacccgacggcggaggagaggcagcgtcggttccaggtgtaccgccgcaacattgagcacatcgaggccaccaaccgggcgggcaacctgacgtacacgctcggcgagaaccagttcgccgacctcacggaggaggagttcctggacctgtacaccatgaaggggatgcccgtccgccgtgacgccggcaagaagcgggccaacgtctcctcctccgccgccgtggacgctccgaccagcgtcgactggaggtccaagggcgccgtcacgccgatcaagaaccagggcccgtcgtgctctagctgctgggcattcgtgacggcggcgacgatcgagagcatcaccaagatcacgacagggaggctggtgtcgctgtcggagcaggagctgatcgactgcgacccctacgacggcggctgcaacctgggctacttcgtgaacggctacaggtgggtgatccagaacggcgggctcaccaccgaggccaactacccgtaccaggcgcggcggtacgcgtgcagccgctccagggccgcccagcacgccgccaccatctccgactacgtgcagctgccggcgggcgagggccagctgcagcaggcggtggcgcagcagcccgtggccgcggccatcgagatgggcggcagcctgcagttctacagcggcggcgtcttctcggggcagtgcgggaccaggatgaaccacgccatcaccgtcgtcggctacggcgccgactcctcctcgggcctcaagtactggctcgtcaagaactcgtgggggcagagctggggcgagcgcggatacctgcggatgcgccgcgacgtcgggcgcgggggactgtgcggcatcgcgctcgacctcgcgtacccggtcgtgtgattcatatactatcaatcgtatgcatgcatgatgcgtacgtgcgtgcgcgcctgcttgttggttgttgcatatcggcggcacgtacgtgtatacatatatatacgtactactactacggattgatctgcatgcggcgacgtataccacgcatatatacacacgaaaactactacgtgtaatcaatcgatactagtagacatataccaacggtaacgtgttgcatcattgtaaaagctggctatcagggacaaaatgcccacattaattattataaaaggctttgttattattgtaaaagccggctatcactttcagggacaaaatgcccacattaattattataaaaggctttgttattattaatgatccagttggcacagctagcacctagcagggccaaataatgccaaattaccaccattaatgaaatattacgggccttaattaatgctccaaaaaaaaaaaaaaaaaaaaagtcgacgcggccgcgaattccagatct

SEQ ID NO: 37212 - DNA, 359 bp, Zea mays
  Clone ID: MRT4577_133941C.1
gcccttaaagcaacgattacaaaccagaccgcgcgtgaatgaaatgcaaagacaggggggggggtcaaagggaaaaaactgctaggcaatttacaacctacccgacgaagcggggtggatttgtcttacataaatggacttgtgcaccctggtttattcaaaaataaacacgtgacaacgtcattcgagccggctttttattactggagcatgaggaagaaactgcgccttttgtcccacgtgggcatttgcccaaactataatgcatggcatggccaccggggagcgaatgatgggcaccccatcaagcatatccaccgtactggcaattgtgaggtcgaggtgggtttttataacca

SEQ ID NO: 37213 - DNA, 550 bp, Zea mays
  Clone ID: MRT4577_133942C.1
gctaaaatattaaaatagggagttgttttacaaaacccgtggagatgctctagtacataaaaattggtcccacagcatacccgcctgcaattcatagtgccaacatagaaaaatatattgccttttctaggaaccagcagtgtggggtatgtgtcggttcttgtgggtgtttgagttcttgtcgcatttttctttttgatataatgatatgcagctcttctgcatgctcgagaaaactagattgttaaatacaaatgattaacccaggtagcagcttccttgaaaacacaatgaatgtagaagagacggtttcatccacaggaaaatttgaaataaattttgttcccatggttgaaggaacactggtaaaattaatatgtaggaagtagaatgcaagaggtgccacataacatagaattagatactagagtgatttgttcaagatgccaaagcattgaaaccctaaataaaaaaatagaatctcaccgttcttgccggtgcattgacacccattgcaaatgtctcagtggaaaacagtacctacaatgag

SEQ ID NO: 37214 - DNA, 432 bp, Zea mays
  Clone ID: MRT4577_133943C.1
accccaaaaaaaaaaagagggccggaggtgagcaataaaaactaaggagctggtggtgactggataaaaaaaccaagtggggactggggaaattttggaaaaacacttccaaaaaaaaaattgaaacgatgggggggcaaataaaaaccgacatggaaaaaaaactcaggggatccaacagcataatccagcacagttaagcccatgggggggtaaaggggcataaggacaaatacgatgatcaaagatcaggggcgcttttatttaaagatgtttccaaatgttcaggctcttttggtggggacgggaggaaaaggacctttaagggaccccaaagtccggggaacgttttaagccctggggtccaatgatcccaaaagcaacacgggcaccggggtttccagggcttttggtgaactcgggcccaccctt

SEQ ID NO: 37215 - DNA, 236 bp, Zea mays
  Clone ID: MRT4577_133944C.1
atatagtattcacaatcttttaattacctcaaaacatggattctttgaaatttttgaaggccttatgaattccattgttccatatatcaatcaacattgactcactgaacaacaaaattcaatacacctaattttgctaatcaccacaaacttatttttacattaattcaacctataaattatatctttaaccaccatattattcaattcattttaatctcctaacttataataac

SEQ ID NO: 37216 - DNA, 244 bp, Zea mays
  Clone ID: MRT4577_133945C.1
cggccttcgtgcttaaaatgagtgcctataaaatgctggcctaaccagcctcaaagcagcgtaccccgacctaatggacctcacaaaataaatacaagcatatgacagcttcttgatcgccataaaaatgcctaatgcatttcggatctaagggtaggacacttacaatgttacataactaccactcaacttctatattttccttacagcgcttctagacaacaacagcaggtctcaccttaaa

SEQ ID NO: 37217 - DNA, 439 bp, Zea mays
  Clone ID: MRT4577_133946C.1
ccacccaacgtaaagtttggcataaataacccatgttttcattttttaacacaaaaggggcaaaacctaccaaacaagggttttttaatacaccctttttttacccaaacggaggggaaaagggggggtaactttccccaaattttttcctacaaataaccaaaaacccccggtttaaatgttcctacaacaaaatttttcagcaggggcctttttttgttgaaagggggggggggataaaacaaaacaacctcacaaaattttttcctaaggggccttttggatgtccttttgcaaagtccaaaaaacccaattccttgcttaaaaaaaaaaccttggccaaacttttggagagggaaaaagaacccgagggggaaaaacccctcctttgcctttggagctgtcaaggttccttatttttcaagaaccttcccatttt

SEQ ID NO: 37218 - DNA, 1318 bp, Zea mays
  Clone ID: MRT4577_133947C.1
agaaaaggccggcgccggcgggtacgcgggagggcgtacgaaggaagaacagctcgtccgagaccatgaagagcagcccacacctggtgctgatcctgtgcctccaggccgctctggtcatgggcgtcttcgccgctttggctaaagaaaatgccctggttgagagcaaggccatcgacatcaacccggggcagctcaagtgctgcaccaactgcaacttctccttctcggggctctacacctgcgacgacgtcaaaaaggactgcgaccccgtctgcaagaagtgcgtcgtcgccgtgcacgcctcctactcgggcaacaacaagttcaggtgcaccgacaccttcctcggcatgtgcggccccaagtgctagctagagaggaagaacgcgcgctgctgctagctgctatagcttcgttcttccgccgccggccggccgccggccggtgcatggttcgtactgtgtgttgtgctactacgtactggcttcttgtgtgttcggttcttgttgttctctcgacagtgcaccttgcgcgccaacaataaaccgttgtttgccatgaaaaaaaaaaaaaaaaaagaaacagcgcaacgaagcttgcttctacgagaggatatagagaggaagaacagctcgtccgagaccatgaagagcagcccacacctggtgctgatcctgtgcctccaggccgctctggtcatgggcgtcttcgccgctttggctaaagaaaatgccctggttgagagcaaggccatcgacatcaacccggggcagctcaagtgctgcaccaactgcaacttctccttctcggggctctacacctgcgacgacgtcaaaaaggactgcgaccccgtctgcaagaagtgcgtcgtcgccgtgcacgcctcctactcgggcaacaacaagttcaggtgcaccgacaccttcctcggcatgtgcggccccaagtgctagctagagaggaagaacgcgcgctgctgctagctgctagcttcgttcttccgccgccggccggccggcgtgcatggttcacgtactgtgtgttgtgcaactactgctggcttcttgtgtgttcggttcttgttctctctacagtgcaccttgcgcgccaacaataaaccgttgtttgccatgaataaatagtactatatgaagttatttgcaaacaaaaaataaaaggtgacgctgatgggcatgcagcattaatattgcgcggacaggcccttgaggttgtttcttccttgtatttaatatagcagcggatatacatgtgcggatgcacgtcgcgcaaaaaaaaacaaaaataacgcccctaa

SEQ ID NO: 37219 - DNA, 321 bp, Zea mays
  Clone ID: MRT4577_133948C.1
cccgagccaccacccaagccacagcacgcagctccgatagactgtcaggagaatgacatgcacggcgaccactcaccaggcagccttccatgtcaatgccaacatggcacaccacagcagtcggcaagcccagacctccgaccaccaccggcatgataaggccccaagtggtgtcaacatgggtggacgaggactcaacgaggaagagttcatcgagtggttccagagagcagtcaactctgcgatgtttgcaactacattcggggcacaacgcgacccgagttcatctggtaacggaagcaatgccaagagtagcggtag

SEQ ID NO: 37220 - DNA, 478 bp, Zea mays
  Clone ID: MRT4577_133949C.1
ggggggggggggggtttttttttttttttttttttttttttttttttttttttagggggccgagtgccaacaactcgggacaagtcgatgcccaaatggggcaccaagcccctttcaaaaccagtgtgaatcatcaaaccacccaaatcttggggggggggcgtaaaacacaaattcttaccatcacataccctgaccacagctaaatcacatgaacaggttcggcctccaaaccttaaacgtgggcttcaacttcctggggggggggcttacctttcgggacaccagggggaacttgatctcactgttgtggaactgcgttgggttgtccctcttgcacaagtttaagtgcacccgggcggtctttatgatctggatgccgggggacctcacccgggggcgagaagccctctcattgtacatctgtgctacaacccccttcaagggtgtgtcccgggactccttgtacatgttgggg

SEQ ID NO: 37221 - DNA, 1072 bp, Zea mays
  unsure (1)..(1072): unsure at all n locations
  Clone ID: MRT4577_13394C.1
gccggccgggctgcgnagcatcaccattcttcatccctcgttgtcatctcacagcttgggctagagaccaaacaaaccaaagggaagcatggcagcaggcctgcaagtgtttggccagccggcgtctactgatgttgccagggttctgacgtgcctgtttgagaagaaattggagtttgagcttgtccgcattgatacatttaagacacatcacaggcttcctgagttcatcaggctgcgggatccgaatgggcaagtgaccttcaagcatggcgacaaaacccttgttgattcaagggacatatgccggtacgtttgcaaccagtttccaaattacggaaacaagagcctctatggatctggtgctctagaacgggcatcgatagaacagtggctccaggcagaagcccagaactttggccctcccagctctgcgcttgtgtttcagctggcgttcgttccgcacctcagtcacctgggcgttcgtcaggaccctgctgttattgctgaaaacgaggacaaactgaagcaggttcttgatgtttacgacgaaatactctccaagaacgagtacctggctggtgatgagttcaccctggccgacctgtctcaccttccgaactcgcactacatcgtaaacaccgagagaggaaggaagctcttcaccaacaagaagaatgtggcgaaatggtatgacaggctctcgaagcgcgagacatgggtgcaggtcgtcaagatgcagaaggaacatcctggtgcgttcaagtaatggcttgtcttggggagttgtgagtatggcttcatcgtccgtgttggtctggctcatcagtgttaaaagcccatcagtgtcgtcaaccagaataatgtgaagcccaactgtgatgtatggtcttttttttttaaaagcgcatttgtaaactattggctatttcttgcacgtgccaattcatcgtcacatataaaataaactgtatctttgaccttgtgtcatgtacgcaaaataaataagttttagtgatgttatcgagaaatatagtagaaagtatgttctaactgccagttggtatgttct

SEQ ID NO: 37222 - DNA, 352 bp, Zea mays
  Clone ID: MRT4577_133950C.1
cccacgcgttcgtccccgccccttttttattttttttttgttttttttttttggggggggtgttttttatttttttttttgttttttttaaatttaaaaaacaaaaccaccttttgaatatattgtattaagggggataatgaaagaaaaaacacagtattttattcatagaccgggtgcgaataggttcccttgattggaacaggagttggcgtttattttttccaaaaaatggggcccccgtgtgggatattggcgcttttgaaagcattaacctttggagggggttggttaaaacaaaaaaaggggttggtgtctggggtggtcaattgtttagggttaggggggtccc

SEQ ID NO: 37223 - DNA, 449 bp, Zea mays
  Clone ID: MRT4577_133951C.1
taccggtctcggattcccgggtcgactcacgcgtccgcagacgcgtgcgatggaaaggtagccttcgatgattatcttgatgctacaggatcagggatgaaggcatcactcagcacaatagggatgcacagaccaagatcggatgtatctcgatcgaacttagtcatatggctacagtctaaacccaaccatgagatagatatggctacgtgctaagcactaatgatgaattatagctgctgaacacctatgtgcatgagattctataacatgttcttgcgaaagatgaaaatctgtagatcaatcaagctgaatgtaaaaagtcgaagcatgaccaatgctagtgctaatgacacagctattgcatcaacattcaggagagttgcacagattatatagactgtgcataggtccaatgcttattggacgactgagtgccagactatgat

SEQ ID NO: 37224 - DNA, 787 bp, Zea mays
  Clone ID: MRT4577_133952C.1
ttgggtacctcgaggccggccgggatctttcacgttcacttttattcatcctgtcacgctcttgcctcctgctagtcgagcgcgatcctttgcactctgcacacacacggtgacgctctcagcctgctactactaactaccactcgcgttgtgacaatgatgtatgtccaggcgacgtcgcgccagcggatgcacgctggtgctgacgaacatgaccgtcggacgctcgagagaaagcacgacgaccgtgcttgcatgcccgccatggtacaacgtacgtgaaggacgaacgctagagcgacttcctccgaccagcgacatggcgcgtcccatcgacctcttctcggcgccggcgcgtcggtcgcagggcgcgcgcatgcgtaccacgtctcagccggcactaccacgctccaacgctgccatggatctgggcgccgtaggtcgacagccgcggttagcctttcctcatgcccacgtgcgccaccttgactcgcaccacgtctcctgaagattcttctctatgtagatcgtcacgcccccatttgcgagatcgatctcgacatgagcctcgccccgattcattgagtcgcttacgagtaaggaccatacaccactcctgtttgaggcctgcatgtgcgctcaccatgattgcatcctgcacatcatacaacactaactcgttcgttgagattgtcgctgcgcccatctttgttaggctcctcaactgcattatcgacgatgtctccgaacacgctgtatgcgcttttagtaatggtgctcgtgactc

SEQ ID NO: 37225 - DNA, 694 bp, Zea mays
  Clone ID: MRT4577_133953C.1
cattgggacctcgagccggccgggatccccacaaccctaatcctcaatcctctcctcactccctcccttctagcggcggccgggcggcgcctccgcacgctgccggcgttgtgcctcgcctctacgcggctccatcagtcctgcgtggccgtcgagtagatctccgtcacaggcgcgagctcctcaccgtccaggcacgcgcgctctagctcccaagccgcgcgctctagctcccaagccgcgcgctccaggccgcacgtcatccaggtgtcgagctccaggtcgcgccacgccgcgcgccgtctaggcgtcgagctccaggccgcgccacgcctcgcgctccaggccgtgcgctgtccaggcgtccagctccctaggccgcgcgctccagcgtccagccacgccacgcgctccaggccgcgcgccgtccaggcgtcgagttccaggccgcgcgctccagcggtccagccatatcgccctcagcgtctcagccacatcacgtcgaggcgtccagtggctccagcgtctcagcatatgataagccatgggatatttgttctcataatgaaggaaacaactcagacgaggttgattggttggaagataaatcgggtggtgatgtcggcaagaacaatcagattaccttgaagacggaggtagtggtagtagaccttggtgccagtgcgtctgctcc

SEQ ID NO: 37226 - DNA, 212 bp, Zea mays
  Clone ID: MRT4577_133954C.1
tacgtcctctgcgcggtacccggggggcggagagtcctcttgaccgtaccatcgactccgctccgattcgacgaatcggcgctggcggacgagacgtgaatctcgacggaggagactccgaccatcgctacatgaaggccgaggactctgaaaccgaaatctgcaccttaacctgaccaaactgagaacgggaggttgcatctaaaaacatt

SEQ ID NO: 37227 - DNA, 490 bp, Zea mays
  Clone ID: MRT4577_133955C.1
gagacgttgatgggccttcatctagctcccgccagcgcccttcgcgggaaatcgcagccgacaggcaaacgcctcgggaatcagctgtgccccgcgcctcgtgggccaccaggagctgttgctgcccccggtgtctccgccctcaacttccaaaccctaggggcggtagaggctccaaactcgggcgctttggccgtgaccgtccgaggtgggcgtcattgcgagttggtgacccacgggttgcggttgactagtgccttttcttttcttcctgagaagcttgtgcacaatctcgagactgcgggatattgcatgcctactccagtgcagatgcaagtcatccctgcatcaatgagtaatagaagtttacttgtttctgctgatactggttcagggaaaactgcatcttttctaattccaatattgctcattgtcacgataagatcacaagatgcccagcatcaggaccgtggcttagtcttgctcacag

SEQ ID NO: 37228 - DNA, 243 bp, Zea mays
  Clone ID: MRT4577_133956C.1
ataaaagaggcctcaggcaggatctggcatagagctagtgatcagcaaatgtttgttgaaaaggtttgacaggtcagtcccttcccacccctcttgcttgtcttacttgtcttatttattctccaacagtgctccaggcagcccttgtccacgggctctccttgcatcagccaagcttcttgaaaggcctgtctacacttgctgtcttccttcctcacctccaatttcctcttcaacccactg

SEQ ID NO: 37229 - DNA, 180 bp, Zea mays
  Clone ID: MRT4577_133957C.1
gaggattatgacaatgaagactagctccggcgttatatagctacagaggtgatgagtgggaagtgcaatacacctttcagttcagggtaactgtgtagccattctcatgtgtcataataacccccagagctggcgcagtaacacataacgtcctagaggagaaggagcctggagtatttg

SEQ ID NO: 37230 - DNA, 131 bp, Zea mays
  Clone ID: MRT4577_133958C.1
gtgacagccaaagccctgtgcgtgcgccacatttcctagtgtcaccgagatcgaaatgcgccgggggccaggtgctcatgccgctctctactcacttgctctgcatcttctgtttccagctgggcgggcgg

SEQ ID NO: 37231 - DNA, 104 bp, Zea mays
  Clone ID: MRT4577_133959C.1
gcaaacgactggctcacaggtcacctcgtccgccgcatcaagaacttgcgcagttaacgtcacagccgctcaattttacagcgcagagcaggaagcatcagctg

SEQ ID NO: 37232 - DNA, 296 bp, Zea mays
  Clone ID: MRT4577_13395C.1
aacaggccgcaaagcaaactgggggggggggaattactgccgtcggtcggacacccccaaacagaattacaaactttaggtgggtcaaaataccgcccccccatgagcatatgcctaagctagaggtatatatacacaggaaacatgaggagggccacaagtgccaactttggtttggaacaaatcaaccaccggcagatttatttcatccaccaccaggagcagcagcagccgctcaaaatccatccaactactgtaataaatgaagaagaatctcaaagttttttcccctctcc

SEQ ID NO: 37233 - DNA, 1341 bp, Zea mays
  Clone ID: MRT4577_133960C.1
tgtaaagattgttgctgttgtatcaagggcgggaggggggggcaatttggaaaaaaaactgcctgaccaactatttgctcctcttgcttaacagtatcagaaggggccgtgtcctggaaataggtagatggatttgtatctgtccgaaattaaacaatccagtggatgaatcattaaggggaggggggcctggccgattgcttgcactaaaagaatcgaatgctttatcctttaacctctttgtatcaatgattatcttgatgagcaccatgtgttttggtgaattatttgtcctctatgtagttctgtaaagtgatgttgcagtgataattctttgcatctcttcttgtttaagcaggataggagacatgacaatgagaaggtgtcagacaggtcctggtcctgttttggctgcaaggagtcctggtttgggcaacgttgacaatctccatgagagttcaagcttatctaggagctgggatttgaacagacagattgatgatgaccgtgatgtactcatagaatgtagagatgtgcataagtcatttggagagaaacagtattaagaggtgttagtttcaagacatggtgaagcagttgggatatgtggaccttcagggacgggaaaatcaactatattgaaggttatggctgggctgcttgctccggacaagggtgatgtaatcatttgtggaaagaaaagcatggtttagttagcgatgaggatatagagggtctccgcattggtttggtctttcaaagtgctgcactttttgattctctcacagttcgtgaaaacgttggattccttttatatgaaaattcaagcttacccgaggaccgcattggtaaattggtgacagaaactttggctgcagtaggactaaagggtgttgaagatcgtatgccatccgagttgtctggtggaatgaaaaagcgtgttgctctagcacgttcgataatatttgatgatacaaaggatgtagtggagccagaggtccttttatatgatgaacctacagctgggctcgacccgattgcatcaactgtcgtggaagaccttatacgttctgtgcatatgactggacgggatgcccttggcaagccaggaaaaatagcttcctatgttgttgtgacccatcagcatagcacaataagaagagctgttgataggttgctatttcttcacgaggggaaggttgtttgggaaggaatgacacatgagttcacaacatcagctaatccaattgttcaacagtttgcatctggtagcttggatggacccataaaatatttttgaagacccaacccagtagtgaatgaagcataggtgttttgtta

SEQ ID NO: 37234 - DNA, 350 bp, Zea mays
  Clone ID: MRT4577_133961C.1
aaatatccgggtcgacgacgctcattatgtcggcgggcgccgcttcttttttttttttttttatgacagacacgcccgattctgaatcgaagtaaagcaatccacatttgtacatgatgcaaactaattgaacatcgtggaacggaggcacgctgaacgcactataaataaaagggcggcgaccacctgcatacattcaggcagagccttcaacagtcaatgggccggtgatccatatatatactacagtcatggagaccattgccgggaggtacggcggcagggagatcaaggacctgcaaagtcagcaagaagtggagggacggtgcagcagctacttacagatgcct

SEQ ID NO: 37235 - DNA, 1780 bp, Zea mays
  Clone ID: MRT4577_133962C.1
gatctactcagctccccacccccggcgtccggagagacgggaggaagcggattccatccacaccgtcgtgcaccacttttccccgcacccaccacgcggcgccgcccgagcacgaccatggcgtcgccgtccatccccgccgctctccgccacccgcacctccccgccgatggaggacttcttttccactcgtccggcgacccaaccgcgcgctcctcgctctcgttcaggataggagacatgacaatgagaaggtgtcagacaggtcctggtcctgttttggctgcaaggagtcctggtttgggcaacgttgacaatctccatgagagttcaagcttatctaggagctgggatttgaacagacagattgatgatgaccgtgatgtactcatagaatgtagagatgtccataagtcatttggagagaaacaagtattaagaggtgttagtttcaagattagacatggtgaagcagttgggataattggaccttcagggacgggaaaatcaactatattgaaggttatggctgggctgcttgctccggacaagggtgatgtaatcatttgtggaaagaaaaggcatggtttagttagcgatgaggatatagagggtctccgcattggtttggtctttcaaagtgctgcactttttgattctctcacagttcgtgaaaacgttggattccttttgtaagggaacatgcctgccagaaggtcatttttcagtaattgcttctgttcagctttcatctttgatacatccatcctttgctttagatatgaaaattcaagcttacccgaggaccgcattggtaaattggtgacagaaactttggctgcagtaggactaaagggtgttgaagatcgtatgccatccgagttgtctggtggaatgaaaaagcgtgttgctctagcacgttcgataatatttgatgatacaaaggatgtagtggagccagaggtccttttatatgatgaacctacagctgggctcgacccgattgcatcaactgtcgtggaagaccttatacgttctgtgcatatgactggacgggatgcccttggcaagccaggaaaaatagcttcctatgttgttgtgacccatcagcatagcacaataagaagagctgttgataggttgctatttcttcatgaggggaaggttgtttgggaaggaatgacacatgagttcacaacatcagctaatccaattgttcaacagtttgcatctggtagtttggatggacccataaaatatttttgaagacccaacccagtagtgaatgaagcataggtgttttgttacaccctcttaaagatcatcccaacaaaatctagagcatcaagaatccaacaatatctggagcatcaagaatccgaaatggggggtctatggcagttgggagaaggaaacacatttggtttgtcattgtttcattgagtttaacaggcatctgcagcagtatcattcggtcacgtcaccttctatgcgcataattgtggtaccagcttgtcaaataagcattagtttctatacaccattctttgagggaaactgtgcgagcgatccaagataaactacatcattcgtcaggaaaactgagctatcatgccaaaaacaaaaaaaaatactaaacacccttcttttagtcatttataaacgagactgatgtaaatgtttactgtaactgttgcttatggtatagcagcgtcgattcctcagtattctcagataaaaaaaaaaaaaaaaaaaaaaaaaaaaaacccccccccccccc

SEQ ID NO: 37236 - DNA, 694 bp, Zea mays
  unsure (1)..(694): unsure at all n locations
  Clone ID: MRT4577_133963C.1
ggcataaattaaagtaaaacatatcaatagatgtcataaattggtgaaaaggtaacacgtgatttcaggtaattatagcataaaatgcaagctaaccatctacagaacaaatgtttcagattttacaataagatacaagagataattattcttgtactcaactatgagaaggacatcttcttttggcaaggctttcataaaagatatgtagtcatcatcattgttgccactaaacttctacggtgaactcctatgttcagtacttttaattaatnnnnnnnnnnnnnnnnnnnnnnnnncgtctttgaggtggtatatgtatgagtacatgatgaactgcacagtccaaatactcagctgacttcaagaagagatcgacagtgccttccctactccctcaattctccattttcagaccatatgcattctgtcagtaagcatnnnnntgatgtcaatattcataaatatatcccatgccagattatnnnnnnnnnnnnnnnnnnnnnnnnnnnnnnaaggtcaagttctatgctaagattcaccaaaataattggagcgcagaaaggatgaattaaaacaagataaccagggtgtgaaatttgaaccttcaaaggtagaaatacaattgacttcttttatnnnnntgattaactattgaaatattgctatgatgttgaacgtcttggatttggat

SEQ ID NO: 37237 - DNA, 331 bp, Zea mays
  Clone ID: MRT4577_133964C.1
tttgtttttaagaaactagaaatgcacttccgggtgggttgaattccacaaacgtgagggaaaaaactttattatagaactataactgatcagcaatctaaaagagggcaccaccaatgatgggtagttggtagaacgctgttgggtatgtaaaagcatgttggtcgaatggcaacaatagtttcacgggtaagagggtgccaacgttaggcgcacatgtacaagtagaacggcaacaactgttgctgcgataagaaggcacctgggctcacagcagctagctggttgaatgggagtagttgttgttgtacataaacatgaaagttcaatg

SEQ ID NO: 37238 - DNA, 562 bp, Zea mays
  unsure (1)..(562): unsure at all n locations
  Clone ID: MRT4577_133965C.1
ggggaaaaggaacgggccccggaacccaattccaaagaaaaccccccccgaggcccccgaaaaagggaacagggtcttttttttttgaaaaaaaaggggcggccggtgggagcaacaacacaggaaacaaaaaaaaaaaggggcaggaggcaggggggttgcaccaaccaaaaaaggcttcgtttttttggaaaaaaaaattggaaggggggaaaaaaaaaaaggagcggggggacccaaacggggacccccccctgggcttggggaaaaaaaaaccccccgggggaaaccccaagggggagttggccctgtcaaggaaggactggaacccctgggccaccaagaaaaaaaaaaaggggcccacgtggccgaaaaaaaaaaaagggaagaggaaggggaaacggacccccccccccaagggggggaccccggagcccacaaccctaaacccaaagggcccaagggggggcctaacctccgaaaaaacttttgggccggggtnnaaggtgaagggccccctgagaaggacccccccccccgcccaagggggcgtggggccccc

SEQ ID NO: 37239 - DNA, 305 bp, Zea mays
  unsure (1)..(305): unsure at all n locations
  Clone ID: MRT4577_133966C.1
nnnnnnnnnnnnnnnnnnnnnnnnnnnnnnnnnnnnnnnnatgcacacccccaccattcccccttaagcagtggtaacaacgcagagtacgcggggcacctaggatccctaaagaattaaaaccttttctcaaaaaatcagatgcccgagagctgctagacttccaccacgactcaaaggaatcctcatgagctggacacagatcctgcagccccactaaactaaggaaatgaaaccagaactgtttggcaaaaaaaaaaaaaaaaaaaaaaaaaaaaaagtactctgcgttgttaccactgctt

SEQ ID NO: 37240 - DNA, 743 bp, Zea mays
  Clone ID: MRT4577_133967C.1
aacacacatgaacttcagttctgtttaaaacaatgggttggctcgggttttatagtactctatttttttttaaagggcctagcaagggcttaatttaggtgtatgatcgaaagaagaagcttatgtgtcctaccaccccccattcgatgaaaatatccatctgcactccaaactggtactagactcgttcaaaaattttatccttcatccaactatgtttaatccttcttccggaatagacagacagtcactgatcaattatcaattaactaatgatcaatccggttgagcctgctggagaaattcacagcaacatgaacaggtgtctggcaatcccagacagaatctcatgtttccatgtctgcaggaagagccacactgaagactctgttcttcgccttcagtgcttccttgttccagtcggtgcataaggtaacggagagcagcgagagcatctgcaccaccaggccgcacaagatcccgaaccagaggcccattccagcgagacggcgcacgaaggcgaaagcgagcgcggcagggataccggcgaggtagtaggcggcaaggttgatgaaagcgccggccttctggcggccacagcccctcactacacctgagagcacgcactgctggccgtcgagcatgacggacacggcgaggaccggcatcatcctggcggtgtacctggccacttcctcctcgctgctgtacgcgtacccccacaggtcgcgtaccaacactat

SEQ ID NO: 37241 - DNA, 261 bp, Zea mays
  Clone ID: MRT4577_133968C.1
ccccaaagaagcaagaaaaatgctgggaactaaccatttatttccgcgttccactggcaccgccggaaaacagcaaccgcccgggggccacattaacaacgctcagggggccgcccaaaattctttaccagggcccaccttttccggggggggggggcgccacaccaatccgacggaacttcggtcaagggttttgagcctctccccccaccttgttatgggtcaaaagcccctaaaactgtttcaaacaagccggggggt

SEQ ID NO: 37242 - DNA, 282 bp, Zea mays
  Clone ID: MRT4577_133969C.1
caaccccatgcttataatagggttatttccccccggggccggggggaagcctaataaaaaaaaacgcgactttttttcgttgggcattataaaacaaagcattgcccggcaggaaacacacttaccgtttttttccatgcccccttgacaaaaacccaaacaaaaaccgacggtccggggttttttttgtccatggccacccccggcagtctgaaaggggcctttttctggttgagctgttgcttgaccctcccctttttgaagggggggaaaaggattttt

SEQ ID NO: 37243 - DNA, 200 bp, Zea mays
  Clone ID: MRT4577_13396C.1
aaggtaatctgaatgacatatcacataactctgccatgggtcttgtcagaaaagtcctcgacatggaagtctaacgggccgaagtaaatatagtaccatgggaaattccgaaaaggtccggacccaggcgaccggaaaagttcccaggggccaaattgggggtggccaaaaaagcgaaaagccttaacccggtggtaagg

SEQ ID NO: 37244 - DNA, 433 bp, Zea mays
  Clone ID: MRT4577_133970C.1
cctcctattaatatttccggaccgaacgccacatccggatagattacatgagatctatccaaaataaataattacatcataaggagacaacggtccatcaacccaaagttgactgggagacgacggtctagacctgtcacgaacacatggcaccatcctccaatagcctgactatgtggtacctgcacaggacctgggactttgatattccaggaaccaacttgcttttcaggtaacacgtgtccttaccccgaatgggggggaccggacccctatagcgagagggtcccgtcgaggcactggcctaaggtcgcggagagcacgggtgacaacggttatcaccagtggacggagattctttattgagttactcgatcccgcgctggagtgcccgctcatctctaatcttacgagtcccgggtttgccacctat

SEQ ID NO: 37245 - DNA, 251 bp, Zea mays
  Clone ID: MRT4577_133971C.1
gcgacatctgctcgtgatattaaattgttttcgcttataatcactcatattaataacgttaattatcaggtcaaatattttaaataatttatttaatgtttgctcgactaatgttgattagattaatattccaattagattaaatgtatagtttcaacttgcgctttgataataaacattaacacagttaatatcaacttaaatactttttgtttgtttaatatttgtttagtataaacatgtaacatgtt

SEQ ID NO: 37246 - DNA, 443 bp, Zea mays
  Clone ID: MRT4577_133972C.1
gaaatcaacagcggagtagcaaatccatggagactccgcatgatcacattgtggattgatggatagctatgatggatggaacagtggaatgcaaatgcatgtaacgctacatgctagattgatgacatcaccagcagattaacaaagaacacagattccctatgccgaaaggctgatctcagtcaagcttagactgtctcgatcaatgtccctcagccccgaaagacatgtcttggacggacactgcaagtacatccgcagtcggagaagccactgcgggctccaccacccgctcccttagcagcatgcctagctgtccgacttgcggccccagaagttcatgttcgacggggagcccagcgtggccgcgccgcgccagaggagtgcttgttgatggcatacacaccttgagcacgcgccgtttcacgcctacctggtgacac

SEQ ID NO: 37247 - DNA, 971 bp, Zea mays
  unsure (1)..(971): unsure at all n locations
  Clone ID: MRT4577_133973C.1
gatcaagaataccgtatgcctgttattaaccaaaggtgtcacatacgtacaatcttacaaggcaagagatctcaacttgtaccaaaaacatcttgctattattaacatccctcccagtgtcctgtccctgtcccagactgctgccctgcctcccatccatcacctgctgtgttcgcgttcgtagctatccgactcccgaggagacagatcccgcgcgagcttgaattcgtctctgagaatctggtcgtcttcgagcatatggaccacgtgcgccatcgtgggtctctggctgccgtccgggtccacgcaccggagcgcggccaggaccgcccgcttcagcgccttggacggcggcggctccggcagcctcgggtccagcacctcctccaccctccggtcggcgaccatgcgcttcagccactccaccaggttcacctcgtcggctggtctagtgtagtccactggagtcctgccggtcatgacctccatcgcgagcactccgaagctgtagacgtcgctcctctcgttcaacatcccggtctcggcgtactccggcgccacgtacccgaacgttcccacgacacgggtggtgacgtaggacctctccgagcagaggagcttggcgagcccgaagtccgacaccttggcgctccactgccggtccaggaggatgttgctggacttgatgtcgcggtgaactatcttgggctccagaccctcgtggaggtaggccagccctctggccgttccaaggagtatgcgcatcctgatgtcccaggtcagtgagctggtttcgctgtcgtcgtggtgcagccacttgtccagattactcttctcncatgtactcgtaaacaagcatcctgcaagctccctcgctgcagtagccgagcaaactcaccaggtttttgtgccggacgcgcccgattgtctgaactccattgcgaaaaccccgtacgttgggcggacgcggg

SEQ ID NO: 37248 - DNA, 282 bp, Zea mays
  Clone ID: MRT4577_133974C.1
atggaggaggctatgctcaacctcaatgaagagtcgttgagccggcccaagcgtcgtcgacgctacatcaatcgtgatcgtgagtctgcccatgatcggcttcatcaagactacttcgccgatgactgtcaagcacccatagtgaacttcatggttaatggacatgaacacaatatgggatactatcttgccgacggcatctacccttcctggtcggtgttcatcaagggtattccgcttccacaaagtatacacatcgatgtatacacaactactaaatga

SEQ ID NO: 37249 - DNA, 309 bp, Zea mays
  Clone ID: MRT4577_133975C.1
ggacctgctggaactgctcacaactatgataaccggggacaagaagtccaacctaaaggagcttatactctcgaaggccgacgacaacacagtgatggaggccgtggacccggaagtgtaggagacgagcacggacatgaacctggggcaggaaggccttccagatcgaactgctggacaccaagcagccaccaaggggaccggccgaccatgcacgaaggcacgagggtactgctctccgttctgccgaccgccggaaagactcccgaatccaagagaggaagcgacttaagaagagaccaggcgact

SEQ ID NO: 37250 - DNA, 280 bp, Zea mays
  Clone ID: MRT4577_133976C.1
gtacaatcacacaaggaggatgaaacggcggaacaaaaatgaggtgtgtagaacagggtcccacaggtttggggacattgagatcacttgccttgtggtggggaggctgctgaggggtagcaggtccatctccagcagctggtccaacagtcgtatcctggtgaatgtctgttcagctcttctgtgagaatatgattttttccatatgtatatagtaaaatatgttactataaattacatgtactttataagtattggtttgggtgttccttccaagaag

SEQ ID NO: 37251 - DNA, 655 bp, Zea mays
  Clone ID: MRT4577_133977C.1
tttttaattcctttttttttttttttttttttttcttttgttttttatttttattttttattttttccttttttaagcaaaggggctttttatgcgcgggggtttttttcccttcatcacatttaatttcgagcaatctctttgcttttgggggcgggggcttttttagtctttactttaaaaaaggcaaaccctttatgcatgcccgggtattacagggccttcctcgaaaaacccctgtttttggtatcaaaaagaaaggatgggatgcgaaacccggccaggaaaagcgggtccaggaatatttgggggaaaagctcagggcccccttgaaaaaagctttttattcccttttcccggggggaggcatgaaccaacatgaattggggttgaccagcggttacataaacaaaccccccaggggctttgaatctatcaacggacttcagggacattgcttttggggcccatgctagggcctgaacaacatttaacgcaggaggcaggaaaaacggggggggaaaaaacaaatcctttttttaccggggaaagaaaatggcaagggtaggcaaaaactttaaaaattcaggggggataggccgccccaaaaaaataaaaaccccgccctggtggacctaaagaaaagctacaattt

SEQ ID NO: 37252 - DNA, 296 bp, Zea mays
  Clone ID: MRT4577_133978C.1
gacttaattttatttacgcattgcaagctatgatgcaggtaattgtatggaagaaacataaattattgtactggccgtgtgtttactaagatatgagtgcgaaaacaatgatgttacctaacttagagggcttggaaaacatgcttccgtgacgacaaaaaattataacaaagaggtctgttaccatagaccttgtaaacaaaagctcagggggcgatgagaaatggtacgcagactaatatcaggacattaacctcggcaagtgtggtggttacaaagaccttgacctattcaat

SEQ ID NO: 37253 - DNA, 356 bp, Zea mays
  Clone ID: MRT4577_133979C.1
cacatacacaagcacaagcgcactctagcattggcttctgaagttgtccgccctagcgacggcgcgctactaaaggcacaagccgacatatggcggctcaccctctcctacctgacgcccgtgtcactgaggtgcgccgaggagcttggcatccccacggcgatctaccgccatggcggagctgcctcagccgctgagctcgacacagacctgattatcccttacactaagctgtcgttcctccaacagctgctgaggcttcttgccgcatctggcgtgttcaccgataacaagcagatcacgtctgaggagcgaacccatattagccacgcattctccctcctggtggacggcat

SEQ ID NO: 37254 - DNA, 228 bp, Zea mays
  Clone ID: MRT4577_13397C.1
ctttttcgtagggtcaatagcatatggaagatggggctttttttaagtattgtggaataggacatcactgaattgatcgctgtacagacactgtggctttgaacctagttcatgagactggtatctctagttcacgttgataagacactgtatgaacccgctctaaactacaagtggaatacgggtcattgcatcctgaaaaagccagtataacttgatagctcacct

SEQ ID NO: 37255 - DNA, 403 bp, Zea mays
  Clone ID: MRT4577_133980C.1
acagcttaaagcccaggtcgtttatttaacactgccccgcccgtcacgaccgacgtcgcgtcacaaacgaagaaccatacggggggggggggggggttcacacataccaacttttttatgccggggagatcgggtccagctaccctacaccagggtgggacaccccgccttgccggggtcaaacacccccgggggcaggtacttcctcccgcgccccccgggcgcgttggacctggcccccggggcccgggccacgggcaaatgcccggtcgtcccggggcccggtcccggacccgggggtggccccggggatttcggcccgggacctggccgcggcccgctttttcctttagggcggcgttttcttgcctggccccgtctgggccaccgggggcttgtgggg

SEQ ID NO: 37256 - DNA, 728 bp, Zea mays
  unsure (1)..(728): unsure at all n locations
  Clone ID: MRT4577_133981C.1
ccggccggggccgctcctttccgaagccgtcaccaggaaaatccaatacgctatggagggctcgccgtagtacagaggtggaggccgccaccatgaagcagtgaagggaagagagacaaactcgtcgcccgcctcgcgtttgttgggagtgggtctggcgtgatggccgggtcgcgttgatcgtgcgcatggtcggcagtgggggaaattttgggccgctggtcaaatttctcgccgccatcctgccgggcaccgtcgaggccatgctgagatccgccgccgccatatacttgtgctgtgcccgctgctctggggacgtcgtcgttccgccagggtcgaagcttcgggcgaaatcgggtggcgtcgtgggtcacggtcacagtgggcgttccatgccgattgctcgcgaggggaggataaagatgactcttgggccgtcgatcaagaaatgcgcggctcagatcatatggccgagatgggtagtcttcagcaacctcttcagcccgggacggtgctccgcttcgggagtctcgagttcatgtccctcgacgacagctacgacatggtactcctccccccgcagcgcgacaacaacaacgacggtcatcagctcggccggcggcggcgaacttgatgacgtcttccccccgtagctgaagagcagcatccgggtttgtctttaaatttttgcaataaaanaaaaagaaaaaaaaaaaaaaaaagcggcc

SEQ ID NO: 37257 - DNA, 1865 bp, Zea mays
  Clone ID: MRT4577_133982C.1
cattgggtacctcgaggccggccgggcccgccactcgcccacacgcgaaggcacctagcagccgccactcgccgaactgaggaacacgccgggcgacgggatacagcagcagcgcgcccctctatccccgacgcgacggcgccctgcagctgcagataaacctgttccaatggccaaacaaaaagagggtgtggacaaaagaactgctaggaagatgatccgatctacggaaggctgtgcaaagagcattactttcgagaggaacaacaaatcagacgatgtgcagcttcacgatctgccgaatgacatcctaggtagcatactatcacggttgacattcagagaatcctcacagatgggccttgtttctcatacctggcggcggctgtggagaagctgttgccggaaactggtcttcaccagtgccaccatgttccaacccggaaataggagcatcaaacatacaaggaccaactttgccatgagagtcaacagtttcttgcgtcagctacgcactcatcctactcttaataagtttgttattaagttcgggctgcgcaggaagcacactcgccatgtcaacagatggattcgcttctgctccgtgtcgcgagcaagacacatcactattaatttcactcctggagtgaaagattttttcatgggtccagccaacagcaagtacatcttccccctgaacgttttcagtggtccagaaggctcctctacacatgtcagaactcttcatctgggctatgtctgtctggacacaacctcgtctgatttcatgatctttgcaaatcttaagaagctcactctgcacaaaatttcctttttgggagacctccagtgcctgatgctgccagaatgcaattctcttgagtgtctgagcatcagcttctgttccttgcctggtttaagcacatgccaaccgctgcaacgtctgcgatgtgttcgtttgcactactgctatctaaaaaagattgagctggaagctccaaatctaacatcgtttgacttgaccaaccaaccaattccatttgtgcttggtggatctctgaatgtaatggaagccaacattaaactgttagctaaggactcaccttatggtgataatctggactacatctacactgagcttcctgctgcgctgtctcatgtgcataaactctcgataacctcgggtctcttcgtttatgatcagctgcaagggttttccaaaacctcagccagattcatcaatctgaggcatctgaccatgtatttgcctctttatggggaacctaagtcaattagtgggattcttcgcttggcctacctactggaattggccccagctctagaagaattggaattgcatgtgaatggcggtggcgtggatgttgggtgggcactcagacggaatatgttaccgtactcacacaataggctcaagagggtccttatttcaggagccactgtatgggaggggctaatggagctggcatactacattcttcggagtgccaatagactcgaaagtatggtcttagatccaaagataaggattgggggtcctcagctggatggttggatgattgatattggtagggagacgatcaaaaatatttttgagggagaggagtttcagagcattattactattctgtaagaatggtaagataggccacaggattttggtggtcacaccaagtggccatgtttgattatgccataggtttgaccagtatggtcataaatgtttgttgttttcatttccgacctcaggaaatgtaaattaatactccctccatccatttttcattcgcgtatacttctcggcagtaaaaaaattaagttcgaaaaaaaaaaaaaaaaaagcggcc

SEQ ID NO: 37258 - DNA, 382 bp, Zea mays
  Clone ID: MRT4577_133983C.1
gagagaaagaaaagcgctcattttgagttataggaggaactatgagtttctatccccgaagcaacgggaagaccggctacaacagtagaccacctgcatactatatactcgctaaagtggcctactcctacacattttaggactgcggcgtcctattgcactcctcctagcctaaagatcatgtgaagggtacggatgtattattatgccacaaaactaactgcgagactactcctaagtgcaattcacagagactaaatattcaccatatatgcttggcaaatggtctttaaggtgcacatctgaacttctatattggttaggcttcaccttactgtgatagaagatacgacctagctagctatactaaaatgcgtaagtg

SEQ ID NO: 37259 - DNA, 371 bp, Zea mays
  unsure (1)..(371): unsure at all n locations
  Clone ID: MRT4577_133984C.1
acgcgtccggctaagctctacagctcgagtattgcttgctcaccagaagaaacaatgcagtgcaccaacaatggccgccgcctcctcgtcctcggtcctcctgctgctcctggccgccgccttggctggcatgagcgccattttggctaacttcatcatcagcaacaactgccggttcaccgtgtggctcgccgccactccggtgggcgggggcacacacctcaggatgggcgggacgtggaccttcaacgtgccggctgggaccatctccggccgcatgtggggccgcaccggctgctccgtcaacggcaagagcgggagctgccatacaggcgactgcngcagctcgctggactgcacgctgtcggggc

SEQ ID NO: 37260 - DNA, 487 bp, Zea mays
  unsure (1)..(487): unsure at all n locations
  Clone ID: MRT4577_133985C.1
cggncgcgtgggtcgcgaacggccgccctttttttttttttttttttttttttttttttttttcttataaatttttacttttttttttttacatatagttgacaattgtttcttacataagaaagaacatataaaaattctacaagggttttaataaacaagggctaatcatcttgtttgaagactttatcagcagctttgttcatgaccctattcacagctttattaactattttaattacatcaaaagcgcccttcagggctgaatcaggctcaaggtggtatggctccggaggaggagaaagttcggctttacaacggggaccgtgggatatggaaacaccgggatcatgaaaggcttcgacgggcactccagctcgcatgccgccccaatcaacaactggaacacgtgccgcaaggggcaaataggaaaaaagccaaaacgccataaagaacatgggagccataaaaacgaacccgtacattc

SEQ ID NO: 37261 - DNA, 170 bp, Zea mays
  Clone ID: MRT4577_133986C.1
ccccgggggaaatttcatttaaaataaaatgttgccacagggctagagataattaagtttgttttccaaatcccgcccaggagggtaaattgttcttagaaaagcagtctttttgacccagggcaacaaaagccgcaccagctgggttcggttttgccattttttttttt

SEQ ID NO: 37262 - DNA, 605 bp, Zea mays
  Clone ID: MRT4577_133987C.1
cattacattactataggagtcgtagatatcttgattttcttgttctgaatgccaccaggatggatgctgtgggttgatgaaaacctttgagaagttcaacccgagcaagggatgcagattcccgacctacgcgtactggtggatacgccagtcgatcaaaaagtccatcttcaagaattcaagactaatccggttgccggtaccaattgactgtttgttatgatcaattatatataaggcctctatttcatatttcgccctgggctcctaaaaagtcaggaacggccctggttgcaggagagtgtgtatgcacttttgaggaaggtgggcaaagcgaggatggaatgcataatggacggggagcagccgacgaacgaggtggtggcaaggcgtgctggcatcacgattgaaaagctggcgaaactgagagcgaaaaccaggaaagtacggtccatgcaggatcgagtctggtcagacgacggtgtgacataccaggagatcaccgaggaccccaacattgaaggtcctgaggtgagcgtggacaggctgatgatgcggcagcaggtgcgcagcttcctggcgggggatcctgagcccccgggaga

SEQ ID NO: 37263 - DNA, 353 bp, Zea mays
  Clone ID: MRT4577_133988C.1
aaagggccgcctccgcaagcagagggtcagctacggttcacgcaagatggcgtgacattatcgttctaccctgggttactgggtggcagcgggggcgtgggtcatctaggtattcgcgttgcgggacgtacgcctcatgagcgtagccatcctgcagggggggagatttcaggtttcacctggaacgcgcacgcaccgtctggtaggtgaagcagcagatcaggaaggaacagcccgcgtcggcgcgccccgacgtagcaagagggcgtgctcgagggtgaggacctcgacgacagccacctcatccagtatatgtgcacggcttagggcggcgtgagagacagtgacgggtg

SEQ ID NO: 37264 - DNA, 2257 bp, Zea mays
  Clone ID: MRT4577_133989C.1
agcagccagagggacatcaaactgtgctgcctgcgtgtgtgtcttctttcttgcctctcccttcttcaacctttgctagcttgccagggagggagtccatgaattccagcagaagcctcctctcttcgcccctctttgctagctcgtctccaaacttcaggagcagtgcttccgtctcctcctccccatccccatcccgcaccacaggtatatatagcccttgtatgtgtttctaatctgcagatactattgtccctgggcactggcagagctcatccgctaccatctggcagcagttccaatgatacatgacaccagcagcagcagagcatccacggcgtgccactactcgccgtcgcttgtggcagaggagcagcttcacggctccaaagacaccttgaccttgaagggcgagaaggctttgctcgagttgcttctaggcatggctctggaccagcacgttgacggcaggaagctcattacccaacaggaggctgaggatagtgatttcgagagctatttgagagaagcaacaagccgagtgctttaccagccaacattcatgtacggagcttctgaatttattagcagtgaagaggatgatgatgattctatttcggagagctcttcagcatcattggccaaaccagctggaactttggatcttggcaagctgacagaggaaccacagttggatgtaccacagcctcaccgccgcagtgtggatccaaaccattcgtatgatcaagtgtttattagatccactcggttactggagaggagatccaagaaacgcaacggcggccacagggctttggataatggtgtggcgtgcagtggtgtgaactcaaagagaaaagacaagtttggcagagttcttgatccagacgagccttttaggttgtttctacgggatcgagagacgacagagttcttgacagcgaaagaggagaaacagatgttcagtcaaatacaggatcttatgaagctggaggaggctcagcgtaacctgcaagctcagtgtggtcgtgaaccaacagttgaagagtgggctcaagccgtaggaatgagctgcagggagctgcaatcctgtgtgcgcaccggaagacggtgccgagagaagatggcccgctccaacttccgccttgtgatacatgttgctaggaaatatgaaggatgtggccttgacattcaggacctggttcaggatggatgctgtgggttgatgaaaacctttgagaagttcaacccgagcaagggatgcagattcccgacctacgcgtactggtggatacgccagtcgatcaaaaagtccatcttcaagaattcaagactaatccggttgccggtattaattgactgtttgttatgatcaattatatatagggcctctatttcatatttcgccgtgggctcctaaaaagtcaggaacggccctggttgcaggagagtgtgtatgcacttttgaggaaggtgggcaaagcgaggatggaatgcataatggacggggagcagccgacgaacgaggtggtggcaaggcgtgctggcatcacgattgaaaagctggcgaaactgagagcgaaaaccaggaaagtacggtccatgcaggatcgagtctggtcagacgacggtgtgacataccaggtacatcactagttgcttgatcatggatgcattcattcatcattcactgcactgatggtggatgatgatcttcttgcatgcaggagatcaccgaggaccccaacattgaaggtcctgaggtgagcgtggacaggctgatgatgcggcagcaggtgcgcagcttcctggcggggatcctgagcccccgggagaaggagatcatcgagcaccggttcggcatccacgacggccagcccaagaccctgcatgtcatcggcgacatgtacggcctgtccaaggagaggatccgccaggtgcagaacaaggccctggacaagctcagaaacagcatctcagcacagggcttccacgtctactttgatttgctaacttaagactcttcaacacgcaaacattacatgtacaatgacattccattctgccaatgggtatattatgtatagatagaccaagaattcatgtttttttcctttcccttttgccatttgacattcattcatccttgtactcaacaatggatactcatacatggttgtttgaggagcaaagcttactttaaatgtatggatgtacgtttaagtgcacatatgtttatgaaacctctctttgtttc

SEQ ID NO: 37265 - DNA, 290 bp, Zea mays
  unsure (1)..(290): unsure at all n locations
  Clone ID: MRT4577_13398C.1
aaaaaaaatccccttgcattttgcctgtttcgacttttgtnatgtaacatgttctcggtctaaaaaaaatgcattacaaaaatgcgaaaccaggtagttacaattgcaggacttttcagaacactttcccagttacatttccaacccttggaccaggaacaagccattatcagggttttgggttcttttggcgcttcttttcgagctgggatgccttgttaaacatgtccggggcatcgctttggatgttcaactttcggagcgccacaactttcatttaaaacgcggtt

SEQ ID NO: 37266 - DNA, 908 bp, Zea mays
  unsure (1)..(908): unsure at all n locations
  Clone ID: MRT4577_133991C.1
ggccaagatgatgccgtcgggcccgccgaacccgatggggcccggtcagccagtgagcggtgcggcacgtcgctactacggacgagctccagcttgctcagtggcggtggccagcctgggatggctggaggtggtggtggcggcatgctttcttcacagtgcgtccgctcctcgcttgtctccccgctcacacagtttggcggcaatggtcttcttggaggcgcctcgaatgtctcctccctgctgaaccggacgacgttcaggaatggtggccctatgccaggtccggggtcgatgcagggtggtgggatgcagatgagtacactccagcagagagctgggttggatggtgccagcgatttcattagcacgggagggtcagaccctctctcattcccgtcttcctcacaggttaatttggtcaatcagatgggatcagataatctgcaagtgacttcacagcagcaacagcagatggatgcagtgcaggatatgcagcagcagcagcagctaccaatgtcttacagccagcaacagttgccggcacaacactcgcagcagctccagcagccacaggctacagtgaagttggagaatggaggaagcatggttagcatcaaatcagagcagcagatgggacagcctgaacagaatggtcctgcccagatgatgcgaagtgctggttgtgtgaaacttgagccacagcagttgcaagcccagatgatgaggagttttaagttcagtcaagatggagcaacagagttcagattcatcagccttcttgcagcagcagcagcagcaacaacaacatcatttgttgcagctgacanagcagattcgaaattgtccagaccttgtatcattggggtggaccaaacacaactgcaaaccctcaagctgctgctgct

SEQ ID NO: 37267 - DNA, 331 bp, Zea mays
  Clone ID: MRT4577_133992C.1
ggggcgggggccctcccccccggggggggtgtttttttttttttttttttttacggggtgaggggtagcatataatagggagggggaggagaacaggccatcacataggtagataacggggaggccaaatacccggctcagggaggaccaccataaatggggctgacccaacagagccaagaggcgggtcaggtttagaactgaccagatgccgaggcaaggaatcctcgagggagggatacacaactgtccaccggggactgaaatgcccaagaacaggattgtagcagcgcccatggagggagggaaggcccatggggcaaggcagcag

SEQ ID NO: 37268 - DNA, 161 bp, Zea mays
  Clone ID: MRT4577_133993C.1
ttagaccgtatgaacatggaccaagtattgcagacagtaatacaaatattggtcatgttcatggccctttctgatgataattctgaggatattatgcttgtagctgagaatccccgtgtttatgcacagttgatgattgtgtccagtagtggctttgatga

SEQ ID NO: 37269 - DNA, 209 bp, Zea mays
  unsure (1)..(209): unsure at all n locations
  Clone ID: MRT4577_133994C.1
ttnttttttttttttttttttttttttttttttatttttttttttttttttttttggatctgaagggcaactgtgtttgcttattttataccaagttacaaaacgatgacacccattgttttatgccatatcaaaacggggccttatccggggggggcgaagttgtagggcttcacttccccggttagttgccccgcttgggtgggggg

SEQ ID NO: 37270 - DNA, 644 bp, Zea mays
  Clone ID: MRT4577_133995C.1
ctcgaggccggccgggatcctttaccacagaagaacttcaattaactattccgcctcagcctcgcacacaatcaaaatggtcgttctccttactcttcttgctcacattgtggcagctatggctattccagcaccagtacctgcgcccgcgccactcccagttccccagtagacaaatccagaagcctggttccctgacgtttggggttgccgctgccacagtgcggagaaggaccttcctcttgttcaacctatctgcaacaagtttggaggcaccgacacgaccatctatcctccagccaagccggatccgttcttaggcagattagtttggtgccagaaaatatccctcaagtcggccccaagggcgaacagattggcagatgtgttcaccgacgcaacatgccaggaggaatttggcgcgggcttcgtagcacagtgtaagaaccagggttatacactgtgctttggcgaggaggagtgttattaactctaatatcaattttggaggggggggggagcctaactgttcaatgtaccgagctaacctcaagtaatatgtgtaagcgtattagaaaccactccgctagggtagccataataataaacattgtttgcctacgaaaaaaaaaaaaaaagcggcc

SEQ ID NO: 37271 - DNA, 775 bp, Zea mays
  unsure (1)..(775): unsure at all n locations
  Clone ID: MRT4577_133996C.1
cgggtgttgttccgatctgtgtcccctttgttgacaatatggttttgttcttcttaatcgtatgtttttacttcactagtaaaacattgcatttttaattctctttgggttagttttggtggatgacgattcttggtttttaatttggacagcatggtgccaatgtaaatgctatagaccacacaggccaaacagcacttcactggagtgctgtgcgtggccatgttcaagttgcagaattacttttgaaggaaggagctaaagtggatgccactgatttatatggatatcaggtcacccgtggcacttcctgttatcattgtatcttctattcgtccagtatattttcataatttctcctgatggttcacttcttctgatgcaaaatattaatggagtttattgggttgcacacagattaataaataatgcaccattatcactgtagatcttatattttctttctggctgtaatgatggtttggatgggataactaagatgtgtatatacaatggatttctgttcttctgctctgcaaattccgccattcttgcaatcacaccagcatgttatctagtgtcagatgagttattaatagggtatttggtttgagtaataagctagaccatcatcttctcactcctcactgnttttgtttggtttgtggaatggaatgagttgatccatcaccacctcattcctaatacttagttagttagtattaacatgaggaatgggatcatcccaccaaatttgaggaatgaactaatgata

SEQ ID NO: 37272 - DNA, 2578 bp, Zea mays
  Clone ID: MRT4577_133997C.1
ccggcccgacccacgcgttcggcctggggcttcatttggatttaaccagacccttgggataagcttgctgtatatggacaggttcttctgactagagttggtatcctttggttttttgctcttccaattctttgcagtcagttcatggatcttgtaactgaacattggcctcgacggcggggtagctttcgcggcgggcctatggccgctgctgagcagagctgacttttgctccgcttgccttgccccaaacctcatattcccctcctccttgctgtagctatagctgtagctttcaccccactccctccacggcaccgcgcctccctcccccccttccccaaatcctcctcccctccccaattgggccaatagcccgctccgcttccagtcgcggcgtcggtcggggaagaagcttcgctcccgtgccgcagatcgggagaggagctccccgctcccgcctcgtcgtccgcttccccgccgccggtctctccgggaggcgtctccgtcgccggcgatgagctgcttcgtctgcttcgggtcggcggcgcaggacgaggagcctaggaagcccgctgccgcgggcgccggcaaggacgccgcgccggatcgcgcagtggctcgcgtcggatcagataaatcaagatcacagggtggaccagactctaagaaggatctaattatccataaggatgggaatagtcaaaatattgcagcacagactttcacttttcgtgagctcgctgcagccactaagaacttcaggcaagattgccttttaggagagggaggttttggtcgtgtatataaaggacgcttggagaatgggcaggctgttgctgtgaaacaacttgatcgtaatggtctccaaggaaacagggaatttctggttgaggttctcatgctcagtctcttacatcacactaacctggtcaatctaattggctactgtgctgatggtgaccaacgccttcttgtttatgagtttatgccattggggtcactagaagatcatctgcatgatctgccaccagataaagagcctcttgattggaacacacggatgaagatagctgcaggtgcagctaagggcttagaacaccttcatgacaaggcgagtcctcctgtgatttaccgggattttaagtcatcaaacattcttcttggagaaggatttcatccgaagctatcggactttggccttgcaaaacttggtccggttggtgacaagacccatgtttcaacacgtgtgatgggtacatatggctactgtgccccagaatatgcaatgactgggcagctgacggttaaatccgatgtgtatagctttggtgttgtgttccttgaacttatcacggggcgtaaagcaattgacaatactaagacccaaggggagcaaaatttagtggcatgggctcgtccactgttcaaggaccgaaggaaattccctaaaatggctgatccaatgcttcagggccgcttccctatgaggggtctataccaggccttagccgttgctgccatgtgcttgcaagagcaagctgctacacgtcctcacatcggggatgtcgtcactgctctctcatatcttgcttctcaggcatatgacccaaatgcccctgttcaacacgtccggagcaattcatccacccccagggccagaaaccctgctgggtggaacggcgaccagcgcagcgtgcgctcgcctaaccatcattctccagacccgcggcgcagagacgctgcgggggcatccaagtatggagcagaggttagcaggactagctctaccagcgactctggccggcgatcaggcctggatgacatggacctgaccgggtcgcaagtgggaagcccagcgcagaccggaagaagaagagaagctccaaggggcaccgacagacagcgtgctgtcgcagaggccaggacatggggggagaattcaagggagcgaacaaatggccatggcagcttcgacagcacccatgagtgaagccgtcaggttctgttccagtcatcattccagaacccccaccatgggttgagtccactcattcatcagcaccagtcagatccgatcttgggacatggcgtcggtccaagtgtctgtgaataaggcttttcttgccctcctgtggcgaatgcaattctcctggcgcccattccttgccaatgcgacctgtgtgtgtcatgcctctggcgactgggagcctcaggaggagcctgtaggattcagtcagaggtagacaggtcagtgaagaaagaggaggggcgcggagtcacattggcgagtgttttgttttttttggcggctaaatgctgagtatgttcagctgcatgtgtcctttttgtgtatgtgtacgtgtaagacgtgtaatagcaaccgtgtcaggtttggctacctgagaggcctttgaagcttctgctgctgcttccttccccttgggaattgggagttcagagttgaaatgtaggataggcgatgttgttgagtacagcaactgtttttacccttccataaagaaacgacggcgacgcttccctaaaaaaaaaagggcggccaaagactagtgagctc

SEQ ID NO: 37273 - DNA, 131 bp, Zea mays
  Clone ID: MRT4577_133998C.1
gctcggcctgcgctgcgccacgatgtccggggagtcagccaggagcttggggaagggaagcgcgctcccggggccggtcccggagggctcgatccgcatctacagcatgaggttctgcccgtttgctgaga

SEQ ID NO: 37274 - DNA, 1870 bp, Zea mays
  unsure (1)..(1870): unsure at all n locations
  Clone ID: MRT4577_133999C.1
tctatcgtataggtagggggggaggggggggggggtgtgcctggccatgtaaatttgcatgcactatctatattaaaaaaaacctcgaccagagggagagatgcccctatgattttgtttttaagaagtttgtgccacccttcaaacctnaactggtgatggggggtttcaggggggggcagacttcaacggctaactagtgtaactcgggagaaggtggcttttcataggctaaaatgaatatgttgatgttttctctctcttccatttctttgcattcagttcacgggtcttgtaactgaaaagtatttatttgtgtagatctgccaccagataaagaacctctagactggaacacacggatgaagatagctgcaggtgcagctaagggcttagagtaccttcacgacaagacgagtcctcctgttatttaccgggattttaagtcgtcaaacattcttcttggagaaggatttcatccgaagctatcagactttggccttgcaaaacttggcccggttggggacaagacccatgtttcaacacgtgtgatgggtacatatggctactgtgccccagaatatgcaatgactgggcagctgacggttaaatccgatgtgtatagctttggtgttgtgttccttgaacttatcacggggcgtaaagcaattgacaatactaagacccaaggggagcaaaatttagtggcatgggctcgtccactgttcaaggaccgaaggaaattccctaaaatggctgatccaatgcttcagggccgcttccctatgaggggtctataccaggccttagccgttgctgccatgtgcttgcaagagcaagctgctacacgtcctcacatcggggatgtcgtcactgctctctcatatcttgcttctcaggcatatgacccaaatgcccctgttcaacacgtccggagcaattcatccacccccagggccagaaaccctgctgggtggaacggcgaccagcgcagcgtgcgctcgcctaaccatcattctccagacccgcggcgcagagacgctgcgggggcatccaagtatggagcagaggttagcaggactagctctaccagcgactctggccggcgatcaggcctggatgacatggacctgaccgggtcgcaagtgggaagcccagcgcagaccggaagaagaagagaagctccaaggggcaccgacagacagcgtgctgtcgcagaggccaggacatggggggagaattcaagggagcgaacaaatggccatggcagcttcgacagcacccatgagtgaagccgtcaggttctgttccagtcatcattccagaacccccaccatgggttgagtccactcattcatcagcaccagtcagatccgatcttgggacatggcgtcggtccaagtgtctgtgaataaggcttttcttgccctcctgtggcgaatgcaattctcctggcgcccattccttgccaatgcgacctgtgtgtgtcatgcctctggcgactgggagcctcaggaggagcctgtaggattcagtcagaggtagacaggtcagtgaagaaagaggaggggcgcggagtcacattggcgagtgttttgttttttttggcggctaaatgctgagtatgttcagctgcatgtgtcctttttgtgtatgtgtacgtgtaagacgtgtaatagcaaccgtgtcaggtttggctacctgagaggcctttgaagcttctgctgctgcttccttccccttgggaattgggagttcagagttgaaatgtaggataggcgatgttgttgagtacatcaactgtttttatccttccatgttgtacggcgacgcttccctgaacaatatgaccatgatgtgcccccctgtc

SEQ ID NO: 37275 - DNA, 393 bp, Zea mays
  Clone ID: MRT4577_13399C.1
cgtctctttcatccgccgccgcgtccgcctctccaagcgcagcagccgccggagggcaggggtctctcgatctgaggcatggctgatgtggatcatcaacaggacacgccgaagctcttcaaccggtggaccttcgatgatgtccaggggaacgacatctcgctgaacgactacctcgctgtgaacgcgacgaagcacgcgatggacctggcggacaccgggggacgttactccaagaagcgggtccgcaaggggcagtggccgatcggcgagcgcctcacaaactcggtcatgatgcacgggcgcaacaacggcaagaaggtcatgggtgtgcggatcatcaagcataccctggggatcattcacctggttaccggtgccaaccccatccag

SEQ ID NO: 37276 - DNA, 623 bp, Zea mays
  Clone ID: MRT4577_1339C.1
cattgggtacctcgaggccggccgggaatatttcagcaaataaaatttcttcctctctttcgggttcacccagtgttaatgctgattggtttggtggccttgaatggcgaaggtcaggacatgactactcctgtgctgtgaacaatattgttgcatattgaaatttcagaataccatttcatgatactatctcattcactgcaatacgagcacagttttgtttcagaaacccagaaacatttatccaactaattaatttccccatgggacaaagagtctagcattatcacatcttgcataaataatttcttgttttgttggtacttgtgattgttgattgaaccaaacttgctaatatgaaaagttagatactttgtatgtttttcttgctcaaatcaacaggaaattatgtagtatcatcaagtaaatatacagaaagcttgaaaagcgaaactgaaaatacctactttaccccagcacctacagcctgacctgggattactaatcaaatcaggttccatgtaatttccttcaaatccaattatttggatggcatattttaatgtttttcggtagccccattttttcttattaaaacggtggctgctgatgcctagcattta

SEQ ID NO: 37277 - DNA, 559 bp, Zea mays
  Clone ID: MRT4577_133C.1
agaagacaggttcgacttgtgaagggacgcgtgggaagctcgatcgggaggctaccgttgccgctgacacgggttaaccagtgttgagatccgcactgcagcagagcttttggtgaccctacttgctacttccacttgcactcgccggattgatgaagctcctgcatgcattgcatgcggagtcttcaaggggatttcagctggcactcatgcattcaagtaaaggctccaattcgagataccggtgcgtttcaataagcaggttcaacagtatctttcgttaaaaaaaacagctctgcttttcgggcggctgctatgtcgcactgcacagtgtggcgtagcgcagcgatggcaagctaatgcctaagaaaaaaacatacgtgcatatagaaaccactgatattagtgtagacgctgacaacctacggagaaatttgtaatggcagttcagggatgtaaatctttttacgaggcaacaggtcacagttcttattgtctggtagtgatagcagtgtgcgcatttcaatatattctctgatggaattgtcttggggttgaa

SEQ ID NO: 37278 - DNA, 163 bp, Zea mays
  Clone ID: MRT4577_134000C.1
ccatacctcgggaggctgcgcgcgcatgccagggaccaacgtacatggcgctggagctgcgtgcgcgaacggcaatatctgatgtatgtgtcatccactgagcagtgagaggccgtctgcgaatcgacgagctattactatatctggctcactgacatcgtgc

SEQ ID NO: 37279 - DNA, 199 bp, Zea mays
  Clone ID: MRT4577_134001C.1
cccgcccgtacgctaggggcacgagggagaagctaggaacggcggcggcggcgtcatggcggcgcggaacatccttcgcggtgcagcatgcggccaccgtttgctcgtgcccgtcccctcaggcgctctggctggttctggaagccggaacatcgacgctgtcactagggaccttcgtctttacgcatcaaacgaaaca

SEQ ID NO: 37280 - DNA, 514 bp, Zea mays
  Clone ID: MRT4577_134002C.1
gactagtgctcggacacgtgggccgaacccgcaccaccccgcgccgtggtcataaggaggtccttaaccgagcgcgcctatttccgtaaggccatcggcaccgtcatcacggtaatggctgacaactccctgcttgccggcggtgccatgggccaggaggcgctgttggacgcaggccacggcaggctcgtcttcaagcccagccagggcaccggcaagggcggcgacaccatcacattcaagaacaacgcacgcttcccgcacaaggtcgacttgcacgaagacgaggtgccgagcggcgtgcacgccaccaagatctaccaggaagagtaccttaacgcgccaggcgagacctactgcgtcaccctcaccgtgccaggaacctacggcttctactgcgagccacatcaacgagcccgaatggtcggtatgatcaccgcaaactcattaaggtaactatcgatcgatatgcagtcatgtattagctgctgctgcctgctatgaactccaccga

SEQ ID NO: 37281 - DNA, 488 bp, Zea mays
  Clone ID: MRT4577_134003C.1
gggaaagaagcagcacacaccgctagcaggagtagagccctggctcggagtaagtgataccaatcttgaccgatgcgctgccctagggcaaggcaccctaacgcaccagccaaccacaggcgaaggtcaagaaggcggaccctgccgtcggcaagcaaacgggccaccgatggaggcaaggacacggccaacggcaagatcagcaaggacgctatcagactgctaactgacacgaacggctaaagtatggcacgctatcgccgagaatgaggggaacaacacacaagcgattataacgggcaagatggatagcatgctaatgatgcacatacgcctgctcgtgagctagctcaagctaggacacgtaagaggctcagacactccatctgacacgctcaagaatgagtaggccaagaccaaagcaaaacggtaaagaggcactatacgcattgacaccgactagacttcatccaatcgcgacttcgaaa

SEQ ID NO: 37282 - DNA, 283 bp, Zea mays
  Clone ID: MRT4577_134004C.1
attcggcacagcgaagcgcgggcacagagatctagctgaactactagctatagcaacatttgctgcatgtcttctgacattacgaagtacgacatcaaagcatcggggcccgaggccggcgagttctaagccaaggactacacggactctccgtcgtcgccgctcatcgacgcggatgagcttaccaagtggtccctataccgggcggtcatagctgagttcatcgccactctgctcttcctctacatcaccgcggccaccgtaattggttacaattaccata

SEQ ID NO: 37283 - DNA, 805 bp, Zea mays
  Clone ID: MRT4577_134005C.1
ggatgatcctaaaataccctgtgtggtgacaattcctttaattttagtccataggtttctgtttttcatccatagaagcagctataaataaacatattgccttgttagttaaattattatatatcctaaaattatggtgagagctgtccggtcatggcctcatgggttcaaagcagctgctccgcatttgcggcggggagatttgcctcagtttatcccttccccagaccccagtaccccactcatagtgggagcttctgacactaggtcagcatttttttcctaatcttgggcaacaaaactcaaatgcagctatgtagatggttcttctgcatagcatagtggcaccagaactaggatcaaatacaaaatcgatgacagaaaataggcaacgtttccagaccttgacataaaaaatataaatattacaagaaaggttttggaacggcaaaatagaatgtcaaaaaaaataaccatccagaggcgtaccgataatgttagggatgtagagataaactgatggcattttgcccgatgacaattgtgccacagatgatcagtagtaacaaagagcttgaagaccggcagttctgccctttaaatggtagcagcagtaaacttaatgggattcctgtcagataagtgtatcgtttatatattaaaccaaaaaataatgtttttacaagggaatcaaaatatgagtccaattaacacagtgctactataacccttgtaccttttacaaacaaaaaaaacttgcattttcatgtcccagggaaatatcaacacacccgctgggttttct

SEQ ID NO: 37284 - DNA, 354 bp, Zea mays
  Clone ID: MRT4577_134006C.1
acgtccactcgtacgcggacgcgtggtaaatataatatgaaataagaaaagctaaccgggggtggtgattcagatacttagttcactaaatggctcctgccaatcatgttcctttgatcattgtatgatatgatttatgatctgaaccacattaaacacctttctatctaacgcaacctgatggccaagtgcctggagatatgaccgcgggtcatcacgatgatgccttcagcaccttcttcagccagactggtgctgggaagcacgttccccgtgcaatcttcgatgatctataacccactgtgatcgatgaggtgctcactggcacgtaccggcagctcttgcaccctgagc

SEQ ID NO: 37285 - DNA, 546 bp, Zea mays
  Clone ID: MRT4577_134007C.1
tatttttttttttttaaaaaaaatccacatgtatgctccgaattctttaactcgaaagatagacgtcagttctgttttcaaaaaaaaaccttccttctctgtttcgcaaattttgatacgggaaagaaaacctaaacactccggagaaacactttgcagggtccatatcctgacggtgacgctggtgaagccgtctgggagaatgatgtccatccagtaaactaattggcattgccattgccgacgacccccgcaaggaggggctccgtcgttgtcgtcgtcgtcttctgatcctcccatttgtgtagccttttctgtgcttcctctacctctttgttccaatcagttctcaaggtggcccacaataagatagccgtctgcatgaaagttcctccaatcatgccactccaaatgccctttacgccgaacttgaagacaaacccgaggatggcgccgaggggaacaccaactatgtagtagcagccactgttcacgtaggctacgaactctcgccacccacacccaacggcgacacctgacagaaca

SEQ ID NO: 37286 - DNA, 1012 bp, Zea mays
  Clone ID: MRT4577_134008C.1
ctttacagttttgagaccatatccaagagttaacctgacatttgtgagaatcctcgtcactatagtccaattatcattagtgggcgcatgcaagaattggcacaccttaatgattgaaaaactcaagctggatcgtgtcaaagtctaaggcaccaaaaatgcttctgtaccttattgcatcctctaactctattagttcaccttctacaatccttaacttcttctgaagtattgagcggagtcgtaggcttgtaattcatcattccaactctaccaaacaaataggaagcctatttagtccgagacaagtgagtaccatcaccgattttttgtatctcaattccaagaatgtaatgcaacctcccctaggtccttcaatgaaaattctgaactcaaatcttgaaaagtagcatcactagcatccgatgaatagctagcaactataatgtcattaacatagaccaagagatatattgagacatttcccttcctataaaagaataaagaacaaagaggtgtccacctttgaatcttgaaaacctagatgcaacaatttatcactaggtactcggctctcagagcttgcttcataccataaatagcttacacacatgattgagctgtgacgtgctctcaaatccaccaggtggctgcttcatgtagacttcctcctccagaatgccatgaagaaacgtattatgaacattaaattgcctcaatatctatcctctagaaaccgctaaggatagaacaattctaatagtagctactttgaccacaagactgaaagtcttctcataacctatgtcatatcgtttcttccccccctccgctactctggttccatgcacagaaggaggctggggtactgtgcgcagcaggagtttggtggtctggtgttatgccttttaggcattgtactttggtccattttggactcttttcttctcttaatttaatgacgtgcagctctcctgcgtgttcaagaaaaaaaaaaaaaaaaaaagcggcc

SEQ ID NO: 37287 - DNA, 517 bp, Zea mays
  Clone ID: MRT4577_134009C.1
aggaggacacaatatgctgaatatataatatactatataatctgatgacaaatctatctgtaagtagtatacaaccaaaaccgtcgcctcccgctgattcatgaacaaggggaatggcagtttacaccagcttatttgaatgtacaaagttaaccccctagcatctcaagggttgtgattgatgcttataatatacattcgtgttgtatcactgccaaaaggtttgaaggaaccagctgtaccggcttcaaatggcataaatacggtcgatctctgaatccgagaactccgaattgtgctgccatgagtttgagccgctcctccttgttgacttcaccttcctcctgattttacgtgtgcgcttagacttcaccacgtagtatgtcattgtaccaagcacaccagccatgatcaccccacctatcagggttactagaagagccgcccactttaagcgccgccccactacaatgtaagaggatgatatgaacgcaactgtcgtgcatactgaagccag

SEQ ID NO: 37288 - DNA, 340 bp, Zea mays
  unsure (1)..(340): unsure at all n locations
  Clone ID: MRT4577_13400C.1
agtcgtccataattttttgtcgatttttattttttttttaggcaggcgttttcagagagaaatctacccgttaaaatgattctttgacnnnagatatacttgcacactgagtcattcaacaacacgggatctgtgtgggagtacatgcatctgataaaattgtctgctgaatgtcgacattgacaccacgatttagagaagcggtaccattttataatagagagccacatgtaccacctttgtggacggtggcgcacctgctgcctcagttgtggaacacccatggagcgctgaattttgatgaccccacccactttgttgaagctgtggtgcattgcaa

SEQ ID NO: 37289 - DNA, 264 bp, Zea mays
  Clone ID: MRT4577_134010C.1
tccgcagaagtgctctgtccactactctttctcctattttttctgacaacccacgtctctatagagttgtgtacaaaaagcgtgctgcgacgatacaacaatccctcgacaattataaatctgctacttattattattcccattcactctgatagactccggcctaaaaaatgccatacctgaagctgatctattatttgttttgtaatcaaataaacgtgtgattatctggcacacaaaataaaatcttgcgtattttggaac

SEQ ID NO: 37290 - DNA, 740 bp, Zea mays
  unsure (1)..(740): unsure at all n locations
  Clone ID: MRT4577_134011C.1
aattcggcacgaggttggcgtcctctccctcatcctctacaccctaatcctgataccaatggtcaagtacgtcttcattgtgctttatgcagatgacaatggagatggtggcacgttcgccctctactcacttatatcgcggcactccaaggtaaggctgataccaaatcagcaggctgaggatgccatggtgtcaaattatggcatcgaagcgcccagtccggaactgagggtggcacagtggctgaagcagaagctcgagtctagcaaggcggcaaagattagcctctttatcattacaatccttggcacatcaatggtgatgggggatggaaccttgacaccatcaatttctgtgctctctgcagtgagtgggatcagggagaaggtgccaagcttaactgaaagtagtctggatctcagtgccgattttgttcgcgctcttctcggtccagcgctatggtacagacaaggtcgggtattcctttgctccgatcatcacactatggttttttcttattgctggcattggaatgtataacctcattgtgcacgagatcggtgttctccgagccttcaatccaatgtacatagtggattacttcagaaggaatgggaaggatggatgggtttcactgggtggcgttatcttgtgtgtcacaggcacagaangaatgtatgcagacctaagccatttcaatatcaaggccattcagatcagctntagcactgtcttgctc

SEQ ID NO: 37291 - DNA, 452 bp, Zea mays
  Clone ID: MRT4577_134012C.1
atgcggcgtttgcgctcgtgttggtccagtacgaacgccgaatttttggatcaagtcacggagatgctacagccgaaacatgggactacgacgccattgcgaggtacagatttaagtaatgctcagacattgttagaaggatctgggcctcttctattatgatcaatgcgggatattctgcgattgccgtaataagcgaagaattccatgacaccagatcgaactgttaattctgaaatgcactttaataccgttgacgtccactggacctacctggattttctatattaccataacaagtgagaactgtaattaactgtcagttactaattgctccatgagtgtgacacgtgcataaatgtacgtggcaagtacacgaatttacacactgctatatagcttagaattgataatatatgaaggatgcatggagcctggaatgtcctatgttg

SEQ ID NO: 37292 - DNA, 101 bp, Zea mays
  Clone ID: MRT4577_134013C.1
aatcggcccgaaaccagaggcgggtagggttctgactgttggaaacggccattgctgcctacaacgccgccccggcgctgctacgacgcctcttctgcagc

SEQ ID NO: 37293 - DNA, 521 bp, Zea mays
  unsure (1)..(521): unsure at all n locations
  Clone ID: MRT4577_134014C.1
agcggccgcccagnntgtgatgggatanntctgcagaaannttcgcccctttcgagccggcccgcnnccgggccaggtacctgaaccagcatacataacaatttttgtcattatttgataacttgtgttaataccaccgttataaagaaaaatacacatgtctgatgaaacggaagcagctatctgttatcataacgaagtcccatgaatataaactgaaaatggctcctttctcttttatggagaacgcaggatcttctgcactgggaagattcctccttatgccacttacacatttatgtgaccggcctagggcttttgttatgctacaacacaaaatcgggaggccgtggccttctcctattctgatactctaaaccaagatgtgctgtatctcactttcccatgggcatgccctgataggagaagagactctgtatcgccaacgaaccgtctggctaccctctaaatgacccgatccttaaaaacctgatactgcgaccacccccctgacgaatatc

SEQ ID NO: 37294 - DNA, 434 bp, Zea mays
  Clone ID: MRT4577_134015C.1
ggggcaagcacaaagggggaggcgatttattaatgatgaccaaatacaaatatcaatgggttagccactattttttttttaaaaatgcatggaaactgccgggaaatggggcaacataaaaaaaacaaacttgggtggttttacacttaaaggatcaaaggggcgttacagcttgcaacatgactcatcaatagggatatacagagctcaccacatccacaaaacctactggattgcctttatcccgggctggaacgagcaacgcggtttttgaaaatgccaagccacgcccccaccggaccatgcaaagggcagggaacaaaaacgggtgaaaaaacattatgctacgggaatggaatttgacacgtacaaacattttgccatttaggggatgctaaaaaacagctcgcatttgcagggcttcaaatttccaa

SEQ ID NO: 37295 - DNA, 1461 bp, Zea mays
  Clone ID: MRT4577_134016C.1
ctccttttctccatgtggcattttttacaggaatgaaagatgggagaggttcatggagtctgagagagaaaagagcaatggagaatgccatggtggcagacatgcatctgacgttatgaacaaacgaatgacaaaccaccgtggtggttggcggggtgctggatcccgtggccatctgaggaacttccgaggtccaagaatgcgcaatgagtttgctgatgaatctattggtggcaacaggcactcatttgaagatgaacctgggcacacccgaggtccacataggaggcggcattcaccaccacatggctgcctcatgagagatacggacattgacgaattctacggaagagagattccagagtataggctgccggcccgtggacaaatagaagatctcccagatagcatgatggacgacaggttttttatgccgtattcccatagacaccgtggccaaggtgatcatgggttcatccacagagacagagacaggagtcattcgcctgctgcacagagaagggttggccatgtgcatttccatcgtggacgatcacctgaagcgatgcgcagatcaccaccgccggtaatgcgaactgacagaacatacatgcctcaccgccatcacaacggaagccatgacgagaggggtgccatgcaaagaaatgagaggaggtgcgccatggaaggtgatgcctcaggcttcgagccaccgctacatccctcccacctagctgagttccatacagtagaggaacttgtgggcagaaggaagtatagggagcggagaccatatcttcattcaacggtgagtgacgaagacgagatgctcccctaccgcacggaggatgacatggagtttgctgaaggaggtgctggtccacgagagcacaacggcggcttcaggaacaggatggggcacaacagggcacgaggggaacaagaggacgggtacaggcaccgccgtggcggtcatcaagggtggcgagacagtgacacaaatgacagaccaaagaggaggaggtactgacctactgcactcacagcttgaccggctaatgaagacgacgtcgttggcctttgggtggactggactggctgatgcatctgccacagatctcggtctcagacgaacccaacacctttttgccagcgtctcccattccaatatattgctttgtttttgctgcattattttctcaggacatggtgctgcagcgtctaaagcatactgctccctccctctctctatagtaaccctgggtcctgctccgtttacaagccgagctgctagtacatgtggatgatgaagggtgggtggagacactgaacattttgaggccaagctcaaagtgaaataagaacccccccggcatgtgctatttttgccctgggtgctagtgcggcccttgtattaaagaccgacttgtctctataatttggtttcgagttgatgtgagt

SEQ ID NO: 37296 - DNA, 256 bp, Zea mays
  Clone ID: MRT4577_134017C.1
tgcagctagatattttccaaatttctctgaaagtgaattttatttgtgactgtggatagtgacatttgctttagaagcccgatggttggtagcccacagcctcctttcaagggcattggcctctcaggtgaacttgcagacttggccaaatttgcttcctctttcccctggggcagttgcctcatatggggtcattgcaagacccctcggggtgctgctttgctgccttcaagaataaaagcctctatgatccaga

SEQ ID NO: 37297 - DNA, 204 bp, Zea mays
  unsure (1)..(204): unsure at all n locations
  Clone ID: MRT4577_134018C.1
tttccctaatttttataatttttttttggtttttttcttttgatcgcctgacaaagctcaaaattatattcgaaancncaacgttctttattacaaaactttttataccccataaatattttcaatgaggggctctttgtaataccgctcttccttattataggccttgacttgataaaaaatcactctttttttctcttgcta

SEQ ID NO: 37298 - DNA, 192 bp, Zea mays
  Clone ID: MRT4577_13401C.1
taataaccccccgacccacccacacgtccaaccataacatacatctactccaaagcacacaataacccgaacaacaacattagaggggcggtctataaaatagctttccctactttcacttaaatcaccacctctacacatacaaacaactcataaaactcacatccatctcaacctaatcatctaccatca

SEQ ID NO: 37299 - DNA, 397 bp, Zea mays
  Clone ID: MRT4577_134020C.1
gtgcacccgacgcgacgccctactgatcgcctcatgccagtcgttgcggcagcagtgttgccagcagctcagcggtggagccgcacaccggtaccaggcgatcttcggcttggtcctccatccatcctgcatcacagccgcaaagcggccaggtcgcggtgctgttggcggcgcagatagcgcagcatctgacggctatgtgcggcctgcagcaccgactcagcccctactctgctgcggggtggcccaatgaagaaactatgtgctgtagtaagccgctggctagctagctagtgatcatttagcggcgatgattgagtaataatgtgtcacgcacaccatgggtggcagtgtcaggtgagcaatgacctgaatgacattgaatgaaagaaaaagt

SEQ ID NO: 37300 - DNA, 299 bp, Zea mays
  Clone ID: MRT4577_134021C.1
agtgcaggactcgatgcaagacaactgcatgtcctggggaaccagggacttcgagtagcccatgctggaatcatgtgtacctcctagtgcaaccgtccgctacccagggatcgtcgaatggccccacggaggggacgggcggcctgctgagtgaagccacaaataccgagtggacttgaccccggcctccactaggctgcagacctagactcgcgctgcacaggcctcgctcttcgcatctgaagagtcctggtagttcttgaggtttacttctcaaatgaaatatgtttagtaaaaag

SEQ ID NO: 37301 - DNA, 630 bp, Zea mays
  unsure (1)..(630): unsure at all n locations
  Clone ID: MRT4577_134022C.1
ggtaccctcgagccggccgngtccgatagtatttctctgctttctctccaatcttcccggtttccctgataaagatggctggatccttttgttctcaataccgggcttccaggtccccttccggttgggtttggggttgggaaaaaaaactggggttccaaaaaccccttttaccttgttgaaagggtgggttccccatttttcctggggccccccctcccccattggggggggggggcccccgttttaaaaaaatttttaaaagggggggggaaaccgggggtttttttttcccccccaaaaagggggggtaaaccccccccccggggggggggggggaaccccccccccccccaatttggggggtctcttttttgttcccccccccggggggccccccaaaaaaaaaaaaaaaaacgccccccccaattttccccccaaaaaccctggggggggggggggggaaaaaatttttttcctctcgggggggggggggccccccttttaaaaaaaattttttttttttggccccccccccccccaaaaaagaggtttttttttttaaannaaaaaaaacccaccccccccggcgggggggttttttttttttcttcccccccccccccgccg

SEQ ID NO: 37302 - DNA, 772 bp, Zea mays
  Clone ID: MRT4577_134023C.1
agctactccactccaaagcggagcggtaccaggacgcgctccaccacgccacctccctctactcactcctgctgttttccgtccatctgcccaccggttcgcagcccacgcctcaaaaccctagccccggtcggatcgcggggcgcctccatggtgccagcgacgcggctcgtttgatccggttgctggtcgagccccgccctcgctgccgcgcttcgctctagctgtgcagcggcgtgagcaccgagcacactcgcgaatggggaactgctaggttgcccgaatcaaggatgggagccctcaccctggcgcctcaggttcgtccatcctatcctagctgttgcttggtaccgttggttcatggggcgatgcgatgagggttttcggcgatccgtgcttgctagttgcgctctacgatcaggcggagggggtttgagatgtgaaaattccggctcgttgcttcttgctcgcgacacatgtatcttttgcgaaatgatgtgtactcgtctgtgtgatgcgttttccccggggtggggatttgacaacagaggggaacttggatcagatcaggtatgcagtggcaggctgctgattgggctattccagtgggtcttgttctgttacatgattccaacctttcagctgtcttgccaacttcaaaatgtccaaggagctagaagtgagccatcgcaatcgctttagagtggttttgctaaagcgcgcttggaacctgaggtgttgtactttgtaggtgggttctgcagtctgcact

SEQ ID NO: 37303 - DNA, 197 bp, Zea mays
  Clone ID: MRT4577_134024C.1
cctcctcaacctccagcccaaccttcagcccgtaatcgagagcaatggcgctcgccaaggccaaggagatcgttgcctccgctcccctcgtcgtcttcagcaaaacttcctgccctttctggctcccggtgaaaccattggttcaagaacctcgaaccaggctacaaggccattgatttgaataaggaaggtgttgg

SEQ ID NO: 37304 - DNA, 301 bp, Zea mays
  unsure (1)..(301): unsure at all n locations
  Clone ID: MRT4577_134025C.1
caccacttgcccgagagtcgtattgtccaagccaacgcaggtgcagatgggggccgatcaccacctccgggcggancacgaccaccacaaaagggggaggaaggggggtcacccccaccaactgaaaccgcgctggtggcgccgcaacccccggtacagatactactacagcgggggcaagggcgggggcgcggatcccgccctctgcttcgacgaactcgtcctgctcctggccgcggggatcaccctgctggtgctctacgtaatgtaccgaccgttccaccccaccttacccgtcacc

SEQ ID NO: 37305 - DNA, 253 bp, Zea mays
  unsure (1)..(253): unsure at all n locations
  Clone ID: MRT4577_134026C.1
cggccgctcgagcgcctgccgggaaatcgtactctcttcccanccatgtgtaccaaagaagtggtgtggcactcgaagagtaatgccacgcgaaggatagatttcacactccaccgagtgcctgggatgtgagacgacggcgacgtcgcgatgatccgcatcgccctcctcacttcttgctcgtgcgtgctcgtgtgccttctcgacggtgtcgagagcatcccttgagaccaaagaaaggaaaaaaagaaga

SEQ ID NO: 37306 - DNA, 351 bp, Zea mays
  Clone ID: MRT4577_134027C.1
ttgtactttctatagaccttgcgccgccgcctcctcttccacccagcggtcgagctcctcgcgtcctgcgagcgcgcgccgcaacgccaccatgaagttcaacatcgcagaaccctctccaccgggttgccaataagaagctaggaaatctgatgacgaccattaagctcgcgtgcctatttatgaccgaaaggatatccccaggaggcaccatggtgatgcttctgggtagaagacctcaagggtctatgtccttccagaccctgcggctggacgggacaagcaaggccttcccaactgaacccacggagtttctgccttctggatcgtgactcatcattctcgctccat

SEQ ID NO: 37307 - DNA, 1853 bp, Zea mays
  Clone ID: MRT4577_134028C.1
ggccgcttttttttttttttctctagattgctatttttttggcactatggacattttccttatatatatcaaataaaacttttttttttttcgttttgccaaataatttattaaaaattccagttggagccggagtcaatttaaaagtagccggagccgtgccaaacacacacttgcgttagctccacgtactaaccatatagacaggtcatcctattcaccgtgcatgcgtgcacaggagcttccagctatatatatatgcgcacaaaaatgctagcagtttccggataaacccaaaagcatgttgcatgcatgaagacacgcgcgcgtatcatcatcgcatgcatagttgcatactgcaatcccccgatcattaccctttggtgaatcccatgacgttgggcgtgccggtgctctgcagccatgacgcgccgtcgatgaaggcgccggcggtgaatgccgtggcgtcggcctgtccgatgacgtggtagcctggccagttaaccctcttgctggtgccggcgcccgggccggtgttggcgtactcggcgtagtagagcgtcttgaggccgaggtcgcccatccactccgcccacccttccggcctgatgaggtcgccgatggtgctctccatcaccaccgtcctcgcgtactccttccacggccggccgaggtaggtggcgatctggaggcggtcggggaagagcgcctgctccggcacgatgcggcagccctggagcacgatgcccgtgggcatgttggggtccgtccgcccttgcgccgtcaccatgttggactggctgtccccgggcttgcgcaccgtcatgaggcagttctggaacagcgccgccgagttgccgaagatgaagtccacggtgcccagcacctcgcagtcgcggaagaactgccggttggcgtgcacgtacagcgtgtcctggtacccctcgaaccggcagttgtagaacaccgacttgtcgccctgcacgtgcatcgccaccgcctggtgcccctccggccccgccgtgttgacgaaccccatcgacttgcagatgaacccgttgccctcagcagagaaggtggctgaggcgaaggtggcgaagccgcctgcgttgctcttgtcgccggtgaccaccgtctgtgtcggcccgtcgccgtacatgaagatgttggccatgttcttgggaacggtgacgtactccttatacgtgccggccttcacgtagatgacgaagcgcccctcgaaggtgttgggcacggcggtgatggcctcggtgatggtcttgaagtcgccgctcccgtcctgggcgaccaccgtgttaggcttctgggtctgctgcaggagcctccgctgggtggccggcagccacttggggaagtcgctgggcggcaccccgctgcgcccgtcttggatctcatcgaacgtgccgatgaggcccgtggtcagtaccctgtggtcgccggacatggtgttctccgtcgtcgcctcatcaagctggcgcttggcctcggtggccgcctcgtcgatccccatgagcgtccgggacagcagctctcgcttaccggcgagctcgtcggggagctcctccgccgcgagaagctggcggtttgcctcggcggacgtgctggcgatgctctcgagctctgtggacaaaaggttgcgccgggcagcgttatcggtctcgtcgtcgggcgacacgtccagcagctggtggcgggcgaggacgtcgtctccctgggcgctggaaatccgagaccccaaggagctaagcaagcgccggccgtttgcgccgtgggacatgccggtgatctcgtccagcgtgtccgacaggagcttccggtttgcgtttgcccga

SEQ ID NO: 37308 - DNA, 397 bp, Zea mays
  Clone ID: MRT4577_134029C.1
cccgatgcgaccatgcgtaccgatcgaatcaggctagagctcactgttgcgttttcttaagaacactataaaaacaacgggggagcttctttcgggtcaacaccttatttgattcacgcaaggcctttactttaagaaatttgcccgcttatcgtcctaattacacgtcaatgctcaaaccaagctcactgcgacgagctaatctaccagacaacaaaagcattgcaatatgctcgccatctacaggaccctgacagtgcgaaaaactctaatacatgcaccaagaacaacattgttcataaacaatggagagatcacaaccattagcacaacgtagactataacaagatcttacgtcacacatgacgtcaaaccggatctatatccgacgatccac

SEQ ID NO: 37309 - DNA, 276 bp, Zea mays
  Clone ID: MRT4577_13402C.1
accactccttccgacccaaacgcgccaaggcggcaggctttccttcgtctcgtggttcttcacccactggttctgggaatttttgggcgcccattggcgagcaacttgcttaaaacttagggttccacgaatggggaccttgatggactaaaattttgcgtggagagccaagacatttggaaagacaattacatgttgcaattggataaccgctccggcgctcgacgggcggcgttggcgtttcggcaatgggatatatactcatgtgccatcgcg

SEQ ID NO: 37310 - DNA, 221 bp, Zea mays
  Clone ID: MRT4577_134030C.1
ttacaactgaattcgagaacaaacttatgagcatgatgtttcttttgcctgatttaaatgattgttattttacccatttatttaatcatttttaagttcattttgctgtacataataaaattgaaatcttttataaatcaatgaacaattttaaacaatatgattattataattctttttaattattttaccaaagatattctttttataatctacttttt

SEQ ID NO: 37311 - DNA, 156 bp, Zea mays
  Clone ID: MRT4577_134031C.1
atcaaacgtattatgaacttgtgctgtttcttttcgccttcattatatcgtggtgcgggtgaaccgtcgatgggggacgccgtagatgacatctttatcggcggcgcgggcctatcctggctcgcgactgcactcgtgctacacaggaaaggggtg

SEQ ID NO: 37312 - DNA, 327 bp, Zea mays
  Clone ID: MRT4577_134032C.1
ttgtccactcggtcctgcttggttaggcggagggggcttttaccaaacacacaggggtatcacacgacgcacgataggcgcgcctgaacaggaggctgtacacgcccacagatgcagggcctcatgaagacagggagagaaaaaacagccaccgccacgaggagccctcagtataccatggagagggccagatgcacagtccacagcgcggcccaccttccagcatagatcactggcctcggcagaagcactggagtgctatctggcaagctgacgccctgagaatgaactagccacgaggagcaggctcctcaaaaatgaagcgcc

SEQ ID NO: 37313 - DNA, 523 bp, Zea mays
  Clone ID: MRT4577_134033C.1
gggtttggttttttttttttttttttttttttttttttttttttttttttttttttttttttttttttttttttttttttttttttttttttttttgggcaggcgttgataagggggaacaaaaaaacccttccaactgctacaatttttggggggggggggcattattaaacgtcctaccttagctgctaaaggttaactcctgatataacccacccaaatgttcatagattaacccctgggggggcaattgatttacattaattttactactatacaccacccccccaatgttttgggcccatttgaacaagtttagctttaaacttcatttgcagcaggaatcggggaaaacctggggtttcaaaaccaattcaatgagggactgcctgagctccaacaggccatccccaaaaacaatcgggaaaactcactttcgttgaaggatacagatcccttaaatcagcgggaacatgttttttttttgcagtcacaaaccacttttttcaccgtttttaaaaac

SEQ ID NO: 37314 - DNA, 335 bp, Zea mays
  Clone ID: MRT4577_134034C.1
cttataagcgtgggagcacatggatccatagctgccattacaactagagcgcggatatgaacaagtggtacatgtacaaaaaaaagaactgtattaggaagcgggagcagactctaccgacgcataaatgaaatgcaattgccgagacgtgagaagcatttcaaatactaataaccaggggaccatcacaagttgacaagtgggaccacgaaaaaatatgtgggcgagcgagggaagacaaacaaacgcatatggtcatggagtgataactaagagctagccagctggtacgagataccgtatagaccgctgaagcccaaatggtgttgaaacca

SEQ ID NO: 37315 - DNA, 822 bp, Zea mays
  unsure (1)..(822): unsure at all n locations
  Clone ID: MRT4577_134035C.1
cggccgctcaaggcggcaggccggcttctcgccttctccgcccataatctttctcggtctaagaaggattccacgggacaaggcacagcgggaggatctcgaagggagaatacgggggagaaaaatgttgcttggagctaagtgataccgtcgtataacgctaacacttgtgcgtaaaatggaggatcatcctggccatcctatttccaactatgatttcttgtcagggaatggttgtcatacgaagaaattagttcataagaactacgaccaggactcctcatcagccaagtctggccggtcacaacaagaagcatctgcaacgagtgacagtaatctaaatgagcaacacacctcaagacccccatcacaatctgacaatgacaatgatcatgggaagcccgaccagcacatgataaagccgcttttatctttggggaacccagagactgttgctcccccgccaatgattgattgtagccaatcatttgcatatgttccttaagctgctgatgcttatgctgggatctttccaggatatgcctcacacgctattgttcatccccaattaaatgctgcaacaaactctcgtgtgccgctccctattgagcctgcagcagaagagccaatgtttgttaatgcaaagcaatatcatgcaattcttaggaggaggcagatacgtgctaaattggaggcccaaaataagctcgtgnaagcccggaagccataccttcatgaaatctcgcaccgccatgccatgaagcgagctcgtggaacaggagggcggttccctcacacaaagcaactcgaggagcagaagca

SEQ ID NO: 37316 - DNA, 337 bp, Zea mays
  Clone ID: MRT4577_134036C.1
ggggggcttatttaaattttggagggggcggatgaactaactacccaaaaaagtgtccaaacacactgcaaccaaaaaaggctatattgtaaatgcactgaccggcagatacaatctaaattccggtcaagaaaaacaccaaacaatctctcttaatgcgcaattggatggaaatataaccgacagggcgtgagcacattgtgtccaaaaaaagaaagggctggggatcacacactcagaccacctgttggccaattccccactgacctacgcgtgcacccaacaacaaaacctcgtgtatcgcgtcacctaaactcaaggaaattacctgcctccc

SEQ ID NO: 37317 - DNA, 713 bp, Zea mays
  unsure (1)..(713): unsure at all n locations
  Clone ID: MRT4577_134037C.1
agttagtgttgtaattacactatatttaatacttatccttaccattcaaaattcgattttacatatacttaatttcgaaccaaacactcctcaaaaactccacagaaaaagattaaataagaggctaccaactgtcacttagccatttgccgttactgagtgcagtaaaagaatagacagctcagatataaacaagttagctccaaggtcacactattatgtttgacgaagtcgtcatcttactggcaagcgggcccaggaatgtcgatgcatcacgtgctgacgtgagatgaccgcatggacagagacgagaaggggaacgtggcgaccgacatctgggtcccgccgtcccagccgccgccagccgcggcggcgcgctcgaacgacgacgacgggtacgagtgcacgaagtcgtcgaacccgacctcgccagagtatgccgggtgcgagcaccacagccccaccttcacggccgcggcggcctccgcgaagtcgaacgcgccggcgagccgggcgtccaccaccttctccacctcccccgccgcgtaccgctcccacgcccactcggncagcaccagctcctcgggcggcgcgcggggctctatgggatgccgnccggncaccacctncagcaccagggcaccgaacgcgaacacgtcggcagcccgtcgtggccttccccgtccgcgtcagctcgggagccaggtacccca

SEQ ID NO: 37318 - DNA, 312 bp, Zea mays
  Clone ID: MRT4577_134038C.1
cgggaagcttatagaacgaacaattcgtcagcaccttgacggggtcttccctgctggagatcgcggcgctctccaccgtcgtgccggcattggtagttctctgaaagtggagcagcagagataactctaggaaggattcagcaaagaacaacgatgatcaagttcaccctgttggtaaagattggatgcaatactttctctacactaggctgttgactatctgacgtggtgtgttgccaatcattgtgggtttaacggctctgtctgattgcactgtcgggggcgctctccttcctggaggctggtcgttcc

SEQ ID NO: 37319 - DNA, 2472 bp, Zea mays
  Clone ID: MRT4577_134039C.1
caggtacccgaacccgccgtggccgacccacaggaccctcgggccggccggattatggttcatctccgtccccattaattcctcccctcactccatcactcccatgtcaagctccaggaaacccaagactcccatcctcctcttcttcctcttccttctcgccagcctcgccttctcccaagagttcacctacaagggcttcagcgccagtggccgcggcgggagcccgaacctgaacctgaacggcacgtcggcaaccgagatcttgcccagcggcatcctccgcctcaccaacgagacgtcccggctcttcggacacgccttctacccgaccccgctgcgcttcctggaccagaagaacggcaccgccgtgtccttctccacgcagttcgcctttaccgtggtgcccgagttcccgacgctcggcggccacggcttcgcgttcgtcgtcgcgcccgacccgcgcatgtccggtgcgctgcccagccagtacctgggcctactcagcgccgccgacgtcggcaacgccaccaaccacctcttcgccatcgagttcgacaccgtgcaggacttcgagttcgacgacgtcaacggcaaccacgtcggcgtcgacctcaacagcctcatctccaacgcgtccgccaaggccgaccctttgaacctcaagtccggggacaccaccgcctgggtcgactacgacggcgccgccaggttgcttaacgtctccatcgccaacggcacgttggggaagcccaccacgccgctcatctccttccgcgtcgacctctctgggatcttccgcgagcagatgtacgtcggcttctcggcgtccacgggagtcctcgcgagctcgcactacctcaggggttggagctttcgcctcggcgccggcgccgcgccggcgctggatctctcgtccctgccgtcgctgccccagctcaagagctccaagaaccggacctcgctcatcctcgccgtcgcgttctcggcgttcgtggcgctcgtcgtgctcgccggcgccggcgcgtacggtgcgtaccggtacaagaaccgcgacatcatcgagccgtgggagctggactacggcccgcatcggttcaagtacgccgaactccgccgcgcgacgcgcgggttccgcgagcgcgaggtgctcggatccggcggtttcggcaaggtgtaccgcggcgtgctccggaaatccggcgagaccgtggccgtgaagcgcgtgaaccacgagtcccggcagggcctccgcgagttcgtggcggagatcgcgtctatcggccggctccgccaccgcaacctggtccagctccagggctggtgccgccgccgcggcgaccttctcctcgtctacgactacatgcccaacggcagcctggaccgccacctcttcggcgaccacctcaaagcgtcgcgcctgacctggccggtccgctaccgcatcctccgcgacgtcgcgtcggcgctgctgtacctgcacgagggatgggagagcgtcgtcctccaccgcgacgtcaaggccagcaacgtgctcctcgacgccgacatgtcggcgcggctcggcgacttcggtctcgccaagctccacgagcgcgggaccaacccgagcacgacgcgcgtggtgggcaccctggggtacctggctcccgagctgacgcggacggggaaggccacgacggctgccgacgtgttcgcgttcggtgccctggtgctggaggtggtggccgggcggcatcccatagagccccgcgcgccgcccgaggagctggtgctggccgagtgggcgtgggagcggtacgcggcgggggaggtggagaaggtggtggacgcccggctcgccggcgcgtacgacttcgcggaggccgccgcggccgtgaaggtggggctgtggtgctcgcacccggcgccggcgacgcggcccaccatgcgggaggtggcgaggtaccttgacggcggggatgccagcgaggtgccggagcctcctcccccgcctcccatgccgccggcatactctggcgaggtcgggttcgacgatttcgtgcactcgtacccgtcgtcgtcgttcgagcgcgccgccgcagctggcggcggctgggacggcgggacccagatgtcggtcgccacgttccccttctcgtctctgtccatgcggtcatctcacgtcagcacgtgatgcatcgaaattcctgggcccgcttgccagtaagatgacgacttcgtcaaacataatagtgtgaccttggagctaacttgtttatatctgagctgtctattcttttactgcactcagtaacggcaaatggctgagtgacagttggtagcctcttatttaatctttttctttggagtttttgaggagtgtttggttccaaattaagtatatgtaaaatcgaattttgaagggtaaggataagtattaaatatagtctaaaaaaaaaaaaaaaaaaaactcgaagagggcgcggtacc

SEQ ID NO: 37320 - DNA, 524 bp, Zea mays
  Clone ID: MRT4577_13403C.1
ggggcggcgcgtcttccctgccgtgcgtcctttcccgtactcggcgccgccaccccggcgcataggtgccctgcctccgtgctgactgtatgccgtctcgctacctagcgctcctgcgttccatgcccaccaagtagattcaccacaccccaaacgtgtagccggcagccgccgtatgcaaatccgttgctgtcggcggcggaggagctattccacgtgttcgtggggaacagacccgcgggagcacttttttttatgaggcgtgccgtcggagcctgatccggcgcccatcgatcccgctggacgtgtggcctatccgggctactgcagctaggtggtcttcgtcgactacgacttcctctacctggcggacctggtcgacctcctggccaccgacggccgcattgtcgtggccagcgtcaagcacgagtaccaacctgttgtggccaccaggatggacgatgccatattcgtgcaagaactgcgtatacatggtgctctaggattggaaccaccgaaggaag

SEQ ID NO: 37321 - DNA, 416 bp, Zea mays
  Clone ID: MRT4577_134040C.1
actcattcaaaaagaagccattggcatagttcataactcaattgctacagtttcacgtttaatatggcgctgccaatctataagcaggaaattaataaaatcatcaaattctaccaccttaaatatatacatattgcttccacccagaggtctcttgtttaagcagaggataagcatgctaaacaacttggggaaagaaaaaggcaaagtccttgcagtaccattggaattcctaaagacttcatatcttcttcgttcatgtacaccaatgctttcatatcaacctcttcagcctggaaatttatcaaatacttctctagatcaagagacttcagtaaactgtcaagcgaagcatcaatcttgttctgggattgctatggtagtgcagatggtgctggtacgggtgcaagtgcact

SEQ ID NO: 37322 - DNA, 155 bp, Zea mays
  Clone ID: MRT4577_134041C.1
aataataatataattaatataatataggatgagtaccaataaatatttcatacataaggggactctaaatccaaaccaaaacattgggataatcctggaattagccaaacaatctgggcaagggcagaatacaatggacaaaaaattgatttgca

SEQ ID NO: 37323 - DNA, 375 bp, Zea mays
  unsure (1)..(375): unsure at all n locations
  Clone ID: MRT4577_134042C.1
cgcggngaagacggcgccgccctgccacaggcagccgnccccncncaaccccaacncgagggccacgcagncgccgaccagcaacggcaagcccaacgcggncnccacgacaaggaggcaccccgccaaccncnaccgggggggggggaagccnccaccgcncccgcncccgcncccgccgcagcccaggaaaccgccagnccgagaggnaccaggcgacggggaggccacccccgacgaccgcagcggccacggcgggccccccaacgcgccgaacccggccacgnngcngcccnncacgcggaaggcagccgnggacgagaagnccccgagcagcccggcgcacangcagcgcccgcccacgccccccccgcg

SEQ ID NO: 37324 - DNA, 364 bp, Zea mays
  unsure (1)..(364): unsure at all n locations
  Clone ID: MRT4577_134043C.1
tttnnnnnnnnccctnnnccgccacccattaatggaacccnnanagaggacggccggcggggttcataacaggcagggggggaaaacgcaacaccaaaaaacnacaanaagggannncancaaaaaaccaaaccaaaaaaaaaacattttaaaaaaaaaaccgaagaaacagccatggggtagagccgcaaaaaaagaggccgccgggtgggccaagcagcttcttgctcagaagcactagccgcgttcaaatcgacagagagatcaagcccccttccagggatcttgtagacaaggcgagcacacccttgaccgtcgactaaaaaggggagggggagacaaagccaccggggaggaaacagca

SEQ ID NO: 37325 - DNA, 510 bp, Zea mays
  Clone ID: MRT4577_134044C.1
aacatggaataacgatttactagaattcatttaatgactgccaacaaatttttcatacgtcaccgtgctttgaattcaaaccaaaagctttaaataatctggcagtttagtcaaacaatccttgcacgcgagagaaaacgaggtgcactatattgattggcctttagccaaacccagcttgtgcaggggatacattgaatgcggttgttgtacttccaactgccgatgttgcatgactacgtccttgctagggtctttctgccaaggattgcaccgagcagctaaaaggcaaatgttggggtgcgtgacgactgcacttatacagaacaagcacggctactactaagaacgccgttaggtcttctcggtaaggtcatctgggtaccacaatacttgcatacacaatgcaattcatggcttttatcactctatatataacagaagtcccagattggccctagtggcatctatatgctaagggccaagctgtaaatggagttacaatgaact

SEQ ID NO: 37326 - DNA, 431 bp, Zea mays
  unsure (1)..(431): unsure at all n locations
  Clone ID: MRT4577_134045C.1
tttactataaaattttatttcatgagatgtaacttcaaaagttaaaaaaaatctaattcaagatctttggaaattttttacataattctcaaaatgagattttgaggtgttacacatgattaggatccaactgcaaaattttcttggcagcaaaagcgccgagcttgagatcaccatgcatccagcatgctgctaaaagagatccccagataggcacattgggctctaaatgcattgactctatgagactaactgcttcttgcatnaagtttagcccttntcctagaagatccacncatacaaccatagtgctcatgcttgggttcaatcccgtattgctgaaccatcgagctaaacaataaacggccttcatgaactagaccagcatgacagcaagcataaagtaaactaagaaatgtcacttcattggg

SEQ ID NO: 37327 - DNA, 348 bp, Zea mays
  Clone ID: MRT4577_134046C.1
gacgatgtgagtgctgtggatccagactgtcaagctggagacttctgtcgcctatgatgatagcaaggctgcggtcatcggcaccgtatacgggagtctccaggtcattctgcgctacgttgatgacgaccttttctaccgatgacgattgagacagcaggtctagcatctttcatgctaatgctcacattgccttgaccggatactctaacaggctctggatctgctacgacatcaactggggatacagcatccgagtggtcgacgtgatgcgacacatgatcagcaccttctaggataaataacttaagggctgatgatacgagctaacagtcttcttacagctcg

SEQ ID NO: 37328 - DNA, 361 bp, Zea mays
  Clone ID: MRT4577_134047C.1
ggtggatgtgcatgggtgctgactactgtttgaacgaactggccacgccttggctctcattttctgccagcatcggatgtttttgactgaccccagggcaccttatatctattgttgtgagggttaaattgtaaaatttctggcccgtggttcattccttaccaactaatgcactcaggtgtaaaagaaaattcctgtaatgtatacacaaacatttatatacaattttgcactgtaaatatactaatattagtttcaatggagtgcacccacaaattaatgtacctgcccatgtaaataatttatttttttcttacaatgaaatttctattaaaatgttttaagctagttctaagatcgc

SEQ ID NO: 37329 - DNA, 502 bp, Zea mays
  Clone ID: MRT4577_134048C.1
ttaaggtattcacatataattgttaatctgtcgttacatccgcttgtagatgccagaagttgtttatcagttgtttctcttgcattcatgtactacttgacagcgtggaactcaagtagggctttgattcttttgtgacagcaattttcttctttattctactattacagccagagaatgtccttgttgataggaaaggcaacatcaagatctctgacttcggcctcagtgctctacctcaacatctcggggtacgatgatatgatttattcaactttgttccgtgtatataattattcttctgtatacataatttaccaaacaacatatcacaactttcagaatgatggacttctgcacacaacatgtggcagccccaattacatagctcctgaggtaaaaaccgacgaacttgtaatttgattcatagccatacagggaaagtttgatcatcgctgtattattataaatatgaatatgaaatatacataggattatcatt

SEQ ID NO: 37330 - DNA, 331 bp, Zea mays
  Clone ID: MRT4577_134049C.1
atatgttggcacaaaacatgaggggggcaacatctacaacaacttgtgctacgaaacctcgctaactactgtcagcaacaacagtttcttacattcaaccaactaactatattgaactctgctgcttatttgcaacaacaactaccatttaatcagatagctgctgactacccccatcaattactagcattcaaacaactggcagacactgaactctgctgcttatttacaacagccacatctaccaccatttaaccatctaactgatgtgagccctagtgccttcttgacacatcaacagttgttgccagtctaccttcacgcttctcct

SEQ ID NO: 37331 - DNA, 439 bp, Zea mays
  Clone ID: MRT4577_13404C.1
gtggtgtgtgtgttttttttttttttttttttttttttttttttttttttttttttttttttttttttttttttttttaaacaaaatccaacacttggtttaaaataaccagccactagctccccccccctgtttgcaattgcctgttacaaagggcaaccccccaaaccttttcggggccatcaaaaatcatgcccccaacaaaaaggaaccccaaaccggcgggcgggcaatgaattacaaaaatccacccttctagtcccccctagctagcaaaggggggcccccgccccggcccggggtgcccttgccaccacaagccccacgggggcagggcccgcaactaaaaacccccccccggggcccccgctggccgccgaccttccccccggggtctcaatcctagaccctgaacatggcgggggggacctacccctcc

SEQ ID NO: 37332 - DNA, 166 bp, Zea mays
  Clone ID: MRT4577_134050C.1
agattgcattactagctactactcagtccttccatagagtttcatctagcatgcagcagagctgcgcggtggccattctagctaggctcccactcccagtccaccgtggtctggatgtcctggacagcctcttcctggcgcagaacggtgctgttgccgcccacga

SEQ ID NO: 37333 - DNA, 150 bp, Zea mays
  unsure (1)..(150): unsure at all n locations
  Clone ID: MRT4577_134051C.1
cagctctgctatgctggcaggtacccanattaattgatgctgagctgataccctcctgttttacggcatccaatttcacaggagtaaagcaggagggtctcagctcagcctctgttacctctgggctctgcgccagctttgctttgtttt

SEQ ID NO: 37334 - DNA, 181 bp, Zea mays
  Clone ID: MRT4577_134052C.1
aacgggccgggtataatagcttattttgtttgtagggcaaaagggccccaaattttcaagcttgcaactttaaggatgaaaatttccgaccgggccactaattggaaactttgattgtcagggcagtgttttcttattaaaacaaaaatttttttgctcttaaaacacaaatgtttttaaa

SEQ ID NO: 37335 - DNA, 249 bp, Zea mays
  Clone ID: MRT4577_134053C.1
aaaccatgaattcctcagggatcttgctgccattctcttgcttgtatgtaccgggagcggcattgttcataccaatggacattgttcaatataacaacaactctataacagaaaggcccgtggctttatgtttgtacgatagactatatccaataagtactctaacctctgtactgcttgcatatgatagcaattcatttgctgtattttcctggttcaatatcggtcacatcataatcttctattatt

SEQ ID NO: 37336 - DNA, 320 bp, Zea mays
  Clone ID: MRT4577_134054C.1
gcccgacgggctcttagcacgcctgattgggacggaaccaacggaaacacgctcttcagatgatcctgaagaccctcttgctaagaatctgaggagaactgcatagccgacaatcatgggcacaacggcttgtgatgcctggcgccttaacatcccccgggtgatctatggccccggatgacaccgcgctcggaccctcattctgggtcatgcagtgacccctctgtctcatatctttgaggggtcttcgcgattcactgcgtggccgtattccctgtggtaccgttcctgctggcgctttaagatgcctggcggacgtt

SEQ ID NO: 37337 - DNA, 208 bp, Zea mays
  Clone ID: MRT4577_134055C.1
ggccgacaacctgatcaagcccgtggctttgctgctgctgctcctgaacctgtgcatgtacgtcatcctggccatcatcggcggctgggctctgaacgtggccatcgaccgcggcttcatcatcggctcggagctgcggcttcccgcgcatttccacctatcttcctccccatcggcaacttcgccacggcttcttcgtcctcttctc

SEQ ID NO: 37338 - DNA, 436 bp, Zea mays
  Clone ID: MRT4577_134056C.1
ttggtcggaaccattgggctgatttatgtgcttggtaaagaacaatagagacaacgtaaacgacctcccaccccatggcggccgtcgccggttggcgtccgaatagatattgctatgtcaaaatgcctccgatacccgatacacatagttttgatcaagaggaactccgtagaatcggacggtaagtgaagccccggacactccaagcccgccctgctttagcccgaagagccctcagctaaatcaggggacacgtaccgcaggtagaacgtaggctatactccccccccccgggcgggcaggcaggaaagcgtcgtcccgtccatcgcgcggtccgcaaagttagaacgcaagacatacgggtggtagtccatgccaggacagaccgagttagctccattacctcccccgaaggaaacgtacccgtactcgacgc

SEQ ID NO: 37339 - DNA, 586 bp, Zea mays
  Clone ID: MRT4577_134057C.1
ttttttttttttttttttttttttttttttttttttttttttttttttttttttttttttttttttagggacaaccaaccggaattttttaaaagttctttgggaattcacagggttagaatgggtttcccggcccaaaacaggtgggcgacccccgaaacccaataaaaaaaaacccgtaacaaaaaggggaaggggttccccttattggggggagcccccaccgggctaaaggttactatcactacgggccccccgagggttggagcccgggggacttctactgaggatttgggggccgggagttggggggaaaaaccctaaagccccattccaacagctttttggggggggggtccttgggcccgaacaccttgaagaaaaaaagggaggcctttttttcccctaacgctgtctcaagggggggcggaagttcctccccgtttttccccttggggggccaacacttgcccaaccccttgggggggggggccccaaagcccggggggtcccagtttttgaagaagtttttgggcccccgctgggtttcccacccaatgggggcccccaccgtgtggaatgaggg

SEQ ID NO: 37340 - DNA, 1341 bp, Zea mays
  unsure (1)..(1341): unsure at all n locations
  Clone ID: MRT4577_134058C.1
ntcctggcgtacaggaggacgacccaacccaagcggcacacaagatccaagaggatgccgccgccgccgccgctcgtgctgctggcgaagccgctgttcccgaacttcgcggcggcgctggagggccggtaccgcctcgtcctggccggggacgccgacgcggccacggcggcggaggcccgggtcctgctcgtgccggggctcgtggccgtgaccgccgagctcgtcgaccggctcccggcgctggagctcgtggccgcgacctccgtcgggctggaccacgtggacctccgcgcctgccgccgccgcgggctcgccgtcaccaacgccggcgcggccttctccgtcgactccgccgactacgccgtcggcctcgtcgtcgccgtgctgcgcagggtcgccgccgccgaggcgcatctccggcgcggcgggtgggctaccgatggcgagtacccgctcaccaccaaggtgagcggcaagcgggtggggatcgtggggctcggcagcatcggctcgctggtggcgcggcgcctggccgccatggggtgccgcgtcgcctaccactcccgcgcgccgaagccgtcgtgctcgtgcccctacgccttcttccccacggcgcgcgccctggccttggccagcgacgtgctggtgctgtcgtgcgcgctcacggaggagacgcggcgcgtggtgggccgcgaggtgctggaggcgctgggacagggcggcgtgctggtcaacgtcggccgcggcggcctggtcgacgagccggagctggtgcggtgcctgcgggagggcgtcatcggcggcgcggggctggacgtgttcgaggacgagcccgacgtgcccgcggagctcctcgccatggacaacgtcgtgctgtcgccccacagggccgtgctcacgccggagtccatgcgcgggttgctggatgtcgtcgcgggaaacctcgacgccttcttcgccggcaggccgctgctcagccccgtgtcgctgtgaattctgaaccacatgtaggatagatacgtcaagtcgtcaagttccattccatccaagaagcatcaaccagacaaccagtgtgtgagactcaccacgaacaatacggaagaacactcagaattggtagggtggttcgggtttcttactttctgttccaagttcatcatccaaaagccaaatttcaaaatgacaacagttcgtcttttatacttgctactggaaaaccaaaacgaattggaatatattacagccagttggctccaccatatttgggattcgccctcgtaactatgctactcctcttcagcttcacagctccatgggcttcaacgaacgcgtaggcgt

SEQ ID NO: 37341 - DNA, 646 bp, Zea mays
  Clone ID: MRT4577_134059C.1
ctttcaagcctcttcgcatctgcatgatgcctctgccctctgcaatacctagagtcattctatactctgcggaagccggttgcttctacaataaacacattggctggtgctctgtacaaagtcttcagttcctcacctgacaaggctagggatgagatgcgccaagcttgttttgattacttgagccttggaggtgtctgttcaaatgggcccattgctctactctctggtcttaatcctcggccattgagtttggttgcacacttctttgctgttgctatcttcggtgttggacgactgatgctcccccttccttcacctaaacgaatgtggactggagcgagattgatttcgggtgcatgtggtatcatcttcccaatcatcaaagctgaaggtgtgaggcaaatgttcttccctgctaccgtccccgcgtattaccgtgcacctcctgaagcggagttctgatctatgaaggtgcagctaatctctcgcacgatgacatttttcctgtgttggtagttgttgaaaatgtgctgtgttggtagtccgaatggatcgaggaacgtgtatagtatctccgttgggtgctgatcctgcttttggaatgttctgaattgctgcatcggtgcccatgttgattcgtcct

SEQ ID NO: 37342 - DNA, 339 bp, Zea mays
  Clone ID: MRT4577_13405C.1
ccggaccaacccttccaacaatcgaatcgaatttcggagcccaccaacttctaaaccccttgcgggtcaatacaggggagattcaaggaacctcttaaggggcattaacaaggccttcttctaaatgccacaagacaaaaccctgtttagagaccctgttttactgcctcctgtggcgaaaaattatgcgaatgagaaagctttcttttatgactacaaaaaagaccacctcaaactcttccaactgtggtgtgctgatgcttaaatatacactatactggagtgatacaaactgatatatgtaagcttttgcatctcgagtcaatgtgaacaaacaca

SEQ ID NO: 37343 - DNA, 1811 bp, Zea mays
  Clone ID: MRT4577_134060C.1
tggggacaacacgtgcggcattgccgagaggggttgcgagagcgacgcttttggagaaggacgaagactacgacgagggggcgcgccgcgacggtgagggtggaggacgccggcgatgggagggggctgccgccgccgtcgccggcgacggggccctacgccggcggtaggtcgcgcgggccgcggcggcagggcgagaccatagccaagggccacaagaactacgagctcatgctgaacctgcagctcggcatcaggcacgcagtaggaaagcaaggtccaattacacttgatctcaagtcatcagcttttgaccccaaggagaaagtatggacaaggttccctccggaaggctcaaaatacacccctccacacagctcatgtgatttcaaatggaaggattactgcccgcaagtattccggacattgcgcaagttgttcaaggtcgatgccgcagactacatgctatctctttgtggagaccaggctctccgggagctgtcgtctcctggtaagagtggaagcttcttttacctcaccagcaatgaccagtacatgataaagacgatgaagaaatctgaagtgaagatatttctgaagatgcttcgagcttattataatcatgtcagatcattcgagagcactctagtcacaaagttttttggtcttcactgtgtcaaattagccggagctaaccagaagaaggtccgttttgtcataatggggaacctgttctgctccgacgcctctatccatacgcgattcgacctgaaaggttcatcccttggacgcacgactgataagccgcagacagagatcgatgagtacactactctcaaggacctcgatctcaacttcatatttcggctgcagaagcattggtaccaagagttccaaagacaggtcgacagggactgtgagttcctggagcaggaaaacatcatggactatagtcttctggttggtgtacattttagggacactagggataggctattgaccggaggttcgttcgatagcgattgcagcagaggatcatcgcctcaattgtcaagaggagacacggatccaaacaggttagccaagataaagcttgggtcgaacatgccgacgagagctgaacggacgataaggaagggcgactgcgaggtgcagatcatgggggagcctacgggggagttctacgacgtcatactgtattttgggatcatcgacatactccaggactacgacatcagcaagaagctggagcacgcgtacaagtcctttcagtacgacccgacgtccatctcggcggtcgatccgaagcagtactcgagacgcttcagggatttcgtgttcagagcgttccaggaagacaagttcgatttgtgactgaagaaggcacaaggaagccagcctaccgggtgccggccgctgacatgtacggataaccagtgttgaaatgcagagtcagacatgcatggcactgctggcatcgcattgcagcagagcttttggtgaccctacctgcttgctacttccacaccagactgcagcgcacggcagaagcttcagggcaggccgtcaggctgatgaagccctgagggggattcagctggcactcatgtagaagcgagggaggctccaattcgagatgtcggtgcatttcaatgtttttcatataaaaagctatgcctaagaaaaaagcatacatgcatatagaaaccaactgatattagcgtagacgctgacaacctacggagaaatttgtaatggcagttcagggatgtaaatcttttcttacgaggcaacaggtcacagttcttatt

SEQ ID NO: 37344 - DNA, 239 bp, Zea mays
  Clone ID: MRT4577_134061C.1
ccggccgggccggcatcccaatcagcactctcttgcaagagtgcaagcaccactgtcgctgcactctctgtgtctatctggtcctaccgtagtagaaaacagtctatcaccaccacatggatcccaaggtgtgcgctgcttccttgccctgcagcctctctgttgtgatgtcacacgcgcatgtgctgcagaaccctaactgttcctgtctccaagtcgtgcccaactgccgaacagtc

SEQ ID NO: 37345 - DNA, 313 bp, Zea mays
  Clone ID: MRT4577_134062C.1
tatcgacgatccatcttaactactaaaaacatacggccgagaagagaatgaatttcgtgtacaaacgaaacatccacgcgccgaatactcaatcctttaacacattaaataactagtataatctatacctataccaagtgcgaagcgccttctacctactaatgaagccccccgtagattatcggttggctgatggcacgcctagcacctgaatgttataccaccccggcgatcgccgacactaacctgcccgcgccccatcatccaataaacaaaaactgcccaggaagaacgtcccttctcacccaacgcc

SEQ ID NO: 37346 - DNA, 875 bp, Zea mays
  unsure (1)..(875): unsure at all n locations
  Clone ID: MRT4577_134063C.1
cctcgaggccggccggtgaacttctataaagttttgatcttcaaattttacaatcaaatgcatcacacaaaaatgagcataatatacttagcttattcatattccctaaattaatttaatcactttaaatatgagcactcatatgcttgagcaaataaaaagccatatataaagaacttaatctctttactcttattatctgggtattacaatggactcctagtacactacagccttgtcacttgtataaaataacttctctcggttcaactgctattagaagccctagatctgcaaatgatgacaaattggtaaaaggaagattgagacatggtggcacggttagatgaggcgtgctattgcagcaactttgtcatttttctggcttgcttattttagtatcgagttgcatattttaaggttgattttcacaaaaaaagctgcgtcctgaggcttccatatctgtgtctgtttggctgcttttgtcagccgctgttgctggctgcagctatacagtgattctacagtgatatgtgagggaggcaacagccagtggctgcaaaaatgcttgccgaccatgcccaagctcagctctgcaaaactattttgtttccaaaagaaattgtatggttggtgcatagtcaatgcttgcgtattagagcaagagtatagtgttgtttaatcctgcaaaactatttttatgttctacaattggattggagttatgatttgatttgtttattattgtgcacgaaatcactttgtatatttcttcacttctatgncatattttcatgttctcataattcacgtgaacacatttatttgttgtgttgcctaatagatagtgtgatcagagcctacactaaagttgc

SEQ ID NO: 37347 - DNA, 612 bp, Zea mays
  unsure (1)..(612): unsure at all n locations
  Clone ID: MRT4577_134064C.1
agcagtggtaacaacgcagagtactttttttttttttttttttttttttttttttggataggattttttctctctgcccttctccaaattctaaaatttccattaggtctttaaatccaaatcgggttactaatgtagtcctattaagctttattattattattttcaagtgcacacaataaactccaacatgatgcaatagatatatgtttattttaattattttattgtttggtagatatttgaaatttgaaacacactcatattgttcctttcgttttaggaaaatagcattttgaatgtgggataaggattaaaagttacttcaaaactaagtattcatgtaaagaaatgcttatggtgcatcatttaatgatatgcataatcatttagttgaatataaaacttttctattacttcttttctnnnntnnttcttggttttcnnnnttcnnttctcccctttcnncnctcgggtntnntttgngntttctgcntttnctnttttntttntttntntntttnttttnttgttnttntctttttttcttaaaaaanttttgggcccccgcgtnctctgcgttgttncggctgcttaagggcgaataaccag

SEQ ID NO: 37348 - DNA, 971 bp, Zea mays
  Clone ID: MRT4577_134065C.1
cctcgaggccggccgggaagcgcttcccgcgctccggagtctcctccgggcgggccgctcgctgctccgagaggcattcgtacgttacacaaatagccatcctcgttcccttgtcttgtccatcaccaccagccatcgcgccagccctcgtccagtcgccggcggcgtacgtgtatcgaccaacgacctgtagaacagattgaggacacatggacatggcggaggaggcggcggcaggagcaggaggctcatcgtcatcatcggggaagccggtgatggtggtgggcatcgacgacagcgaccacagctactacgcgctgaactggacgctgcagcacttcttcgtcgccgggcagccgcagcagtaccagctggtggtgctcaccgccaagcccccggcgtcctccgtcatcggcatcgccggcgtgggctccgccgagctgctgcccaaggtggagaccgacctcaagcgctccgtcgcccgggtcatggacaaggccaagaagctctgcaccgagaccgaggtgaccgacgtcggctacgaagccatcgagggggacgccaggagcgtcatctgcgacgcggtcgagcggcaccacgccgagatcctcgtcgtcggatgccatgcctacagcaagtggaagagggctgtcctggggagcgtgagcgactactgcacgcaccacgcgcactgcaccgtcatgatcgtcaagaggccaaagcacaagcactgagatttcggatcgatttcggatctttgtatctcttaattagctgcgcgtgccaaacttttccaattttggactagcaatattgtcgagtaactcatcatcccatatcatttaggtcacgaaactcttaaaatgattttttttggatcaaaaaaaaaaaaaaagcgggtcatgtaggtctcaaaccttcaaaaatactatcttgacttgtaaaagaaaaaaaaaaaaaaaaaagcggcc

SEQ ID NO: 37349 - DNA, 301 bp, Zea mays
  unsure (1)..(301): unsure at all n locations
  Clone ID: MRT4577_134066C.1
cggttncaccggcatcaggaatggcctcggtatcgaccgggtagnaaatgctttttgacnaacgtcttctagcatanggggcggntanttgcctttgcnagtctttgaggattcagcaatanganccngttcattcctgtggagaaggcgtnggctngctgaagaaaaccacncagnagccttccttnttgtgcttggttcaataccagcangttttatatctgctngcctttttatagcttatagatgnggccatttattatttgatgatgtaattgagannnctataggtcagaggcca

SEQ ID NO: 37350 - DNA, 257 bp, Zea mays
  Clone ID: MRT4577_134067C.1
accggctgttctggtcgacgacggcggagaaggcggcggaggcgctctgcgtcgtcgtcaacgtggtcgagacgctgtgagcaggcgttcagggagtgctccaaatggaaacccttcttcgatggcgacgcgtactggctcgtggacatcacgctcgggaacttcgtggtgtggatcatgatggtggacgatgcggccggcgtaaagcttctggacgacggcaagttcacggccttgacggcgtgggaggacgcttc

SEQ ID NO: 37351 - DNA, 230 bp, Zea mays
  Clone ID: MRT4577_134068C.1
gtgttttttttatgaattgatacagcataataacaccacgaattccagtataagggtcttaagctcaacaaaacatgcccggcctatcttgttgcacacgtcacctgagctcgtgcggcagtcggttatactcatactcttatggcacatgggaggacagaaacactacacccaagccctacgatgctctgttcatcatcacctacctgacctagtctgaaacagaggaa

SEQ ID NO: 37352 - DNA, 313 bp, Zea mays
  Clone ID: MRT4577_134069C.1
gcctctaaattatcggttactaagtctaataccctcaaattcgattaagcgacatcggcatatgctactgtagttgcctaatatgccctatgtacaattgctgccactaccttgacgcattcggtacgtacagacatgactgagggtacagtagatgctgaggcagttacaacagcggaaacatctgctactgtcattgcaacattctccaacactacttgaactacgacgggtactgcaggaactctacgctgaaggccacgacttcaacatattctactggatgccctattgtttacacctaatgcataat

SEQ ID NO: 37353 - DNA, 278 bp, Zea mays
  unsure (1)..(278): unsure at all n locations
  Clone ID: MRT4577_13406C.1
nntnnnttttttttttttttttttttttttttttgggtnccaccgccccccgaaccgggtggcattttggttttacataggggcctttacagagacctggagatggaaaaaaaactcccttattgacagaaaacatcccgaactctgcctggctttttacaaatccctttaagaaccctcctttttttcctccccctccaaatgggggggaaaaaaaaagagagataccctggcctttaaaatccaatcccccaaaccgggttttcacgggggggggg

SEQ ID NO: 37354 - DNA, 421 bp, Zea mays
  Clone ID: MRT4577_134070C.1
attcggctcgagctcatgtgcgacaacttttgtttaccgccggagaccataaggcttgatgactggatgttggagcgcatgcggtggactcttagggggaaggggggaccggcctagtgagacagctgcgtttttgcgatgagaggagggatgtcaccagtttgacgatctaatacagcctacttgacctgagccttgctaccaaaaaactagctgacgcgtgagattgatgcactgatcatgacaccaggaaatgatcgggccacaagcctgtgggcaccacatacatgagtcctgcctgctagactgaaggcaggcaatcagtattgggcactatgatccccgattagtaggaaaagcacaagttgtttggagtcacacaagtgtattgtgacctgatgtatactaaaggcactgtgga

SEQ ID NO: 37355 - DNA, 324 bp, Zea mays
  unsure (1)..(324): unsure at all n locations
  Clone ID: MRT4577_134071C.1
gccacgccacgcgtgcgattcactgacaaaagagtgagcgagcgagcaaaggcaacgcatcaatggggggggcaatactactctccggccaggggcgggctcttccctaatctctgcccctgtccctgcggctgctcctcctcctgtgctgctccggcacactgnggtggcgatggagcacgtgccagggaggagcgcacagggagtgcgggttctatggcaagctggaggccctagagcctcgccacaaggtgcatgctgaggccagctccttacaatacttcagccggatacacgaacccgaccgagagctcacctgcgccg

SEQ ID NO: 37356 - DNA, 546 bp, Zea mays
  Clone ID: MRT4577_134072C.1
accctgtgaatacacaggacaaaattatggcttaaatgcttaacaaaaagaaaagcactaagtaccatgccacaccaaggtacacgaaactcaatgtgagaggcatctactggaccgatcaaacattgaaatcgggcgaccggatggtatcccccatgacaagaaaagagagttatggatttggggcccgcgctgtataaaaagaatcggtgatcaccaacatacaaagaggggggcgttttttcaacagacgaccaccaaggagcttggcccatgctccctcagaccgaggcaaagatgcctccatgcaacatgtggaccgtcggacactatctcacttcacatggcgaaacccttgacaaaatgaaccacttaacctgatatgttgcattatgggagaaccccaatcttggaacttctggccagtttatgtaaatcactgtgcaacatgctgtgggtaaaacgcgtgcttgtatacaccctgctcgggcatatataaaaaaacatgacctcccattcaacccggataaatactgatttaagcag

SEQ ID NO: 37357 - DNA, 351 bp, Zea mays
  unsure (1)..(351): unsure at all n locations
  Clone ID: MRT4577_134073C.1
gctggaacgttggtactcttttgccaccattattggcactaggaagtttggttgggattgtggccccacaaattcctactttgttggaggtctggtttaatgtccggagcacccaattcctgcttggggttggggatgtaataatgccatattccaaccagcgacgttgggaaccattttgctgtggttcacagccgatattcactttttgattttaaaataagtggcatccttcttttggcgacctgttttgganaaaaaaaaaanatttataaaaccatccatattttttttttaataaatattattttcaatttttattattggggaaaaaaaaaggggggccctttt

SEQ ID NO: 37358 - DNA, 175 bp, Zea mays
  Clone ID: MRT4577_134074C.1
aagtggtacaataagttattcaacgagttgatccactagaaataccgcacgttcctaattctacgaattggcctacttgtgttgcaacagctaagtggaatacactgtatagtattgcattcacgtagcctcttcaaagctgtatggctcaagaacatcaacttggacgcatgtg

SEQ ID NO: 37359 - DNA, 213 bp, Zea mays
  Clone ID: MRT4577_134075C.1
attcggctcgagccgggacgaaattgtgatttgacgcacacggaccatgatataaggatggtttttaagaagacaagcatggaaccagaaagggaagaacaaacgaaggcgcgcctaaaaacgaacaaacggctgaactatacagagggacccgggaaattcggggggaagaacaggaagccaaacaaacacccacagggagaccaggagacg

SEQ ID NO: 37360 - DNA, 326 bp, Zea mays
  Clone ID: MRT4577_134076C.1
attcggctcgagctctagccggccctcgcgtgttttttttcattccagaggaaaacgggtctgtgtatgcgtggctcacaggccgggccacatcctggtacaggagcggacattctcaatgtctggtaacacgtctcatgcgtctgttcctgcttgacctgatcctttgtatcacattctacctgcacccacactgatgcaatggctgtgtgacatgcatgggctgaaacacatcttcctgtggtgcacccatcaacacaaatagatggcggaaaggatgcggtggaacatatacaagttggagcatatgaaagcgacatgaacat

SEQ ID NO: 37361 - DNA, 417 bp, Zea mays
  Clone ID: MRT4577_134077C.1
cacattatgccagggggggcataaaaaggggggcgggggaaacaaaggcggggggggaaaaaacaagaagccccgcgcgaagggaccacggcgggccgaaaaaggggggcggggaaaaaaaaaaaaccagggggggcccccgggaaagaagggaaacaaggggacaaatgggggggccaaaaacacccgaacaaaaaagggggagggcccccgggcccccatattgcgaaggacacaaggggagaggaagggggggacaaaagacccccggacaccagggggggcccgcggctcccaaattgggggcaccccaaaaaaaagaggcccccaccagggccccaacgcgaaaacacccacctccagaacaaagcagagaaatggggagcccacacggggaaaacatcccccgaagggacc

SEQ ID NO: 37362 - DNA, 372 bp, Zea mays
  Clone ID: MRT4577_134078C.1
gccacgcgttcgggtcgatcgaaaccatacgctcggtctgaggcgatcgccccggccgcggtagggggagctgcatcacctgactacaacatgcgaaccttgataagcctgatgtcaaagaaccagatcctggacgacggcatactgttcaccatgaacaccgaggagttcagcataagactaaaaaacgtccgctcatttgcaactgtacagtcgaagacagatggccaacacattcctgccaactacaagatatatcagtacatactctttccaggaaaggacataaatgatttgcatgtgaacttatctacaccatgtgaggctgatactatacacaatgatcctcatattattcatgcacattatcct

SEQ ID NO: 37363 - DNA, 790 bp, Zea mays
  unsure (1)..(790): unsure at all n locations
  Clone ID: MRT4577_134079C.1
ggcgcccacgtgccgccaaccacccctgcctctaccacgagcaccctgcaccgccaacgcggcagcatccaccgcgaagccctgggccacgcgacgagcctgccgccctacgccacacgaccggggcaggttgcgcaagacgctcatgctgctcttccagctcgacgactccaccggcagaggcgtcgcgcgtccgtccgaggggccccaatcggcggagttccagtccgtttccgaaggaggaggccgagggggcaagcggatctattttcccccctggcacgtctctctgtccaccgatctccgccgcctcactgctcgcatcgtcggcctcacccgccgcaggcagctcgcccagatcatggcggaggtggaagcagcgcggtgtcgtgtgcgtgggggcgggttgctcaacaccatcgtcatgaacgtggttctcgagccatgcgtgtgcggcggcgacgtcgatgtcgaccgagcgctctagctgttcgaggaaatgcgtgggcccatggggtgcggcgtcgacgatgtttcctacggcatcctgctgaaggtctgcagtttctgttaatgctcacatccttaacgcaagcacaaaagttcatttggtcagttgtctgttctaagtggttgtgagtaatggtggaattgtggagataactgaagaagaacaatgtgattccgacaacataatctatcctannaatgtatgataaggatgcatatccactaaatctaatggaaacagcattgatagaagggaacaatatggatacttaattctttt

SEQ ID NO: 37364 - DNA, 784 bp, Zea mays
  unsure (1)..(784): unsure at all n locations
  Clone ID: MRT4577_13407C.1
tttcaaaatctgtcctttttgtctcagggcattaaaatgggcgcctacaagtacgtggaggagctgtggaggaagaagcagagcgatgtgctccgcttcctcctgcgcgtgcgctgctgggagtaccgccagatgcccagcattgtgcgtctgacccgccccacgcgccctgacaaggctcgccgcatgggttacaaggccaagcagggctacgttgtctaccgcgtgcgcgttcgccgcggtggccgcaagcgccctgtgcacaagggtattgtgtacggtaagcccgctagccagggtatcacccagctgaagcctacccgcaaccaccgcaacgtggctgaggagcgcgttggccgcaagtgcggtggcctgcgtgtcctgaactcatactgggtgaaccaggactctgcctacaagtacttcgaggtcatcatggtggaccctgcccacgctgctatccgcaacgatgctcgcgtcaactggatctgcaaccctgtgcacaagcaccgtgagctgcgtggcctgacctccgcgggcaagaagtaccgcggcctcaggaccaagggccaccccgccaacaagctcaggccttccaagagggccaactggaagcgtcgcaaccagctgtcgctccgccgcttccgttanaccaacagctgatgctgctggttttaagctttttgcgtgtatgggtgccttgctccacctcttcctaccgcagcaggctgcttttgtgtttggactacatttgctgccctgcttattccctgggccctgtaac

SEQ ID NO: 37365 - DNA, 911 bp, Zea mays
  Clone ID: MRT4577_134080C.1
accggaaagcgaggcctttgcgctcgcgcaccgtagaaatcgttaccggcaccgccaccacgcccactcgagcagccgccgagcacccagcgagaacctcccgctcctcccagtggctctctgtcctctcgcgccccctcgcgtcctcactgccacttgaaataccggtgggcacacgaccgctccagtgttcaactgctccgggctgtgatttggtgcgactttggtgttgttggtggtggtgctacacgtcttggcctctgcttcctcggagggattggagccgttggaactcaggagcttgctgctggccatggtccaagggttaggggatggattgaggcgtggggggagaggagcgcagtagcttcctcttcttcttcttcttcggtgcgcgggtctgggctctcgggagcgagcatggcggcgggttgggattgcgacagggtcagctgatcctagcaattggacccgacagaccattttattctgtgatctcatcataattgaagcccccactgatgaaaagctgttaccttggttgctttcttgagtactggtcaccagatagtagcatgttctcttctgtgtgattaggcttgattgtggactgacactcctggtcacttatctcttgtgatcatccagagtatatcatctgtcagctgatcttttctctatggaatcgcttccctttatgaaagtatccttgttttagggcaaatctcccttggcaaacattgttcagggtgcatcactttgctggttatcctgagcatattctcctcgtcgaatgaactatcagcagcgaagagacttccaaatgatatccatcaggaaatttctcatttagtttgatggaaagttcataaggtttcgtaccatctgatttgctgggcaaatctcctttg

SEQ ID NO: 37366 - DNA, 289 bp, Zea mays
  Clone ID: MRT4577_134081C.1
accattaaattttttttaataatttccctttattttattacaggttttggaaataaaaaaattagggggctaaaaattgggggtgggttatggcccttaaaaaaacgagagccggccctttaaaacgtttttagggaaaatttttcattgcctggtgactggaccattaataggcccgttgcctggtttttttggaccaatttaccaaattgggcaggaaattcttcaacctaaaaaggttcccccaggggttagaatccccgggtttttttggaaattttgttaacaa

SEQ ID NO: 37367 - DNA, 364 bp, Zea mays
  Clone ID: MRT4577_134082C.1
ggccccccattttaatcgcttaattaaatcacgcttcaaactacataaccgggaagcagggacaaaatcgggggggaactaaccttgccaactaaacgccgccacaaaacaaataccgagggatcggggcctgtcaaattcaattttcgaggccaggcccctgcatgccccggttggccaccgactttttgcccccggaggaactcgtcggggaccaccttgagctgcttgccctttttggacttggcgatcttttggatcggttttgggggggggaccctttgcagtttggggcccgggcggagcacgttttcctgcttccgtttttaacgctcctggggggccttcccttcggacccgtggg

SEQ ID NO: 37368 - DNA, 606 bp, Zea mays
  Clone ID: MRT4577_134083C.1
ctgttacccacaccgcgggaagcctccatgcgatcccctgggcggcgcctacggctaccagcgccgtcgcggctcgtcgcggctgccctcctcctcgcagctctcaccgggggagccgtcggcgccgatgggtacgggcgggcgaggagggtgtacatgaagaacaaggtcctggagatgtgagtactcagctgccacgtgcttcatccctcccgtcttcgccgttcataatctttcttctgtcggatcttgttgtgtgcgcctgggtggtgtatccaacgttgtctagagatgttgtaaacacgaagcctagctcttataatttgacgagttctgaactgaagttgtaaaacgaatccttacaatgctaatctttttgatttgttgggtcaaatgccaacatttcgagctcactttctctggcctaggattggaccattggagtgatacagatacacctcgcaagtcgcaacaaaatttccatgccaacgtggttggcaaaatctgatagcactttgagcttagcttctagtaccactgttatttgacgttcttttgttctttctttgatggttagcttcttatgaaatgagttgactttaaagc

SEQ ID NO: 37369 - DNA, 256 bp, Zea mays
  Clone ID: MRT4577_134084C.1
gaaaaaaggaaaacgtgcacatttttttgccgttggttcaaaaagaaaaaatgtttctgagaacacggggtttgtcccatgaagattgtgatttttcccccgcacgccaaggagcaatcagaccccatccctgtttggggtgaaactcacccacttttttctatttgtgcgcaaactactcttgtgggggggggtgactattatctggggaaatcatattcgtggtgtacttttacgggaaaaccaaggttttgaa

SEQ ID NO: 37370 - DNA, 317 bp, Zea mays
  Clone ID: MRT4577_134085C.1
gagctcatcagtcggcggccgccctctttttttttttggtcggttacatggtgccagatattattactcgagcacgggagaatttcggtgtggttgggcgacgcaacatgtcatgcacatggcctggggttaacacagctaatgtggggaggaccatgaacttaccgacatgttcggagcgtaaaaaccgatcagaacaaaattaaccaatgcatggagcgaaaaggggaacaccgacgctttacagcatacgcaagcaccgacttacacacaactgcgattattcgggtagaggcgacttatgaaccgtggaggta

SEQ ID NO: 37371 - DNA, 208 bp, Zea mays
  unsure (1)..(208): unsure at all n locations
  Clone ID: MRT4577_134086C.1
ggcgtcgtacatcacggtggccgcgagcgcggagcccacgnacgtgccgttgacgatggcgaggccctccttggggttgagctggaagaaaccgccccaacgcgcaagacggaacagctgacccacaaaatgaagacccacgcggagaccataaaagcagcggccatcatggagcacataatgaagggaaggagctagaagaagcagg

SEQ ID NO: 37372 - DNA, 298 bp, Zea mays
  Clone ID: MRT4577_134087C.1
ggcacatgaaatcaacccaaaatataaatagaccaaccgaggtgtgtatcatatcatccggggcgctgctgcggcggcggccgcaggtccagaagcattgaggtatatctccatacaaggtcgttccaggaatgactttctgatagagagtgtcattccgcgccctatatagctaccactatagatgcttgtcgcagatgctgcactccgttaacttcggggacttcttgcagtacttcttcagcgtgtcattggcgttggacatcctgaggctgtcgaggtcgtggcctggccttgg

SEQ ID NO: 37373 - DNA, 431 bp, Zea mays
  Clone ID: MRT4577_134088C.1
gacactatagaagagctatgacgtcgcatgcacgcgtacgtaagctcggaattcggctcgagaaatatttggtcgtctttcactctctatttttattgctgcagtaatacatgtcaatttccttgtattattgttactgcacactaactactaaacaactcgagtcaactgtctaaatatcattctttttatatgctatagttttggttatatgttcctactcagtattgttgaaatttatttcatttattgttacccttaaacatggcaagacatacaatagccatcacaccccttgttttaaaggcgtcacctaggcgacgcctaggcgtccaggcgcctgaaagatccaaggcgtcaccgtcgcctaagtaagaataaacaagaaggcatagggcatatcggaaaggaaaagggccgcgctttttctg

SEQ ID NO: 37374 - DNA, 183 bp, Zea mays
  Clone ID: MRT4577_134089C.1
gcgggcatgtgaagtcatggttctgattggcataatcatgagtttctgtttcacacctcactacttcatgcggcagtatgtcctttcagctctcatcacatttgcgtttgctgaggtgcttgtacgagtgcatctgtcctttctctcacccgtaatgggggtcccgctttaccggggacctac

SEQ ID NO: 37375 - DNA, 583 bp, Zea mays
  Clone ID: MRT4577_13408C.1
ggggggccaagggccttttttaatttttaagggcctcccgatcccaaggttttttttttggcttcccttaaaaaaaattccccggccttttggaaggaaaattttccttggccccttttttgggggtttttcccggggaagaaatttccccaatttggaaaaaaaaaaaagggagaaaaagaaaaagggttttccaactggcccgggttcccccctccgggggccccccaaaaaaatttttgagggctaggtaaccggggggaaattttcccgataaaaatttttttttttgggaatttgggggaaaaggcttttcccccccaattggccccttgtttgggggggggattttggttcccggcccttattgaaaaaaggccgggggaaaatattgggttttcccgggaagggtaaatttttcagcccccctttttttttggcccacccgggttttaaagtttttgggggcattgggccaaaaccggccccccaaacaggtttgggcctccaaagggccccgtgggacccccatttggggcaaaccccaccataaaattggccccccccgggggggtttaattaa

SEQ ID NO: 37376 - DNA, 252 bp, Zea mays
  unsure (1)..(252): unsure at all n locations
  Clone ID: MRT4577_134090C.1
acgacgccgcccagggggacaaggagcngcaggagtttaccaaanccaacccggacgccggccaccgcgngancggggncgacaacancaagcagacggagggcgncagacgcagcgccaacaagcccccgggcagcgacaagaccgcgcccgccggccgccccccgccggcgagcaagagccccggcgggagcgaggagcaagccagagccacgcgccggcgcgggcagacggaaaagccacgggggcacc

SEQ ID NO: 37377 - DNA, 244 bp, Zea mays
  Clone ID: MRT4577_134091C.1
ggatctcgaagctacatcggtaacacgatcacacctgacgcggaagggggactggaaatcaggagggagaccgcagagctagaccgccggatatggatccgagatctgcgatctacagatccggcgcactccttctcctcgacgccatctctgcgttcgtcgacatctgcttatcggcaatcggagacaagtgctccgcctgctaggcgttgctgcggactacagatcggaatacgagtgagag

SEQ ID NO: 37378 - DNA, 531 bp, Zea mays
  Clone ID: MRT4577_134092C.1
aaacaaaagcttctggttaatcacaggattggtcgggtgggactacaaaaaaagctggaatcccctccttacagatggggaaaattaaaaccccccaaattttggggttacagcataaataacctacttgggatcggaattaaggaaaagttttttcccccctaaacaaaggggcacaaaatgggaacctcctccaggttacaggggaaataaggaacaaaatttggtttttggaacgggatgtttatgttttgagcttaagggctgaatttgacgggagcgcttttccccggggggggaaaatcatgaaatccaggttagccgggaacgaaacaatccttttttcctaaaaaggggggagccctgaaaaaaatttggggggaacagaaagacctgcccacatgcccaaagccaaccctaggggcaactcctttataacattcatgggggggcgggaaaactcctcctccgggattttgaaccccccccggttctggatgggggcctaagcggcgtgggcaaagatggccc

SEQ ID NO: 37379 - DNA, 257 bp, Zea mays
  Clone ID: MRT4577_134093C.1
gcggccgtttaaaaggttccaacctgacaaacccgtgcctgcacccaaattaatcttttttgggggcccctaaatttaattcaggggccgtgatttcaaaacggcccgaccggaaaaaccttggcatcacccaactaaattgccttgcaaaaaataccctttttgcaaggtggcataatacccaaaaggcccggaccgtacgcccttccaaacagttgcacttcccaaatggctaatgggccccccctttgatgggg

SEQ ID NO: 37380 - DNA, 279 bp, Zea mays
  Clone ID: MRT4577_134094C.1
ggaatacaagacgtacactgtacactctaccaaaaccatgtgtggtgacagcctccattcttttaaataaaccatgcatttacaaagtacctcaccagaaaaagatccgacttatagaattggctggcaaatcattcaagaaatattccatgcccccaccttggatgacagtaaaaacaacttatttcaccaagttgtgttggttctataactttttgttggggtgcatagtggtaaacctctttcccaggaaattgagggggcaaagtctgttgaaaa

SEQ ID NO: 37381 - DNA, 882 bp, Zea mays
  Clone ID: MRT4577_134095C.1
ttgggtacctcgaggccggccgggagcacactcgtctttttcctctacggccgccaccatcgcctgcggccacctgccgctccgctcggaagtttttggtgaagattttttgaagctgagaagatggtgcttaagacggaactctgccgcttcagtggccagaagatctatcctgggaaaggcatccggtttattcgtgctgattctcaggttttcctttttgccaactctaaatgcaagcgctacttccacaaccgcctgaagcctgcaaagcttacctggacagcaatgtacaggaagcagcacaagaaggacatccatgctgaagctgtcaagaagaggcgccgcgccaccaagaagccgtactcgaggtccattgtgggtgcttccttggaagtgatccagaagaagagagctgagaagcctgaggtccgtgatgctgctagagaagctgctcttcgtgagatcaaggagcgcatcaagaagaccaaggacgagaagaaggcgaagaaggctgaggtgtccaagtcccagaaggcgcagacgaagggcgctgtccagaaaggttccaagggccccaagttgggcggcggcggtggcaaacgctgaaaaggaacgaagtgtcatttcgagacctcaccaaagtcacctttgtagtacctgggttaattttgcattttcgttcagagttacttgtgactcttaactaccatgtcaagagaatggattcgttatttttatatattgggagaaatggtcgccgttccttcatatgctttcctcatcttggatgatggcctgctttgtttctgaactgaataaggtcttgttcggttatttccattatatatggattggaccccattgaaaaaaatttagaag

SEQ ID NO: 37382 - DNA, 866 bp, Zea mays
  Clone ID: MRT4577_134096C.1
aaattatcaaaaaaaaaaaaaaaaaaaaaaaaaaaaaaaaaaaaaaaaaaaaaaaaaaaaaaaaaaaacactcttcctccttcctccaccgccgccaacgtcgcctgggggccgtctgcagctccgcgcctctgctcgaaagttggggaaggtttcttgaagctgaaaagatggggctgaaaacaaaactctgccgtttcagcggccaaaaaatttatccggggaaaggcatccgatttatccgggctgattctcaggttttcctttttgccaactcaaaatgcaagcgctacttccacaaccgcctgaagcctgcaaagtttacctggacagcaatgtacaggaagcagcacaagacggatatccatgctgaggctgtcaaaaaaaggcgccgcgccaccaaaaagccatactcgaggcccattgggggggcttccctagaggggatccaaaaaaagagggctgaaaagcccgaggcccgcgatgctgctaaagaagctgctcttcgcgagatcaaggagcgcatcaagaagaccaaggatgagaagaaggcgaaaaaggctgaggtgaccaagtcccagaaggcacagacaaagggtgcggtccagaagggttccaagggccccaagttgggcttgtgttgtgggaagcgctgaaagaacttagtgtcgtttctcgacattgcagtcgttccttagccaaagccactttcgtagaacctgtgttgaatttgcaagacttattcaagcgttgcttgtgcgtgctaaataccatggcaagagaacggatttatatttatgcctgaaaaaaatgaccgttcatattcttaactcatcttggataagggcttgtttcgtttctcccaa

SEQ ID NO: 37383 - DNA, 404 bp, Zea mays
  Clone ID: MRT4577_134097C.1
gcgccgccgacgaggtcagccacctcatggtgcgcgagagcatgcgctacgccatctacgcgtagccgtatatatatattattatgtacctagcagagtaggattattctacgtctctataatctatatatacgtatccatgcatgcatatacgtaccacttgggcatgtaggaatatatatgcatgtatgtacgcagcaggttgagacggtgcatagtgtatagagtactgtatcccgtattcttgtaggcggaggtctctactagctagtctactatagacggagaataaaaaaacaccaaaaattccatgtcaaattggcactgtattgctcctgcgcgtgcccttgtaattcttggtcttctttgccggtttgtcattcggatggaatttggattatttc

SEQ ID NO: 37384 - DNA, 793 bp, Zea mays
  Clone ID: MRT4577_134098C.1
acgcggggagccaccagcacacctcgtctttttcctctacggccgccaccatcgcctcgcggccgcctgccgctccgctcgagagtttttagtgaagattttttgaagccgagaagatggtgctgaagacggaactctgccgcttcagtggccagaagatctatcctgggaaaggcatccggtctattcgtgctgattctcaggttttcctttttgccaactcgaaatgcaagcgctacttccacaaccgcctgaagcctgcaaagcttacctggacagcaatgtacaggaagcagcacaagaaggacatccatgctgaagctgtcaagaagaggcgccgcgccaccaagaagccatactcgaggtccattgtgggtgcttccttggaagtgatccagaagaagagagctgagaagcctgaagtccgtgatgctgctagagaagctgctcttcgtgagatcaaggagcgcattaagaagaccaaggatgagaagaaggcgaagaaggctgaggtgtccaagtcccagaaggcgcagacgaagggcgctgtccagaagggttccaagggccccaagttgggcggcggcggtggcaaacgctgaaaaggaacgaagtgtcattctgagacctcaccaaagccacctttgtagtacctgggttaattttgcattttcgttcagagttacctgtgactcttaactaccatgtcaagagaatggattcgttatttttatatattgggagaaatgatcgccgttccttcaaaaaaaaaaaaaaaagggcgccctccgat

SEQ ID NO: 37385 - DNA, 358 bp, Zea mays
  Clone ID: MRT4577_134099C.1
ccgttaatcatccaagaagggcaaaagaggggggaggaggaaaaagcggggggagcgtgatagagcctggaagataacaataatatcaatcacaatcaaacaggggggcagcaaaaccaagagaggggaggattcgaacctggacctgagagcacacttcagacattcaagaagtatgcagatgatatccgggaacaataaactaagaaagaagagtccgaggactcaccaccagcaggagaagacaaagaaggcgaggataggcggatagccaaaaagcccactgaagagacaaagggagcatatggggcggaaaaggagacaggaaccaaaagaaagcgggctacaaaagaacagt

SEQ ID NO: 37386 - DNA, 251 bp, Zea mays
  Clone ID: MRT4577_13409C.1
gccacgcgtccgcgctgcacggactacatcatttgagatgaaatacggcgggagtacctacatttcctctgctatggaacattgagctaaatgcaatattgcatgcaacaggagcgagttgcattgcgatgggtgccgagaacaggcttatgaggcctggcggatcttgcagatggacatggtagaggtatacacagagagacttgcgagatgaaggaaacctaaagaaatggacagccgttcagttgtac

SEQ ID NO: 37387 - DNA, 335 bp, Zea mays
  Clone ID: MRT4577_1340C.1
gcgtctagttctagatcgcgagcggacgccctcagggtttttttttaaggtgtttgctgatgagaacctcttagacaagggtgaggaacttgcattgagagaaggaagaggagggggcccagttcggaagcccatctttggatgcccttgcaaagctacatgctgtctctttatatgtgtagacagctggcattttattgcgcaacctgtgtaagacgaacaacttctatgccaggacggggcagacgtgacactgcttgcttgctactccgccctaggaaacaggcagaactggtagttagtgtgaaacatgacgcgacagatatgatacattg

SEQ ID NO: 37388 - DNA, 787 bp, Zea mays
  Clone ID: MRT4577_134100C.1
actctctgctccccccactccctcccgcgccgccgccggcgttgtcaccgccgcatcgccgctgccgacggctgcgctccgaagaattctgtgaggatttaagctgagaagatggtgctgaagacagagctttgccgttttagtggccagaagatatatccagggaagggcatgcgctttattcgtgctgattcacaggtcttcctttttgcaaactcaaaatgcaagcgctacttccacaaccgcctgaagcctgcaaagcttacctggacagccatgtacaggaagcagcacaagaaggatatccatgctgaagctgtcaagaagaggcgccgcgctaccaagaagccatactcgaggtcaattgttggtgcttccttggaagtgatccagaagaagagagctgagaagcctgaagtccgtgatgctgctagagaagctgctcttcgtgagatcaaggagcgcatcaagaagaccaaggatgagaagaaggcgaagaaggctgaggtgtccaagtcccagaaggcgcagacgaagggtgctgttcagaagggttccaaaggccccaagttgggtggcggcggtggcaaacgctgaaaaggaacgaagtgtcattccgagacctcatcaaagccacctttgtagtaccttggttaattttgtattttctttcagagttacttgtgactcttaattttgcatctttatatattgggagaaatgatcgccgttcgttcatatgatttcctcatctttgtttcctaaaaaaaaaaaaaaaaaagcggcc

SEQ ID NO: 37389 - DNA, 3565 bp, Zea mays
  unsure (1)..(3565): unsure at all n locations
  Clone ID: MRT4577_134101C.1
ggtgatagtacacataattgtttgctgaagatttatggcatcaaaactttggtgaagagctatataccttgcaaggatgctcatgcacagccaggaatagagaagttaattgatattctgaagaatattcttacctatggtgatatatctccaaatatggtctcaagtgctgctgataaggcccatttgaggcttgcagcagcaaaagctgttctccgcttatcaaaacaatgggaccataaagtgcctgttgatgtattttatttgactttgaggatttcacaggacgattttcctcaggtgaggaaattatttctttgtaaagtactgcaatatatcaaggaaagggccttggatgcaaaatatgcctgcgccttcatgtttggtgttaacgattatcatgccccgccgttagaagagttcaagtacaatctgactgaagtggttcagatatgccaacaagttaagatgcgccaactttcagtccaagcagatatggatttgttgacggcttacccagaatacataatttcctttttggttcatgccctcgctcatgatccttcatccccggaaattgaagaacatgaaaacgtcaatgcatttggtccaatttactggcgactatatctgattctttcaatcctcctgggggaagaaggtttgcaacatagtgtcccaggcatgaaaaaggacagcttcactacaataatatctatattcaaaagtataaaatcttcacaggatgtggttgatggaagtaagaccaagactgtgtgtgctatatgtgatcttggtactcttattgcanagaggttataccatctaaggatcccggccgagagtccgctttaaagttcagagttcaatctcacagcaccaagcaaaaaggaagcagatcaagggcagccgagcgagcagaggttgtcaattacgtgtcttaatgagtctctggaagcagccgtcgaaactcgccatgcttgtagtactgctgctgctgctatgtcatgcagtggacaaagtccattgctcgacgcaccataacaacagccaagattttcattccctgcttgagttccacaagggcatcaccagtgatccgaacggagccttgagcaattggaaccccagcatccacttctgccattggcatggtgtgaactgcagttccactcgaccatatcgagtcacggagctcaatctcaccggccaaaacttggctggccaaatcagctcctctcttggaaacctgaccttccttcatacccttgatcttagctacaatagcttcagtggccccctacctcttcttaacaagctccgaaacctggacatactctttctgggaagcaaccatttgggggatgttattcccgattggcttacaaactcttccaacttagttgatctagatctctctgaaaacaatctcaccggccatattccttcaaacatagcctttcttaaaaagctagaaggtatagacctttatggtaataatctcagtggggtcatccctccaaccttaagaaacctctccacactattgttagttgatctttcaaacaatcaactaaatggaagcattcctaatgaagtttggcaaataccgaacatacaaatggtaaatctagcaataaataacctatcaggtggaatcccagatactttcactaacttatcttctcttatgatattaggccttgaccacaatatgctgggcggcacattgccatcaaacattggtgatgtgctccctcatctgcaaggactatacttaggaagcaacttattttttggtacaattccaacttccctaggcaatgcttcaaatctagaagtcgtagacctaccaaacaaccttttcagtggcacaatcccaagttcttttggaaacctttcaaagttgcagattctaaaccttgaggtaaacatgcttgaagcaagacatagtgagggctggcaattctttgatgccctagcaaaatgtagatatctcgttatactttcagtgtctcataatcatctacacggacctataccaaattcgattgctaatctgtccactagtcttcaacaactattcatgggttggaataacctttcaggaatagttcccccaactattggaaaacttagtggcttaactaaattatcactagaaaacaacaacctcataggtaccattaaggaatgggtcagaaagatgacaaatctacaagttttaacactacaatcaaacaacttcatagggaaaattccaccttgaattggcaatcttacacagttggcacgtttctctgtagctagtaacaatttcttcggttctatatatgggtgacaatgggctctaacttttacaatataagatttaaggattggatcggattaggatcgggtcctattactattcatttttgaactaaaatttatttagggccctaccattttgtgaagaagcatttggatcgtgatccattaccacccctagttctataccatctaacttctgtgatcctaaattaatgacaaagttagaccttagccataacaatttctaagggagcatacctgttccctaaatcttacttagaactcatctcgctaaatctttcatcaaacaaatttagtggcgaaattcctaaaactttatgaagacttgaacaactaaaggacattcaaatggaccaaaacattcttactggaaacattccgtccacattcagtagtctatatagcttggacttgcttaatctttcccataacaatttatctggccccctgccaaattttctaagtggtctaaatcttagtaaactagacctatcctacaataatttccaaggagaaataccaagaactggtgtattcgataatcctacagttgtttcgctagatggcaatccgggattgtgtggaggagccatggatttgcatatgcctccttgccatgatgcttcaagaagagtagggagagcaaacttattgatcaaaatattgatcccaatatttgggttcatgtcactcgtattgctggtgtagttttactcctagaaaagaggacatcaagaagagcatatagatcagagcaatcttattatgagcattttgagaaagttacctataacgacttagctcaagcaacacatgacttcttagaatccaacctgattgggagaggaagttatggttcggtgtatcaagggaagctgaaggaaagcagaatggaagtggcagtaaatttttttgacctagagatcagaggagcaggaagaagcttcttgtcggagtgtgaagcattgagaagcattcaacactggaatcttcttcccatcatagtttcttgttcaatagtagataatgtacgaaatgttttcatagatttaatttatgagtacatgcctaatgggagcctggacacatggctacatcacaaaggcgacgaggaggctacaaaatgtcatggcttgactcaaagtataagcatagctgttaatatagctgatgcattggattatttgcacgacaacaaaaaaaaaaaaaaaaaagcggttgttgcgacttg

SEQ ID NO: 37390 - DNA, 2857 bp, Zea mays
  unsure (1)..(2857): unsure at all n locations
  Clone ID: MRT4577_134102C.1
ccggccggggtgtcttcctttcgcgctggtcgtgggctacccacacccacggcccgccatctcgtttgggcctccaactccccaccccacccctgcctcctcctatccaccatcctctcccacttcctcgtctcgtcttcgcaatcctcagaaagagagagggagagagatggcggcgagcgcgctgctgacggggtcgccgtggctgcgcatgcgcctcctcccggacgcgcctgcgcgccccttccgccgcctctacctccgccgggcgctctccgcccgcgcctccgccgccaccggcggcgccgagggcaactccggccccgtccgcgtccgcttcgcgccgtcgcccaccggcaacctccacgtcggcggcgcccgcaccgcgctcttcaactacctcttcgcgcgctccaagggaggacgcttcgtgctccgcgtcgaggataccgacctcgagcgctctaccaggaagtccgaggaggccgtcctcgccgacctcgcttggctcggcctcgaatgggacgaaggtcctgacgtcggtggggagtttggtccttatcgccagtcagaacggaattcactatacaagaagtatgccgagaagcttttggactctggtgcggtttaccgttgcttttgctccaatgaggaacttgagcaaatgaaggaagtagcaaagcagagacagcttcctcctgtgtatatggggaagtgggcaagtgcttctgatgcagaggtacatcaggagttagagaaaggtacgccgtacacttaccgcttccacgtgccaaaggaagggtcattgaaaattaatgacttaattcgtggtgaggtcagctggaatttagacactcttggtgatttcgtgattatgagaagcaatggacagcctgtgtataacttctgtgtgacagttgatgacgctaccatgcaaatatctcatgttatcagagctgaagagcatttaccaaatacattgcggcaagctttaatttataaagctcttggatttgcaatgccttcatttgctcatgtttcgcttattctggctcctgacagaagtaaactgtctaaacggcatggagctacttctgtggggcagtataaagagatgggctatctacctcaggcaatggtcaattatttagcactactgggctggggtgatggtactgaaaatgagttcttcactatagatgacctagtccataaattcactataaatcgtgtcaataaaagtggagcggtctttgatgcaacaaaattgaaatggatgaatggacaacatttaagatcatttccccatgatgaactcatcaaggcttttgaagatcggtggaaggacacaggcattctccaggaatctgaaagtagttttgctaaggaagctgccgagcttttgaaggatggtattgatttgataacagatgctgatgcagctcttacaaatttgttgtcatatccccttcatactactttaagcagtgaggaagctaaacctgtggtgcaagacaagatttctgaggttgcttcgagtcttatttctgcgtatgatagcggtgaactcactcaagcactagctgagggccgtgatggttggcagaagtgggttaaaggttttggcaagtctatcaaaagaaagggcaaagggctcttcatgccgctccgcgtactgttgaccgggaagcttcatggacctgacataggtggcgccattgccctaatacacaaagccggcgtctgtggtgcggtgactccgcagtccaactttgttactctagatgagcggttcagggtcctgaaggagattgactgggactcgttggcgaaggagcaagaaactcctgccgaatctgccgttcccgccacttaataggctttgacagtagcagcttagcaggcncagggatgatgttgcgcttgaagagttctgtccattttggcgtgtttttgtcaccgttcggttccatcgagtagaagttaataaagcggattttgagcataggtcgatgctgtaatgggggtattgaattactagacgaggatgtctgtaatctaggcgcctgcagtcttttcttttccaggtgttcataaacaatatcaaaatcgtttggcgcggccgcgcggaagttggtgaaggtttcttgaagctgagaagatggtgctgaagacagaactctgccgcttcagcggccagaagatttatcctgggaaaggcatccgatttatccgtgctgattctcaggttttcctttttgccaactcaaaatgcaagcgctacttccacaaccgcctgaagcctgcaaagcttacctggacagcaatgtacaggaagcagcacaagaaggatatccatgctgaggctgtcaagaagaggcgccgcgccaccaagaagccatactcgaggtccattgtgggtgcttccctagaggtgatccagaagaagagggctgagaagcccgaggtccgcgatgctgctagagaagctgctcttcgcgagatcaaggagcgcatcaagaagaccaaggatgagaagaaggcgaagaaggcggaggtgaccaagtcccagaaggcgcagacgaagggcgcggtccagaagggttccaagggccccaagttgggtggcggcggtggcaagcgctgaaagaaccgaagtgtcgttccttgaccttgcaattgctcctccgtggcccaccttgttgcaccaccgccacttttgtagtacctcggttaattttgcattttctttcagagttgcttgtgggttttgagttccatctcaagagagttgagtttatttatctttatattgggtgaaatgttcatatgcaaaaaaaaaaaaaaaaaagcggcc

SEQ ID NO: 37391 - DNA, 1068 bp, Zea mays
  Clone ID: MRT4577_134103C.1
cattgggtacctcgaggccggccgggactctcctccttcctccaccgccgccaacgtcgcctggcggccgtctgcagctccgcgcctctgctcggaagttgttggtgaaggtttcttgaagctgagaagatggtgctgaagacagaactctgccgcttcagcggccagaagatttatcctgggaaaggcatccgatttatccgtgctgattctcaggttttcctttttgccaactcaaaatgcaagcgctacttccacaaccgcctgaagcctgcaaagcttacctggacagcaatgtacaggaagcagcacaagaaggatatccatgctgaggctgtcaagaagaggcgccgcgccaccaagaagccatactcgaggtccattgtgggtgcttccctagaggtgatccagaagaagagggctgagaagcccgaggtccgcgatgctgctagagaagctgctcttcgcgagatcaaggagcgcatcaagaagaccaaggatgagaagaaggcgaaaaaggctgaggtgaccaagtcccagaaggcacagacgaagggagcggtccagaagggttccaagggccccaagttgggtggtggcggtggcaagcgctgaaagaacctaagtgtcgttccttgaccttgcaattgctcctccatagcccaccttgttgcaccaacgccacttttgtagtacctcggttaattttgcattttctttcagagttgtttgtgggttttgagttccatctcaagagagttgagtttatttatctttatattgggtgaaatgttcatatgctttcctcagcttggatgatggtttgctttgtttctcagctgtgtttggttagacaaggctgatatgcccgcgccatcctggctcggtgctggtgcctcagtgaaaccgaatgatctgctataggatgtttggttgggggctctggacctggctcgtctccatgccggcagaaacggtctattctgccgtggggtatgctcgtctccatgcccggtatagacactgctgcatctagatcgaagatggtccctccgcttaagctatgat

SEQ ID NO: 37392 - DNA, 1727 bp, Zea mays
  Clone ID: MRT4577_134104C.1
cctcgaggccggccgggccgggcattcggcttttgaagatcggtggaaggacacaggcattctccaggaatctgaaagtagttttgctaaggaagctgccgagcttttgaaggatggtattgatttgataacagatgctgatgcagctcttacaaatttgttgtcatatccccttcatactacattaagcagtgaggaagctaaacctgtggtgcaagacaagatttctgaggttgcttcgagtcttatttctgcgtatgatagcggtgaactcactcaagcactagctgagggccgtgatggttggcagaagtgggttaaaggttttggcaagtctatcaaaagaaagggcaaagggctcttcatgccgctccgcgtactgttgaccgggaagcttcatggacctgacataggtggcgctattgccctaatacacaaagccggcgtctgtggtgcggtgactccgcagtccaactttgttactctagatgagcggttcagggtcctgaaggagattgactgggactcgttggcgaaggagcaagaaactcctgccgaatctgccgttcccgccacttaataggctgtgacagtagcagcctagcagtttttcgtatctgtcagggatgatgttgcgcttgaagagttctgtccattttgccgtgttttttttttgtcaccgttcggttccatcgagtagaagttgagtagttaataaagcggattttgagcatagatcgatgctgtaatgggggtattgaattactagacgaggatgtctgtaatctaggcgcctgcagtcttttcttttcctgaaaaaaaaaaaaaaaaaaaaaaaaagtcgacgcggccgcacggaagttggtgaaggtttcttgaggctgagaacatggtgctgaagacggaactttgccgcttcagcggccagaagatttatcctgggaaaggcattagatttatccgtgctgattctcaggtcttcctttttgccaactcgaaatgcaagcgctacttccacaaccgcctgaagcctgcaaagcttacctggacagcaatgtacaggaagcagcacaagaaggatatccatgctgaagcggtaaagaagaggcgccgcgccaccaagaagccatactccaggtcaattgtgggtgcttccttggaagtaatccagaagaagagagctgagaagccagaggtccgcgatgctgctagagaagctgctcttcgtgagatcaaggagcgcatcaagaagaccaaggatgagaagaaagcgaagaaggcggaggtgagcaagtcccagaagacgcagacaaagggtgcggtccagaagggttccaagggccccaagttgggcggcggtggtgggaagcgctgaaagaacttaaggcctgtttggaggctgacgtcgagcgccacaccccgcctaagatgcggcggccaatttggccgccacaactgcggcgcgtggcgtgtggcgcggcgtggtgtttgcggcagcgatccaaacacgcccttagtgtcgtttctcgacattgcagtcgttccttagccaaagccactttcgtagaacctgtgttgaatttgcaagacttattcaagcgttgcttgtgcgtgctaaataccatggcaagagaacggatttatatttatgcctgaaaaaaatgaccgttcatattcttaataactcatcttggataaaaaaaaaaaaaaaaaaaaagggcggcccc

SEQ ID NO: 37393 - DNA, 870 bp, Zea mays
  Clone ID: MRT4577_134105C.1
ccaaaaaaaaaaaaaaaaaaaaaaaaggaaaccagcacactcgtctttttcctctacggccgccaccatcgcctcgcgaccgcctgccgctccgctcgaaagtttttagtgaagattttttgaagccgagaagatggtgctgaagacggaactctgccgcttcagtggccagaagatctatcctgggaaaggcatccggtttattcgtgctgattctcaggttttcctttttgccaactcgaaatgcaagcgctacttccacaaccgcctgaagcctgcaaagcttacctggacagcaatgtacaggaagcagcacaagaaggacatccatgctgaagctgtcaagaagaggcgccgcgccaccaagaagccatactcgaggtccattgtgggtgcttccttggaagtgatccagaagaagagagctgagaagcctgaagtccgagatgctgctagagaagctgctcttcgtgagatcaaggagcgcatcaagaagaccaaggatgagaagaaggcgaagaaggctgaggtgtccaagtcccagaaggcgcagacgaagggtgctgttcagaagggttccaaaggccccaagttgggtggcggcggtggcaaacgctgaaaaggaactaagtgtcattccgagacctcatcaaagccacctttgtagtaccttggttaattttgtattttctttcagagttacttgtgactcttaattttgcatctttatatattgggagaaatgatcgccgttcgttcaaaaaaaaaaaaaaaaaaaaaaaaaaaaaaaaaaaaaaaaaaaaaaaaaaaaaaaaaaaaaaaaaaaaaaaaaaaaaaaaaaaaaaaaaaaagggggcgggccgttttaaa

SEQ ID NO: 37394 - DNA, 284 bp, Zea mays
  Clone ID: MRT4577_134106C.1
ggggaacctaccaaaaatgatgttttaacacaccccgttggtaagggcaatacagcgttttaaccgcatatgggggaaggaaatgcttgttcaatgcttttggtttgtgctctacacctttacaaccaaatacttagtgatcgggtgggaacttcctaattcttaaacacacgtgaatgaccacttaaaatacaaagacttgttttcttgtggaaaaagaacccctttttaaatttgatcttttttgtttttgcacaacaaccgccatatcttctggattttat

SEQ ID NO: 37395 - DNA, 486 bp, Zea mays
  Clone ID: MRT4577_134107C.1
ggagaaggagagttttcattgttgctcgcttcttgttctccttggctcccaaaaaaaaaaaaaaaaaaaaaaaaaaaaaaaagggcgcccgcccttttttttttttttttttggcattgttctttccccggccccccaaccatttgtgaaaaaaaaaacttccaaaatttccccaaaacattacctcccataaaaaacaaaatctatctaactccttcaacttaaacaaaaaaaaacccctttaacttccagcattccccttaaaattaacttgccaaagggagtaaccaaaaggggggggaaaaacccccccaccttggcaaaaagccaatttcatggcccaaaaaaagttttttccatgctctccacccaaatcaatgacccccccatatttttttttattcggggttagtacaaacaatatctcgggacgagccaaatatccaagcagcctcggaaatcctgaaacccaaaacagatttttaa

SEQ ID NO: 37396 - DNA, 281 bp, Zea mays
  Clone ID: MRT4577_134108C.1
gagcggacggattcgattcaacggggttccggaccgcgctgcgctatggagcaggtcaatgagctgaaggagaaaggcaacaaggccctgatcgtgggtaacatcgatgatgccttacagtgctactccgaagctattaagctggatccccacaaccagtgctctacagcaaccgttctgctgcctatgccaagaaaggagactaccagaaggcttatgaggatggctgcaagactgtcgacctaaagcctgactgggcgcaagggctattcacgataagc

SEQ ID NO: 37397 - DNA, 310 bp, Zea mays
  Clone ID: MRT4577_134109C.1
gcataaagagccgtaaaggaccttcctaagggctttcaatggagcgggggggcttgaaacagacagaagcagtgttagcccaacactctaacaggggcacaacgatcatagggtcttcacaaaaccatacggcgtcagactcaacagtgagaggttgtatgctagtccgggcaatggatttactggtcagatgctcatcaatgcacctgccattggcctgtgattttgctcccatgtatgcaacaaccaacgtaattcacacattatgaaacctgtagagggccacgcctattagcagccctccagatcc

SEQ ID NO: 37398 - DNA, 457 bp, Zea mays
  Clone ID: MRT4577_13410C.1
gtgtgcctaacaacctattttaacagacaaattcctccctttacactaatcttctaacatttttttacttctgatgcgagcatgtacttatattggtatttctatatagtagaagaaatttgctcttctacagcagcagcagcagcagcaaagtcatagccagcagcagcagcttcagcaacctgcgctctctggacagcaatctcaaagttcaaaccagcttctccatcagcatggaaaaccaggagttgggagcttgcctattgatggaaacttgccaaactcttttggatttcctgaacaaggatcaaagaagagaaagaaacctgtctcatcctctggtagagctaatagttcaggaacagcgaacactgctgggccatctcctagctctgcaccctcaacaccatctactcacacgccaggagatgcaatgtccattccacagctgcagtat

SEQ ID NO: 37399 - DNA, 537 bp, Zea mays
  Clone ID: MRT4577_134110C.1
gccgggatgagagaaacactgttcgtcctctatcccgccgctacgacgctacgacctacacccgcgaacaccacgcatggtcctcgcctgcaacggctcgatgaagctcggccggggaggacgaccaccagagcagtaggcgctctgctgcggtggcactgagtcgtttggcggcggcgtcgtggagaagcttgacgacggctctgtggatctcggatggggaggacttctatccactggcgcgttgccgctcggctatggacgcggagtcgcttgtcggcggcgtggagctgagtagtggtgctctggatctctactcggcggtgtggaggagccggcgcggtgccgcttggatgtggacatgaagtcgttcgtcgaagtcctggaatagtggacaagtgttgtgcgaagaacaaaaatcaatttcccattcgaatgtgtgaaggctagttcgaaaaataaatattgttaataaattaaaaactattttcatgctaaaaaaaagaaaaaaaaaaaaaaaaaaaggcccctagggcc

SEQ ID NO: 37400 - DNA, 256 bp, Zea mays
  Clone ID: MRT4577_134111C.1
aatttcaaattttttttgctcgacgacacaagaatcgagataggacttcgtaagccgactgtattaatcagaatcacaagtacagcgtttactgggattgccacgccctacttgtgacaacgaggaccgcctgctttacttccataaatcacgaattacctgtacaaaccaaacaacatcctcccccgctacgggtaattggctcacaaaacccctgggctggaaaaaggccagcattaaaaacccaggtaaaaac

SEQ ID NO: 37401 - DNA, 170 bp, Zea mays
  Clone ID: MRT4577_134112C.1
ccaccaacttctatatcctcaaccttgccgtggccacggcaccccctgatgagtgtgaccctggaccggaatggtaggatcacctgcctgacgcttccaccacactggattgtttagggaccggaacggcaccagctccgcgcccgtcgccatggttgggggcaacgaga

SEQ ID NO: 37402 - DNA, 248 bp, Zea mays
  Clone ID: MRT4577_134113C.1
ggtacaggtccagaattcccggtctgacccacgcgtccgctcccgctgctggccgcgggccccgccgtcgtccgtggccgccgacagcgcgcccagctcctccagcttggacagtaggcccagccgctccatcgccgacagcgacagccccgcgcgctccgccgccgacagcaggcccgcgcgctccgccttggtcaccagccgcagcatcaccaggggcgtcagcaacgtaaagggagctatggaga

SEQ ID NO: 37403 - DNA, 2101 bp, Zea mays
  Clone ID: MRT4577_134114C.1
acgcctgcaggtaccggtccggaattaattcccgggtcgacgagctcactagtcggcggccgccctttttttttttttttgcaatacaatcatgtttatattttaagtcttggcagtcgacaaacaccaaattgtatagaaaccggaaaatccagcccatataaaagggccattcatactttgcacggatgctcagattacaacgctttcagaattcagatacatacaagcggcacagtccaagccaaatatataactatcagctcttccagccacgcacaacaaaccaatcaagtttgacaacccatctcacgaaccaggtgtcacgacagacacagcgtgctcgcacatggattggagccacaacatacaaaggggggagcctatccccaagaagacttcaggtccgatggaaacaaacaaacgtatcatgcaaatctgccacacatatctcgagaaatggaggggacataatttgagactaggtaacgacgaggaacttgtgaaaccctagaagcacttccggtgaacaattgccgggccagactcgtcgtactcctccttcgatatccacatctgttggaaagtgctgagcgaggctaggatcgaccctcctatccagacactgtacttcctctcaggcggtgcaacgaccttgatcttcatgctgcttggtgcaagggaagtgatctccttgctcatacgatcagcgatacccgggaacatagtcgaaccaccactgagcacaatgttaccatagaggtccttcctgatatccacgtcacacttcatgatcgaattgtatgttgtctcatggattccagcagcctccataccaatcatcgacggctggaagaggacctcagggcacctgaatctctctgcaccaatggtgattacttgtccatcaggtagctcatagctcttttcaactgaagagctgttcttggcagtttccaactcttgctcatagtcaagggctatatatgctagcttctccttgatgtcccttacaatttctcgctcggctgaggttgtgaaggagtaacccctctcagtgagaattttcatgagggagtctgtgaggtcccgaccagcaagatccaaacgaagaatggcatgaggaagggcatatccttcgtaaatgggcacagtgtggctcacaccatcaccagagtcgggtacaataccagtagtacgcccactagcatagagtgagagcaccgcttggattgcaacatacatggcaggaacattgaaagtctcaaacataatttgggtcatcttctccctgttggcctttgggttcaaaggagcctcggtgagcaacacagggtgctcctctggggcaacacgaagctcgttgtagaaagtatgatgccagattttctccatgtcatcccagttgctcacaataccgtgctcaatcgggtacttgagcgtaagaatacctctcttggactgtgcctcatcgccaacatatgcgtccttctgtcccatccctaccatgacaccagtgtggcgaggacggccaacaatgctagggatgggacagaaggacgcatatgttggcgatgaggcacagtccaagagaggtattcttacgctcaagtacccgattgagcacggtattgtgagcaactgggatgacatggagaaaatctggcatcatactttctacaacgagcttcgtgttgccccagaggagcaccctgtgttgctcaccgaggctcctttgaacccaaaggccaacagggagaagatgacccaaattatgtttgagactttcaatgttcctgccatgtatgttgcaatccaagcggtgctctcactctatgctagtgggcgtactactggtattgtactcgactctggtgatggtgtgagccacactgtgcccatttacgaaggatatgcccttcctcatgccattcttcgtttggatcttgctggtcgggacctcacagactccctcatgaaaattctcactgagaggggttactccttcacaacctcagccgagcgagaaattgtaagggacatcaaggagaagctagcatatatagcccttgactatgagcaagagttggaaactgccaaa

SEQ ID NO: 37404 - DNA, 1144 bp, Zea mays
  Clone ID: MRT4577_134115C.1
gctgttgattgtaagctgttattcagatgtctcctttctataaaaaagaattgctttccaatggtatgttaaaggtggttcgctacaaaatgatcaacttgatgtaatccacaaaaaggtaaatagctgacagtgctttctatctccaacatattcacagtatatactgcctaccatcaaccttaatcacagaatgactatttctgcaacttgagcagcgacatgcaacttgtcgtagtcattgctacaatatcttggggtgaccgaggacactgaaggtttcctgctacttgatgtagaatcacatttctgattcgaaaccaatgttccaaaacccttccggcgtcagaggcggcgcgtacctgtaccgatgccttgacacaccatcgtggtgctcacatcgtaagcttgtagagcctgcaccatcgccatctgcacgaccaccaggaagaacagcatcataaaacttcttgcattgcttgcactcgacacctttcaggttctcccggtcagctttctttctcactgattctctatatttgaagtctttctttggtggatgtaccgatattgtgttttgctgcttggtaactggcatattggggatgtgccggagggcttgagttgcaatattcagatcttgggtttcatcatctgaattgtcgaaatccataacttgaggagaggcggcaagtgccagtgcttcttcgggagttgcagggttcctgatggtattcttgacagcttccagaggtgtatcaaggaaatcatcgtgtggatcagcaacaccttgttctttgcgtgcacgggtctccctccaatttagacatgggctggcgacactggttgaagcttgtagttttgaattgttggcagaatgatttgccaatggattcattgggcgagatggcacggcaaggtgtgagtttctgattggactcctcactgaactagcatgttgggcagcttgggctttggcacctggagcagagtcattcttcaggtcccttgtgttgggaaggatttggatgcgctccttgtttgtgtgctccaaatctttgaatttcctcttacttggaggactttcagtgtttcttctatctgcaggaatgtcctcaggaggcttggagccttcatgctcccg

SEQ ID NO: 37405 - DNA, 140 bp, Zea mays
  Clone ID: MRT4577_134116C.1
gggcgttactactacagatgattgcggaagtgcatgcatgcacgctggcgctcgctgcccatgctgatctcagggcgacacgcacgccgagcctactagagacgatgcagacgcaacacacaatagatatagtaactgta

SEQ ID NO: 37406 - DNA, 341 bp, Zea mays
  Clone ID: MRT4577_134117C.1
gaacggatgaagtgatattcattttcataacctaagacggagcaacggcgggatggagactgacccaaatgcatggcgaatataaacattccattagcaaatttcggtactatcgccaattttagggcagaactgttactaaccacacaggaaaagcaaatcatttaaagtacagaatccagcatggtactgcgataaatatcctaatcgctgggccctaacaaataatggctaatcaggggccttgcaaacataaatgcggacggagccagcccctgcagcttctggtgatgatactggcgacggaacaggccctctgacggtttccggcggagctggat

SEQ ID NO: 37407 - DNA, 305 bp, Zea mays
  Clone ID: MRT4577_134118C.1
ggaaataagttgcttcactaacatgtaacatataccctatttttaatatatatatttgcaaccttgccctatgactctgtttgagatttggagctggtgatcatttaatttgttttatctggacaatcatgttttgatttcaatgccgttttcttatttggcatctggtagtcatgttttagcaacttcctaggaaagtatcgtacctcctttactcaatttctagaattcaaaagggaggggtatgtaggttcaattaattctaaggatttatgcctagagtataaagttgtctcagtgttagt

SEQ ID NO: 37408 - DNA, 1624 bp, Zea mays
  Clone ID: MRT4577_134119C.1
ttgggtacctcgaggccggccgaattcggcaccaagctcaaaagatggagcacaactgcacaacaccctagaacagtagtgtgatatgtagctcaataggttggttggttgtgtatcacaagagcaggggtagagacacagagagctaaaagaacattggacgcgagggagcagagtagaactgtagaagggagtggtgtacgtgcgctagactgccagtggcagctgctgcaagctagctaaggtgaaggatggatatcgagtcgaggcaagtttccaaaggggacgccatagctgctgctgtctctgttgactggaagggaaggccctgcgaccccctcaagcacggcggcatgaaagccgcggtcttcgtcctagggatccaggcgttcgaaatgatggcggttgcggcggtggggaacaacctgatcacgtacgtgttcggggagatgcatttcccgctgtcgcaggcggcgaacatcgtgaccaacttcatcggcaccgtcttcctcatctccctccttggtggcttcctctccgactcctacctgggcagcttctggaccatgctcatctttggattcgtcgagctctcgggtttcatcctgctggcggttcaggcgcacctgccgcagcttcgaccgccgccatgcgacatgatggcgccggggcaggcgtgcgaggaggcgagaggcttgaaggccggcatcttcttcgctgcgctctaccttgtggcgctaggcagcggctgcctcaagcctaacatcatcgcgcacggggccgaccagttccggcggggcagcggcagcgacgccgcccgccggctgtcgagctacttcaatgcagcctacttgagcttctgcgtgggcgagctggtggcgctcaccgtgctcgtctgggtgcagacccgctccgggatggacgtcggatttggggtctcggccgccgccatggccgtcggcctgctcagcctcgtcgctggcgtcgccttctaccgcaacaagccgccacagggcagcatcttcactcccatagctaaggtatttgtcgccgcagtgagcaagaggaagcaagtgtgcccgtcgacggcctccacgcaggcggtcgcaggttctaccgtccatgagatgtccgttaacaccacagacatttgccacatcaacaagttcaggtttttggacaaggcatgcatgaaggcgcaggacggccccggcggatcgtcggcggggaagaagagcccgtggattatgtgcacgccagcagaagtggagcaggtgaagctgctgctgtgcgtggtgcccatcttcgcgtgcaccatcatcttcaacaccatcctagcgcagctgcagaccttctccgtgcagcagggaagcgccatggacacccgcctggccgcctccttccacgtcccgccggcctcgctgcaggcgatcccctacatcatgctcgtcgcgctcgtcccggcctacgaggccgccttcgtgccggccatgcgccgcctcacgggcgtccccacggggatcacgccgctccagcgcatcggcgtcggcctcttcgccgtcaccttctccatggtcgccgccgcgctcgtcgaggcccggcgccgccacgccgctgccacgga

SEQ ID NO: 37409 - DNA, 803 bp, Zea mays
  unsure (1)..(803): unsure at all n locations
  Clone ID: MRT4577_13411C.1
ngaataaaaagcgaaacgacgaactggcagcgtagttggaggtgggagttgacaagtgaggagcagaattaagaatttggaggggagggttgccgagcagccccagcgtcaccgccgacgcctcgaccccgcgcgcccccgctcctgctcgccgagccctccctctccggatctccggcatgtacggcggcgacgaggtctcggcgatcgtcatcgacgtgggctcctacagctgcaaggcgggctacgctggcgacgacacccccaaatgcgtcttcccctcggttgttggttcaattgaacaaacgggagatactgatgaagctaagccagaaaaggaggccgactctggatcagatcctaagaatggatccaagcctatggatgtggacaaagccaagacaaagcgcaaattttatctaggccaagaattagaattcaggagggagcatatggaggtgatctcaccgctgaaagatggaacaattattgattggggaagttgttgacaacatatggaaccatgcttttagacggcggctattgatcaatcctgaagagcatcctatgctgatagcagaaccatctacaaacagtggacagcaaagagagaaagcagccgaacttatgtttgagaagtacaagttgccagcgctgttcctagcaaaaaatgcagttctcacatctttttgcatctggacggctaccattctctggtggntgacctgtggtggcgngtcctactgtggtttctgctggaatgggaagnttatggtgttgcaaaagtctgcggcaacttctcc

SEQ ID NO: 37410 - DNA, 442 bp, Zea mays
  Clone ID: MRT4577_134120C.1
ggaacaaaaaactcccagggccccacaaatgggaacacgggacagggcccagaatccagaaacgggggggggggggggggaaaaacgggcgggggaccccctagggggcaaacggggaacccccatcaggaaaaaaaaaggtacaagaccccccaaaaccagggggtttcattatcaaacaagaaaggggctaagggaagaaaaaggaggggaaagcatttgccttttaagaggccacggaagcatgggggcttcggccagccaaggggtaggattcccccagcaggcgccacaaaaagggggccccccctcggttccaaattggggggccaaaaatcccaaaggggggggaaggtcccccaccctttaataaaacaggggaccaaacctcattgaagacacccaccgggacatcgggggccccaatcttgttaaaaccaag

SEQ ID NO: 37411 - DNA, 192 bp, Zea mays
  Clone ID: MRT4577_134121C.1
tttttatttgtgtttgttttttttttgaaaccaagaccaagcgttggtaaaataccccccgttactaattcttattcagggaaatcactctggggcttgacctactgtggggctccaccagcttgacacttggtgggggtggcaataccagcaacagtaagcccagacaggtaatgcttcctaccggtggtg

SEQ ID NO: 37412 - DNA, 667 bp, Zea mays
  Clone ID: MRT4577_134123C.1
gcaccccctcagtttgttggtccacacgccgcccatgccggcaccgccgcctgctcctcttgacgccgtcgcgacacccgaggatgataaatggcaagacgagtaatttactatgctgagcttgggcatcagacgtgtgtagatcaggagccttctacatgctacagacatgggaagcacacagattatttaaccacacacctctcatactaaaatcagcgaaatcaggtgattaggccgtcagtgcggtggtccgtagcaataagctgacagagggagagggtgttgccttttagaggctagggctatatcctccagaggttagcatgcagtccacatctgcagtattcgttgtgctggctgtgaccataatgtacatataagcatggaggaggtggagggtccatgaccagcacacagaaatagtttcgcgtaaagagggtagcaatatcatattggcgatagttttggtgttgataattaaagcaatggaacacggctggaaaatagcttccgtgacgttgtaatgtattttaagaggggcgtttggtatggctcaatcccaaggggaccctaacttcagagatgtaaagtagttttgggagctgcagtacaaatttaattttcgaattttggaaaaaaaaaaaaaaaaaagatccatagggcc

SEQ ID NO: 37413 - DNA, 427 bp, Zea mays
  Clone ID: MRT4577_134124C.1
tttatttttagttcctccattttattctatttaatccctaaattgtcaaatacgggaggggctaaaaaatagtccctagaaaccaaacatcccctaagttcttatgctgcctgatggatttaatttccatgatcattaatggcgcggtgcttcagttaggaggccaataaacctggaagactacactccacctgttgagcttcttcagatattacccctgaagtccagcgttagaggaaaagatgttgggccccaaatcggtccaaataacttaaaattttctccagtatgttcctgttgttatagatcaatggctaatgcattatgcatgtgatttgctgtcattggtccttgcaatttgcatatttaaacacctgcctttgtacttcgttttacactgggcagggaatgcaagctttattagacc

SEQ ID NO: 37414 - DNA, 224 bp, Zea mays
  Clone ID: MRT4577_134125C.1
cccccgggctgaaggaattcggcacaggggtgaccccacccgtgccggctcgctccctgactgcccccagtccgatgcgccctgcccgtctctgccacgccggtgtgggatccgcttgcacgtcggctccccgtccggtctcgaagccaactgcccctgctgacctgatcgagcgagaccctgccccctatgtcgccgatagcagctgccagcatcagcctgag

SEQ ID NO: 37415 - DNA, 368 bp, Zea mays
  unsure (1)..(368): unsure at all n locations
  Clone ID: MRT4577_134126C.1
acgcgtncgtaggctgcgagaagaccgacagaaggggaagaaggttctgttactaacatgtttacttccattgtcggtaatgtatttgggttcaaggccctgcgtgctctacgtctggaggatttgcgaatccctactgcttatattaaaactttccaaggtccgcctcatggcatccaagttgagagagataaattgaacaagtatggtcgtcccctattaggatgtactattaaacctaaattngggtatccgcaagaatatggagactgttataatgtttctggggactgtttacaaaaaaaaaaaaaaaaaaaaacgcgttaagacaactactacctctcacttactttttggaccaatatatg

SEQ ID NO: 37416 - DNA, 118 bp, Zea mays
  Clone ID: MRT4577_134127C.1
atgtattatgcaaaacattgtccacacatgttataggctgaaatcggaactattcgtgatagttttagactaaagaagggcgactagctacaagtgcagaatcaactaccaaaactgc

SEQ ID NO: 37417 - DNA, 158 bp, Zea mays
  Clone ID: MRT4577_134128C.1
cggaaaaagagaatccaaaagggttaaatccgaaaaaagaggattctggccccctttggctggtttcggggcccggcccaaaaaagggaaaagattaccgcaaggggaacagccccccgttttggtccgggaccagccaaggggcttgccggccccgg

SEQ ID NO: 37418 - DNA, 489 bp, Zea mays
  unsure (1)..(489): unsure at all n locations
  Clone ID: MRT4577_134129C.1
gggcccaagaaagcaatacattattggcggaaacaagatacacgttggaacagacctttaaatccacaaaggtaaaccccctccacaaagaacaaagctttggaaaacccccggaagccttgcatttggggcattccaagaaatatgctgaaaaacgaactttttgacatttatttcccctaaaacaaacccccccgaataaaaagaaagatttccttggattggtcaaagggttgggcctatagcgggatccaagcaaaatccggttcttggattgctcaaaaagggcatcttcaaaggggaccccaccaggggggacagccccaaaaccaaaatgaacctttttaacatttncagccaaaacgggatctggacggccttttttttcgttcccaaaaccctgggcttccctccaacccattttagaaaaaagtttgggcccaaaattggccgcctgaattttagccttctaaggggtttttttgggag

SEQ ID NO: 37419 - DNA, 320 bp, Zea mays
  Clone ID: MRT4577_13412C.1
actacacgtccgcgcacgcgttcgagtccagatgagaagtgacctggaatcttgctggggtaccgctacatactcgtactagatagtcatacgcgctgctaaactgttaggattacgcaaacgcatcactacaacgccaacatccgagcttcttatcactagccgccgaatacgcattcgtatctgccttagtactgattcatctagataggacacagctccagctgctagagatcgaatggaccacgcagaaggactattacatcatgaacaatcttgtcaacaagatccgatctgtgatatacgtcttccatgttcac

SEQ ID NO: 37420 - DNA, 448 bp, Zea mays
  Clone ID: MRT4577_134130C.1
cgtggtagaacggagtggggaagatggagacggtgaagatctttctgaaggcaaagccgacgccgcagcagcagctgtacgagaggcacatgccggctacggacgagggccgtatcatcgaccggcagatccaggatgtgcagagggaggagaagaaggaggggaaggacatcagggaggacgacgagaacaccgacatgcgaaccgtcaaggcgctggccaaggagggggtgcgcctgaggaatgcagtcaaccgcctgtgcgagaacaaggctcagatcaactccattttcatgcgccttggagaaagtgttgctactggtacgacaggcagccacttggacaagagcactgaattgatgaaactggccaacagcctcaagaaagcccagagggttgcagccacaatgcaggaatgcaggaaagagatgacaaatgctggtgtgat

SEQ ID NO: 37421 - DNA, 289 bp, Zea mays
  Clone ID: MRT4577_134131C.1
ccaattagtaggtttgagagtagatttacatggctactctaaactctgagagagattccatcttgatactattcttcaaggaatgaagggatgttattagtacagatcaagccttacggccgcaacctagtctagctttttgtcttaactagtggctactatatccaatttaatgtgcgtcatgatctcccagctttgcttgctaaagcctggcttctcacacacaatgagacgtggttaactgcaaaacctagatgcctctaagaatacgcgaacagtcttcctgcta

SEQ ID NO: 37422 - DNA, 396 bp, Zea mays
  Clone ID: MRT4577_134132C.1
agctaaacatacttatgtactgatatatgggataaaacaaaaccatgcttcctggtcattgtcatcaaggagaaaattacaagactggagattctgaacaaatattcccatgtagtgtagttctagcacaccaagcggcaaatcggcgccatatcttaaaacatctgacaaagggagccttccacctttaagtcgagccatcctatccccaatggatccttcggaaaacctcatcgctacacaaagctgaaatagacaaaacaaaactccatcttaattgattcattcacaggcaacccaacagcaagtgtccaccagaaaatatataccctcccattatgcgttgagatgccatgtaggaagcagatattgcccgggcactggcatttgcggaag

SEQ ID NO: 37423 - DNA, 498 bp, Zea mays
  Clone ID: MRT4577_134133C.1
ccggaacctatggtaagaccattttttgttttgttcctgtttctctcgctcccccgatggccgcaattgttcagggagtacgttatgcctttggtttgcatgcacctgctctgcttatcagcttatgtttactgacgtgtgtatctgtgaaatctttttttgcatgtgtcaccgcatggatcttaaaactctctaacgtcttattaacaatgatctagctagctagctagctagcaccttaattttcaattgctgggaaacaagctagctagctactagtatgcagctgttgttggtcctctgtttttcggactactctctgtcgagttcaggtgaaattgccttcattttttttgaaccagattaaataggtatgttggaataatccttatttctccctcttggaacgcaaccagcacacgttcatcaggagtgtttctgtatggcctgcctacctgcttctgtatgatacatacagatagcttctgcttggataca

SEQ ID NO: 37424 - DNA, 191 bp, Zea mays
  Clone ID: MRT4577_134134C.1
ctcgagccgcgcctcgggtcaaaccctaagcagggagttgatatatccgctgcagccaagagtaagtttgcagtctgagtctgtaaaggatgcaatctccaaaattgttgggaatgccaaggagaggattaggaagttcactaaaactttggaacttcaaattggcctgaagattaaggatccacagaggg

SEQ ID NO: 37425 - DNA, 947 bp, Zea mays
  Clone ID: MRT4577_134135C.1
cattgggtacctcgaggccggccgggaacacctgtcttgttcctcactaccacaggtccaaagcaagcaagaaggaacgaaggacgaaagcaagcaagaaggaacgaaggacgataacgataatggctctggtcgggcaggtggcgacggtggcgcagctggtgggcgtggacgcgttcagcctcatcacgatgatcgcggacgcggcgcagacggcgcggcggaaccgcgccgtgtgccggcagctggcccggcgcgtggagatgatcggcggcctgctccggcggctgcgcgacgacgacgacgcgcggctgctgcggcacgcggagacgcgcggccccgtggaggccctggaggagacgctccggcgcgcctacctgctggtgcggtcctgccagcggcgcgggtacgcgttccgctgcctgatgggggcgcggcacgcggacgagctccgcgagatgcagggcgagatcggcttctacctcggcctcttccccctcatcagctacgtcgactgggcgaggcgtcgcggcaacggcaaggccgcctgtggtgacactcgttctttgcaagaggcacctatggtaagaccatgtcttgtgccgttcctgtttctctcgctcctgcgatggatgcaattgttaagggagtacttatgccttggtgtatatatatgcacctgctctgcttatcagcttatgtttactgacgtctgtatctgtgaaatctttttgcatgtgtcaccgcagggatctaaagataaacgcgttactgacttaaaactctgtaacgtcttattaacaatgatctagctagctagctagcaccttaattttcattgttgggaaacaagctagctagctactagtatgcagctgttgttggtcctctgtttttcggactactatctgtcgagttaaggtgcaattgcctttcttttttgaacc

SEQ ID NO: 37426 - DNA, 1531 bp, Zea mays
  Clone ID: MRT4577_134136C.1
tggcacatacttctcaatcaagaactaaggccaaggtccaaagcctgaacggaattcggcacgaggtgttcctcactaccacaggtccaaagcaagcaagaaggaacgaaggacgataatggctctggtcgggcaggtggcgacggtggcgcagctggtgggcgtggacgcgttcagcctcatcacgatgatcgcggaggcggcgcagacggcgcggcggaaccgcgccgtgtgccggcagctggcccggcgcgtggagatgatcggcagcctgctccggcggctgcgcgagcaggacgacaacgacgacatgcggctgctgcggcacgcggagacgcgcggccccgtggaggcgctggaggagacgctccggcgcgcctacctgctggtgcggtcctgccagcggcgcgggtacgcgttccgctgcctgatgggggcgcggcacgcggacgagctccgcgagatgcagggcgagatcggcttctacctcggcctcttccccctcatcagctacgtcgactgggcgaggcgtcgcggcaacggcaacggcaaggccgcctgtggtgacactcgttctttgcaagaggcacctatggtaagactaccatgtcttgtgccgttcctgtttctctcgctcctgcgatggatgcaattgttcagggagtacgttatgcctttggtttgcatgcacctgctctgcttatcaccttatgtttactgacgtgtgtatctgtgaaatctttttgcatgttaattttcattaacaatgatctagctagctagctagcaccttaattttcattgctgggaaacaagctagctagctactagtatgcagctgttgttggtcctctgtttttcggactactatctgtcgagttcaggtgaaattgcctttcttttttgaaccagattaaataggtatgttggaataatcctatttttttcctcttgggaacgcaaccagcacacgttcatcaggagtgtttctgtttggcctggctatctgtttcggtttggatacatacagatagcttaccttcttggttcatcaggagtgcaaagttgcaggatctcaggcggcgctgacgatgacgcagcagccctggagccttccacggccgagcaaggacgagtaggaaggagggccacatgcgtcgtggccccgtgacacctgcttcacgttctctcaggaaaaaaaatttgcaaaaaaatttgcaattttaattttatgacgcacagcgaaaagcccaaaaggaggggggggaagatgctgtcgatacagatcgttcgatccacacgggaagatctgaagcatgagagcatgtctgaaacagtcgagatgtcagacatgtcctgccgccattttattttttacccgctcatgtacgggggttatttttttttcgtatttctttcctcagcggcgctgcagaatagaaccgatcgaggcggagttgtctgtcatcccctcctctctcagtaatattcacacgcgctgcgtttttcccaaaaaaaaaagggaaaaaaa

SEQ ID NO: 37427 - DNA, 1318 bp, Zea mays
  Clone ID: MRT4577_134137C.1
atcggcagcctgctccggcggctgcgcgagcaggacgacaacgacgacatgcggctgctgcggcacgcggagacgcgcggccccgtggaggcgctggaggagacgctccggcgcgcctacctgctggtgcggtcctgccagcggcgcgggtacgcgttccgctgcctgatgggggcgcggcacgcggacgagctccgcgagatgcagggcgagatcggcttctacctcgacctcttccccctcatcagctacgtcgactgggcgaggcgtcgcggcaacggcaacggcaaggccgcctgtggtgacactcgttctttgcaagaggtacctgctcacaactgctagtagcagtagtgggttttgttctctaatctctactatagtacgtgtatgtatggatcagctcatgttttttttttggcatttctgttatgtgtacaggcacctatggtaagaccatgtcttgtgccgttcctgtttctctcgctcctgcgatggatgcaattgctcatcaagtacgtcaactgggcgagccgtcgcggcaacggcaacggcaaggccgcctgtggtgacactcgttctttgcaagaggcacctatggtaagaccatgtcttgtgccgttcctgtttctctcgctcctgcgatggatgcaattgttcagggagtacgtcatgcacctgctctgcttatcagcttatgtttactgacgtgtgtatctgtgaaatcattttgcatgttaattttcattaacaatgatctagctagctagctagcaccttaattttcattgctgggaaacaagctagctagctactagtatgcagctgttgttggtcctctgtttttcggactactatctgtcgagttcaggtgaaattgcctttcttttttgaaccagattaaataggtatgttggaataatcctatttttttcctcttgggaacgcaaccagcacacgttcatcaggagtgtttctgtttggcctggctatctgtttcggtttggatacatacagatagcttaccttcttggttcatcaggagtgcaaagttgcaggatctcaggcggcgctgacgatgacgcagcagccctggagccttccacggccgagcaaggacgagtaggaaggagggccacatgcgtcgtggccccgtgacacctgcttcacgttctctcaggaaaaaaaatctgcagtaatctagctcgtcctccccgttcactatttcatttcactgtggtcttgccctcatgctcggtctgtgtatctccagattttaattttattttgttcagagcagcattttttatttaattcc

SEQ ID NO: 37428 - DNA, 503 bp, Zea mays
  Clone ID: MRT4577_134138C.1
gcatgtctaaagtagagggcctaccatgctgcagcgttagaactttttaacacaaggtagtaagtaatactgtacagtgaggtatttttcccgggaagacactccttgttgatcttgccagggctgcgctttattttcgtgaaataaaaaaaacgtcgatgttataaaaagagctagttatcgcacaaaaaattaggaggtgactgaaaaactcgtccgattaaatatattactggttgaaaaaatacaaggccggggttccagaaccaaggagagtaaaatcaaatgcttggctacgaataccaaacggtgcactttgagagccaactgcagaacgtgctcatgaattgtcgcttctcactggaaccctgatgaaatattctagctgggatagggctgtgctacacgactaagtgacaccatggcggggaatcaaggagctatcttcacaccctgtgcccaattataggatatagttttccaactcatggccgtacgcgtgg

SEQ ID NO: 37429 - DNA, 432 bp, Zea mays
  Clone ID: MRT4577_134139C.1
cacgcctgcatgtaccgggccgctattacacggtcgacctcagcgttcgttgttggttaagcaaatggatgtgtggcgcgtacaatttgcaactgattaaatgcttttgcctgggcttggctacatactacgacccacctcccagttatgacacaaactcattgcatctacctgccatttgacatccttgaaaggatgtgggacccttttaaactacgaagactgaacgtttaactacttatggcctgggcgcgatctaaatttaaaacctaaggatcttcagcgctttctgttcctaactagttagagattaatagagctcactcagaacttgtggtgtactacatactacctcaccagatttttactcaacaaatcggggctactgacaattgtgcagtaaggaccgcatattcctatgtttttaggttt

SEQ ID NO: 37430 - DNA, 132 bp, Zea mays
  Clone ID: MRT4577_13413C.1
gaaaaaaaggagtaggaggtgttggcttccattttcggctatctcggagtttgttgtggtatgcttaagttctgttgtaatgtgctttactaatctttctttggttcgaataaaatggtgaggatatctcat

SEQ ID NO: 37431 - DNA, 313 bp, Zea mays
  unsure (1)..(313): unsure at all n locations
  Clone ID: MRT4577_134140C.1
ntcaaacctacgcacactaggtttttcgtttaacaaaacacnacanacnccggggcaagtgtacaattttaaagtcccctccgccatacaaccaccccctaactaaaactcaccacattatttcatcatcacaaactccaccaccaactcctcctccacaatctaatcctccaacttcatctccacatcatctaataacaacaaattttaattattaattaatacaatatttcactgaaactaatcaacataagcccatcataccattcactaatgttcaatccacaaatttaataaccacttcctctaccaa

SEQ ID NO: 37432 - DNA, 487 bp, Zea mays
  Clone ID: MRT4577_134141C.1
gggggggggtttttttatttattaagaagaacctataggtcccttttttcaaaagagaatcatggcgtcctttgtggaatcatcaacactactccaagactagagtggcctatcggagtatcgaagatacaacctaaaccatttccctcagaggggggggggggcatacactctgaaacggtgaaccttccatcattgaagcggccaataaaaaactgaaagtgagaaaactggcgaattgggaagggcacattgaaaaagtaacctaatttaccgcggaattgagcttgcaagttggcccatgaaagctcatctgaccccaacatggcactcatttcatgttcccttctcttaagacatcaatcatgtcatacaattttttgttcacacccgattgaatctttgagtagagaaacatagctgcatcaacagttccttctgcgtatattgaacgggcacatacattgtgctggaactcaaacgaaac

SEQ ID NO: 37433 - DNA, 253 bp, Zea mays
  Clone ID: MRT4577_134142C.1
cgcggcgcgtctttttttttttttttttttccccaattttaaaccacctttatatttccaagcggcccctaccctaagggaacgtttttgtgtccaggtccaccaaattttaaaaataaaaaccaatctatttggctggccctggatctggaaaacctgcaggacggctggaaatgacaggagttccctcgattggatggggaataaagtctccctcaagctattttgcaatggctgacgggattttccaaat

SEQ ID NO: 37434 - DNA, 697 bp, Zea mays
  Clone ID: MRT4577_134143C.1
cccctcctcgagtttttttttttttttttttttttttttttttttttttttttttttttttttttttagggaaagggatctttgttttgcataaaaaaggggttacaatatataaactcaaccctaaacctaaggggccggcagcccaacaggggggccagcccacaaacactcacacatagagtctaaaagttgtccatggtacacccctcgttcaccaaacgggatgttaattttgccgacgcttcgagcctacaaccaatatttttccacagaacacgcgtcgcccaatgctacaagcctacaaacagtactgttgacaggtcaatctccaaaaatgcacaaggggtgcctaatgctgagctccacctttagccggggatacaacgctaggtcgttgtttgcgaccagcattttcaaaggggaaaaatgggccttttgtaaaataccaccatcgacctccaatctagcttttggaaattttggaaaatgaccaaattgctttttgcctaaaaaattgccagggccacggagcaacaggtttgctttacccaggtaaaacccatgggaggacttttcgagcacctttagccttggcagggtgctcaaagttgaacccaggaatatgcatctggatttcctttcaccgggacctatttttccttgaagttgatgcagctgaaagattccaaatcgc

SEQ ID NO: 37435 - DNA, 1160 bp, Zea mays
  unsure (1)..(1160): unsure at all n locations
  Clone ID: MRT4577_134144C.1
gggacagccagaggcgagcccggacaccacacaggcgagcacangcngagcacccgaccaggggggggcaganggaattgtttctctggtctcgcgacattgagcccgaaattgtgccgatgtgcagagaattgggcattggaattgtaccatacagtcctcttggccgtgggttttttggtggaagaggagtgaaagagcaagtgtctgctgaatataatctgcatgggatcccaaggtttgctccagaaaattgggagaagaacaagcaaatttatttgcgaatggaaaaactggccaataagcaccagtgcagccctgctcagctagctttagcatgggttttgcatgaaggcgatgatgtggttcctataccactttgataatgatactttttaagacactatggtctggatgatgtaataaagttactctactctctttacgcctttattgcattgtcttttaatatattacacttgtgacgtcaaaaaaaaaaaaaaaaaaaaaaaaaaaacttctttcttctggtcttgaagaggaccttaatttcggttctgatgctgcaaaaaatgcattggctgctgttagacttactgtcatccttatattcacagtgcacaatgtaaataaagagcctgataggcagtcttatgctgaaattgtgcaacgcagagtactgctccaaagtgcgtttacggctgcttttgactttgttggacgaattctcagaaggtgttcagagctcaatgatattgcatcaagcttctatctgccagccattttggtctatattgaatggctggcgtcccatccagagttggctgttgattcagagatggaggaaaagcatgcaaatgccaggtctttcttctggagccaatgcatctcatttatgaataaagttgatccttaccaaccttgcatctgtgaatgatgatgatgacgaggcttgcttttctaaatgagcatttatagggagggtgaaactggcaacaggtttgcctttggggaagatcttgattgaagaaggttttctgcccttgcttcctgcacataccattntgggatttctcaagcaaacacnacatttggaagcaccaaggaggagaaagcacgggttcaagcgaatttttgctgcaaggaaagtcactgcttaa

SEQ ID NO: 37436 - DNA, 445 bp, Zea mays
  Clone ID: MRT4577_134145C.1
ggggaaaccagcgcccaccctaagtgacatcaattataaattttaaaacatagccagattggaacacttcctaccacttgtccactacggatgaattttacgaattggaacacccacaaatgtgaacttccacaaaggcaagcctggaacaaatgcaaaccatactacggggccactcccagatgccgtaaacagagaatgtaggccctttaaccaggggtcctcctagccaggtgaatgcccttgggcataatggacacccgcttggcctggatggcgcacagattattgccctgcaataaacccaccaggtacacctccggaatctcctgcagcgcaagcaccgaatggttcttgaaactaaaataagcttgaaatactgagcaattttcctgacaaggctttggaacggaagctctcttatgagcaggagaaggctcttctg

SEQ ID NO: 37437 - DNA, 4072 bp, Zea mays
  Clone ID: MRT4577_134146C.1
cctcgagccggccggaatttcttcctcgacgagggagtccaatcccaacacggcgacgacgacaaacaaacaaggaaatcgcctcctcctcctcctcctcttctttccctcgctctgccatctgcccccaaattcccctccccactcgctcgcgtcgcgatagcaagcaacgcgcaggtgctgaaactcgtgtactgttgatggatgatgactgttcccatggatagtgctagcgcagccccatcctccacgcgggaccttgccgagcgtctccttactaggaataatgaacttgaagaccagcttcgtaagtccgcacaatccaaagtcccatcagatcccaacatatggcttcagatgcgtgacaactttgagaagataattctcatagatcacgacctctctgaacagagagatgtagagtatctcctatggcagttgcattacaaaagaattgaggacttcaggaggaacattagtgcagctagctcacttgcatctcagagtgggaagagcaacactaacccagatcgagtcaagagaattaaatcagccttcaaaagcttcctttcagaagcaactggcttctatcatgacttgatgttaaagatcaaatcaaattggggccttccactcaattactttccagacagccttgacaatgcaaacaactctgtgcgagatgacatgaaaacagttcaattgaagaaaggtttgatttcatgccatcggtgtctgatatatttgggagatcttgctcgttacaagagtttgaatggtgatggtgatcctgctagtcgtgaatacacagcggcttctagttactacaaggaggcagcttctatctatccttccagtggcaaccctcatcatcagcttgctatactagcttcttactccggcaacgaggtggtggctgtttataggtacttccgaagcttagctgcagacactccttttgccactgcacgggacaacttgattattctttttgaaaagaatcgccaaagctatggacagctgccagacaacagcaaagttcctagcactaagacattacccccacggccatctgggtggggccgaggacggggagaagtaaggtttcaaccaaaagatgttaatgcagaaacagctgaaagggaacgcgagtgcaataatggtgatacattgaagaccttctatataagattcgtcaggctcaatggaattcttttcacgaggaccagtttggaaacattcggggagctgttttcttcagttagcaatgatttgcagattcttctttcttctggtcttgaagaggaccttaatttcggttctgatgctgcagaaaatgcattagctgctgttagacttactgtcatccttatattcacagtgcacaatgtaaataaagagcctgataggcagtcttatgctgaaattgtgcaacgcagagtactgctccaaagtgcgtttacggctgcttttgactttgttggacgaattctcagaaggtgttcagaacttggtgatatcacatcaagcttctatctgccagccattttggtctatattgaatggctggcgtcccatccagagttggctattgactcagagatggaggaacagcatgcaaatgccagatctttcttctggaaccaatgtatctcatttatgaataagttgatccttaccaaccttgcttctatggaggacaatgacgatgaggcttgcttttctaatatgagcatttatgaggagggtgaaactgggaacaggcttgccctttgggaagatcttgaattgagaggttttctgcccttgcttcctgcacataccattttggatttctcaagcaaacacacatttggaaatgttggaagcaccaaggagaagaaagcacgggttcagcgaatttttgctgcaggaaagtcactgcttaactttgttcagattgatcagttgaggatatattttgattcatcatcgaagaagtttgttatggccaagaaccctcctgtttctaaaactaacacccctcttcacgaatctcctgatgcacttaaaacaagtggcactgaaatggattatgaggctgctagaagatttgattcagtttcttctaatatgggcacactgcagtctaaagtgcagttttgtcctgatggtgacgatgatgaagaaatcgttttcaagccaacagcttccgaaaagtttccgaaagctccttcagatctgttggttgatggatacactcatcctgtacctatgtctactgctggctggccaaccaatgctagtttagtgcctgttcagagcactggatcaatgtctgcaactcgtttaccatccaatccacatgcaactggttggccacccaatggtgggtcaaatgcttttccaagtactgcatctctatcagctgctggtaattacaacattaaccagtcgcttcccaggtcttccgttggttggactgattgggctgtcaatagtgagcaaagtgttattcctagcattgctccaagatttgaactcgtgcagtctgttgaggagcctgtttccagctggacaagcagtggggcacagcatgttggtcctcagcacaagcacacaggtttaactttcccagatgttgtgtctgaaccacttgtatctgcatcaatggttcaatgttttagtagcactgattattcgaaatttctcagtgaacaagaaatgctcttaatgaatggactgaatactgtcaacataactggaaatggctatttaaagcagagattgcagcctggattgagtggtttacagtctatggggtattcatctcagatacctattgaacctggtggtaccactgcaaacctgatgcataatcatgtcaaaattactggagagactgtgccctctacacttgattcagttgtaccttcaatagcaccatcaggtggcatgccaatcaaacttacagaagcaccactaactgcttcgaagaagaaccctgttagtcgtccatcaaagcctgttggaccacctccaggatttaatcatgtaaccccaaagcgtcaagatgattctattccggttgaaaaactgcagaacccacaggtcgatgattacagctggctagatagctatcagcaatcgattgatcatgttcacagcttaagaactatttatcctggtgtcagtgatactagcactgcatttgccactccattctctttccctgggaggatacacacacaagggaccaatgaaaagacttggcaagatttccacctttttgagccttcaaaacagaacatgttccaaacttaccaccaaagaaatctgcaaagtggtcaaatggatgaacaagagccagcaaattctatctggtctagcagttaccatgtgtgatttggtaacttttaccaggatgattgctggagtttctggggacagactattggattaagtggcacgacctgatctattgagcttagcccatacctgcagcacttagtgttaaatttcttttgagaatggtagtctttcaagcatgacaatggctgctgttaagtttgggagtgccgccatcttttgggccaaagatggggtagaggatgattgatctgtcggcagtctgatggcgatgaattaatacgaggtcttcaatgctgacagaaagggttaatgaaacaaacttgaatccagtgattataggcactccgcacggaccacatgattcatctctcactggacatattgctaccacaagaagcggacggttgctgccgcaactaaaacatgccgtgtggatgtcagttttcagttggcctatgccatccagagagtaaaaagtgaggatcaacgagcatgttgccgagtagtttctcaagtataaattactgcgtctacttgctccttcgctttgggaacaatgtatcaggttgtaagttgcaattaaatgtttggaacagtttgtcatggtaattgtgtggctcctatatggctatattgttctctgtaattgtatggaccaaccctaagtgttacatacaaacatctttgatttgactcaatatcttgttcttcatccgttttt

SEQ ID NO: 37438 - DNA, 1808 bp, Zea mays
  unsure (1)..(1808): unsure at all n locations
  Clone ID: MRT4577_134147C.1
gcacgagactactcgtccgactagaaccaaacttttcaatccatcgttcgcagttcagttcacacttcacaggcgagcagcgaccatggatacccaagcacgtccggttcctccccgcgtcaagctcggcatccagggattcgaggtgtccaagctggggttcgggtgcatggggctgacgggcgcgtacaactccccgctggacgacgaggccggcatcgccgtcatcgcgcacgctttcagccgcggagtcaccttgttcgacacctccgacgtatacgggcccctcaccaacgaaatcctcctcggcaaggcgctgaagcagctgccgcgggagcaggtgcaggtggccaccaagttcgggatacggcatgacgagagcggcacgcggaccgtgtgcggccggccggagtacgttcgcgcctgctgcgaggccagcctgcgccgcctcggcatcgactgcatcgacctctactaccagcaccgcattgacaccacaactcccatcgaggagacgattggcgagctcaagaagctggtggaggagggtaaggtcaagtacatcggattgtcagaggcgagcccggacaccatcaggcgtgcacatgctgtgcacccgatcaccgcggtgcagatggagtggtctctctggtctcgcgacattgagcccgaaattgtgccgctctgcagagaattgggcattggaattgtaccatacagtcctcttggccgtgggttttttggtggaagaggagtgaaagagcaagtgtctgctgaatctaatctgcatgggatcccaaggtttgctccagaaaatttggagaagaacaagcaaatttatttgcgaatggaagaactggccaataagcaccagtgcagccctgctcagctagctttagcatgggttttgcatcaaggcgatgatgtggttcctataccagggacaacccaaaatcaagaatctagattccaacattgactccttgaaggtgaaactgacagacgaagatctgaaagaaatgggcagccagatacgggaagaagatgtggctggtggaagacaattcacttcatttgcacataccacctggaagtacgctgatacgccaaagaagcagagctaaaaaatacttgaaagcaacaatgatgatgcgattggtatggccctctccctgcagatgccctcaggaacattgccgatgcccctttgtgaacagcctcttctagtaaataataatgtatggagaagaacaatgaagggcccagtcttgttggaagtacgaataatgtacagttacaggaatgtgtgctaccatatatttcgtcgcatcagtttgagtttgtggttgtgtgaacctaccatatatttcctcgcaaaagaataatgtatagttacaataataaaaaaaaaaaaaaacaataactaggcaggtgcttacaacccataatgtttggtacttggtgtgtattgcatgcctcaatttgtatcaagagtatttacccatgagtatagcttgaaggttaaaaccactggttcgacgaataaccatatgcatttgtatcgagagtatttaccatgagtagcaaactgaattttgtaataatagtcaaaagtgtgattgtaaaatgtacttagggaatgtggtacgctatattagcgtgcaaacataagtatagccagttaagcccctccattttagtctcatttagtctctaaattgcttaacggtgggactaaaatagggactaaattgttttagtctctagtcacttaaggaatgactaaaagagattaaaccaaanaaaaa

SEQ ID NO: 37439 - DNA, 261 bp, Zea mays
  Clone ID: MRT4577_134148C.1
gggtggggtttttttgtttttttttttggacgacaaaaaataaacaagggggtaaatgtaaagcatctctgatattaataaacaacgtaaacagctatatttattttaaataacccggtaataatggaggggaattaacaacttttacaaaattatgggttgtaaaccaaacaatacttttaatcagacacacaataacactattgcaggagcaactctttgtaaatcacgggataagggcaaaatactggcctgtatgtt

SEQ ID NO: 37440 - DNA, 822 bp, Zea mays
  Clone ID: MRT4577_134149C.1
gcttacctttctggtttcctagaggctctcaaggacaggttgtgatgtctctcatccttttagttccttgcttcgtctctactcccaaacccaaacctgattaatgcctcgcctccattccgtactctcctgctgaagcttttttctctgaaactagtatatcccccatctgtttggtcccgacgattttccgctttgggagcaccaccaagctcttccagcttgcagggctggagtctttgccagggacagcaatggtgccgacgcatggcgatacagccggaccgagctccagccaggatgacccggcagccagcgtgaagaagcgcaacagcaacaggcctcagtatcatccgtttactcagcaacagcttccagcttgcaagcctatacttgcgcctcagacggtcatccctgtactcctgtttgtgggcgtagtttttatcgtgattggccttggctgcattgcagcctcaaacagggtggttgaagtggtctatgagtatgagacttcatgcataccaagacacatgcttggcaacaaagtcgcctatatccaaaacccatctatagataagacctgcacatggattctcaaggttcctagggatatgaagcacccaatctacgtatattaccagcttgacaagttctaccagaaccacaggaggtacgtgaagagccgcagcgacaagcagctgagagatcccaaagaggccaacagcacgcagcagtactgcaagcccgaagctaccaccgagcacgggagcgccgtcgtcccctgcgggctcgtggcctggagcctgttcaacgacacctaca

SEQ ID NO: 37441 - DNA, 1284 bp, Zea mays
  unsure (1)..(1284): unsure at all n locations
  Clone ID: MRT4577_13414C.1
tagtcggcacnaggggcaggggggccggcgcggtccattcccctccgccgtgcgctccgctgccacaggcgcacttccgcctccgtctcagatcggggaagaagagctgctaccgctgcgggaggaagatccccgagcgttctgtggctgcaggtatggaaccagatccacccaggtagataaacaacttgtgttcaacaatcgatttagagcagcaagtaaaggatcatcaaggcccacgatttgttcaatggactggaaacttaatataggagaatttgatgcaatggtggctttttcttcctgtgagcttatgcgagtgtttgggtgtaagggggagaagtggaaaatgctgatgaacaaaaaaccttctagtttgagaaaaataaatgccttgaagtggtgtcctgatgatcgttcacgcatagcagtcgctgccggcgatgggcaccttgtgaccattgacttcttagattttaaaggtcgacactttaaaagagtcgagaggtttgaggtaccccaagcaggtagtgtttcctgcatatcatggagctgttgtggtaaatacttaatggcagccataaaacgagatgctcgacatcctgatgcttgaatggtgattattaaaaaacaaggaaatcaaagatacaatatgaagactatcagttatgggtatcaaagtgaatttatctccgtatttcattcaaccgacccaatcattctatcagcttctgccagatcaactgatatacttctttgggccgaagatgttaaaagctttggatggacaatcgtatttaaaatatccattggtgcaggaattacagatatgtgtatgagtgatgatggaaacttccttgccgctattgtggaaaagcgcttaatgatatggaagtattgttgtgtggacgtacatgagtcttcatgcttttcaaagttagaagagatacaatatgagaatgatgatgacattaaaagaaaaaagggtgtttcactatcaaaacattgtgaaaacataatatcgttgaaatggtcgagcgagcttgacttattgactggttcgtctgtcgggaccatatgtgtccatactcatcctgcactgaaagaaaatgtccatatttctctggatacaccgtttgaggtgctttattttcgctggagctatgtgcatgcacataataaaagtggacctgtgaaatgtgtttcatggattccaagaaaaccttcaatgttggcagtagctggtatgacggggtagtcattgtgtgggaagtggtggatgct

SEQ ID NO: 37442 - DNA, 465 bp, Zea mays
  Clone ID: MRT4577_134150C.1
ccacctttaggtttggaggctgcaggcagcgttgggagaaccaatctgaaatcaccaagtgtaccaaacaggaatatgaaaggcttcaaaatgtagtgccccttattgtgactgcatccttaatccttatttttccgtttgaagcatgttcacttcatacacccttacacaaaaggaaccatttaggtctaaactgtcaacgataaggacctttagacagtgtagccctgattctaatgaaattctttgggaattaaactgttgactttgttattgaatgagttactgtcattgcttactgatagttattaccttttatatgggtcataaatagttagcttgctaaatacatcaatattcctattgacagtcatctttctctcgtttctaggacgaggttctttatatggtatgctaccaaggagagatatcatggtgcttatttcctaccgggtcaaaacttta

SEQ ID NO: 37443 - DNA, 228 bp, Zea mays
  Clone ID: MRT4577_134151C.1
acagtgctcatcaaacaggggggtattttatactgcaaactggagatagcacaacagtatgacatcatttttgcaaaaaaaaagcatgcaagaaacattctaccataaaacacatgcaaacttcctacacacgctaaacaggcaaataaaaaagtgaaaaaaaccccagtccccaggcccacaacaattccaaacaaaatactattttttctagccaaaaaaaagaaa

SEQ ID NO: 37444 - DNA, 661 bp, Zea mays
  unsure (1)..(661): unsure at all n locations
  Clone ID: MRT4577_134152C.1
cctcgaggcggccgggatgaccctccaaacatctctctatcacacgacacgacgatagcacaagcgccggcttactacccataagctaggaaaaaatattcaaagcataccgctcagccatgactacctcctctggatcatgccttattattaccctcgagctgtcgctgacggcggccgcccttgccaacgctacgtgcctcgcacagatgctgtccacgttctacgacaccacaggtcccattgcgatgtccaccatcaacatcgcccagtactccgacatgaagcagcacattcgagtgatcacagactctgctccatatcctcttccaccactgcttcaacactatggtgcaacacgatccatatctgctgaatgacactaacgtatgaattacccaccccacgaatctctaccttaacaccatggtctccaatgactacgacagcatcatggcccacactaaaaagaagtgacctgttgatgtgatctcgtgaacgtatccatcagcccatctgancatgaacctgatgtggcttctctctaacagcttcgagtatcatgcatctgctgaagatattaacgagcgtgactttgcggaagccgatggaggcctcccacctacatcacgaacacggagaaatcatgattcgatctcat

SEQ ID NO: 37445 - DNA, 280 bp, Zea mays
  unsure (1)..(280): unsure at all n locations
  Clone ID: MRT4577_134153C.1
ggcgggcacaccaggggcgggcgcaccggacacgagcgctgccgaaacaggcggacacggcgcagcgacttgagcttagggtccagggggggcttctttttgtcgtgggcactccgngcccttgggggggggggggtgagcacgcggtcgtattngtgcagtttccagaggatgcgttggagttgaccatgctgtggggacggtttggtgaggtgtgtgttggttgtttagttgtggtacctgaagggggattggttgctttgggtgggaggtttttttg

SEQ ID NO: 37446 - DNA, 270 bp, Zea mays
  unsure (1)..(270): unsure at all n locations
  Clone ID: MRT4577_134154C.1
tcgaggcaactccagctatcaaccaaaccctnntttcgcttgcaggctggggcaccacctcgtgcgtcgtcgggctcccccatcagccctccgcacagcgcgccgcgggatcatcgcgcctcgccccgccctcgccgctcgcttcgcgccgcacacgaggagaggggcgccacccaccccgcgaggcttccctgggcgggcccgataccggacggcgatggccgagcccgggtcacaggaggaccgagaggcaccgagaaagatctcttc

SEQ ID NO: 37447 - DNA, 397 bp, Zea mays
  Clone ID: MRT4577_134155C.1
gaacacaaatcttcgttaaatgatgaatttaaatacagactcatacctaagcagaacagtggttccaaatgacgaatgcctgtaaacgatccattctaatagaaccggaacggccaaagccgaaggaacagtagctaccaccacgaaggaccaatcgatggccggctacattagccctgcaggatcggctactgacaacgatggcgatgacccaggggaaggaccgagctaaaccacgcctagatcttagaaaaggcagctatctgcagctgtgcgaggactcggtcattgggtgacggcagatattgtactaactaagagtgtaggccgagaccaggctctacattaaggtcaaactgatccgcagcttgttgatgcctatccaactgggacaagc

SEQ ID NO: 37448 - DNA, 453 bp, Zea mays
  Clone ID: MRT4577_134156C.1
tcgttcaccgtcccttgatgatcacgagcggaaattctttaccgccgacgaatgggccttcgtcattgcggcgacagcgagattgatcccttccggtggtcaggggcccggtgcgcttgaggcccgggttgccgtcttcatcgatctgcagatggccggcccgttcggcgaaggcgcggactggtacatggaaggtccacaccggcccgacgccccgcccgagcagggctttcagtctccgttgcccccagccgagatttatcggcaggcaatcaaggtcttcaatgcgtggtgccaggaaaaatacaattccatattcgccgatctgcctgaaaatcagcaggatgaagcgctgcatgcccttgagggcggcaaggccgggggtagcaacgcgccgaagggcgaggttgcggaatcatcgtagaaataaaaataagaaaaaaacattaaaaa

SEQ ID NO: 37449 - DNA, 336 bp, Zea mays
  Clone ID: MRT4577_134157C.1
ggcgaggtcgagctgttcgagtctaagggcgtcggccacgcgttccacttcgatatgttggactcggagcagggcgtcgcactccaggagcggatcgtggctttcataaacaaatgaaaaccgagacgataaataagagttttctttatgctactattataccatatttatgagttgtttggtttggtcttcttttttttttgtccgctatcgattcacagagtaaatcgattgtttggtactttggtccattttatccgctgcggcgctgcctatccacggagtaatgcgttgtttcgtttttggttagaacaatttgtattgattcacagagct

SEQ ID NO: 37450 - DNA, 271 bp, Zea mays
  unsure (1)..(271): unsure at all n locations
  Clone ID: MRT4577_134158C.1
tgttgttttttgcgccaaagttgcctggcttttagcatcgtttgntgngtgaggacacacctcncctccgaataactngaacnctagggntntntgttctctcanatgaagctttgcctgttatattanataatacttccgtgnnacgaagcngtnagtggctngagtgnatagaatttggttggtcagtgcctccagttgtttggtctaccgttcaaatgccttattattctgcnagttgttttgaactaggcctcatttttttccagnc

SEQ ID NO: 37451 - DNA, 832 bp, Zea mays
  unsure (1)..(832): unsure at all n locations
  Clone ID: MRT4577_134159C.1
cattgggtacctcgaggccggccgggattgcatcccacctttgcatttcgctcgcttgcagagcttgagggtcccgtaatggacgttctccttgctgcagtcgtaggcgagctaacaactagatccataaatttcctcatcagaaactgcctgaagccaaccgcaccggacgtggaggaccgcctccgcaggatcctgctccgggcggaggtcatcgtggaagaggccatggggcggcagatcacgaaccaagctatgctccagcagctggacgtgctcagagaagccatgcaccgaggccattacatcctcgacaccttcagctacgaatctcgcagcaaggaggaggaagaggaggaggaggaggaggaggaggccagaggtcatggcgcgtccaaagtaaatcctctgcaaggtctgtgctcatcgccatccagtagaaatagaaacacgaggatcttggaacagatgcggaaatcggtcgaccatctaggctccctgatccgtgacgtccaagagctggtggtgttcttgacgggctatcctcgcatcatactacatcgccagccttacagcatgcatctcctactcagcaactgcatgttttgccgccagatggagaccgagctcgtcgtcgacttcctgctgctgcgcgcacgagcggatcatgcacctgaaagggaggctggatgtgctgccgatcgtcggccctcgtaaagtcggcaagagcaccctcgtcgcccacgcttgcagggacgaaagagtccgcggncgtttctcccagatactgttcttgcgggacccaaccgcggtggtttcacaggccacgacg

SEQ ID NO: 37452 - DNA, 495 bp, Zea mays
  Clone ID: MRT4577_13415C.1
gggttgggggttttttttttttttttttttttttttttttttttttttttttttttttttttttttttttttttttttttttttttttttttttttttttttttttttttggggccctggggttggcccgggaatgccggcccggtgcgggggggggggggggtttttcttttgggggggtgttttggggctgggggttctcagggtaattggggttccctgggggaaatggaaggggggccaaatgggggaaaaaataaaaaacggagggaaaaaggggaaagccggtttttccaaaggagggagtaaactaaaaaaacccgggtggggctaacaacccggttggcagaggggaaaccgggggggccccccgcgtgaaggaaagggccaacccgcgggggggggcatttttggtattgggccccaaggggggttttttttaaaccgggaaaacgggcaacactggattgccctaccccgcggggccctggaaaa

SEQ ID NO: 37453 - DNA, 798 bp, Zea mays
  Clone ID: MRT4577_134160C.1
atggactctaaggtcgccgctttgtgcgacgagttgcgcaagctgaacatggaagtggtttccccagttactttggattatatctcagttgagccaaccttacaagagcagataatcatggcacagattggtgacaggggtgttcaagtgattaaggaaatgctcaatcaaaagttatcaatccagcctgaagatggcacccttcgaggccttatatgggagaagatgaactggctagctaaccagacaagaaggaggtcccgggcctggaccgaggtcagattcattaagaaaaacttagaggctgctcaggccaggcaacagagctatcatgataagaggagaaagcctctacagttcgaagtgggggatcatgtgtacctcaaggtctcacccacaaaaggtgttcagagatttgggatcaagggcaaattagcccctcgctatattggggcctatgagatcaaggagacttgtggacctgtagcataccaattgaagctcccacctcacatgtcggcaattcatgatgtgttccatgtgtctcagctgaagaagtgtgttggcttaccaacagaagtactatcagaacctgagttggagatagaaccagacttgtcatatcaagagcaacccatcaagacattggaccataaggaaagatcaactcgagcaaagtcaatcaaaatgtataagatccagtggagtcaccattcagaagaggaagctacttgggaaactaagagttttctgcgctcacactaccccgaatttctacctaaagagatcggtacgtaa

SEQ ID NO: 37454 - DNA, 271 bp, Zea mays
  Clone ID: MRT4577_134161C.1
gcaaccctctagagtgagtcgtattagaatgggatcggcaaaggtacatgctacgacagcacgcgcaccacacccatctctagcttacttataagaacattcatgtcgttggggataaactactcgttagtgtgatctacgtgatccattagcgtcagtgctatggatgcatgatcatgagttgatcttttagcatctacagtacaggaataatatgacaatgtggcacgtttcctggaagcatgtggactgttcgacgaagggctcgaga

SEQ ID NO: 37455 - DNA, 544 bp, Zea mays
  Clone ID: MRT4577_134162C.1
aacattataatggatatatgttgagaaatcatagatatacatctatcagggccggagagaccttcgtacgtttagagttctagttctaaatcctgagccactgaccagatgaaattgtaaatataaaccaagagcaatccatattaagataaaacaattcgtgagtgaaaactaaaagtaaaatcaaacctattatgcatgaagaaattcagcgtttaatgtccatgaaaatctgagggagggagaggaagcgcacggcggcaaactgagttatggcttccttccagttcctgctcatggtgtttgtgatgctcatctgcgcgtacagcttcctctctagctcctcctgcaggccattgacgcactctcctatgatggcaccgaacacttccagctgcagctcattctccgactgcagatcagacaccgacgagttgaccgaaccaagcatctccttggcctgccggaacacggagcccatgagcagcttcagggcgttgaacctctcatcaatctcaatcaacatgacatcaagcgacatgcc

SEQ ID NO: 37456 - DNA, 461 bp, Zea mays
  Clone ID: MRT4577_134163C.1
ggtgcccggggaaaaggcggtaatgacgactccccccttccttgtggctgctgctggtaccatatcacagaggtgtttgtcagagttgtgaaggcccatccgcttgggcatcaaggaagagcttagctttactgccatttttgtaatctgatccggttggtgggccagggcaggcaaccggggggagttattggcatctgacaacgcccccccaatctttgccatatccttatacatataaaacgctctaactaacacttgtttagttcgtccagaatctctgtacacgcacgcacgcgtgtattattatgtgtataagtctcggccgttccttttccttggtgtggtgtagctccgcgacccagctgagatgatgcttctccgtgcctgctcaaaaggcagcaacacggttccagatgatcaaacgatctatcgaagcaatacaaaacgaggcgcaaaga

SEQ ID NO: 37457 - DNA, 310 bp, Zea mays
  Clone ID: MRT4577_134164C.1
gcgtccatgcgtccgtccacgcgtgcagaagcttttgcattccgtcgtatcgcgtgatcccgccgtcgagataagtgatactcgtatcacgatttcaatctgagcccgcccactgtttgactccgacccgtctggtactgatggatccaaagtagcggaatggatcaggctgcacgcatgatccgcatacaacgcgcctggcgctggttctactgggaggtacacgggtggtttcttacggagtgcctcgaagagctcaacggctcctaggactactagtatacccctacttatggtgctggttatggtt

SEQ ID NO: 37458 - DNA, 356 bp, Zea mays
  unsure (1)..(356): unsure at all n locations
  Clone ID: MRT4577_134165C.1
cgagacaaaagagacgatctcatttaccgaatgccttagctccaaatttatcaacttttatnntggcgggtgtccgagatatacacttaacctgcgcttttaactgatataattaatctacaatgagtccagagacgatcctaggatcatataacctgctcaagtcgtacaaccgccactcatccttaaatttataaacctaaaacattaggtctcgcacagctaatgataaaccttaaaggtcgtcaaaacaaatactcaaaaatttctgccagtgcacaataatccaaagcttgcactagaaatcgaaaagcgtttccttttactcatgctgatcaaccttaacgggctttggc

SEQ ID NO: 37459 - DNA, 2220 bp, Zea mays
  Clone ID: MRT4577_134166C.1
gaacatgccaagaagcattactggatcctcaagaattggccaactatcttcttcaccacaagcaaaggatttatcattttccaacagtgatgtctcagacgaaactaactttggcattttcaatctggcgaagttctccaagaaaagtgctcttccctgtgatatatgcatgcgatgtgatacaatattggaccgtatttttgtttgctcgagctgtaaggctactgtacacttagattgctaccagagtctggtgtatcccactggcccatggaaatgtgaactttgccatgagatgccctcagattctgttacctctggtgaacaatcagaccaaaatggtccgaaagcttgtttggtgcaatgtggtttatgccatggaacatctggtgcttttagaaagactgtgaagggtcaatgggttcatgctttctgtgctgagtggctgttggagacaacattcagaagagggcaacataatccagtcgacggaatggagaggcttcatcacaaggataaagatacatgctctatatgccaccgctgtgttggtgcatgcttgaagtgctgtacattagattgtcaaattacttttcatccttcatgtgctagagatgctggtctttacatgaatacaaaaagattgggtaatatgttacaacataaagcatactgttgtagacacagtattgaacagagaaaggcctatagtcaacaatatggtcctgatgaaatcaagggcatgaaacaaatgagggttgaactggaactattacgtttcctttgtgagaggattgttaagagagaaaaagtgaagaaagatttggttggatgtgcacatgacatacttgctgcaaggaggataactgccgtctcttctttgtggacttcatgttatacttctggacctggagcaagttcagaatctgccactacttctgttaataacaaatcatatggtggaacaattcaaaggtctgatgatgtcacagtgagattggaagatgtcacagtggacagtacagttaccaaaaaacatactgtcaggttttctctgcataacagggacactgataggaacactgctgacagttccacatcaacaatatcatacaaacggaagttggatgatggggaatcacttgcattcaagagtcatcccggaacaccagctactgccttgttggagtcacgggatgcagaaaagccaatagataaaaagctcagggatatgtatcaaaaggagcttgtcatggttacttctcaccaagctttgttgaagaacaagacccctccagagagatatgtttacactcgccgcagctccatgtccaaaaggaagcaatgtagtcagcatgtagttcaaagacctggtggatgacagcaggcgaagtcgcttcttgggatatctggataataatattcttggaagctcgatgcagaaaaggacaaagtaaatacagcaagcggggctggccattaatcatgacagccgcaggggctggcgcgtggccgcactggaatcggaaatttggtgcaaattgggctcttcgaagatttgaccaattgagcccatgtcaccttggagtccaacatgcgctgaattcattcactaatttagtcaagggcaggttttgtgaaatacgcccaattgccagtatggcgtcttcacattatgtcgaagaaggaaatcgattgagttatgtgtggtgaaagaaagtgggtagacaaatattactgactggtgaaagctaccaataggccatccgcacattaatgaccatgtttaggagttgttgctatgtactaacagaactgcatgttttgttgtgtggctccattctgacttgtgaaatgaactctcggtaagtcatagggcatttcatgtttgtacaggcatgtaggtttagctttctggtatgtagctaaattcaaagcatcatcttgtagccttatgtggttaaccagatctttgatctattagttaatttagtaaaccaagagctgccttgtgttcgtatgggttgagtcgggcttttactgtattgatatctattattagcgtgaaggctgtttattgccgatgttgagcttcataagcattatctttttttaacaaaacacagtgcttgttttgtgaatacttgtaacctcgaatgtgtaataaatgtagcacatgtctattcaactcaaaaaaaaaaaaaaaaaaaaaaaaaaata

SEQ ID NO: 37460 - DNA, 843 bp, Zea mays
  Clone ID: MRT4577_134167C.1
cctcgaggccggccgggccgagaggagtgtatcacttcactgagggaagaagtgaagcggaatagacgccgtcgacaatgggagagagccgcggcagcatcgcctttttcgccacctaccggccaccagtgccgctagacatcttctctgtgcccatctcgccgtcttcgatccgcgacgaggtacacctcacggacggcgtctcctacaactacaactgccgccccatccccaaggacgcgctcaagtccctgctcaagcgccccaagctcgctgccgacggcggcgccaccgacgccgacgtcgacagcggccgcgtctccggccttctcttcgtctccgagcgggacgatggcctcgagacgctccgcgtggccctgcatttcaaggactccggcgagcaggcctgcaaggtgttctccctggctgacgtcttcggcgccgccgacttcagcggcgtgcgcctcgaggatagcggctgcgtcggcggcggctacaaggtgggctctcgcaccgtggaccactcgctcatctacgtttccaccaaggagccggtgcaagagcgacgcagcccgtggaccgtcgtgtacaagaccaaccttaggaccggcaagaccgagcgtttgactcccaaaggtcaatttgatctgagcccagctgtgtcgccgtcggggaagaaggtggccatggccacgttccggccggagggctgggagggcgagatcgaggacctgcagactgatatcttcgtgatgaacgtggagaggccgccgatgcggaaacggctgattaggaacggcgggtgggcgtcgtgggccagcgaggacgtcatcttcttccaca

SEQ ID NO: 37461 - DNA, 603 bp, Zea mays
  Clone ID: MRT4577_134168C.1
gccggcggggccggccgggaaccacattctcaaacaccatcaactacaacaaccttccaaacaactccatcaaccacctccaacatgtctgacgctctccgccaatccaccaccgacaaggctgcctccagcctgaagcccgactcccagaagtctggcctcgagcaggctggcgacaaggtcaagggtgccgccgacaaccttgccggctctgcccagccctccggcgagaagtccgccacccagaaggcctccgacaccgtctctggcagcaacgagaacgcctccaagcagggccagtctgtcctcgactctgcctccgagactgtcggcaacgccgctcagtccgcccaggacgctcttggcctcggcaagaagtaaacacttctctcatgaggacctgacgcctctctcccaccagccgacctgataccctttgcttcagaatggatacccggaattattttccacccgttttggtcggttatggaggttgacgagggcgaaaatttcatgatacgattgtatgattttacataagttaatcacttcacgatacgaatcaattgtctaaaccgaaaaaaaaaaaaaaaaaagcggcta

SEQ ID NO: 37462 - DNA, 2504 bp, Zea mays
  Clone ID: MRT4577_134169C.1
atttactccatttcctcacccggcacagactgacccaacaaacgcacccccaagctaccaacgcacgcgaagcacgtgcggggggatacagctttccctttctggagcgggtgccccttctcttctctaggtctcttctgccggctagtcagagatcagggagagaccagagcaaacgacaaccaccgcttgtttcatcatgaatcgtggaggagaaccgaaaggagcaggagccttttccggcaggtgcatctgctagagccggtcgtttgaacacaggggtagcgagaggaggagggcagccgagcaggagcgtcgcagcggtgggtaagcaggagcaacgaggacgacgacgacgctgagaggtttccccgttcccgacggacgtcaacgaggcgtgcccacgcgtccgcctacttgcatagtagttctcaatcacaaagccatggggcgaaaattaattaaattaacaactcggtaaaactcaaattgtcttgccactgtaaatggttcggatatgaatcgcatgatgcgtgagcccgtacgtgctgatattatatatacagacaagtgggcggccgggccgggatccctcccgatcagatccctcgacaatggcactccaggcagcctacgagtacctgcagcaggccgtcggccatggcgcgtggtcgtccacgcagacgctgacgctgctgctcatcgccgtacccaccgtactactgctgctagcgtccctcgccaagagcacgtcgtcgtccggtaggggcaagccgccgctccctccctcgccgccgggcaccctccccatcgtggggcacctacaccacatcgggccccagacccacatctcgctccaggagctggtggccaagtacgggcacaacgggttcctgttcctccgcgccggcgccgtgcccaccctgatcgtgtcgtcgcccagcgccgccgaggccgtgatgcgcacccacgaccacatcttcgcgtcccggccgtggtccatggcctcccacatcctccgctacaacacctgcgacgtggccttctcgccgctcggcgaatactggcagcagaccaggaagctgatgaacacgcacctgctcagcaacaagaaggtctactccttccgccatggccgcgaggaagaggtgtgcctcgtcgtggacaacctccgcgaggcggccgccaagtcgccgtcgacggccgtggacatgagcgaggtgctggcggcgtacaccaacgacgtggtgagccggtcggtgctgggctcgacgcaccggaagaaaggccggaacacgctgttcagggagatgaccatgaccaacgtggacctcctggtggggttcaacctggagtactacatcccgcggtggccgctgacggacctgctcttcaggctcgtgtgctggaaggtcacgcgccacctcaagcgctgggacgccctgctggaggaggtgatccacgagcacgtggagatgaggaagctgtccggcgacaaggagaaggagtcggacgacttcatcgacatcttcctctccagatacgaggagtacggcttcaccatggataacgtcaagtccctcctcatgaacgtgttcgaggcagccatcgagacctcatatctggtgctggagtccgccatggccgagctcatgaaccacaggcgcgtcatgaagaagctgcaagcggaggtacgggcgtacggagcggagaagaagctggacatgatcagggaggacgacctgagcagcctgccgtacctaaaggcgtccatgaaggaagcgctgcggctgcacccaccggggcccctgctgctgccgcactactccaccgccgactgccagatcgacgggtaccacatccccgccaacacgcgcgtcctcgtgaacggctgggccatcggcagagacccggcggtctgggagaagcccgaggagttcatgccggagaggttcatgcgggacggctgggacaagtccaacagctacagcggccaggacttcaggtacctgccgttcgggtctgggcgccggatctgccccggggccaacttcgcgctcgcgaccatggagatcatgctcgccaacctcatgtaccatttcgactgggaggtccccaatgagaaggaagacggtggcgggaaggtgagcatggacgagacgttcgggctgatgcttcgcaggaacgagccgctctaccttgttcctagggccgtctagctagctagttactgtgccgccgccgcctcctatccaagaatgcatgagtcttagacgtgtggcagtaataattgcgtggggtgtagtaaaataataagcacgtttgttgagttgtaatggattcacattatgtgcattcgagacaggtccaaggaattgtatctctaaagtgaaaatttcctttttcaccacgatgaatgcatgtcatactctctaaaaaaaaaaaaaaaaaaaaaaaaaaaaaaaaaaaaaaaaaaaaaaaaaaaaaaaggggccgcgtgtacc

SEQ ID NO: 37463 - DNA, 311 bp, Zea mays
  unsure (1)..(311): unsure at all n locations
  Clone ID: MRT4577_13416C.1
cttcccatgactgataaaccaagaggaggatatgtacagtcagggctagtttggaaactcatagaggaggatatgcacagtcagggctagtttggaaactcatataccctcgaggattggggggatttgagttttcaaactancggctgtacttcctatcctgaaaatgtatgacagcatggcagtaacctgtgcgggggcctacatcaactgtatcagttgtgcaaattcctgatgagtcagcttgccattctgaaacaaaacatcaattctatggaagntattggagacctgcattttaccaaactgaa

SEQ ID NO: 37464 - DNA, 2372 bp, Zea mays
  Clone ID: MRT4577_134170C.1
tattctggtgtcctaggcgtagaggaaccacaccaatccatcccgaatttggtggttaaactctactgcggtgacgatactgtaggggaggtcctgcggcaaaatagctcgatgccagaatatccctcccgatcagatccctcgacaatggcactccaggcagcctacgagtacctgcagcaggccgtcggccatggcgcgtggtcgtccacgcagacgctgacgctgctgctcatcgccgtacccaccgtactactgctgctagcgtccctcgccaagagcacgtcgtcgtccggtaggggcaagccgccgctccctccctcgccgccgggcaccctccccatcgtggggcacctacaccacatcgggccccagacccacatctcgctccaggagctggtggccaagtacgggcacaacgggttcctgttcctccgcgccggcgccgtgcccaccctgatcgtgtcgtcgcccagcgccgccgaggccgtgatgcgcacccacgaccacatcttcgcgtcccggccgtggtccatggcctcccacatcctccgctacaacacctgcgacgtggccttctcgccgctcggcgaatactggcagcagaccaggaagctgatgaacacgcacctgctcagcaacaagaaggtctactccttccgccatggccgcgaggaagaggtaataaattgaggaaacgaaaattaaaggaataatcctccgtcctccaagaaaattaaaggaataatcctgcatgaattaattatacgcgcaggtgtgcctcgtcgtggacaacctccgcgaggcggccgccaagtcgccgtcgacggccgtggacatgagcgaggtgctggcggcgtacaccaacgacgtggtgagccggtcggtgctgggctcgacgcaccggaagaaaggccggaacacgctgttcagggagatgaccatgaccaacgtggacctcctggtggggttcaacctggagtactacatcccgcggtggccgctgacggacctgctcttcaggctcgtgtgctggaaggtcacgcgccacctcaagcgctgggacgccctgctggaggaggtgatccacgagcacgtggagatgaggaagctgtccggcgacaaggagaaggagtcggacgacttcatcgacatcttcctctccagatacgaggagtacggcttcaccatggataacgtcaagtccctcctcatggtaatcgattccatcgtcgtcctcctcattattattttgggctagaatccatgcatatatataggctgaggctctcaacgtacttaacttccttgcgtccgggccggccggcttgacaaaacagaacgtgttcgaggcagccatcgagacctcatatctggtgctggagtccgccatggccgagctcatgaaccacaggcgcgtcatgaagaagctgcaagcggaggtacgggcgtacggagcggagaagaagctggacatgatcagggaggacgacctgagcagcctgccgtacctaaaggcgtccatgaaggaagcgctgcggctgcacccaccggggcccctgctgctgccgcactactccaccgccgactgccagatcgacgggtaccacatccccgccaacacgcgcgtcctcgtgaacggctgggccatcggcagagacccggcggtctgggagaagcccgaggagttcatgccggagaggttcatgcgcgacggctgggacaagtccaacagctacagcggccaggacttcaggtacctgccgttcgggtctgggcgccggatctgccccggggccaacttcgcgctcgcgaccatggagatcatgctcgccaacctcatgtaccatttcgactgggaggtccccaatgagaaggaagacggtggcgggaaggtgagcatggacgagacgttcgggctgatgcttcgcaggaacgagccgctctaccttgttcctagggccgtctagctagctagttactgtgccgccgccgcctcctatccaagaatgcatgagtcttagacgtgtggcagtaataattgcgtggggtgtagtaaaataataagcacgtttgttgagttgtaatggattcacattatgtgcattcgagacaggtccaaggaattgtatctctaaaaaaaaaaaaaaaaaaaaaaaaaaaaaaaaaaaaaaaaaaaaaaaaaaaaaaaaaaaaaaaaaaaaaaactgaaaaaaaaaagaagaaactaaaaactaaaaaaaaaaaaaaatagaaaaaaatagtaaaaaaaagaataaaaaatataatggggggcggttttaaaaaaaaaacaggtaacaccctcgagagtccggctaatattttttttattgggtcccccaaaaataaat

SEQ ID NO: 37465 - DNA, 394 bp, Zea mays
  Clone ID: MRT4577_134171C.1
tcctcacgcatctaacacccgtactcgcctcgccaccatactacacagcatgacgtcggactctcaacggccggccctctaccaagaggaggtaaccctccttgacaccgccaagactcactcttaccacttcaacaagctcatgagcaaacccatcaaactaacacacctacacctaccaccatttattcctcattctaaaaactcatcttctttgtctgatctacctcaccttgcatatatcctcaaaacccacaatgataacgccaaacatgctcttgaccatgaaccacatggacatgaaatgcactctttaccatgcagactcttctaagcatatctaatctacatgctctttagcaaaaaagcttatgcccttacactcatgctcata

SEQ ID NO: 37466 - DNA, 418 bp, Zea mays
  Clone ID: MRT4577_134172C.1
acaccgcatgcactcttacacaagcgctcaatactgttctagcaatatataaaggaatagatcctccatgcttggcggaagttaaagacatttttcggtcatcaatagctacaaccagaatacagacgactctgcatgccctaatagggaccctgctatcaacgcttatatggcttgccgaatgactactataagaagcgattcactaacaaaaactcagatgaagaagatacttaaaaacatggctggattgaggaccacttgaaactccccacaccgtataccaacaataccttacctagctgacctacgaactatgaacacgaaagatatcacgattaaacgataggccctgttagatgcctgcctgccgtgcgtcgggcgcatacgctcaacaaaatgatcgttctatgctctt

SEQ ID NO: 37467 - DNA, 292 bp, Zea mays
  Clone ID: MRT4577_134173C.1
gattgtagagaagatggtgagcaaaaggttcttttggactccatcttagctctgctgagacagtatcttaatagattgcaggtagccactgacgaaggctcaaatgaagtttaccttcaagtcgatgctattactataattgaaaatggagatataaagaatgcacatgtacaacatatgaactgtgaaggtggcattcatgcatcagatgagagaaatatgcatgtaatccatgagtctgacagccagaaaagaatatccccaacagaatctgaaacatgtccatcgcctg

SEQ ID NO: 37468 - DNA, 1977 bp, Zea mays
  Clone ID: MRT4577_134174C.1
cctcgaggccggccgggacagcttccaacgccagcccgagctcattccaaaacatcactccctcgcgaaccccaagaactgcagcgacggcaatggcgatggcggcggagggcgcggcgagcgagccagagctggtgtcgatcccggcgacgccgcacggtctgtcgacgccggagggcgcggccacgccgaccggagcgggcgggggcggcggcggcaggagcaagggctccgggaccccagggcgtcgcgtggtggagggcctgcgcgggtacctggaggacgtgggccacctcacgcgcctcgacccgcgcgacgcctggctgcccgtcaccgagagccgcggcggcaacgcccgctacgccgctttccactccctcaacgccggcctcggcttccaggcacttctcctcccgctcgccttcccggacctcggctggagctgggggataatttcattgactattgcttatttctggcaactgtacacactgtggatcctagtgaagcttcatgaggctgtgccaggcaggaggtacaacagatatgttgagcttgcacaggcagcatttggagaaaaaatgggaatgtggctggctcttttcccaactatttatctctcggcaggcactgcaactgcactgatccttgttggaggggagaccatgaagctgttcttccaaatagtgtgtggcccactctgctcgccgaatcccattacgacagtcgagtggtacttggtgttcacatccttggcagttattctttcccagcttccgaatctcaattcaatcgctggtctttcactcatcggtggggcgactgcgataatgtactgtaccatgtcatgggttctctctgtcagccaaccgcggccaccgacagtatcttatgacccagtgacatccaattctttcggtttatccctattctcaatcttgaatgccctcgggataatagcgtttgccttcagagggcacaatcttgctctggaaatacaggcaacaatgccatcgactttcaaacatccagcacatgtgccaatgtggcgtggggccaaagtagcgtatctcctgattgcaatgtgcctcttccccgttgcagttggaggctactgggcctacggaaacatggtgccaccaggagggatgctggcggcactctacgccttccacagccatgacatctcgcagggcgttctcgcgacgacatgcctcctcgtcgtgctcaactgcctcagcagcttccaaatttactccatgccggtgtttgacagctttgaggcctactacaccggccgcaccaaccgcccgtgctcggcatgggtacggtcagggttcagggtcttctacgggttcctctcgctgttcatcagtgtggccctgccatttctctccagccttgccgggctgctgggcgggctcaccctgcctgtgaccttcgcctacccgtgctttatgtggatctgcgtcaagaagcccgagaggttcagcttcagctggtacctcaactggggccttggtctgctcggcacagcgttcagtctggcgttctcgctgggtggcgtctggagcatagttaacaatgggatgaagctcaagttcttcaagcctaactaggtacatagattgctcgcttgctccaatctgcatgcaagttattagaagaaattagtcgtggaactgaatgttacatattactactacataattatgctgtatgacgactcctacattggcttggtaagaacaatggcgtgtatgtaagttaatgtctgagaaattcgaaatctgaggggctttgcgtatagagatatttccatgtattttagtatcagctgctaaaatctcgattcctgtatatggtggtggttgtctgcttcagtgtactttgaactttagaaagttgtcagtaatttgaggacttcatcagcttcacgttcgaaactttgtactgatacactatgaatcctttcgt

SEQ ID NO: 37469 - DNA, 405 bp, Zea mays
  Clone ID: MRT4577_134175C.1
cggacgcgggggttgatgcacagtcatctcatgtggatggtgtgatcattatgatcgagtggtattctacaacggctgacaaagaacacacatgtcttacaaacatgaacaggagcttcaaagaaaatagaggctgttatggactgaatgatacgtacagactgactgggatcttatcagaggtgaacggagtcgcagctaatcatgatctcacaggcatacatattaccaccctgcccattgatccacaaatggattcattttacgtgagtgaaaagccatgtgtaccactgtgctgaaacatattggaaactgatggacctattacatcctctacatatgggggatagacaacctagcatgatccttgtggaactgcatctgcgacagtgtaatacgtggatg

SEQ ID NO: 37470 - DNA, 441 bp, Zea mays
  Clone ID: MRT4577_134176C.1
tggctctggacctttgggctgatttatgtgcttggtgttggttacggtgtctgtccctgatgagcctgggtgttttcctactacttcgtgggagtaggagaagaagatgtgttccagggggtctgatgtgtagaaggttaatactgttctggttaaggttgctgtgtggacttcttgtatgctgtccggatttaagggtacggacaagacgtcttagctttttgatggtgatgctactactataaacgacggagtgattacttcggagtagacggacgccgataattagacagtaaagtcgacggcggagtcgctttgcagctaagatcacgaaactggggacggcattattggggcggcagctacggtaggggtctcctctgagtaggtcgagaagtcctcggagtgcggcacctattttaccagggcggtcgaaggtca

SEQ ID NO: 37471 - DNA, 361 bp, Zea mays
  Clone ID: MRT4577_134177C.1
ggaccgagatgagggttttacaggacgccaacttttacagtgccacgagaaggaacaatctccttaggttgctgaccatattgagtcattacgaccaggagcgacacagtgggataccacttggttatcattatatgagctcaacggggacatacttgcctatgttgcacgtgcaagcacctgtgctgaggatattgccgcacttatgtaaattgtggcacctgcacttgattcaacacctgaaggctcccatgtccactgtaaacctttagcaccagctatgattggagcacgccctcttatggatccaccagggataacagttgttggtgctgccattctaacatgccttcaatatatt

SEQ ID NO: 37472 - DNA, 1857 bp, Zea mays
  Clone ID: MRT4577_134178C.1
ctcgaggccgcccgggaggccgggccccaataagcagcgagagagggtcgtcgaggtcgtctctagctagctagagctagctgctaagagagatagagagagagacagagagagagagaggtatacgtaggaccgccggccggcaactaactaacatgtcgtcgtcgtccgggacgacgatgccgctggcgtaccagacgtcggcgtcgtctcccgagtggctgaacaagggcgacaacgcgtggcagctgacggcggcgacgctggtggggctgcagagcttcccgggtctggtggtcctgtacggcggcgtggtgaagaagaagtgggccgtgaactcggccttcatggcgctgtacgcgttcgcggcggtgtggatctgctgggtgacctgggcctacaacatgtccttcggcgacaggctgctgccgctgtggggcaaggcgcggccggcgctgagccagggctggctggtggggcaggcgggcctccccgccacggcgcaccacttcgccagcggcgccctggagaccccggccgcggagccgctgtacccgatggccacggtggtgtacttccagtgcgtgttcgcggccatcaccctggtgctggtcgccgggtcgctgctgggccggatgagcttcgccgcgtggatgctgttcgtgccgctctggctcaccttctcctacaccgtcggcgccttctccgtctggggcggcgggttcctcttccagtggggcgtcatcgactactgcggcggctacgtcatccacctctccgctggcttcgccgggttcacggcagcctactgggtggggccccgggcgcagaaggacagggagaggttcccgcccaacaacatcctgttcacgctcaccggcgcgggcctgctgtggatggggtgggccggcttcaacggcggcgggccgtacgccgccaacgtggtggcgtccatgtcggtgctcaacaccaacatctgcaccgccatgagcctcctcgtctggacctgcctcgacgtcgtcttcttcaagaagccctccgtcgtgggcgccgtccagggcatgatcaccggcctcgtctgcatcacgcccgccgcagggctggtgcaggggtgggcggccatggtgatgggcgtgctggccggcagcgtgccgtggtacacgatgatgatcctgcacaagcggtcccggctgctgaagcacgtggacgacacgctgggcgtcatccacacgcacggcgtggcggggctcctgggcggcctgctcacggggctcctcgccgaccccaccctgtgcgcgctcttcctgccggtcaccaactccaagggcgccttctacggcgacggcgcgcagctcggcaagcagctggcgggcgcgctcttcatcatcggatggaacgtggccgtcacctccatcatctgcgtcgccatcaacgccgtcgtcccgctgcgcatgacccaggacaagctcgaggtcggcgacgacgccgtccatggcgaggaggcgtacgcgctctggggagacggcgagctctacgacgtcaccgagcacgggccacgcgccgccgccgccgtcgcgcccgtgtccacgcccccgaattgaaatagctgcgagtaccctcctgtacgtccgtccatccatcatggggtgttgataacccccgttcattgtgaaaaagaccaagtgcacgagctagctagctagtaggctttcctgctgctgttcctcctcttcttaatccaacatcgcatgtactgtacattgctgtgtatgtgaacgtcgcatgtagtgtgcattgccgtcgcatgaaaaagacggcataccgaagaatcagtcaacaaaagcttccttgtttcct

SEQ ID NO: 37473 - DNA, 133 bp, Zea mays
  Clone ID: MRT4577_134179C.1
cgcaagctcggaatatgggtctcgggctgttccacaaaactggtaccactcctatagtgtagaatgataaaccagggcgagaacatgtggcctacgtggggttgcatcgtaagccatcattgagcaaaaccat

SEQ ID NO: 37474 - DNA, 2589 bp, Zea mays
  Clone ID: MRT4577_13417C.1
ccggccgggttccgccggccgttcccggatcctgtcatccaccctcgcccaaccgacggctaccggttgtaagattggaatcgtttgatggccgccgccgccgcttcgcctccggttcctttaggacccgatgcctccgatctactggacggggatctccgtctcaagcccgctgtggcaatctcatgggattccgaagcactacacagccatgcagaaaggtgtgagatagagtcaaaagtgtgtgtcattgatccttctctgcttccagctctagatgatttattgcaggacatctatgaatcattgcaaccacagccagtggactatgaacaccgaaaccttatggttaatgttttcaacaaaattgttggagaaatttttggtaaaaataatgagcttccaattgtggaaccatttggatctttcacaatggatctatttactcctcaaagtgacctggacctctctgtgaacttcaatactgatgcaaatgatcagtatcctcgcaagaacaagatttctgctattaggaagcttgcacatgttctattttctcatcagcgtcatggtcgctgttatggtgtttcacctattgtgactgctagagttcctgtactgaaggttattgataagggaactggtgtagagtgtgatatttcagtagaaaacaaagacggcatgtcaagatcagccatatttaaatttatttcatcaattgataaaagattccggatactttgttatctgatgaagttctgggctaaggtacatgatgtgaactgccccaaagatcgaacaatgagctctatggcaattatttctttagtttcttttcatttacagactcggtgtcctccaatattacctgcattttctgccgtattgaaagatggtacagattttgcaagtattgagaagaatgtatcactattccagggttttgggcacagcaataaagagtctattgctgaactttttgtatcactaatgagtaaactagtgtcagtggagggtttatgggagcaagggctctgtgctagcaattttgaagggacatggatatcgaagacctgggcgaagggtgttggcaacttgaatgttgaggacttcttggaccgatctcagaattttgccagatcggtaggggtgaaggagatgcagaaaatatgtgaatgcctaagggctagcgtttctgatttgagcaagttttctaagggtgaaattgctgcgcccaagctaaaggccctgttgtttaagcctttgaaccaggttaacccagtcattaaaccccatcagaaaactattaagaggaagcgtactaatccaaataagaccagaactaaccctattcagaaaaatgctaagaaaaagaaggcccttgagcaggataaattagccatttctcctggtcagaaagatggtaagaagacccttgatcaagagaagtcagttagttctcccattcagaaaggtgctaagaagaccaaaccccttaaccaggataagttagtcatttctcccggccaggaagatgacaagaagccccttgtgcaggatgagccaatagtagtgtctcccatccagaagaataacaataagtatgttgatcaggagaagtcccttcagcaggagaagcaaatcatctctcccggacagaaagatgataagaagagcagcaaggtgggacctgactcagcatgtaatcatgtgcaacagaagaaagtgaaggctactgtatctaccggccgtgctgctaatactcatgtttctagttccaggcctcgctctgtttttatcccccaagcacattggcccagccagccaattgttgatcggtttgcgcatatacctgagcacctgatcagcccttctgcttttagttatgggttgccacaaccacttatgcatccagcctatcctcatcctcattctcatcagggattggtaggtcaaggacagggtaatttccttcatttcaatcctggtattgagctgcagcatcaaggccaggctttcttcggtcctccagctgtctaccaccccatggtgaatgggtttcacccattcggtatcaatggtgctcagcaagtgcagtacatcgacaataggatggtgcagaggccaccatatggttttggcccaggtttctggggatgatggttgcagcctgaggaaaggttggttgctaactagtgggggtttgaggtgaaagttgtcagttcaaagaaaaaaaagctgttgtgtctaatatactcaaagatttagctttaaataggggccagtggaaaatagctaaccatgtgtctgaaccttgatttgtggtttttgttcggtttcagctctagcttaccttagaagtaaaatgttctgttgatgttggattttaactctagcctatcctgggattaaaaggttttgttgttgttgttgtaagttgtaattgtaactgttaggtttgtactctagtctgatttaaaagtaaaaaggctatattgttgttgttgtatctagacctgtacaaggagaaataatcaaataaggaaaaaaacccaatgtgggaaaaaaagctgtaatgtcgtttgttct

SEQ ID NO: 37475 - DNA, 337 bp, Zea mays
  Clone ID: MRT4577_134180C.1
ctggggaaggcttttttaaaaaaaaatacaattttcctcctggtttattttaattgtcttagtgggtaaccccgcataacaagggcactggtgtacacccggccggtttaaacaggggaaaaagccaggaaaaaaaaaaaacaagttattaaaaaaaagaggggtgaaaaaccgcgacgaacattgacagaaaaaacacacccgccgggggggggggggcacccggaaataaaccgtccacccccacgggggcaaaaaggcacccccaagagaagcaaaacccaccacggtgggggggcaaagaaacccacccggggggcgaaaaaaaaacaaacaa

SEQ ID NO: 37476 - DNA, 764 bp, Zea mays
  unsure (1)..(764): unsure at all n locations
  Clone ID: MRT4577_134181C.1
ttgggtacctcgaggccggccggggccccgttccaatccccctgtctcgctatgattccccctgaaccctgcctcaatgcctcgttagcgcataagagcgctggatgttactgctgtctgggacctcggccaccacgttcagaagcccggcggtgcagggtggagtgcaccaggccaccgtcaagatcttctgcaaggtcgacgaggagtactgcctacaccgtccgctatcccaatgtggtgctgtaccccgccagccctgcgcgacgaggtatctatctatttgcgtatcaagagacatcgtcggcttctggaccacaggtcaaggactaggcaggtgaaccctgcggatcgccgcattctcagaccaggccgctgggctcgccatcaagcactctctctcatcagtcccacccgatgtagtggcgccgttcaacccggagtaccagcactcagactgtgctgtgtacggacatcggcgacgtggacaagggcttccgctgcatccgcatggagaactacatccggctcaacttcgacgtcttccacggagaccacggccactgcgaggtgcacgactgcaccaccgaggtgctgtgggagtgtgacaagggcgacaaccagagctggaagatcctgccctggggcgactagggctacgacgggggtggtagcagcggcgtcaacgcgtcccgcttcggaggnggagagcccacctgtcgcatctactgctaggccgactaatggttcagtgacacggtgcg

SEQ ID NO: 37477 - DNA, 446 bp, Zea mays
  Clone ID: MRT4577_134182C.1
gcttgttttttttttttttttttttttttttttttttttttttttttttttttttttttttttttttttttttttttttttttgagggattcatccactggggaccaaacatgcggcggggcttaattaacatcgaccggttacaaaaggggggcgggggcattgattgaggagcacacatcgatcatgagcaaaccccggggggggcaactaccacacccctaccatctgaacaaggggaggacaaaaaaaaccacactgttcactccacgggcggacaaacaaagggggggatctgaggggaaaacacatggacgggggggctcaaacaattaattgccggggacaaaattcggggggtatccccaagcgtttttggcaaccggggccgcaacctggtcaaaaaggttctcaatggggccctttcccgggaccatggccttcac

SEQ ID NO: 37478 - DNA, 199 bp, Zea mays
  unsure (1)..(199): unsure at all n locations
  Clone ID: MRT4577_134183C.1
ccgggcgccaagcccagcacggcagcgcaccaaacaccagggccaagccgaacaaggcaaccagcagaanagcaaaaaacgaaagccgaaaagaaccagccanacacgacgccgacggcnaggagacnaggacgacggnaacgaccagggaggcggagacgccaacgaacnncggaggggaccaaggaagggaaggaga

SEQ ID NO: 37479 - DNA, 417 bp, Zea mays
  Clone ID: MRT4577_134184C.1
ttttttttttttttgtaattttgtcaatttatttgcattctattttttttttttttttataggaaggaaccggaataaatgggcgaccttggtgaaaaatagggatttaactgggcccggctaatagggccaatctacgaccaatcgggagggccaccttaatcgtgcttaggccatttgagccaactagccgactttaaaaccttgctccgtccttacgcgaacagagttccattgccccctttaaaacctaggtccaatctttctcataactgacccccttaaaccagatcttttgaaatgtaaaattttaaaatctcggaacccaattgcttcccaggtgaatcagaaccaaagctgggtgttcccttaactttctccccaaaaaagttccaaaaccacggtatgggctcccct

SEQ ID NO: 37480 - DNA, 385 bp, Zea mays
  Clone ID: MRT4577_134185C.1
cgtcaacaacgtctgtaagtttttctttgtggggttctacaactggtgggtcatgttcgtgggcgagcacacgactcatgcgttcgtgttcaccgacatggcagaggacgcgagcgtgttggtggtgtttgtttggtgcacggtgtcctttatcatgtgtttttggtccacgaacgtatacttgtcacgtgtgttcatggattagttgttgtacatttactttggtttttttaaggtgcttttttttgtagtggtgagtttgttttgtaattttttcagtctttttatacattttttgccttattatagtttttttttcgtgtatgttcttttatctgtgcatttttttataggtattattatttagttctttcttattatttta

SEQ ID NO: 37481 - DNA, 401 bp, Zea mays
  Clone ID: MRT4577_134186C.1
tctgggtttcctccgcggcagacggcgatggcggagaccgtgcttctccacgtcgcgcccatggatctcctcgcgcttgccgacccatgcgggcccaccgcaccggcgtcctcttccacgcgccgtcctggccagaggaggaaggggaggagcgcgtgtgggccacaaccacaaatcccatccctcttccttctcaaacaccatcgccgtcaccgtgtcatcgcgggccgaagtcctctctcctccatctcaagcgatggcatgaggtggatctgtagcacgtaccaggacgcggtcgacgacgagctagggtgcgcgttcccgcccgtcttccccaccgaggcgctggactgccacgcttctgttgccactggacgtttgcgccgccatctgccgtgagc

SEQ ID NO: 37482 - DNA, 535 bp, Zea mays
  Clone ID: MRT4577_134187C.1
ccggccggggtatcccccatatatccccacttttcgtctcctttatggagcagatacggttcccgcctcgatccgatccgacgagtgcacggcactctttccccactccgatgcaactaatgggctgccgagggcgagaacaatatgataaccctcaccaccccgatggcgacgagatcgaggaggaagacgccgtggaggtggagtcccacagcatccgcctctgatcgaggatgactgagacgacaacggcatccctcttcctaaccttaactgcaagatgctatccaagggaatcaagtactgctacaagcacctgacatgtgcggctgctgctgcggcgtcgcctcgatggccggttccgacgacgtgggtgccggctccgtctaatgaaccgccggctcccgtgatgacctccagaagtggcccgctcaccccgccaaggtcgaccaggccacggttgtcgaccacatcctggctgcatactatgtgaacatgagggtctactccaacccacctgtcagactgttgctga

SEQ ID NO: 37483 - DNA, 485 bp, Zea mays
  unsure (1)..(485): unsure at all n locations
  Clone ID: MRT4577_134188C.1
atcaccctcgnaggtggnagnntcttctgacaccattgnacaacgnntcaaggccaanatccaggnacaaggnaggnngcatccccccggnacccagcagcggcttcatttctttgctggcnnaagcagctcgaggnaccgggcgcacnnacttgccgactaccaacagtccaggaggggaggagcgacccnntccaccttggttcttccgccttcaggggnnnaggcatgcagnannncttcgtcaagaaccctttcactggnaaagaactatncnnaccctcgagggtggnnagtcttttctgacnnaccatcgactaacgtctaagggtccaagatccagngacaaggnagtggcatttcctttcagnaccaagcagctggtttcatttttttgnnccggcaaggcagctttgatggacgggctgcacgtctggcctgactactaacatttcagtaagggagagcaccctttcactttggtg

SEQ ID NO: 37484 - DNA, 337 bp, Zea mays
  Clone ID: MRT4577_134189C.1
cagggaggctcaaacgttgcggccactattttctcataggacaaaaacgctggagtgtgcatactactccttaaaacagcatgctgccaagctatatcgtgatcaagagtatcacacattatacattgcgcagcactaggcacgcatgtggtgagtctactgagacgatggactaccggttatgccattctgcaatccagattcagaacagaacgagaaggtcgcctggcaaactatcctcttgtgctgcagtatgtggcagcgggcttcttctatatatgctcagactacgtccaacgccacctgcagctcgtccgtgcctcacacgattctcatg

SEQ ID NO: 37485 - DNA, 638 bp, Zea mays
  Clone ID: MRT4577_13418C.1
cgacgatctccatcttcattcctttcgcttcgttcctcttccttcaatcgcctccgtcgtatgctcagattgtttgacaaaaaatcagactctttgctcgtcggctctgattcatggatgagttcctaaggaagaggtttgtttcccttattttttatcgtcgtcgctctccctctcgtcgtctcgtccgctccgaatgattgctggaaaatcagtctatttgctcatcagctctggttcgtgtatgagttcctaaaggagagatttgtttttgctattttcccttaagttcctttgcctgtagcggaatggcttgcttccgtttcgaactctatattttggactcatcttgcctctttcgcttccgtgtgtgtttctacccacgagcctgtttgctctccgtcactctcccttcatgaggtatagacctgggttttttttcttcaactcagcccaaatctctgtagtgctattttttccatgcagtttttcctctttcttccagacattcacatttttctgcatccattgctttaccatttctttttccccatgatctgttggtgtcccctttgccggagagatcctgccatgcatgcatccatgttctgcactccttttattccttcggcctcacc

SEQ ID NO: 37486 - DNA, 239 bp, Zea mays
  Clone ID: MRT4577_134190C.1
ggtgtgggtccaaatcaaggtttcattattagtttttttccaacaattatgagatattgatcgacagttgtatggtctcaactttcaaaaagacaaaacagcatttttaaacacagcctaaaccatcggggaacgtttaacagaaatacacgcacatacagttcccaacattacggtacctaatcatacggaatggtactttcggttatgtgcctaatttgtgaaaacaaagaacctta

SEQ ID NO: 37487 - DNA, 1611 bp, Zea mays
  Clone ID: MRT4577_134191C.1
catgcacacgcccgtaagctcggaattcggctcgagggaaaaaaggaccaaataaacaatccactgtctcctacctccgcggaagcatcaaacaaatcaccctgccgatcgccatggacgaacagcaggcggaggagggcgaaagcgcgcgcgtcaagaggacgccggaggaggggtcgtcgccgctgtccgctctggcggatgacgtgctgctacagatcctgggacggctcgaggcggacccgcgggactgggcgcgggcctcctgcgcgtccccgcgcctcgccgctctgctccgggcggcctgcctcccgccgcgactgtcgcgggcgctccccgccgagctcctccccgcgccgtcaccggacggggcgcccgcggcctgggcggcgctccacaagctctccgtctgttgcccggggctcctccgcgccggggtgctcctcgagcccaccgacgatttcgggctcgatctcgacatcgggcctgacgtccccatctacgcccgcaccgacgcctcctccgccgaggggttcgaggccacggccacctcccgccacagcggaaccatcgtcgcggccgggagcgcgccccgcgccggcgaatctgccaacgtcgccgcgtggtcgctctacgacgacctgtacctggacgcggcatacgactgctcgtccgagctgcagatcccgcctgccgctgcggctgtggaacccgccccgcccgcgcccgtggcggcgatccgcgacgtggaggaagcaacgaccacaaatgctgtctcatgcggcgtcgcccggcgcggcgtggtggccgggagccgactgcatccgcggcggtggctgggcaccgtcggcgcgcacctggcatcggggtcctggacgctgagccgtgagcaggggaacaagctccttgccagccgcttccgcggcgaccggctatacctctgcgactggcccgggtgcgtgcacaaggaggagcgacgcaagtacatggtcttccgcggcgtgttccacaacttcgcccggtctcaggtccggcgcgcgctcagggacacgcgccgccccaccgtcgccatcgagtgcgccttctgcggctgcaaagagacctgggacctctactcggctttctgcctccgcagtttctacggctaccacgacgacggcgagcctgtggtgcgcgcctacgtctgcgagaacggccacgtcgcgggcgcctggaccgaccgcccactctactcctgatcttggagtggacactccgactgacatggtattgcatcaaagactgcaccctgccattgccagatgctcgctcctaccacttgagctgtttctagacataattatgcgtgcctgcatatagcaatccggattttcgtcatgttctgatacacgtgggatgtgtattctttatttctttcttcttgctgttgctgttgtttgtgagaaactgagaatggttgagtagaataaggatgccggttgatttgcagcataggatataaagagatttgcttaaaattgtaaacctgatgctacgagaaattggaaccgctgttttattgccacactaccgtttgtgttgggtactaaaaaaaaaaaaaaaaaagcggcc

SEQ ID NO: 37488 - DNA, 397 bp, Zea mays
  unsure (1)..(397): unsure at all n locations
  Clone ID: MRT4577_134192C.1
ccccnccccccggggggaaagaaccttttttccggggccaaaacaaggggcaaagggcggaaagcatgctacaattacaatactccaaaaatttggcgacataagagcgacatggggttttttgtccatttttacccaccattgggtttggggggttatcaggcatcacccgccattttacccgccatttaccggggggtgtccttggggggggaagagacccttttccacacaggggtgtttattggaaccccgggaccccggaagggcttcggttgcccgcctgggaacctttttttgccagttaagcctttttgggccaacctttgaccgccattcattttgtgggacaaaatttggtttgggggggcccttaattctttcttttccccacccg

SEQ ID NO: 37489 - DNA, 554 bp, Zea mays
  Clone ID: MRT4577_134193C.1
gtggtgtttttttttttttttttttttttttttttttttttttttttttttttttttttttttttttttttttttttttttttttttttttttttttttttggggacaaaacccaaaacccggggggccctacattcggggggccaaaaaaaaaaggggggttaaaagcctcacgggttcaacgaagggaataatactttagggccggggaaacattggcctaaaaaattacttgggcaccccacaaccggggggggggcaacaaggcgggatattttaagcttccacggggggaccaacaaggaagcccaggccccgccaaatagatcatttttttttggggggagccttcggaaccttgggtccagggggggcctttttctcccacccttgaggacccccacagccaccggttgccccatggcacgggcaggaaatcgaccaaaaggggggtcccgggaaaagggccccacccccatggggttagggggaaccattttaaccataccaacattaccggttttgagaaattgggggtccttctccagctcctt

SEQ ID NO: 37490 - DNA, 619 bp, Zea mays
  unsure (1)..(619): unsure at all n locations
  Clone ID: MRT4577_134194C.1
tgccgcacgctgctgctgatgacgacatggagatggagtggcgcctgctgtctcttccgccggcgctgccgcacgccccgatgagctgatggtgggtgagccnatgccgatccccccgctggacccgttcctgttcgacgggccggccgcgccaaggatcatcgacgacgacgacgacgagcccgccaccgtgatcgtgatcgacgacgacgacgagcccgcccccgtgatcgtggtcgacgacgacgacgacgacgtgcccgtcaccgtgatcgtggtcgacgacgactaggcgactagctagctagcgcgtgcgctagaggctagcgataataataagggatcaatctagctgagccgtgatatgacatatgcatgttcgtctgcgaaactctacatctctggggcttcatgactccagtccagtcttctatttgctttctttcgcgcgcagaactccagagtcttcttgcccatgtaataatacagtgagaggtggccaaaacgggagggcgagacgtgatctgtagactgtaggtgcagtcctgagtgctgagaagaagaaatcgatctgaggtctgtctcgtttactctaggtctaggtaccaactgaagaatg

SEQ ID NO: 37491 - DNA, 265 bp, Zea mays
  Clone ID: MRT4577_134195C.1
caacagaatacatagaagggaaatatggaaaatttggggttgaccgtgtgccacagctcttgtaacagtgccaatccacaagtgaagctggtgttcacaaatattataggcaagcaacagcagtgtttggcatgacactgctatccctttcaagcaagtgctgcaagagtttgaggactggcttggaaatcacaacctgtggaaaaaggagcaaggtggatcactcaaccgtggagcatttgttacttgtggaaactgggatttg

SEQ ID NO: 37492 - DNA, 232 bp, Zea mays
  Clone ID: MRT4577_134196C.1
accggtttcggattcccggtcgacgccacgcgtccgataatatacagttaggcaccgacgttggtcctccttgcgcttcttgcccttagagtgggcggcaacaaatgcagttgattattaccacagagcattacttgctccatagctgcacaggcttccaaaatctactcctactcagttacattcaatgtcatcaggaacattcatcacgtgcaagcactacacagctact

SEQ ID NO: 37493 - DNA, 358 bp, Zea mays
  Clone ID: MRT4577_134197C.1
gtcgcgcgcagaatgccttttaaaggacgggagacagggaagactcatgctctagcgcaactgggctgagctaatctgagcccgccaggtttgcggtctgcggttcagcttactatgtctacccagcgcgatagacaacttgggatacttcatgtaaaggtagtacaatgcgcccgtactgcgcggtgctctgctggaggcggcacacgtgtcatgcctataggaccggatcgcgctgggcccgcagatggggtgaggccagttacgcgtgatccgaacctgcttcgacctgctcaccggcgaggcgctggactgcaagtccatcagcaaaggccggatcttgttccccgacgacgtg

SEQ ID NO: 37494 - DNA, 507 bp, Zea mays
  Clone ID: MRT4577_134198C.1
cgtggttcggtaaagtagaatacttgcctactccacgttgtggagtcccaatggacgagggttgcactcaacccctttcaagtgatccaaagatcaacttgaataccacggttctctttatctcaataatatccctttgtgaggaatctccacactttggagtctctcactccttacacaaatgatctcgaatgagcacaagagtaagggaggaatagcaacacacacaagagcgagagttgcagcaacaacatgcacacaagacaagaacgagcacaggaaagaagcacatcgggtttacaactcaaagaagtgctcgaatctttatcacaatgaaccagatgcgtgtatgcgaagtatcggcatcataggatgttcaatgggtgcttggtgtgctgttccatttgcctaggggtcccttttatagccctaatgcagctaggagccgttggagctctattcggaaggccacatttgccttctatccgtgggcaccccacgcgtccg

SEQ ID NO: 37495 - DNA, 219 bp, Zea mays
  Clone ID: MRT4577_134199C.1
tcgaagacatcgttattggatcacctcttgctatgagtgtccatcaaatacattcgtacaacaatttttgctgaatggggcatgctcctcaaatgccccatctgagcataccatatactggacctcaaagaacacgccggctatatcggccacgactatgcccaacactagtgaacttccatgaacaagctcttacttcaaaagagctactagctgcct

SEQ ID NO: 37496 - DNA, 442 bp, Zea mays
  unsure (1)..(442): unsure at all n locations
  Clone ID: MRT4577_13419C.1
gagaggatgtctgtcataattggctgccctgataagtctgtcaagctgtttgtaaaaggcgctgacagttcgatgtttggagtcatcgacaaaactgcgaattcagatgttgtccaagcaacagagaagcatctccattcatattcatcattaggtctgcgaacacttgtcattggtatgcgggaacttagccaagaagagtttcaggagtggcaaatggcttatgaaaangctagcacggcactactaggaagaggaaaccaactccgcaacgtggctgccaacatcgagagaaacttgcgtctattgggtgccactgggaattgatgacaagctgcaggatggtgtacccgaaagcnattgngaaactgaggaatcagggattaaggtttgggtgctaacaggnacaaccaagaaactggtaanctcnatcggcctattc

SEQ ID NO: 37497 - DNA, 387 bp, Zea mays
  unsure (1)..(387): unsure at all n locations
  Clone ID: MRT4577_1341C.1
natgaacaggtactttcggactcggatcagaaccacagtgtgaagaagcacaaagaatacgaaggttggcgcagagccgaagctatgcgcaggggagcttcggcatgacagcagaaaaggaaaccgacttaaaagggaaaagactatttagacctcgatggattactgtagagtcattagcaaatgtaaagggcatgagtgtaattttacatgggctgcgtcctgtgcctataaatagatgaacagtgctcctgtactgttcacgctgacttgacatttgcttttgcgtcacacttgtactcttaccttctttcgagccgaaggtacattgtaacttgttatcatttctatttttccataataataaactagaaatgatttgataat

SEQ ID NO: 37498 - DNA, 271 bp, Zea mays
  Clone ID: MRT4577_134200C.1
atcggggatgcatatcccttgtataagggcaacataccccctcagtaccatgtacatgttcctcactgcaacaaactaaagcctccctgcattccaactttggctgaagctagatctgaaacatttgtccgtttttaacgcgggattgagcctgctcgagcgcatcctaaaagaacggggccccgtcaatcctagagtccatgcccggaggggagaacacggggatgatgtcccttgtgggcaccaatccttggacccgcccgtgctcgtc

SEQ ID NO: 37499 - DNA, 543 bp, Zea mays
  Clone ID: MRT4577_134201C.1
tttttaccatcgctgtcttgggagagataatacccacttctttagcctctacgagatccaacaggcaatcacagtctggcatattccctttatcaccctcaggaccgccaacaatgcatcagctctattacttcaatcctcctcagggggatgagttgtcacagagcatgaagacacagcatctacttcagcttgcgctaaccaaccttgatatctactttcaagagcatcagtttatacccttcaatccatttgatcttttaatctctgctatttatttacatctgctaccactaccgtttagccatgtatctagatcctatctgcatcaatattatttcgttcaaccaactggcaacattgaactctcctgcttatttacaccaggcaacaacttctaacatgtcaatcatctagatattgttaaccctggtaccctcttgatacaacctacaagagggcgccaattctaccataacgctgcgcctaacgcttgcaccctcttacaactgcaacaattgctgccttttaaaccccttactt

SEQ ID NO: 37500 - DNA, 732 bp, Zea mays
  Clone ID: MRT4577_134202C.1
accctcgaggccggccgggatctcttttcgtacccaacctgaagagcgtcggtgtcgttaggacaaggatcaggcgaaggaggagttgtgccaagccacgatggtcatctcgcgcgactcgatgctcaagcgccgagccaccggtggaaagcacaacgcctggaggaagaagctgaaaggatgagcttggtcgccagccagccaacaccaaggtgtcaagcagtaacacagtgaggaggctccgtcgctcggtgcaggatagatgtgaaatggagggctcttcagccttgatactggtaactactcatggcgaagagaagctgttacccgcaagacccgtatcctcgacgaggtctacaatgcatcaaacaatgagcttgtgaggacacagacccttgtgaagagtgccattgtgcatgttggtgctgccccattcaaggagagtcacctcgctcactatggagttgacattgataagaatagacacacacccctgctgcaaagaatgatacatgctgagggacaagaggctgaggcagcagctgcaggaaacgaaaaagagcgaccgtgtcacgcggaagcttgacaagcgcaaggaaggacgtacccttgacgcacacagtgatgagcaatttgccagtgaacggatgttggcatgcatttcttcccgaactggacagtgtgcacgagctgatgcgtacatccttgtggcgagagagcttgagtctacat

SEQ ID NO: 37501 - DNA, 158 bp, Zea mays
  Clone ID: MRT4577_134203C.1
ttccctctctacgcatcttcctagacactatctatcctatcctataggtttctgttcacagcatacatcaccactagaagttcactcaacatggtcgacttcaccaacaatatcatatacacctcattctccttcaacaccactaccacccattctcc

SEQ ID NO: 37502 - DNA, 1184 bp, Zea mays
  Clone ID: MRT4577_134204C.1
cctcgaggccggccgggctattgttcaggatggaacagtccatcctttgactagctatgtgatcaattatgtcaaattcctattcgattaccagtcaacattgaagctactgtttcaggaatttgatagtggcactgaggcagaatctcagcttgctgcagttaccacaaggataatgcaggccctacagaataacctagatgggaaatctaaacaatataaggatcctgcattgacacacttgtttcttatgaacaacatccactatatggttagatctgttcgcagatcagaagcaaaagatatacttggtgatgactggattcagaggcatcgcaggattgtgcagcaaaatgccaatcaatataaacgtgttgcttgggcaaagattcttcagacactttctgttcaaggtgcgggcagcggcggtgaccttaccagcagtagtgtttcaagagccacaatcaaagaacggtttaagtctttcaatacacaattcgaagagcttcacgcgaagcaatcacaatggatcgtacctgatcaagaactacgagaatccttgaggctcgctgtagccgaagtcctgttgccagcctaccgatcttttatcaaacgctttggcaatcttgtggacaacaacaagaacccgcagaagtacgtgcggtacagcccagaagcagtggaccaacttctaggccagttcttcgaagggcagcaatgggcggagcaaaagcgctgagcaacatagagtgagagtgacggcatgagtacagccagatgccagcactacctagttttcttttctcagaaaaagcgcgcctaagtttcttttctcgccatttgggtggctggaacggaaagctaacggcaaaaaagtgttggtggaactttcttgctggaggttcctaaacttattagtgttgatctataaaaggtaaaagaacgagacctctacggttgtggccttgtgggttcacaatcagcagttccaacaccaaggactagtttgataattccatttttccaaaggattttcattttcaagggaaattcattcatttttccttaggaaaacgggaatcccttagaaaaatatagtaactttttttgggtgccgtagaagtattgttttcatcagtatagaaccctatgttgcaataaaattgttccttaaagataaaaac

SEQ ID NO: 37503 - DNA, 2519 bp, Zea mays
  Clone ID: MRT4577_134205C.1
ttgaaaatgaaagttctagatcgcgagcggcgccctttttttttttttttgttggaactgctgattgtgaacccacaaggccacaaccgtagaggtctcgttcttttaccttttatagatcaacactaataagtttaggaacctccagcaagaaagttccaccaacacttttttgccgttagctttccgttccagccacccaaatggcgagaaaagaaacttaggcgcgctttttctgagaaaagaaaactaggtagtgcctgcacagcagacgtttatgtcactatatattatatgtagtgcgagaaggaactggtggttgcttcggaagaaatctgtgctgttgaacttactggcatctggctgtactcatgccgtcactctcactctatgttgctcagcgcttttgctccgcccattgctgcccttcgaagaactggcctagaagttggtccactgcttctgggctgtaccgcacgtacttctgcgggttcttgttgttgtccacaagattgccaaagcgtttgataaaagatcggtaggctggcaacaggacttcggctacagcgagcctcaaggattctcgtagttcttgatcaggtacgatccattgtgattgcttcgcgtgaagctcttcgaattgtgtattgaaagacttaaaccgttctttgattgtggctcttgaaacactactgctggtaaggtcaccaccgctgcccgcaccttgaacagaaagtgtctgaagaatctttgcccaagcaacacgtttatattgattggcattttgctgcacaatcctgcgatgcctctgaatccagtcatcaccaagtatatcttttgcttctgatctgcgaacagatctaaccatatagtggatgttgttcataagaaacaagtgtgtcaatgcaggatccttatattgtttagatttcccatctaggttattctgtagggcctgcattatccttgtggtaactgcagcaagctgagattctgcctcagtgccactatcaaattcctgaaacagtagcttcaatgttgactggtaatcgaataggaatttgacataattgatcacatagctagtcaaaggatggactgttccatcctgaacaatagtttttgaagcatctttttcaactgcctcctcaaaatctgcaaatgtttcctgggcagtctgcgccaagcgctttgttaagcttgatgcagcttcccgcatctcagtgcaaggtttgccttcaaatatttcatcgatctctggttgaagttcacgcattacttcatacatgtcaagcaacacaaacagcttttcaggagaccttttgcttttagcaacagcgtctccaaagctgaaaagagttataatactatttgctgtgagttcagcaaaacaatggcccttgttaaaattcacaccatcaaaaatctgatcacagatttttctttcccctgctagtaataatttgaccgcgattcgcataaaatgtatccagtttccaattttagcctccaaagcctcccattgcattttttgtacatcatctttagtaagtttttccactcctaacttccgaaggctcacctctagtgctgaagcacggtaatctctgtagattttatagcaagtttgctgatttccagcctgaaccaactgctgagctatgtcattcatgagaggcaatattctgggaggaattagtgttggggtcctgtatacggcagcctccaagcctttggatggatgatggctgcctccatcggactcgtggtcaccttttgttggacgcagagacttgggtagacagtcaaacaggcgatctggctcgataggtttgctgtatgtactcatcagctgcttaaattcctcttcaatcttcagagtagatttagctaacagattgttgacatgattcagaactccttcgctactcttgaagttcttgtttgaggaaaagaagcgagaaatgcctttcagcacatccactgcctccaggtagctctccaaatcctcatggggacccctcaatattgttgcctcagcccggcgagcgagatcgaactgggagaggatgccgtcggcggccttgatggtccggtcgatattctcatgcgccgtccggatcgcgtgcgtcctcacctgggtggggcgcattgcggcctcgagcgcggagaggcggtggtcgaaggagccgaggatggtgaccatgccgtccgtgttcccctggcttcgccgcagagagtcccgcagcatggtcgcccgccgcgacagcgcgtccatcgcctgcagagccgccaccgtcatcgcggacgtcgggtcaagagcgggcactcctctcgggagagggccggggagatctcggcagtcggcaccgagaggagaatgcgccgggggtcagggcggcttggccggtggacgcgccctgatggaagagcgggccgtgtgacgacgcctcgatagtctatgatgatgggaagcggcgattcggtggcggtggtcggcgacgcgtggtcgtaaaaaa

SEQ ID NO: 37504 - DNA, 652 bp, Zea mays
  Clone ID: MRT4577_134206C.1
tcgtacattgcaatctttactactataaaaattatacataagtgagatttcaaaccgtgattgttagcttcaaattatacataaatttgaaggtaacaaatcacggtttaaaatctccatttatataaacggagatttgaagctaaacgatgcgtcaatctaaacatacatctggcggagcagggtaaaaagagggggcggctcgcagcatgcgcacgctggagacagcctaaacatgaacttacacaatacacacggccttggacggatttgttttccccatatccaatccaccacattcgagtcctcactgtatttacagaatatatacagtacatatgagacaagagtccaccgatcgacgagtcatgttcatgtacaaagagttcactccttcttccctatgccgtgagacatgttgtagatcccgcgcccaacgaggtacatgctggagactgcgagggcgagcgggacggcgacggaggtgaccacatcgtagcggcccttgaggtacgtcggcttctgcacgctctggaagtacctctgcttctccaggaccttctctcgtggccggaacggcggttccggccccgacgacgccgccgtcggcgacatgagctctcgacaagcacaagtccaggacccggccggc

SEQ ID NO: 37505 - DNA, 164 bp, Zea mays
  Clone ID: MRT4577_134207C.1
gggaaaacccccctacatggataaaaaaacaaaaaaggtttaacctccaggtggtaacaagccttgggggaaacccttgacaaaagaaaaagagcttttctgggggaaaaaccagagaaccccttagcgggccttattttggcccattgggggggcataaggct

SEQ ID NO: 37506 - DNA, 613 bp, Zea mays
  Clone ID: MRT4577_134208C.1
caatctaaacatacatctggcggagcagggtaaaaagagggggcggctcgcagcatgcgcacgctggagacagcctaaacatggacttacacaatacacacggccttggacggatttgttttccccatatccaatccaccacattcgagtcctcactgtatttacagaatatatacagtacatatgagacaagagtccaccgatcgacgagtcatgttcatgtacaaagagttcactccttcttccctatgccgtgagacatgttgtagatcccgcgcccctgcaaacaatcagcagatccatgcacgagtacttttaaaatacaaaacggattttcctttccgtctagataaataataatgagaggcgaggtcgggaacttacaacgaggtacatgctggagactgcgagggcgagcgggacggcgacggaggtgaccacatcgtagcggcccttgaggtacgtcggcttctgcacgctctggaagtacctctgcttctccaggaccttctctcgtggccggaacggcggttccggccccgagacgccgccgtcggcgacatgagctctcgacagcacaagtcaggagcaagcaaacgggacgcgtgggtcg

SEQ ID NO: 37507 - DNA, 187 bp, Zea mays
  Clone ID: MRT4577_134209C.1
attcggctcgagggctcaagagcgctgagtgtgacccggccggcgaacctgctgccatgcgtgcatgtcacggcgaaggcagggcccatggtggaggtccctgtagacgttgcacgtaacagcaatgctgctgtgcacggctagactggcactacatagcacggaagggcgacctgagaccagatct

SEQ ID NO: 37508 - DNA, 473 bp, Zea mays
  unsure (1)..(473): unsure at all n locations
  Clone ID: MRT4577_13420C.1
gtggcctccttgctgcaacctcccggcgctctttcgccgctgcctccagttgctgcctcttctcaacgctggcgatccaaaactagccgctcgatgctgccgcggcctcctcgccctccctcctccctgcaatcgaggtcttcactgagagtgttgtttctagtgaccatttgaggagctgcttgattatagccaactgtgctgcacgtgaaggatcacggatgtccgctgaggctgacccatacgaggatgagcacataatgcttgaacttgtgtgccgccacttcatttcatcattactggacgagggggcattngaggagtttctgagtgcactatcttggtcggagagggcattgcagcgcactccagagatcagctttcagggggcttttgtgctggatcaaaggacctacctgtctttgccggctgttgcacaagcacatcttttactgctcatgtcaagatgcacg

SEQ ID NO: 37509 - DNA, 1105 bp, Zea mays
  Clone ID: MRT4577_134210C.1
ggtaccctcgggcctccgggaacgacctcttcggctcgccaacattaggtccagtccacccctccagccaacccaagtctccatccacaagagctcgagaacctggccacgagcccatgacggcaagaagcggtcatggccggtgatgaggaggaccacctagcagacgcgccgcgggtggtgggcgtcctctccgcgctcctggaacgtgtcgtggagcgcaacgacgcggtggccgatgagctcgccgccgggaccgagtccgcggcgccgccgtcggcgttccgggcgacggcgaggcccgacatctcggtgcgctcgtacatggcgcgcatcgcgcggttcgcagggtgcagcccggcttgctacgtcgtggcgtacgtctacctcgaccgcctcctgcgccgcgcccgcagcgcgcccgccgtggactcgtacaccgtgcaccgcctcctcatcaccgccgtgctcgcggccgtcaagttcatggatgacgtatgctacaacaacgcctacttcgccagggtcggcggcatcagcctgtcggagatgaactacctggaggtggacttcctcttcgccgtcgggttcgacctcaacgtgtcgccggggacgttcggccactactgcacggtcctccgggccgagatgctgtacctggagctggagggtcctcctcctccagccgccagtacaagtctgcacaggtgctgcttgtcagaagacgacgacggtagcagcagcaccagcagcagctagctgcatagagacaggtacagcggttgcttccaagcaagcaaccatgtatgaatgtgtccgtgtacactgtacagtacagacatgcttgcttgaaagcaaacacggagtacgtgacgtaggcatctgcgtgtgatcggtttgctatctggcggctggcgcttagttgtttttagctttgttattaggtaatctgttgctcttgtagtcttgtatagctgcattgctgttgttcatgtggaaatcggaaaaccgtaaggaacggtataaattgcagtcttggggcagtgtaattgttttcttgtccagcagtttatccgtagtttatctaaaaaattgtttttgctct

SEQ ID NO: 37510 - DNA, 696 bp, Zea mays
  Clone ID: MRT4577_134211C.1
tctcttcttccctttaacccctaccctccctttccgccgctttgctgctacctatccccttccctcccctccccacgccgcacggccccgccagtccaagcttccacgctcctagggtttttagccgctgccgcgcctccccgagcatgtcggcgccgccctctctcaagtccccggccaccgccgccttcctcgcctccccacgcttgaccgtcgccccgagagccgccgtgctcggcgccaccgcgcagccgccgcggcgcctaaactgctctgcagccgttggagccggagccagggatctcgaggtgatgagtgctcccctggactgggcggcgaggtcggtgggggagctggagcaagcgacagacctggacactttctgtatgatggcgctatcacctctggacggccggtacttcaggtttattaaggacttgatgcccttcttcagtgagttcggcctcatcagataccgcgtcttagtcgaggtcaaatggttgctgaagctttctcaaattcctgaggtcaaggaggtgccaccgtttagcgaggaggcgcagctatttctggatgcaatcatccaagattttagcatcaatgatgctaaagaagtgaaacaaattgagaaaataactaaccatgacgtgaaggctgtcgagtactatctgaagcagaaatgcagctcaaatccag

SEQ ID NO: 37511 - DNA, 147 bp, Zea mays
  Clone ID: MRT4577_134212C.1
ccttgtcacttcttcgatctgacaggcaatataagggaactcccaggctgccaagttatcttcgttggcctcacattcagactgatcaagttcatggtctaagtttgagagagataggtggtttcactaagcattgcgagctccctc

SEQ ID NO: 37512 - DNA, 408 bp, Zea mays
  unsure (1)..(408): unsure at all n locations
  Clone ID: MRT4577_134213C.1
cctgccgttacgagacgtgacgcagcgcgagcccgcgcgcgcgctccgggccggacgcctccgttcgaatcgatggacgccgaggccggcgtcgccgacgccgacccgcttgcgtggaggcagcactacctgaatctactgctactagcataccatagctttgtcgaagtgtacggagacctgaccacatggtctgtctacgaagctaaaagtgcggaggatcgaaagctcattagattattaagagaggagacagggggcctgggaccatgactgatattttggaccttcactctgcgcactggtgcataagntgggcatcatgcgcaatgcatgctcacaatgaccgcgaacgtggaccattagaacatgtagtaccttctttgcaggcatgcaaaaatacgcttg

SEQ ID NO: 37513 - DNA, 447 bp, Zea mays
  unsure (1)..(447): unsure at all n locations
  Clone ID: MRT4577_134214C.1
cccacgcgnccgcggacgcgagggccggaangcgggncagggagacccnccagcngancggcggacgacancagcngaagggggngnagcnaacgacncnggnnccnagagcaggcanngcngggnacggcagagcaagggggacaagacanngacnagnancnggcannagggggagggggaggcgcnnaannngncngannacangcggggannnggannagnncnaggggccgannacangncngnaaaacggccnacnagcnggngccacnnannnggcanaccanggacgcccncggcaaaaggggaaaaaaaaaaaaaaaaaaaaaanaaaaaaaaaaaaaaaaaaaaaaaaaaaaaaaaaaaaaannaaanaananaaaaaaaaaaaaaaaaaaaaaaaaaaaaaanaaaaaaaaaaaaaaaaaaaaaaaaagggggggg

SEQ ID NO: 37514 - DNA, 3560 bp, Zea mays
  Clone ID: MRT4577_134215C.1
ctagggcctttctggttgagtttttctgagccaaagccatcttagatttaaagcccatccaagaatttcaagattgtgaatggttaatacaaataacagatatcacactgttttcgttccttttttttgccagctaatttgtgctgctaccttgtcttttcaatctccttatcaaggaaaatcaatattgtttctgtggcatggtttggtgcaatgccttctctgatcatcctcctcaaatatttgccagcttcctttagcctaccagctttcgcattaatactgattaacgtattaaaagtaacaacatctggcttcatgccacttctgatgatctgctcaaacaagcagcctgctttttgggaattttcttgacttaaaggggcaaacccagatatttgcatggaaaagccacctcattacaagggaataactcctgagcagccaccatgtcttgttcctcacaatgaatgggcgtcatactcgatactctcacagttgtaacaaggcctgaagccactccaaagattgagaggatctccctgcccatattgaattcttctcaactgtgtcgcaagaacatcgccgaatcgcgaggacataaagagatacgatgcccaatttctccccttatcacatggagaagcgacacacttgtgagggtgctccaacgaggattagtgaagagtgtcgactctcttgtcttttcaatctccttatcaaggaaaatcaatattgtttctgtggcatggtttggtgcaatgccttctctgatcatcctcctcaaatatttgccagcttcctttagcctaccagctttcgcattaatactaattaacgtattaaaagtaacaacatctggcttcatgccacttctgatgatctgctcaaacaagcagcctgcttcttcaacctttccactttcccaactgactgatcaaagtgttaggcattcaaggttataatgagaagctatgggaaccccaaggccaattatgctccaagcacttataacttctggatatggccgtgccttaacaactgctgccactgattctgatattaagagtggaactggtgcaacgcatggatcttggggtgcctatgacttgctaagggcgccctgccgcaaacgaggtcatcagtgaattgtatgtataacttgtccctttgtttcctagattagtaaagatctcaaataacttgcaagcaacaatcaacttccctttggctaaaaaaattgacaagtatgtattgatcatgtcagctagctaagtcttggggcccataccttccatcctctgccctctgtgcattgtaaatacaacagagctgttcaaactgtcagcatgtttagcaagatggtccaagtgtggtgatagtgtccaatcatccttgggatcactgtttgggatttcttcatcagtacctgtatgtcccacatggttaaccaaactcatcacatcctccatattgccatcaaaggaaaacaatggtgtcccatctttctctctgccgtgaggtcctctcaaggcaaccatcatgtttgatttccaccgaatggcatccggcaatacagtgctgtcccttataaactttactatttgctcttccaagtcccagcgtttactcttgttaaaacctatcaacaatgatgttattgtaaccaaatcaacactgaagccttgctgctccatctccttcaccaactctacagcctctgcaacttggtccccaatcccctccttgcagaactccctcaccatgatactataagcaattccatccaacagttgccctttcctccttagctcgtatttttgccgacatgctgcttctgccctcccattattaaacagcccatctatcacagtgttgtgtgtgcttgctgagcattggattccatcagccaccattgtctcaaaaaaactgcatgcctcatcaagcttcttcactttaaacagcccatcaagaagtgaattgtacaccaccacgtcactcaccccaatgatgccccgcatctcatgaaacacacgcagtgcatcatccatccgaaaactcttgcagcacccattcatgactgctcgataagtgaatacatctggctcgattccagaagatttcatttcatcatagatcaccaaagcatcaggtacccgcccaccaacaacaagggcccggatgactgaattataggtgcatatgtccggctcaactggaggagtggcggccttcattgctgcgaaaagccccagcgacatgtccatctgcctccacttgccaaacgcgtggatgcaaatgttgtataaccttacattcgaaggaaggcccctcctcgacatttcttcgaacacatagcggaagtcatcggagaggttctccttcgataatgccaggaggaggcggttcgtttcccggacgggtggtgggtgcgaggcgatgggaagcagcctgcggatggcggggacggcggcgctgaggttctgggaggctatgagggaagggagagcagctgcggcgaggcgggggaggaggtctggcggcgcggagtccaagagggagagcgcggcgtcgaggcgcgaagcggagaggagaaatgagaggagtgcggggaggagggtggacggggacgcggagagcgcgaacgggaggagcgcgtcgaggagcggcggggaccccgcggcgagcgcgcggaggaggacggggaaggtggattcaagaagcggggaggcgggcggcgtggcggcgaggaagaaggagagcttggaggccggcgggagcgccgggtggcggaggatgtggaggtggacgggtagcggcagcggcgccgtcggcagcagcgcggcgggcaggtgcggcgtggtgaggagatggctagcgaggcgggtggcgaggagcgcgtcggtgaggctggacagcggcgtgggggccgcggtcgagagccgtcggccgatgggagcggcagcggccagcccgagcggcatatgaagtcaatattttttagtcaaaatgaaatttcgctacagtaaaaacgaaaaggtaatccctgctctgtttatgtggcatgtgtgctactcataatgcagcgactatcctgcaggttataatggaagctatgggaaccccaaggccaattatgctgcaaacccttataactctggatatggcattaatcaagcaactgctgccactgattctggttctcagtatggaactggtgcaacgcatggttcttggggtgcctatgacttgcaaagggcgtccgggcgtagataagtactgcgaattcgtcaggtctttcacggaagctttggccatgcctctatgattgttgtggtggatcagatgttgaacaggtggggcacaggtatagatgaatagcgcacacatttgctttagtttagcttctatcggcctgtgcaagggaacatatatctgttgcatcgagtgtcaatgtattggaagttttctatcgagcatgaatatattaaggaaaaaaaaaaaaaaaaaagcggccctcgtagttcaattatcttctgatggcgtattatgccggccct

SEQ ID NO: 37515 - DNA, 412 bp, Zea mays
  Clone ID: MRT4577_134216C.1
aaaaaaaaaaaaaaaaaaaaaaaaaaaaaaaaaaaaaaaaaaatttaaaaaaaaaaaaaaaaaaaaaaagacagggcagggagagtaaaaaactattgctagaacgagattaagaccatatagttctttttttggggggcttgtttttagttcccgggggtctggtcttcttcggccgtgaatgggacaccccttgggctgcccctcttgatttctttgggggcggtttctctttgggcatggcggggaaagccttgggggccccatctttttgttctttcaaaaatattgcccctctcttttggacgatttgaaccccctcgggttgggggcttttttccttcctgtgctggggctttccccaagggcggcggggtacgccttcttggcccacaatacaccgggggggggg

SEQ ID NO: 37516 - DNA, 1165 bp, Zea mays
  Clone ID: MRT4577_134217C.1
tttttctcccgaacccccatacgtaaaccaaaaaaaaaaatccaaaacgcaatcgcaaggaaatttttttccctgcctccagccctccaccgccgccacccgcacatccatcgtcgccgttcgcgtctccggatcccgagaccggagtccggatcctcgtcccgcgcccgcatattctcccgtccgtgccctcgcgtgcgctctgcccctctggcgtccgccgccgccgccgccctaccccaggtgccgtggtctccatctcccggagcttcgccggcgacgagaatcctccagcatctcggcgcgtgtagagccatgctgggcgcgcgtgtgcagctgaaggggtggcaacaggcagctgttgcatttggttctgcgtttggggccttgcttgaccctaggagggctgatcttatagctgctcttggagagactactgggaaaccagcgtttgagcgtgtgctgcaacgaatgaagaacagtgcagaaggcagggaagttctttcggagcgtcctcgcgtggtatcctcgcaggtttcccatgcctgggacatgcctcagaacacatttggcgcggcgtatgctcagttcatgggatcaaggaacttctcaccagacgatcgcccgcctgtccgtttcatggacaccgatgagctcgcctacgtcgcgacacgtgctcgcgaggtgcacgacttttggcacgtgctgtttggtcttccgacgaacctgattggggagaccgccctcaaggtgatagagtttgaacagatgttcctcccaatgtgcatgctgtcggtcgtcggtggctctgcgaggttcagtgacaaacaaagggcgctgtttttccagcactacttcccatgggcaacaaaagctggtctcaagtgtactgatctgatgtctgtatattacgagaagcactttcacgaagacctggaggaagtgagaaggaactggggaatccttccttgccccagtcccaaaaagagcagtgtataggccgggcattttctgcgtgaactttctatctgtttcttctttggtttctgttagttgctcagttctttttggaataaaatcatgagctaatgttgatgaatactgatacgttaccaagttcgaagtatggttagtaaaaaaaaaaaaaaaaaaggcccctagggcc

SEQ ID NO: 37517 - DNA, 369 bp, Zea mays
  Clone ID: MRT4577_134218C.1
atgaggaagatgtagagtgcgaccccgccgtctccaacttcttcgtctcctccaacgacggtgtcgatcagattctgtagccatgtgtgagggcatgacgcggagggacaaatgagttagaatggatgcattaggactgccgtccttccgagcatcggagtataagactaagctgtgcgcgcatattggaaggtcaggattctcaattccatcttccatatctatttgaagatagaatgcttctcctggccggttgacacgttcaaagtcttctagctgtacgtcatggacctgtagtgcttcgaaggagaactggcattagatagcttttgtgctcaaaacatgtatgagactgagatgctccttcat

SEQ ID NO: 37518 - DNA, 594 bp, Zea mays
  unsure (1)..(594): unsure at all n locations
  Clone ID: MRT4577_134219C.1
attgtacaaagctttgtacagtatgaatttcgactaccattttcaatagtacatgaaaactgttaggtataattgccgactacaaaaagtgatatcattatactataagaggaaaaggggaaatacaacaatagtgggatccaaattgcaatgaagtgtgcacttcccgtctctaagaatttccggtcaccaagtctatctctagcagattacccatccccatagcatattcaaactccactcggccgcttttttttttttttttttcggaaacttatcttggagtagttggagtgttacaactgctcacttgcagaaatagaaccatgggtgttgacgtgttgtattacgcccagctcagtctcctccatttagagggctgatgtacccttatcccccaattccacctccgcaatttctcataattcatacacataacaagcatgccttaatagagaaaagaaaaggatgaacattgtcccttaataggatgtaaagaacataatgagtaagtagacaaccgtttaatgcatctccgttgtcatttccatacaaagtatcacttatgccggccggcctcgagnngggtaccca

SEQ ID NO: 37519 - DNA, 2689 bp, Zea mays
  Clone ID: MRT4577_13421C.1
agtcagattcatgcgttactcgctttgcatcctttgacagtgctcgatgtttagcaaaacacaagcgaaaacaggctcgtttaatagcataccgatatttacccattttctctcaggaaagcatctaggggatactgagccgccggtggaaccagattttagtgtgctcgcttcagcaacaacaaagctgctttttagcaccctacaagttaggatatgctagaattaaaatctaacattaggccacaaatcaagattcatgcataagtcaggaatcaagattcacgcataaggcaagtggcctcgatccactccagccaaacagcatgcttccttggtgaatcgcgacgacgtttctctctaaaaaactagattcgccacactagcttcttgactttagaggcgactgatctagtgcccgaggctcccacagtcccacctgagtgagaactcctaggaggagaaatcggggcaaacctttctctctaaaaaatggagatgctgcttcgaacccgacctggtgattgagatgctctcaccacactagctccttgacttgagtccaaaagtatccatgatacattgccgtttagattgtctcttgttgaaccattttctatatttaaacttcttaaacttttggagttgcttcaaggcatttgaataatcttttccttcttcacattcaacataatccagtatatcagcccacgactttcgtgaatattcaggatgacactcaaaaaacctttgaccggcagcctttccaactctggaattgcattcctcaggagtgcccaaactgattccatcaacataaaagcgcctgcctttattatgagatttatgtatgcttttataccgtaatattatctctttagttcgagcagaaacctctacaatccccttttcggtattgcagaaaactggagaatatttggagacatccatagggggatgaaatgtaccccaactttgctcttcagcaataagatttgtggcgatcatcatcatgataatacaacctttccacagaaagccaagccttcttcttaaacaacaagttgataagctagcaaaatgagccaacattagcattgaggcactttcactttccactgactccccaataatagccaggaggtcatatctatgaagctcatctgttccatattgcccaagcaaactgataatttcacatataacattgtattccttgcagtttgcttcataatttttattgtgcaggatgtatagaattgaggagcccattaccctagttgctgcagcaaggcaaataatctcatctgatacctcagtatcaggttcactcacctccttttgctttgcacagcacaggatactagacaatatacccttcacaaacacaatacattcttgcctgaacttttcaagaaacatatgctggttcatttcaattatgcaaccaatatcactctcattgacgggaagatcatcaccacagtgcaattcacaaaacgaaagcagacgatagatctgacttctgagtttctgatcagtgctatctttgatacaactaaaagatcttttcttgcccaaataattcagtgggggtattgcactgcgggttatgttgaaaacacacaatgccggtaaatatctgacataaagattcatggcatatccaaacgctagcatatgcgagttaagattttgaccactcgtgcatcttgacatgagcagtaaaagatgtgcttgtacaacagccggcaaagagaggtaggtcctttgaaccagcacaaaagccccctgaaagctgatttctggagtccgctgcaatgccctccccgaccaagaaagtgcactcagaaacacctcaaatgccccctcgtccagtaatgatgaaatgaagtggcggcacacaagttcaagcattatgtgctcatcctcgtatgggtcagcctcagcgaacatccttgatccttcacgtgcagcacagttggctataatcaagcagctcctcaaatggtcactagaaacaacactctcagtgaagacctcgattgcagggaggagggagggcgagaggtcccgagagaggatggcgccaacggaagcgaggaggccgcggcagcatcgagcggctagttttggatcgccagcgttgagaagaggcagcaactggaggcagcggcgaaagagcgccgggaggttggagcgaggaggcaacgtcgaagaggagatagagagctccgccaaggtgaaggtcgccacgcgccgggcggcttccagctcattggcgtcaggcatcggccgcggattggaggcagaaaccctaggatttatttttgttgcctcgagggagaaatgggagcggcagagaaggtgatgcaaagctgtcattcaccaacggcgcgcatgtcttccgctccctgacgcaatgttgcttcgactggcgcaggtcgctgttcctagctgccgccggccacacctcagccccagccggcgaggagcaagtggccagcccccaacccagggaaccggcgttgggcgttgggcgttggtgagaggctccgtcggccgtgagccccgcctccacctactgtcgattcgccgaactccagtcgtggtctcgtggagccgagtagccgacagcagccccgccgccctcctggataagaggggcgtcgatcggggaattgggaac

SEQ ID NO: 37520 - DNA, 522 bp, Zea mays
  unsure (1)..(522): unsure at all n locations
  Clone ID: MRT4577_134220C.1
attgtatgcttgatgtatttagagacaattccaagggcaagcactggatagggaagttatctggttcatagatatttgtacaaaaggctgttaagactacacggtcagttcccactgcaggaaacagaaaggttttcttatttattattccctgccaacagcattttccagctcacacatttaacttctcacaacatgattgcaaacacgtacatattcattcccatgagaaatctgcatgtgacatttcggaatgtttgaagtcagtcagataaaaagcacatttgacacaaaccataggaggagagctgggactagggactgtgcagaatgaaatgtcacagccacagggaggcacaggngtggtgctgggacagcnacgtgcgtgtgacctgccactcctccccctccatacaagaatggccagccaggggaggctcccctccctctttcttccatgtgcttccctccttaagctgagagctcagctgaagacctccccgacaaatagcctgactgttc

SEQ ID NO: 37521 - DNA, 424 bp, Zea mays
  Clone ID: MRT4577_134221C.1
aaaacaaaaaaaccccccccttaatactacgggaaaaaaaaccccaaaaccccctttaagaaaaaacctccaaaaattttttttgacaacaaattgggtgccaaaaccaatcccccccaaaaaaacatttcaggaggatacccccaccggcccaacaaaataaaaaaaaaacaaaaacaaaaaaacacaaccacaaaaaaaaaaaatgacccggacaaaaaaaaaacccaatatccccaaaaaaacctgccccccaaaaaaaaaaaaaaaacctttaagcgggaaaaccctcagagccctttgtggaaaataaaagctttttttgatgcctgatcttaaaaaccccaccctcctttaaaacccagttctggtggcgggcacaactccggggtgaaggggaaaaccccccccacccaggggcccc

SEQ ID NO: 37522 - DNA, 193 bp, Zea mays
  unsure (1)..(193): unsure at all n locations
  Clone ID: MRT4577_134222C.1
gcaacactatgatctcatcattggaatggattggcttttggcttatagccctattacagtgcattgggctaacacgtggttgacaccttcaaagggcaatatatatgtcgtgctttatgggatcaagacttctgctgatagtagngcctttgttcaactttgcagcattgtcgacttgacagaccaagatcag

SEQ ID NO: 37523 - DNA, 341 bp, Zea mays
  Clone ID: MRT4577_134223C.1
aacgccacacactcaaccaacttaccaacttttttacccaccccgctcacaaaatattccctgtgctctatttaaaaacggtccctcccacaacaaactcaatacaccccctctcctctacccaactaatgaaacaaccttcatatgccatcaaacacatctatccattcctcctccctcttctcaaaaactactactgcttctaccctaacctcaagcatatccaccatctccaatacaccacccccacattctggctctcttctattcccccattaacaaaacttacatcacctactcctttctacctcgcctattaaaaataaatctattatttccac

SEQ ID NO: 37524 - DNA, 605 bp, Zea mays
  Clone ID: MRT4577_134224C.1
accgatcctgctgctgctgctattgtattccgttgtacgagcgccggatcggggacgttgccctattccatcctttgcaacttcaggaatgcgccagctacacgggccaactctgaattttccgctttttccagcacactacattaaacttaatatcagcgtacttatagctgtaatcctaatgtgactttaaccttgtaacttactatatgctctaaaatttcccttgatctactgcttacgagtgaattttccatctaaattccctctgccatgtgacagccacattacggcctttctgcacaactttctttattcgcctctgctcaggccgcgcgaccgcccacgcccatctccgcacccgccccgctccccccccgccgcgccccccccccccccccccgcgcctcccgccccctcccccccgccccccccccccgccccccccccacctaccaccctccccacctcccccccccctctccaccccccccaccccccccccccccacccataccccccctccacccccccccccccccccccactcccccccccttccacccccccacccaccacccccccaccccaaccccctgcccccc

SEQ ID NO: 37525 - DNA, 393 bp, Zea mays
  unsure (1)..(393): unsure at all n locations
  Clone ID: MRT4577_134225C.1
tccctttcggacgatcttcctaataaacacacctactactttcatcatccttataacttatagatcctctttgtggactcttgggagtgggttttcaaggcatgtataattgctactcctattctatngctagtatcctctaccgcacttgcacttggtctttgatctctcactatccccattgctaccctcatctttaactatgcttctcacctgtttttcctcctaaacagctcccttagtaactgtgctaaattttttatgatattataacttagtgtgcaccattagtacccttcctctagtcaatacacaacaatataccaacttttggtatctaaaaaaaaaaaaaaaatacgtcttactctctatagtattcaaatcttacttacc

SEQ ID NO: 37526 - DNA, 228 bp, Zea mays
  unsure (1)..(228): unsure at all n locations
  Clone ID: MRT4577_134226C.1
ccggcggcgacccacgccggccgggggcannagcacagcaaacagngagagcaagagggggcaagcgngagagggaagagacgancgaaaacganggccggggaaggagacgacgccaagcagccgggcacgggggagagcccgnncgcggnccgcgagcgcacgacccngcaccggaaaggcgngagccaccaggaccnggagcaggacgggggggagaagggcgag

SEQ ID NO: 37527 - DNA, 558 bp, Zea mays
  Clone ID: MRT4577_134227C.1
cgtagtagcttggtcctctgtgcggccgccctctttttttttttttttttttttttttttttttttttttttttttttttttttttttttttttttttttttttttttttttttttttttttttttttttaaaaaggggcccgtttttaaagttttggcggcccctcggcggttttgttttttttttttttacccattacccatgtttgggggccggggcttgcattcacatttttgttcctcacccaacaaatcgacaggcgttgccctacgtccgtaattgtaaatgggtgatgccctgctggatacattaacaggaaaattgttggaagcaaaaggaacctttgcttgccggaaaaaaaaatgtttagataaagggaaaaaaaggggggggagagagagaggaacccttgccagagggggatcccatcaacaggcaaaggcatggccatgggtttaatttaaccacggtttttttttttttccggggggtttgtaggcaataaaatttaccccctgggtttgcctgacgttttcaaaacccataacccgggggaa

SEQ ID NO: 37528 - DNA, 277 bp, Zea mays
  Clone ID: MRT4577_134228C.1
aagcaaaagatgatggatgctcggcgacagtcagcaacagcggctcatccgcgctgcggttctgctgggcgccaccgtcgccttcttgaggttcctcctgcgctctcgctccgggggcgggggcctgccgcccaccatgcggctggcgccgctgggcggcggcctcgagaagctcatgcgcgggcctatcccgatgatccgggagcaggccgcccgcctcggctgcggtttcaccgggcccatcttcgtccgggacatcacgttgggcggcgcgccc

SEQ ID NO: 37529 - DNA, 224 bp, Zea mays
  Clone ID: MRT4577_134229C.1
gttctaaaaagacaagaaaatctaagaatccactagaaccataaggaactcaattcattaaatcatggcatcatgacgcattggaaacttagtccactcccgattcacaccattcaaccggattaacagacttgccagctttgcccttcacccctgcaaaatgacaactaccttttatttcacccaaccaacacttgtccatctccagttgttttctaaagctt

SEQ ID NO: 37530 - DNA, 225 bp, Zea mays
  unsure (1)..(225): unsure at all n locations
  Clone ID: MRT4577_13422C.1
cagacgcatgggcggacgcgtgggcggacgcggggtcggacgcgcgggcccagggtaaagaggattgagaggaaggtgcgatcactcactagaccatctgacgaccttgcatctcttgaccttagaaaggcctttttttttccaacagggggcggacncaactgcaatcngacgggaaacaccttgttgattgccacatattttaatggggatggaatacactca

SEQ ID NO: 37531 - DNA, 189 bp, Zea mays
  Clone ID: MRT4577_134230C.1
gcgcttgattgcaaacaaaacatcagcgcatcttatttacgggtcctcacatcaagattcacatgttggtgacttggaattcttaactcaccacctatgctttgcacagaagttaatttggagatccaactgccatacttgtgtatgttgaacttgaattgtactgctgaagtgcctatggagctcata

SEQ ID NO: 37532 - DNA, 314 bp, Zea mays
  Clone ID: MRT4577_134231C.1
caccatgtagactatgactcacacatacaatcaaccaaacataatctcaaataaagtcaatacatacgatgatctaagataaaagggtgcggataaccaatcaaggtggatacaaactgaaactattctatatttttttggggggattccctccttgacttgcgtggttgacgcgctgctacacacccgacttccgcgtcacttcacggcttcgccccactttgcactagtacggggccgcgttgctgttgtcccaacctatagacgacgcgtttgggatctcaggactgcattgcgtgatgataatttaaggt

SEQ ID NO: 37533 - DNA, 181 bp, Zea mays
  Clone ID: MRT4577_134232C.1
attcaataggaacaatacccttttcttgtcattcaaagagctaattcacgccactgaatcctctggcactgaccaccagggggatgcccaaaacataattactgaaaaatcagcgctaaagggctctttttgaaacgtcgacagatgttttactacagcacattttccctagacaggggga

SEQ ID NO: 37534 - DNA, 331 bp, Zea mays
  Clone ID: MRT4577_134233C.1
agtgcataatgttttccacatatctcagctgaagaaatgtttgcgagtgtcataggagcagttgccaaccgaggacctcaaagtccaagaagacttgacatacatagagaagccaacccagattctagaaacaacagacatagtcactcagaggaacaccatcagaatgtgcaaagtcaaatggagtcaccattccgaggaagaagcaacctcgtccactgtgcagtacaacgcctcatgtcacctcgtccactgtggcagtacactctctacaagacggcgcgtcacggtctcacggacactgcatgtgtggccttcgaaggaggaaaaa

SEQ ID NO: 37535 - DNA, 637 bp, Zea mays
  Clone ID: MRT4577_134234C.1
gcgtgaacgctctaaaccctccccacctactccctcgccgcgccgccgcgcagccgcgagtgcagcgaacatcggcgccagtgccacgcttatggccgccacctcccattccctcctctctccggcgcccacctcgcccaaccgcgcccgcctaacattcccattcgtacagaacgtcaacaactgccaaagctcctctttcacgggcgtcaaaggcaagaacctcctaaatgaagtgatcagatagagaagacaagaaagagattaaattaagaagacgtacgattagaggaaagaatgaaagaagaagtgaagaagttcacgaagacaaaatcctatgactgatatatatacaagaacgaaaacaaaagaaacaacgaaaaaacgatatatgtatcaaagagaatgaatgaaaaaacaagcgatagagatataatataaggaggagcgcaaataaaattgagaacaataattaatatggcaattttaaatgtagaaaaggaaattaagaacttacatgaacattgacgaaaatcaaaatgaaaaaactgtggaaacagtgaagaatctatacacataaaacaaggatgaaccatgaaactaaatatacaaactacagtatgttactgccataaaa

SEQ ID NO: 37536 - DNA, 362 bp, Zea mays
  unsure (1)..(362): unsure at all n locations
  Clone ID: MRT4577_134235C.1
tttcttcnatccatcaannaaatattattttctcttcatctctnncacaagggatcggcgctctttccaaaaggccgngggantcccccnnattnttttatttccccnnntnnctnnaaantnctcnttnaatactataacagcttggtgccatcctttttcatcatcaatcttcccaagccaattncancctgaaatatgggaagctcttcanataaggaaccctactatatcancacaagcggttctttgcaacatanaaccgttgttgtatgattttatacttgcttttaagacttaaaaacactgggctttatttggactttaatgtgtgcattttaactggtgtgccctatcttctt

SEQ ID NO: 37537 - DNA, 513 bp, Zea mays
  Clone ID: MRT4577_134236C.1
aaaaaaaaaaaaaaaacaaagaacaaaacaaaaaaaaaaaaaaaaaaaaaaaattaaaaaaaaaaaaaaaaaaacacataaggaaaaaaaaaaggaggtttccttttcgccggcgacccctttgggggggatttcgggggcctccttccccctggcgggtgttgccccctttttaggggggccccatttccccttgtggggggtgggaaaaccctggggtggccgactttaaacaccttgcggggggaaaaccctctgggcccccccctttttagcggggtggcccaaccccctctttcttccaacctggtttatcatccaagaagggccaaaggacccccccttaccaggggctttacacgctgggggagtgggggcccccccctgtggggcctcatcactcgcggggggggtggggccccccccttggcgacctttcttttcggtgtcgccccggcccccggtttttccctttacgctctttttttggggccccctttagggtttcccccc

SEQ ID NO: 37538 - DNA, 352 bp, Zea mays
  Clone ID: MRT4577_134237C.1
tcgcaagtagcaacatacattgcgtaagacactggcaacgtgttaactccaatgggagccaagatttttggccttcttggccttcttgatttttcaacaagcggtgataccttgaattttattgcacaatgctcacaacaatacctttatacggtgacagacgagggatttcaatacccaactatgccattctacattgtgcaagaggccatccaagcaagcatcttacgggcaatagcgttaacccttcaacaaccatatgctctattgcaacagccatacttagtgcatatttgttttcaaagaattgggggaccacaacttcaacaacaagtggttacaacaattaatc

SEQ ID NO: 37539 - DNA, 236 bp, Zea mays
  Clone ID: MRT4577_134238C.1
ccggccgggacgccaaccatcaccttttgcctaccccggcaccaccccgcctttgccttggtgttgaaaagtcgccgcgttcctcttgcctgatgaaatcaatcctcttctcgtctagatctgagcctccgcgtggcttccagatcagatgcttggtccgatcaacgacgaccttcagagctgcgacgttccggcttccgggggatctggatcttggctgactggacacttgcgag

SEQ ID NO: 37540 - DNA, 578 bp, Zea mays
  Clone ID: MRT4577_134239C.1
gcatcttctgcctgcctcggcacccgggcctttgccttgtgaagaaagtcgccgcgttcctcttggctgatgaaatcctcttctcgtctagatctgagcctccgcctgtctttcggatcagatgcttggtccgattgaacaacggtgagtcttgctctgttatttgattgttctaaacgcatggttttgtttttgtgatggtgtgcaggttccgatctgtttcgtttgattgctgagttgacgcatcggctcgaagcgagacaaggctgcatggtttttgtgcctggatgtttctgatcagcgtgtttaaggaaactgggtgtcacaatttgttgctagaagtgctcgatccgtcgaattgatatctgccgagctgcgacgttccggggatctggatcttagcgcactggacatttgggaggcgtcggcgggcttctaaagcgtggcgggagacgaaggaggggaaaaggatacatgaaaaagaagtgatatgtgacatcttgaaggcctttgccatgttgggtgcgctcgcatggcaggcatcgtaataaagatgttggttttgtttgctgggtggg

SEQ ID NO: 37541 - DNA, 926 bp, Zea mays
  Clone ID: MRT4577_13423C.1
cctcgaagccgcgcgggcggccgggccgggactaagcctgaggagtgcatgccctcctcctctcctcttggttcttgcagacaactcgcacctgcaggttgttcctttgtgtccaaaccaagtaaaggcggcaggctcctcacattctcctgccatatctgctgcccgctgctccccccctctctcttcaagctagccagtagctggctgaatggtcctcgcgcgagccatggtgatggagcacaggaagaagtcgaattatcttgttgccctcgtcttggcttcgctcttgctctccgccatggcaggagggcatcggaagaagcttctgaacaaagacgacgcatcagaatcaatggagacattggaatccacgcagcagctgcaggaagacgacgaaatggctgtggtggtccacgagagaattctcaggcaggcgaagatgaacgactacgggagctacgactcttcgccgaccatggctaagcctcacttcaaggacatacctaactagccagccccactagctactatatacattgaggtgttgcttgctagtcgagtcgcctctcctccgtcctcatacacaagcatacttgcctaataaattccatgtatcatcaccatgcatatatgtgagaatatatgtactgccgcttgatgtatatgtgcacagtgcacacactacctacatgtttatatatgtgcatgttcgtcgtcgtccatttcgaaatcgagtatatttgtgttgtataattgactaatatgaaagtttactagtggtggacgacctaaagtttttatcaaaggatgatatgatcctgcccctagcttactatgcaactactttctgttcatatgtgtaatagacttggccaaaaaaaaaaaaaaaaaaaaaaaaaaaaaaaaaaaaaaaaccccaaacc

SEQ ID NO: 37542 - DNA, 2044 bp, Zea mays
  Clone ID: MRT4577_134240C.1
ccggccggggccaaccagcatcttttgcctaccccggccccacccccccccccgcctttgccttagtgtagacttggcgccgcgtacctatttcctgattaaatcgatcctcttcttgtctagatttgttgctccgagtgcattgcatactatttgctttggcgtctaaacgacggtcagttttgttcggttagtgtattgctcgatcggcttggtgttgtatatgtctggatgtgtttgtttcgttgacgttcgtgttcagggtgtgttgggacattggttggaagcatgagttggctgaattgtttgttcgcctggaggtttctcatccgagttttgacggtaccgggatgctgaaatttgctaactggagattttgagagctgcgacgtgccggcttccgggggatctggatcttggcggactggacgattgcgaggagttgacgggcttgtaaagcgttgatggcctttgccatctcctttgcgctcggataccagacatcatatcaatgttgtggttattattggatgaaatttcgataattattagatctgagagttgatgctcgcggcggtccgtgccttacggacgccaacctagggtcggggtcttaaagttggggtaaaggatacgttcaaaaagaagtgagatgtgacatcttgaaagcctttgccatgttgtgtgcgctcgcatggcaggcatcgtaataaagatgttggttttgtgtgctgggtgggagatcgcacgagggaattgtttttttcatccctgggttctcccgcccattgtgtccctgtgccctgcttcgtgttgtttggcttctcgtcctacgcttcatcaccggtgctgctgcaaattgaacggcgtttctcgtctcacggcgtgctgcaaattgaacggggctacatcgcaacgcaacacacaaggtacaaaccggatctaaacattttcaatttacagcgaagttagcaagttactgaaatcaccatcaatcgttcaaaactcagcgcgccacaaacttctacgcctatactacgccatgcatatgcagttcatccactcaacgcatatcccgtaaggctataaagcacatgcgaaaggcgttcattcactctgtaaggcgttcttcacccaacgcttctcgcacgggggtgttctattggtagtcattatttgttcaggtgaactaggtctgaaaatctgggcaattccagattctcatgtgagatgataaaaatgtcataatcatttgctaagtttaatgacctacgtcagttcttacgtactaaaaaatattcgctagttgagtcgttccggcatattcctgatgtcctacggtgaacttgtatgtcattatcatttcaacgtatctagatgcattatggaagatttttagttttctttgttatatttgagaagttatatattgtatatacagagagatgcagctgtgtattatttgctgcagcttcgcgatgttgcagtcattttattgtagttagtttatatgatacgtcgttgtcaccgcatgaaaatctactgctgtgccatatgaagacctgcctcatcacggtgtttgtacataagatcaactactgtgcctacacagtggacggagtatttatatgatgaaatggctatggtcttcaaataagagcttttgttcagcagattctcaagctcacaattagatactagacataactcagataagagcttttgttcaacttgcactatagttcatttgagtacttacctattattggtctctcttgagttgaagctaggtttcaagtatctcctaaggtttcgtataggtgaaaatcagggattctctttttttttttgcactacaatctgtgacgttttaatatttgatgactagttgttcatgcattgctattgtatttgcatgaaattggatacagagggctttctccttagtgattttattcttaaatccttcttaattttcctgttttccaaatcaaaagatgtgttgactttccagatgtttttccctccttaaaattaaaagatg

SEQ ID NO: 37543 - DNA, 2154 bp, Zea mays
  Clone ID: MRT4577_134241C.1
gactcctatcggcgattgggcccctcgaggccggccgggaacccgcactcgcccaaaaccctactgctcccgctccgctcctgcttggtcgagatcacttcgccgccgccgctttcgagatctccgggtggagcaagcgaggaaaggcagcagccatgtcgctccgcgtgctgaaccctaacgccgaggtgctcaacaagtcggcagcgctgcacatgaacatcaacgccgccaagggcctccaggacgtgctcaagaccaacctcggccccaagggcaccatcaagatgcttgtgggtggagctggtgacctgaagctgacgaaggatgggaacaccctcttgaaggaaatgcaaattcagaacccaactgcaatcatgattgcgaggacggctgtggcacaggatgacacaagtggtgatggcacaacctccactgtgctatttatcggggagctaatgaagcagtccgagcggtgcatcgatgaaggaactcatccaaggttcttggttgatggttttgatgttgctaagagagcgtgtcttgattttctcgataagttcaagacgccagtcgttactggtgatgaacctgacagagataccttaaaaatgatagcaagaacaactcttaggacaaagttgtatgaagggctggctgatcagttgactgatattgttgtgaatgcagttctctgcattcgcaaaccagatgaaccaattgatctatttatggtggaaataatgcacatgcgccacaaatttgatgttgacacccgtctggttgagggtctggtcctggaccacggttctcgtcaccctgacatgaagcgcagggcagagaattgttacatcttgacctgcaatgtctcattagaatatgagaaaagtgaaatcaatgcaggatttttttactcaaacgcagaacaaagagagaaaatggttgctgcagagagacgccaagttgatgaacgtgtcaaacagattattgaattgaaaaataaggtttgtgctggaggcgataaaaactttgtggtgatcaatcagaagggcattgaccctccatctctggatctccttgctagagcggggattattgctcttcgaagagcaaagaggagaaatatggagaggcttgtgctagcatgtggtggtgaagctgtcaattcagttgatgagttgactgaagattgtctaggctgggctggtcttgtctatgagcatgttcttggagaagaaaagtacacatttgtggagaatgtgaaaaatcctcgctcttgtactatactgattaaaggacctaatgaccataccattgcacaaatcaaggatgctgtccgtgatggtctaagatctgttaagaacacagttgaggatgaagcagttgtgctgggtgctggtgcttttgaggttgctgcaaagaagcatcttatcgacaatgtgaagaaaaccgtcaaaggacgagcacaacttggggtggaggcgtttgcggaagctcttcttgttatacccaagactttggctgagaactctggtttagatactcaagatgtgattgtttctctccagaatgagcatgaccgtggattagttgtggggttgaaccatcactctggggatccgattgatccccagatggaaggcatcttcgacaactactctgtgaagcgccagatcatcaattctggacccatcattgcatcccagttgctgcttgtggatgaagtgatcagggcaggccgcaacatgaggaaaccgacttagatttttgtcgccacctagccgagacttatttgttctaccttttgttttggttttgtgcctagtagtgatctggatgatacgtttgacttgagttggtcccatttcacgaagcaggtcgcattcgctttttttttttgggattactgcgtgcttccattttaacatgggattttagttttatcgatggttttaacatcctcctatgaggaaacaaagcctctagagagacgaggttgccttcccgaagttagtgccaccaaacttgctgcatggaacatgaagaagcaatgtttataacaatgttattatcaagtaatccgatgtgatggataaaatattggtactggcgtttttcctcttaccaaaaaaaaaaaaaaaggcccctagggcc

SEQ ID NO: 37544 - DNA, 398 bp, Zea mays
  Clone ID: MRT4577_134242C.1
gagatattctggttggtgaattatcttgaagatcaaaattgctattaatgcagatattgttttggtagattgaatagcattttggtagtgctatgagttatatttggtagggactttttatgagggttgctaccacgttgtatgttttgggtttccacattgtaaaaagtttgtatttatggagagtataatggctttgataatattatggctactaaattaaatgattcacaacatattgctttgctagagcttcaatgcagtaaaagcttggatactggtctgggattgagcctatgttataattcgaagccaagagatctttgttgctgctggatctaataggtactatgtgtcacttatgtcatggtgcactattgggagcaagaataaactaa

SEQ ID NO: 37545 - DNA, 609 bp, Zea mays
  Clone ID: MRT4577_134243C.1
accccgcctttgccttggacccttggtgaagaaaagtcgccgcgttcctcttgcctgatgaaatcctcttctcgtctagatctgagcctccgcgtggcttccggatcagatgcttggtccgatcgaacaacggtgagtcttgctctgttacttgattgttcgaaacgcatggttttgttttgtgatgatgtgcaggttccgatctgtttcgtttgattgatgagttgacgacgcatcagctcgaagcgagacgaggctgcatggtttttgtgcctggaggtttctgatccgcgtggttaaggaaactgggtgctacaatttgttgctacaagtgcccgatccgtcgaattgatgtctgccgaccttcagagctgcgacgttccgggaatctggggggatctggatcttggcggactggacaattgggaggcgtctaaagcatggctggacaattgtgagatgtgacatcttgaaggcctttgccatgttgggtgcgctcgcatggcaggcatcataataaagatgttggttttgtgtgctgggtgggagatcgcacggggaattgttttttcatccctgggttctcccgccctttgtgtccccgcgccc

SEQ ID NO: 37546 - DNA, 307 bp, Zea mays
  Clone ID: MRT4577_134244C.1
ggggcacaacaaaaggggatggacaaattattaaaaggggggcaaaaaaaaagcgtaaaccgggggggggggggggggtacaaccaaaaaggggggagcatgcctagcaagccaaacatattaccttacaggagggatcccatgggcggttaaaaaatttttggggccttcgaaacaaaaacagcacaaaggggttactagcggggattatagttctacaaaattgggaaacacgattatcaccggtgaccaaaggctaccccttggggggggggacgggggacccgggaaaaaccatggaatcccc

SEQ ID NO: 37547 - DNA, 1782 bp, Zea mays
  Clone ID: MRT4577_134245C.1
acgccaaccagcatcttttgcctaccccggcaccacccccccccccccccccgcctttgccttggtgtagaaaagtcgccgcgttcctcttgcctgacgaaatcaatcctcttctcgtctagatctgagcctccgcgtggcttccagatcagatgcttggtccgatcaacgacggtgagtcttgctctgttagttgattgttcgaaatgcatggttttgtttttgtgatgatgtgcaggttccgatcagtttcgtttgattgatgagttgacgcatcggttcgaagcgagacgaggctgcatggtttttgtgcctggaggtttctgatcagcgtgtttaaggaaactggatgctacaatttgttatctgcagaccttcagagctgcgacgttccggggaatctagatcttggcggactggacaattgggaggcgttgacgggcttctaaagcgctgctggattgctggatctcctttctgccccgcgactcgatgatatctctttgtattggtaattattggatgaaatttcgataattattagatcggagagatgttggtcgcggcggtccgtgcctaactgaaggcaaggtaaggtccgagacaaaagaggggaaaaggatacatgaaaaagaagtgagatgtgacatcttgaaggcctttgccatgttgggtgcgctcgcatggcaggcatcgtaataaagatgttggttttgtgtgctgggtgggagatcgcacagggaattgttttttcatccctgggttctcccgcccattgtgtccccgtgccctgcttcgtgttgtttgtcttctcgtcctacgcttcatcaccggtgttgctgcaaattgaacggagcttctcatctcacggcgtgctgcaaattgaacggggctacatcgcaacgcaacacacaaggtacaaaccggatctaaacattttcaatttacagcaaagttagcaagttactgaaatcaccatcaaccgttcaaaacttcgcgcgccacaaacttctacgccttttctacgccatgcatatgcagttcattcacccaacgcttatcccgtaaggcgttcacccaaccgttcaaagcacatgcgaaaggcgttcattcactccgtaaaaacgtatctagatgcattatgggagatttttagtttcctttgttatatttgagaagttatatattgtatataccgagagatgcacctgtgtattgtttgttgtagcttcgaatgcgagacgtatggttgtagtcattttattgtagttagtttatatgatacattgttgtcaccgcatgaagattaactgctgtgccatatgaagacctcctgcctcatcacggtgtttgtatataagatcaactgcagtgcctacacggtggacggagtatttgtatgatgtgaaggtcactattcagcatcgtcagtatgaattggctatggccttcaaagctctctttcttggtcaccggacagggaagaaatattctgctcaagctcacaattagatacaagacataactcagataagagcttgttcaacttgcactatagttcatttgagtatttacctattattgatctcttgagttgaagctaggtttcaagtatctcctaagaattcgtatatgtgaaaaccagggattctctttttttttttttgcactacaatctgtgacgttttaatatttgatgactagttgttcatgcattgctattgtatttgcatatcccctaggtttaagagcatttctaacaaggtgactcaatgatgtctc

SEQ ID NO: 37548 - DNA, 409 bp, Zea mays
  Clone ID: MRT4577_134247C.1
acaatataatttcgtaaaacggataggtttaatataaagagttataagtgttatctagtaaaccttttgcaattcagaatacatgaattctattacaatttaatttcgattatactttttctataaaatagaacctcttttgaagtttagtacatgacctctaaatttaccggcctgcccctatataacatatgctctaatgaagatcaaatcaagaatgctttattgctatgaagaagaggagggtgatgagaacatgacacctacatgtatgaccattgattataaggtgagctcgttccaatactagtattacggtaagtctatctaatattggtatttcaaatgtatttagaacaacaacaataatagacaatacatattgtatgacccagaccaaacttaaaat

SEQ ID NO: 37549 - DNA, 304 bp, Zea mays
  Clone ID: MRT4577_134248C.1
atcacccactctactactcgaagttactaccatcaactagcttcaacattagagtagagcgtgcctaggatggcggcaccgaagccctaacctgcggccctactactactgactgaagcccacatactgtcgctgtctcacgcgtacctgacgcacaacaactgcatgaacaacagcatgctcacagtccaaaacttgtgcagccacaacttgactctgacgctgaaacccctttccaacaacacaccgatattcgcgtgaacctacactttgcacccgaacatccacgcccagatctctgtgc

SEQ ID NO: 37550 - DNA, 257 bp, Zea mays
  Clone ID: MRT4577_134249C.1
aatatacaggcgcatcgctctattatgatgcatcgaccatggcgccgctgaattctatctctttggccgccctcaacagattccgagcatacaagccccccgcgttcccgctatgggacaagttaccggcgcgcaaggagccgccgtcctggtgctgctgtttgcggatcgatggggttccctcagagtcgtcgttactatgcgcgcggccagtctgcgcacttctcgggccatgcagcgctgccgggcggcaaagc

SEQ ID NO: 37551 - DNA, 112 bp, Zea mays
  Clone ID: MRT4577_13424C.1
ggagaaggtgacatgaaggagttggtgcccaagaagcttccatctgtgcatcttgaggttgatcagataggcacaggtaactatgataatggataaattactaactggacaa

SEQ ID NO: 37552 - DNA, 330 bp, Zea mays
  Clone ID: MRT4577_134250C.1
acggaacatatactggcattggaggaacaaacagaatggaacaggggagcagacaagctattcatgcacaacaggagcatccaaaattacacgagacaagccccttcccctttccccgggtcaccgtctcttcccaaccaacaggaataaacaccgacatcaggaataacttcctctggcgatcaccaaaaataataagggcaggactcaacaacaggacgaccaaaaaaagagcaaaactccccatggttttttttctcgccggggccagggcacaccagccatttgtaagtcacgcccccccttttaacttgctgccgcacttgaagc

SEQ ID NO: 37553 - DNA, 973 bp, Zea mays
  Clone ID: MRT4577_134251C.1
aggcaggccgggtctctccggcgagcgcctggaggaaaggtcgaagcgtcgtctctctcggcacggagcctagtgcccggcctcgtgagatccgaaattcagaagcgaggatggcgacgaccgcgactaggcggtggtggaggcggcacgacggcggcgacgatgacccagacgacctcgtccccatggacacccaagagcaagaagagctggtccggtctctggaggctaagcaggcgcagcaaggccgccgttggaggcgcgtcttcgcggggttcctcctaggttacgcggccttccttgtctactccagtttccatcatgcttggtctccctgggagctgcggtaccatgcttacttcatggaagatttgcctgcaccaatggtcataattgcagattggatagctgctctagcatgcctatttgctgtgaaaggattactacagaattcaggcccatcaaagaagtggatgtggtattcttgctatgttggcattttggtagccatcttttggacatactacatcttgaggttgccaagaattcgatgggatgttgcatggctcccactcggtcctttgatggctggtgcattgagcctgtatgtggaccatgtgctgctggagtcaatgcaagatatcagcacattgagaagttacatgtataacttcaaggccttgtagttttgagcataatttcccttgcacctatatgcagctatatgtggaacaggttcaggtcatttctccttttttttagtggcagagttgcggtggtaccttgttaaatggtgtgttagcatgaatttttaacctcagagaatacttgtgcatcacttccgctctgtggcgggtgtatgtacaagctgtggtgccaataggcaccgcggctgtttgaaacacccccctgcttcagtgcttctactgatgtccatatttgttgtagaaattgatgatttttgagaggctta

SEQ ID NO: 37554 - DNA, 1233 bp, Zea mays
  Clone ID: MRT4577_134252C.1
gccggccgggcttcggatttgtcatttcgcaataagtcacccaaccaaacagcgagcgcaaggaagaaaggtcgaagcgtcgtctctctcggcacggagcctagtgcccggcctcgtgagatccgaaattcagaatcgaggatggcgacgaccgcgactaggcggtggtggaggcggcacgacggcggcgacgatgacccagacgacctcgtccccatggacacccaagagcaagaagagctggtccggtctctggaggctaagcaggcgcagcaaggccgccgttggaggcgcgtcttcgcggggttcctcctaggttacgcggccttccttgtctactccagtttccatcatgcttggtctccctgggagctgcagtaccatgcttacttcatggaagatttgcctgcaccaatggtcataattgcagattggatagctgctctagcatgcctatttgctgtgaaaggattactacagaattcaggcccatcaaagaagtggatgtggtattcttgctatgttggcattttggtagccatcttttggacatactacatcttgaggtatatcgtcttagtcaacttatctttttttttcccttcccatgtcactcaaatgctttgctaaaatattagcatttcaaaaccatttgtatcatgtcagcactaattctagctgttgtagctacactaacacacagcagccagttctagatatggtattccttctgactgttgttgtaggttgccaagaattcgatgggatgttgcatggctcccactcggtcctttgatgtatgatgtgacttgaatctctcttaatcttctttcagcaactactcatgaatagtagtagttaacttacgattgtcctgtatatatgtgctactgtgcagggctggtgcattgagcctgtatgtggaccatgtgctgctggagtcaatgcaagatatcagcacattgagaagttacatgtataacttcaaggccttgtagttttgagcatagtttcccttgcacctatatgcagctatatgtggaacaggttcaggtcatttctcttttttttagtggcagagttgcggtggtaccttgttaaatggtgtgttagcatgaatttttaacctcagagaatacttgtgcatcacttccgctctgtggcgggtgtatgtacaagctgtggtgccaataggcaccgcggctgtttgaaacacccccctgcttcagtgct

SEQ ID NO: 37555 - DNA, 692 bp, Zea mays
  Clone ID: MRT4577_134253C.1
accctcgagtcgccggactcccctccttcccacccacccaaccaaccctcccaatcccacactcgtcgtcccagtcccaccgaaccctactcaccaacaacagacccgcaggagaagggggaaagggggggaaattcctgtggagacgacttcgccgccatggcgggcgatcccccgacggccgcggagaaggagaccctggtctcctctttcctcgagatcgccgctggccagacccctgagactgccactcagttcctcctgatgacgagctggcacctggaggaggcgctgcagctgttctacatcgacggcgagtccgccctcaccccggcgcatccggcggcagcggccggggcggaagaggcgatgaggttcgctccacccccggcggctgcactgggcgatgcaatgttgcatggatttggggtcggggaggacgacgacgtccgcgcgcctctgcctgtgaagagggagactctgtacggcgagggcatcgtatccgtcatgcgacctaatgcatcagctgcatctcggaactttgaacaagaagcaagacaatctgctgtttgggactctgaccagaatgctacatctagttctggggataatcttgcttctttataccggccacctttttctttgatgttcaaccgaccctttgaccaggcaaagttagaggcttcttccct

SEQ ID NO: 37556 - DNA, 1860 bp, Zea mays
  Clone ID: MRT4577_134254C.1
cttcaatcccacactcgtcgtcccagtcccaccgaaccctactcaccaacaacagacccgcaggagaagggggaaagggggggaaattcctgtggagacgacttcgccgccatggcgggcgatcccccgacggccgcggagaaggagaccctggtctcctctttcctcgagatcgccgctggccagacccctgagactgccactcagttcctcctgatgacgagctggcacctggaggaggcgctgcagctgttctacatcgacggcgagtccgccctcaccgcggcgcatccggtggccccgccgcccacgtcggcggccgcgtcggcgttggcggcagcggccggggcggaagaggcgatgaggttcgctccaccccccggcggctgcactgggcgatgcaatgttgcatggatttggggtcggggaggacgacgacgtccgcgcgcctctgcctgtgaagagggagactctctacggcgagggcatcgtatccgtcatgcgacctaatgcatcagctgcatttcgtaactttgaacaagaagcaagacaatctggtgttcaatgacttgtgcacataaactacctttgagctgaaactccaggagattcttaactattgctgatattttgtcattctgatgatttttttccaaattaaggcaaagttagaggcttcttccctggacaaatggctattaatcaatttgcagtcgacagcggaatttagctctcacatgcttaatcgagacacttggggaaatgatgcggtggctcagttgattcggtcaaattttattttctggcaggtttattatgacaccagtgaggggaggaaggtatgcacgtactaccatttggtgtccatgcctgctattctcctaattgaccccgtcactgggcaaaaaatgcatgcttggaatggaatggttcacccagatcgtttacttgaggatttactaccttacctggataaaggtccgaaggagcaccatgcagctcaacctcaaaagcgcccaaggaaagttgatccggaagcttctacgggcaagcaaggcaaaatagctgtagaggatgaagatgaagagctagcacgggcagtagcagcttctctagaggagagtaaagaagtcattgaagcatcagacgccagtgatgacatggttgaagctgaacccgaggaggaaaatgagcccaccctaaacaccaagcctgattaccctcctctccctgaagaacctacaggaagcagggaccttctctgcagggttgcgattcggctaccgaacaaccggaggatccaaagaaacttccttcacacagatcctatcaagctcttgtggtcattctgcgctcctcaggtcgaggacggggagaggagggctttccacttcgtccaggcaattcctggggcatcccagaaactggagttgggaagcgacctaacattcaaggaagccgggctggccaactcgatgatcaacctcttgttggactgagccgcccgctctctcaacctgcactttgagatgagacgccgtcggccggtcgaggggtttgtatttcaggatgggcttgaagatgatggtgcgcttgggtatcttctttccttgaggattaactcttatcttttgctccactggagctaggagtccgaggacaaaccaaaaaaaaaagtctggtgtgccctgagctgtttgtgtgtggaaatggtccttttgtcgttcgttcttgtgtccgtatacatcctgtccccggtagggcttaactctatttaatgcacatatctatgaaagattcactctggagcttgccttgaaaaaaaaaaaaaaaaaggcggccctagcgatctagaactag

SEQ ID NO: 37557 - DNA, 836 bp, Zea mays
  Clone ID: MRT4577_134255C.1
ctgtgcggcgctcaggcggcgggttggaacctcccatcccacactcgtcgtcccagtcccaccgaaccctactcaccaacaacagacccgcaggagaagggggaaagggggggaaattcctgtcgagacgacttcgccgccatggcgggcgatcccccgacggccgcggagaaggagaccctggtctcctctttcctcgagatcgccgctggccagacccccgagactgccactcagttcctcctgacgacgagctggcacctggaggaggcgctgcagctgttctacatcgacggcgagtccgccctcaccgcggcgcatccggtggccccgccgcccacgtcggcggccgcgtcggcgttggcggcagcggccggggcggaagaggcgatgaggttcgctccacccccggcggctgcactgggcgatgcaatgttgcatggatttggggtcggggaggacgacgacgtccgcgcgcctctgcctgtgaagagggagactctctacggcgagggcatcgtatccgtcatgcgacctaatgcatcagctgcatttcgtaactttgaacaagaagcaagacaatctgctgtttgggactctgaccagaatgctacatctagttctggtgataatcttgcttctttataccgtccacctttttctttgatgttcaacggaccctttgacaaggcaaagttagaggcttcttccctggacaaatggctattaatcaatttgcagtcgacagcggaatttagctctcacatgcttaatcgagacacttggggaaatgatgcggtggctcagttgattcggtcaaaatttattttctggca

SEQ ID NO: 37558 - DNA, 2230 bp, Zea mays
  Clone ID: MRT4577_134256C.1
attgggtacgtcggccgcggccggctcttttccttacttcccaacccaccctcccaagtcccaagcccaccgaaccctactcaccaacccacccgcaggagaacggaaaaaaaaaatcgtgtcgaggcgactttcgccgccatggcaggcgatcccccgacggctgcggagaaggagaccctggtctcctccttcatcgagatcaccgccggccagaccctcgagactgccacccagttcctccagatgacgagctggcacctggaggaggcgctgcagctgttctacatcgacggcgaggccgcccacaccgccgcgcattcggtggacccgtcgcctgcggcggcggccccgtcggcactagcggcggcggccggggtggaagaggcgatgaggttcgctccacccccggcggctgcactgggcgatgcaatgtcgcatgggtttggggtcagggaggacgacgacgttcgcgcgcccctgccggtgaagagggagactctctacggcgagggaatcgtgtccgtcatgcgacctaatgcatcagctgcatttcgtaactttgaacaagaagcaagacaatctgctgtttgggactctgagcagaatgttgcatctagttctggtgataatcttgcttctttataccgtccaccttttcctttgatgttcaatggatcctttgacaaggcaaagttagaggcttcttccctggacaaatggctattaatcaatttgcagtcgacagaggaatttagctctcacatgcttaaccgagacacttggggaaatgaagcggtggctcagttgattcggtcaaattttattttctggcaggtttactatgacaccagtgaggggaggaaggtatgcacctattaccatttggtgtccatgcctgctattctcctaattgaccccgtcactgggcaaaaaatacatgcttggaatggaatggttcacccagaccgtttactcgaggatttactaccttacctggataaaggtccgaaggggcaccatgcagctcaacctcaaaagcgcccaaggaaagttgatccggaagcttctacgggcaagcaaggcaaaatcgctgtagaggatgaagatgaagaactagcaagggcaatagcagcttcgctagaggtagtcattgaagcatcagacgccagtgatgacgatatggctgaagctgaacccgaggaggaaaatgagcccaccctaaacaccaagcctgattaccctcctctccctgaagaacctacaggaagcagggaccttctctgcagggttgcgattcggctaccgaacaaccaaaggatccaaagaaacttccttcacacagatcctatcaagctcctgtggtcattctgcgctcctcaggttgaggacggggagaagagggctttccacttcgtacaggccattcctggagcatcccagaagctgcagtttggaagcgacctaactttcaggaaagctgggctggccaactcgatgatcaacctcttgtggggctgagacgcttccatcttgcgcttggaaggccttgatcaggacgtgtccagtgtcctccggatgggcttgaagatccagttatttttcattccttgaggattaactcttcatattctgctccgtccccctgggctgcatgttgaaatgctcctttttgccgttcgttcttgtgtctacacatacatcgctgtccccggtagggttttgcctcgatttagtgcacatatctatcagagattcaatctggtggtgtggggcgtgcgccatggtctggtgctttgctttgatgtttcccttttgtatggtcgtggcaaagtctgaaagggagatgcatgaaggcaggcagcgcaatcagattcacagctggacctggatccaaaaccatgaatgaatgagcaggcatggtccttggtgtgccccgtccaacctcacacagtggccgctcaaagctgccggcacaggacagcgtgcggatgcagatgcagtgatgggagatcgcaggcagggagagtagagcagagagagagggacatcacaaggttacgtccctttgatgaatcatcactgcccctccagagacattgtttcgttgcatgatttatatgttctatgacaccttttgtgaacttgcttgatgtatgactgtacctaataatctaatatgttcctttttaaaaaaaaaaaaaaaaaagcggcctaaaaaaaaaaaaaa

SEQ ID NO: 37559 - DNA, 818 bp, Zea mays
  Clone ID: MRT4577_134257C.1
atgattctgatgaatcttctaagggtcagtgtacctcatttcactagtaggcaacttgagcttacaatctaacactctctgttccaaattatatgttgttttagcttttatatatacatagctcatgcacctggacatatgacatgtctagatacataataaaaaagttatgtagaaaagccaaaatgaactataaattgaacggagcggagtacatgtcatccacgacccttcaagtcactccctcgtactatttgccacccttactcattttttagtcttttattttgtcaggattcgagtaaaaatatccaaatcgaggcatttcacgtgttcaaggtatgtataataaccttaacatctttttgtcaacaaaagtttgcttaaactcgtttggttattttacatgtatcacagctgtttgctgcgaataaaaacaaaccacctgaggtagtgaacatactggtcaccaatagaaacaagccggccggggatacttcgtttttttgctggattcaagattgacaaagaggatgaacagtttgaagcagacaaggagcatgtcataaaagaaatatcggcgctttgagtatgtctgaggttgtaattagtcattctgatgattttcttttcttgagaaagtgcatgtaaaataataaactttttgtatattattctgttggacttagaggaacaaaaaaaaaaaaaaaaaggcccctatgactcgttgactcgagttgcacttggaaactgccagcaaatgtaatagtttttaatagaaatgagtggatgcccatgccctttttagggcttgtttc

SEQ ID NO: 37560 - DNA, 259 bp, Zea mays
  Clone ID: MRT4577_134258C.1
agggcaactggcaaccggcgtgtacctaaatccaacacaagaactgatgcgaacgtagcaccgatacaggcccaatgctaacaaacaggcatgactaggtatccttacatgctgacctctagcaaacgctaaaccacgtgctcttcagatccatgccaagacgccagcgcaaagtgtcggtgaccacacccttgttcgctagcaacgcgtgcctgtctggggccactgagacgcttagcgggcctctacagctacttgg

SEQ ID NO: 37561 - DNA, 253 bp, Zea mays
  Clone ID: MRT4577_134259C.1
gtatgaaaaattaattttttttttgagggttttttttttatattttttgtttaccaaagctcgaattgtgttttttacaaccagaagtcgtgaggccaacccagcggattactaacaccaaacgggacatattccacacatgcaatgattcggggcatgtgctagcttggacatccatacacacacatagtttaccaactactgggtattacgggagtttcaaaccatgcctgcattatatttcacaaaatgc

SEQ ID NO: 37562 - DNA, 365 bp, Zea mays
  Clone ID: MRT4577_13425C.1
atcaagaaagtccacggtcttattattttcagagtgatgccctgaaaaaaacagctgattacttcaatatacatcgttgcagttccaggggcgtaaaaactaccaacgtgatgaaaccaaaggatttgtccagagtaacatttccccatgataccaaccacatgcttacaagggacacatttggcttggatgtaaggctgaagcgcctcgtcacggcgcgcatggtcactacctcttcatcattggaagggtggattaggacagctctgccagagactgctttgtgggctccacattcaaccgcacgaaccaggccgtggataatttgaggtgcgtctggtgcacacatggatgcaccaagtact

SEQ ID NO: 37563 - DNA, 304 bp, Zea mays
  Clone ID: MRT4577_134260C.1
ctcttttttaatatacacgaaccatgcgtgttgctatttcatattatctggggttcactgagtaaggagatcacaggcggatcatgttgcttgtgcacaacaaactccaaaacaacaataagaggcttgccatctgtacgacgacgacgacactcatgtggggacttttgggaacagggtactagcatctgtggccggcgagagcgactatcccgtactgaacggacatgcccaccttggccccggtgcgctccatatcggcagacatctgcaagaggaatggtgtatgaggttcgcgagcatg

SEQ ID NO: 37564 - DNA, 162 bp, Zea mays
  Clone ID: MRT4577_134261C.1
caagcgtccggttcagggtgcatctaactggcgggggctccttcatgtgggattcattcccgcgcggccgaggacatattgctagggatctaaactggagacgctgcatgggatcattaccaccgctccaaggaagacaacgatctcttgaaaaggttgaac

SEQ ID NO: 37565 - DNA, 294 bp, Zea mays
  Clone ID: MRT4577_134262C.1
ggggaaaaaacagcaatttttggggtttggggccgaaaactgttttgccttgggcattgaaaaaaaacaaggttctttcccaaaaatgggattgggccccccaaaacctcccagggggggggaaaaaaaggcttaacaaaaaaaagagccccgcggggggaacaatgggttttttggaggggccccgcccccccctaaaccaaatggggccctctcccccgaactggtgttttggccaataaagccggtttggccaacgcgggggcccaataaacccccttggcgggttccttg

SEQ ID NO: 37566 - DNA, 227 bp, Zea mays
  Clone ID: MRT4577_134263C.1
ccgggccggggctacattgcaccgcatcgtctaagctcgcctgccctttacagcagcttactactacaaagacgacaacacagcgcgcgcgcgccaagctgagctcagctcgtcacgacacgccagcatggtggtgccttccacgacgccggtggtgcgccaagaaacgccaccgccgtcccacgacggcataggcataccgacggtggacctgtcggcgccgggcg

SEQ ID NO: 37567 - DNA, 548 bp, Zea mays
  unsure (1)..(548): unsure at all n locations
  Clone ID: MRT4577_134264C.1
gcacgagtctcactctcagctggtcgctcactcttgcagctccacccttaatcactcagtcttagggtcttagctctaggctctagctagccgcgccanctcnncttcgtgtagcnnncatcagnnccttctcatcgccaccaatgttcactgccgaggtccagaccccgaccgtcgtggcggccccgaggaagccccgcccgtnnggtggagtaccccccccgccgcccnggccgtnncgtgccnncgaggagctnnctgcnnccccgcnnncgaggccgagngctgagnngctgaggcctgnagngnncctgnctgncntnccnnntgctcctgctggntccccagngagccnnggccgccgnnagngnccgngnagngnnaggnnttgncnttggngcnttcccnntgnnaggnnnagcccgagaaggccagcgagntgaggcccgtgccgcaacgcnnaagcggnncgggnncgngncccangnggncncnncaggggatcggcgtgcgcgcgtggcggggtaagtcgnnctcgcgncnngcgt

SEQ ID NO: 37568 - DNA, 579 bp, Zea mays
  Clone ID: MRT4577_134265C.1
ccacgctaacaagacaaaaatgcaaacgagggttccaattagatggctctcggccttaacagcacacaggctgaactaactgacgtctcctaggcttgaccagcatacggcacgatctgtctttactcttgcgcccgagtcttcatatcttgctgatggaagagaagagcaatcatcttgatggtctctgcatcttgaagaacctgcttctccagctccgacttatgtagctctgttgccaagcgtggcgtgaagcttgacgatcacgtcctcctcctcctccgtgatgttccccctcttgagacccgccctcaggtagttgatccaccgcagcctgcagctcttcccgcaccgcagcaacccagcattcttgggcagtgatctccatgagccttccccgtgctcctcgatgtacctcgccaggatctcgtcctcctccctggtccacctccccttcttcaaccccaccttcccgcagcacggcgccctccccatctgtttgcgaggtgcaactgcaagaaatgcggcagcttgcgtgtgcctgcctcgcctgcgctgtggagtggaggggaaaagtga

SEQ ID NO: 37569 - DNA, 291 bp, Zea mays
  Clone ID: MRT4577_134266C.1
agggggtgctaccatttttattggaaaaaacaaatagtttgaaccaccagggaccacacacaagcctttaaattttttaggggaaccaaaacaggaaggcatctggctggtttttaggactattcactttaccgggtgggaagatatttacttaattacacgttccggggggcaatatatacagggggatatcattttctcgctatgagaaacaggttatacacggtggattttagagcccacgggggaaatggtaaaacttgaaacccccgttcaattgcacggataaag

SEQ ID NO: 37570 - DNA, 419 bp, Zea mays
  Clone ID: MRT4577_134267C.1
tcttttttgtaactactccagcttgaaggacccaaggtgagctagtttcaccattggtagagatggccaaaggtggatctttcttattgaacaagaccatgttgctgaggagtcacaggcgctgatcgaattcagaaaggggatgaagagctatcgttccgaaccagcgtcagatactgagagagaggctgatgctccaaccagagtagtagagggactacaatcctccgatccttgaaaggaagcttaaactaccgacaatgcatacgatgcaggagatccaccttacgcgggaactcagaccgtaggaaggaaagctgaaactagctcggaataatgacaaagtggcgccgtaccattgatacagacgacgaagattagtctcgaaatgccagaccgcctcatggggataaaatatg

SEQ ID NO: 37571 - DNA, 511 bp, Zea mays
  Clone ID: MRT4577_134268C.1
ccggccgggaatcacattccaacctcaactacctacccgataccaaccggccaagatgaaggcctctttcgtcgtctctcttcttctctccctcggagtctcagctactccagctgtcgacactaccaccattgaagacggtggcttcacctacactggtatcgacaagcctcttctcgctctccgtggccttgaggcccgttgcgactgcttcccctgctactctcctcacgccgactgttccccaggaaagtgccagtgtgctggagactacggctgctggtcttgtggcggtggacgcatgcagtgtcagcctggccctggctctggacagtgctggacctaagcggtttcggcttttgttcacgcggatagctggactctaccagaatcacatgtgcacattcggcattttgacagacacgtgagaccgaaagcaatctttttactacaggcaatacaatacgaatttgggatcaagtgcaaaaaaaaaaaaaaaaaacccgcggcc

SEQ ID NO: 37572 - DNA, 269 bp, Zea mays
  Clone ID: MRT4577_134269C.1
cgacgtcggaagctgcgggcgaggtgcctgctttcgccgccgatgtgaaagtggaggggaaagctacgttggcgacggatgtggatcgtgaagggggagatacggcggtgagcgacccgctctacgcgaacgagtcagctggtatggttggtgccgaaggccacggagatgagcccgcggagggcctggaggcggtgaatggtgaggaggagatgctagaagcaggagctcgtgatctgctcactgagacggagaagaatccggttctt

SEQ ID NO: 37573 - DNA, 281 bp, Zea mays
  Clone ID: MRT4577_13426C.1
aaagcgttcatattatatgaagaatataatcccggattcaaagactcaaatcagtgcaattcacctgatttttgggaccctccatcctataaatatattaagaatggaaaatatatacacactcactcacaagacaacacgatactcatcaaaacttctcaagaatccatattcaattccgagcatactatgcctttacacatattttcttgacttctaaccaatttatcataatggatttttcaagatttctctttttactttaacttactttacacaat

SEQ ID NO: 37574 - DNA, 751 bp, Zea mays
  Clone ID: MRT4577_134270C.1
cattgggtacctcgaggccggccgggaaagtcttccagcaccaaaaggctgcatgtaactcgacattccgtacacgaaaggagaacaatcttttcattatgcctgagactatcaagtacaaacagatccctgataccggcgacaaccataatgaaggctatgagaaacctgtggaacggcaacggcctcgcatcacggcactcatctcattccttgttggactctttacaatgggactcatcgctgcatgtttctcaatcataatgctaccagccaggccagtcgcacgcatattgccagaaattcgcagcggctcagatccagttactggtctcccaatatcttggtctcacggcgactgcggtaactcccccgaagaggcaagagctcaaggttgccgatacagcatcgttcttcacgcttggctgccaaagtcttgtctagcagaggacgacgaagaagacaccaaggacatgtataagggccgcaattggcctcttcaagcagcgtcaggccagaacctcacaatggaggagttcagtgctggcaactatggtcattttgtgacgacatttgactggcatgttacccactgcatgtatgtttggaagcgtctgcatagggtgatgttggatccaacaaaggaactcgattcttacacagccaattatcaccatacaagccattgtgtgaagatgataagaggggatgcttggggggatgaaggactctggtaccagggttttgtaaa

SEQ ID NO: 37575 - DNA, 2146 bp, Zea mays
  Clone ID: MRT4577_134271C.1
ccggggacaatattatccctaaacacggataccaacaagagaccaatgaagaataaatgtccatctgatgttatggtgacctcgaggccggccggggatgatggtgtcaccaatgctggcatacaattagatccacttcatttgtccagcaatgtagacacccaccacaagccaaaagttactgatcatcatgcaaatatcaaggaaaaagctactgaaactgatagtgataaggacaatatcatggaagaagctcctcaaactgttagtgaaaagaagccttcctactctgagtgtgtcaccttacctgatctagatttcttcaattttgagaaggttaaggatatcaatgtgtttgaagttggtcagatatgggccctctatgataaccttgatggcatgccaagatattatgctcgtataaagcattttgatgcctcgaacttcgaaatacattcaacttggctggagtatgttgcaatggatgaagatgagaagtggactgatgaagaactgcctactgcttgtggaaactttcgccttggaaaaggaaccgatatattagaaaaggaaatgttttctcacattgctacttggacgaaaggtaaaaagaggaagtcgtatgtcatatatcctaacaagggtgaggtatgggctctttacaaggggtggagcatggaatggtgctcagatgcagataatcatagatcatatgagtatgaggttgtggaagtcgtgtcaagtatgtcagccaatggtggcgcgaccgttgtcccactggtcaggattaacggatttgttagtttatttgcaacagctaaggacaaaccttcatttgtgataccatcaagtgagctgctccggttttctcacagcattcctttttataggactaaaggaaatgaaaaggttggtgttccaagaggatttctggaactggacaatgcatgtctccctgctgacctggatgcagcattcccttctcttactcttgattcttacatgtctctcggcaagaacgaaagcagcacatttgttgatgtgaccactgacaatacaagttgtaggatggatctgggagatgatcaaattgctcaaaaagagaatgaccacccaatatctacagacaatcccaaagatatgtgcccggaacaaaatacacccttaaaggaaaccactaattatgccaaagagtctggtgattgctctcttcaaagcagcctctcccccatcatatacacatatcctgattctgatttccacagatttggagaaaaacgctcctgcgagaagtttgaacgtggacaagtatgggccctgtacaacaacattgataaactccccaagttctatgcctgggtaagaaaagtcagggaagagccgtttagagtcgaggtgatctggctcgaggcctgccccgaacaggaccaggagaaacagtggctggagcaggacatacccatcagctgcgggacattcaagatccgaaaatggagagccgagtacggcacaaacgacaccttctctcatcaagtaaatgccagagaaaccggcgcaaagtgggcgctcgaaatcctcccgcaggtcggcgacatctgggccgtctacatgaactgggcacctgactgggtcccgtgcggtgctgacgcctgcgagttcgctatctgcgaggtcgtcgagcgcaccgctgaagctagcacaaagctcgccttcctggcccaagtcggcggctaccggtccgtgttcaggcctgacgagcagaggggagtgttggaggtgcctgccacggagaggacgaggttctcccaccagataccttatttccggctggcgggagagggaggtggtgggctccgtggcttctacgagcttgaccctgcttccgtccccgacgccttcctgtatggggacacctgatgatgtggactggcagacggtgaagcaggtttcctagatggttgaaccgaaccctgagtctgggtagcattatgtctcaagtgttaggctgtcactttatgtctcactggaaccgtgcggatgtagaattgtagatacggaggtgcctggggtgggtgggttatcgtcctgtacacactgtggaaaaggtctgttgtgctggttacagagcatggctaccgatcaagtt

SEQ ID NO: 37576 - DNA, 370 bp, Zea mays
  Clone ID: MRT4577_134272C.1
ctcgtctgtgatcgtgccgccctccttcagcgcctcgtcatccgagtctttcggcctcgacgatctctagctgtggtagctaccggagggaacgactcgtgcttattctcgtccccgtggcacgtttgcgtggcgcgcttgcgcgaacagtgtagatagtgcgcaagcagctgcgagctgtgctgccgtccttcccaagggaggaatgccagcttactttgttgtacggaatgccgtccttcccaagggaggaatacctccatgatgttcttttcctttattttttattagcatacgtgcgtgtattcataaaaaaatataatggatgaacaaaaatgaaaaatctaagaaattagttgtttcatgtatc

SEQ ID NO: 37577 - DNA, 360 bp, Zea mays
  Clone ID: MRT4577_134273C.1
atcctctacagcggacggcctgtcctttttttttttttttgtgatattttgtttttttttttttttaagagaggaattgtacaagaaccaatgcattacttgcttggatgggaaagatgcggaaaccggtggaactgattccgccttccaagcgccattggaccgtcggaccatcatgccatggagcttccaggaaaatggactatggaaccttaaaagggaagccagctttgtacggggccataccatatgttcggtttattgcgggcgggcgggcacaaacccaacccattccgcccgggggaaggccttcactttgttcccactatcatctgaagggcagaactcggccggcaattc

SEQ ID NO: 37578 - DNA, 351 bp, Zea mays
  Clone ID: MRT4577_134274C.1
cacaagctgtgttctttctttctttttccatttgtccattttccgtatccaacctctgaggcgaatccgatgacattccgccctactactgagtcatgacatcagggaaatatgctctatccatctctgtctatctatatatgtaataaggcgggaggacgacacacattatcatgcgaggtatgaccaaaatatatggtggaaagtaaaagttcggcttgggatggagcggactgggagatggacctgcccgggggcggtgaagggggaatttgagatatacgtcaaatggcaggccgctggaggatgcatctagggggcccaagtcgcgcctatagggggggggataac

SEQ ID NO: 37579 - DNA, 338 bp, Zea mays
  Clone ID: MRT4577_134275C.1
tttatcgtacgccccaggcggcggcagcagcggcggggtagcaatagagctacgagggctttagcaatggcggctccggggatcggcggcggcgaggcgatccggctcaagggccgcgccgggggccggctaactgaagctgcacaagggcgacatcaccctctggaccgacgactgcgccaccgacgccatcgaaaaagctgctaatgagcgaaagaaaggaggcggaggagcagacggagctaaacatcaagctgccggaccagagctagtgcaagcatgccggaaagaaccagaggacaaaaccaggagaccggagaccaactggagaagcccgg

SEQ ID NO: 37580 - DNA, 286 bp, Zea mays
  Clone ID: MRT4577_134276C.1
cgtactgtgtgcggtacgcgtgggtgtcgccctcgcgcatgcaagctgactggcgtcggtccgacgacgccggcgtgcctgactcgctgcggcggtggcgcactcgttcgcgctgttcgtggcggtgtcggttggcgcgtacatctccggcgggcacgtgaatccgtgcgtgaccttcggggccttcgtgggcggcaacatcatcctgttccgatggctcctgtactgggtgtcgcagctgctgtggtccgacgttgcttgcttcctgctgccgttctcgacgggc

SEQ ID NO: 37581 - DNA, 528 bp, Zea mays
  Clone ID: MRT4577_134277C.1
gctataaaccgagaaagttttaacgtgttgacatgacgcatactgtcatgtacaaatggattataaatgcgatagtggcgtttgtaaagcaggaggggaagaggtgagctctctaagcagtctcctacaatatatacaaatgtccggcttgggcaaaacaaaaaactgaaggaggcattgtacaaaaaggtgatagatggagtggaagtcaaaccaaagccatcaacaggcttttttggttttaccattagaaggcactggttggaagaagaaactttggggtctaactgctcagtgaccatgacaaagagcatcttgacccatagccactaattgctgatctgtcctaagcattgtaccagatttctataaaagaattgttaaaaactcttcttcttctccatgatagaccatttctgactgaacaccgtattggctacttatatcacacaccatacaaactccctaacataagaggtaaatctactgaaagcctttgatgtgaattaacacacattatatgctgtt

SEQ ID NO: 37582 - DNA, 417 bp, Zea mays
  Clone ID: MRT4577_134278C.1
ctgcatgcgctggggcgtaattatattgccgggacgaccatgttttttaggcggcggccggcctaaactttttttggacaagatgaggcctgtaaatgaacgtcatgcttatcatgagaataagcctgaggtatcctgggctacatggctgtgttatgtaggcgaacctaaaatgcatgaggcaatgttggaattgcccaaggaaggggaatcaatgattctggacttcacactattgcctgtggcgtgggtataagacaacacgcgatcacaaaaagggccagaattaatgccttggcacgggtcatatggggcttacaggggtgagggggcatcagactatataactgctggctcggtgaaccatatacaaaatctgagccacccccaggtgatttactctcttcaaaaccacct

SEQ ID NO: 37583 - DNA, 771 bp, Zea mays
  Clone ID: MRT4577_134279C.1
cgggacattctagctatctccgtagtgcggcgattgaggttttgttccgctttctcagggttttctatcgtctcgtctccatcgtcgtcgtcgcccgccgctgctaggtttggggtttccggtggccaggacccaagccagctccgtcgggcgccgtggggaactgctgggaggggcggtcgaccggcggtgcctctgcttcgggttctccgtaccggcgtcggaggggatcggatggcataagcattccaaaccaaacattacctatgggcggccttcaaagcaaaggaggataaaggtgatgcaattgtagaggaggaggttgagaagggaaattgcgtttcaaaccagccagacaaggtacagtctgataatgcttcattttcttcaaaccatggactggaccgtccaagcatggaagctccccctcaaagcagtagcagtgtctttggtattgttgtccgacaagctccaaatcttgaaccagaagtgaagcgatttatccaggagatggaacgcaaaggtgcgttggtaacggttatgaggggggaggcaattggtggagggccatagccaagcaacaccacgaccactatgcattagttgtagagagagtagagagtaaaccatgtcaaactatgctgtagttgtatagagtctgacacataacgtcgtggacttgagctcttgttcagtttttttttgtaaggtacctacagggtttggtcatatgataatttctccggaacgcatacccttacacctgtttcc

SEQ ID NO: 37584 - DNA, 791 bp, Zea mays
  Clone ID: MRT4577_13427C.1
cggttcaagatcgcaaacttcatgaccgcgaaaggaaaaacccacgatccctgctggattccaaactctgaaacgcgtgccagagtttcctggaggtgctcagtgctcctgacaagtatccgggaagcgtcccccacgcgtccgtcggaaatctccatcccgcatcgctgaaggagggccaggttgggcatggcaaccttctcgaggttgacgctgaggaggttgccgttcatcttgacgaaccgcaagagctcgtcgaaggagccgaagagcccaagccagaattcaaaattgcggaggaacgaggggctgcggaaccggatctgggcggcgatgactacctggccgacctggtggcttgacaggccgaggctgcggagctcggcgacgcggagagacagggtcttccccacgtcggtgcaaaggagtctgggatcattggcgatgacggttgtgaggtcggtgccggagatgtcgaggcccgccaggaaggcgaggacgacgtcgggcttcgagggagacctgaggtcgaggatccttttgattttggatgccttgaggacctgctccctggagagaccgcatctggcgacgaggtagtcggcgaccgtgaaagggttgctcgcggtggtggcggcggaaccggagaggaggcgatggaggggggtgatgcaggaagaggagcggcgggacgagaagagtagatgtggaagaatcaatttcgaaggcggaacatagcgtcgggagcgaccggcgggcggcgccgggagggatgtggtcccggccggcct

SEQ ID NO: 37585 - DNA, 351 bp, Zea mays
  unsure (1)..(351): unsure at all n locations
  Clone ID: MRT4577_134281C.1
tctaccttttaacgacaccagcagagaaatttccttctgagcgcgtgaaacatgttgtctgctggccacgagaacatctacaactacatggaggacctaaacgttacgaggttatagacctatcccaccactaggggcacggtggtctgcgggctgaggtttctcatgtcgctggagactggacaataggtattgtgtaggactcatgcagatggagggagccacggnggaacaataactgaaggaacagcattcgtacagcctgcctgaggagctaccgaagtagacagagactgaatgccagctagacgagaatcatgacctggagagggaactgcttgacgaccgaga

SEQ ID NO: 37586 - DNA, 654 bp, Zea mays
  Clone ID: MRT4577_134282C.1
ggtgtcgaacgcgacacgggtgacagaaacagagacagagccagctatgtcgaccaccaccctgcagctggtgccggggccgccggagccggggggggccgccgggtttcttgttgcgcggaccgccggcgtgtgagtgcttgtgcacactacgggccgcgccgagagacaaagggacaggagggggccccgtctcccccccgatttcggggccgtggggtaaacttgaacttcggccgtggctactcctccgccggaggtcgtcgacagagcgccgtctgtggcaggaagcgcggtgttccgggcgcatctgctcggttcggcacacggtggtgcacccacacgcgaaggtgaggcgtctcgcggtgcacagacacgcgcgcgtcttcgtgctctgacacccgcgctctgtgacggagctcatgggagagccctccatcctgctcatcaacgagagtctgtagcggcgcgtgcacgggactcggcgggcgtcttcttcaagtcgccgcacatcaaggagcaggtcaccgacgacatgcagcgcctcctcgcggccgtcctcggctgctgggaagggtcggggccgcctccccagccgccgatccgcatccaggacccgtccaggacgatggggctcctagaccctggggaggg

SEQ ID NO: 37587 - DNA, 437 bp, Zea mays
  Clone ID: MRT4577_134283C.1
gccgcccgggcaggatacagagctttatctttttttgttgttctatgttttgttggaacgatgccctttcaagttactgttaatagcatattgcttgtgggatgagcttgtttctaagctcaagaggagaaaaaaccggcccccctgaagtagaatgcatgttggggagggggaatccggcacaataaataaataaataaagggggacgcggcatttgttcttgtggtgctgacaaaaagccaaacccaaaagccctttgctttttggagttacttgggggggattgttcccccaaccttgggcggaaacaccctaagggggaattttggaaaaatccaatacaaggggggggggggggggatttattgaaaggggcccagtccccctcttggggggcggattacaaatcacggggccggggttaaaaaagtttcgg

SEQ ID NO: 37588 - DNA, 292 bp, Zea mays
  Clone ID: MRT4577_134284C.1
gggaaagggaagacccctttttaagctttaaaacttaagaaaaatttgcggctgaatctttggcctgctggctttctcgaccaggtaaaccgaacaaccagtttgcactcggggggattggttctcattgccatataaagtgccaaatataaaatccctcacattggttacaattgattttgcgggtgcagaaacttttcacaaggacaaaaggccacacatatcgctgacattgtgtttagatttcggagcaattgggcggggcaagggttctaaatggtttgatgcccct

SEQ ID NO: 37589 - DNA, 761 bp, Zea mays
  Clone ID: MRT4577_134285C.1
attttgcttttgtgggcgctgttcgattaggtgctactcgggtatagtcaggtgtctgccttatttaattagcttaacacagttacatgcccgggatatgtaatctgctcatcgttacacgtattgcttctcgtaatgctactatgtgttccatttgggcagtatattgttctccagtgataagtattgtattccttttgccgtttgactgggttgtagtattcagttgaagttgtatctataatacagtagtatgttttgtattgtccggtcattagtaggtacctgtcttacacaatcttgtggttgatacagttacatgactggtacacagatgtcactcatgttgccttcactttgtcatttgttccatttcactgctgtggccatttatcagtggcctgcacgcctctggtataaagttgttcacaaaccacaataggttacaagttccatgtgacccaataatatgggtatgatgtattgtccggacatagtcaggtatctgccgaatgcaatgctgtggtcgatacagttacatgtccggtagaaagatgtcattcatcgttacacatgttggcttaacatgctgtcatgtgttccatttgggtgctacaacatcttgatgttccatttgacgtttgttggatttcttttgaacacaattttattctgttgctgcattccaaatcaagctgtatttgagctgccatttagtgatcactaatcaatctgtaactgtacacagaacctttaaaaag

SEQ ID NO: 37590 - DNA, 760 bp, Zea mays
  Clone ID: MRT4577_134286C.1
cgcacgtgtggccaagtgttcatggacgcataatcacagcgttgattgtatcacagctgcttctccttgggttacttagcacaaaaggcgctggccagtcaacacctgtgctccttgttcttcctgtagtgaccttctatttccacaagtactgcaacaaccgctacaaaccgacttttgtgaaatgcccattgcaggaggcgatgaagaaggataccctggaacgtgccagagagccaggatttgacctcaaaggatacctaatgaatgcctacatccacccggtgttcaaaggtgatggggacgacgacaagttctcagtcgcagatgaaccagaagccgagcaagtcctggtggcaaccaagcggcagtccaggcggaacacccccgtgcccagtaaatacaatgggtcggaatcaccttcgcttcctgaaattgtaaatgaccaacggctataaagatgtctacagttttcctatgtatactaggtatatgcccgtgcgttgccacggaagttaaaaaatagtataaaacatgtataccgaacaccatgttctagacaatgctagtgaaactgaaataaaaatagctacataattgcttaaatagttatacagctcgtagcacaaacaaaacaaagttgggcataacgttaagtgacacttttcctgtatcagacttggactatgtcccggctaatgcttgtagcctttgaatattatcgggacccattgatcactaaaaaaaaaaaacctcgtgc

SEQ ID NO: 37591 - DNA, 3155 bp, Zea mays
  Clone ID: MRT4577_134287C.1
gggaccaaggggccccgataattttcaaaggctacaagcattagccgggacatagtccaagtctgatacaggaaaagggtcacttaacgttatgcccaactttgttttgtttgggctacgagctgtataactttttaagcaattttgtagctttttttatttcagtttcactagcattgtctagaacatggtgttcggtatacatgttttatactattttttaacttccgtggcaacgcacgggcatttcaaaatttaatatataaacaatacagtctaccatacaaacaatattctacatgaccatatatcacaagtgtgaaagaaataatccaaaacaattggcacaggaggacaaagaaccacacgcatgaatatgttggccatcactgcttttactagtattaactggaggcattcaaaagcattattgtatccttaatatacataggaaaactgtagacatctttatagccgttggtcatttacaatttcaggaagcgaaggtgattccgacccgttgtatttactgggcacgggggtgttccgcctggactgccgcttggttgccaccaggacttgctcggcttctggttcatcagcgactgagaacttgtcgtcgtccccatcacctttgaacaccgggtggatgtaggcattcattaggtatcctttgaggtcaaatcctggctctctggcacgttccagggtatccttcttcatcgcctcctgcaatgggcatttcacaaaagtcggtttgtagcggttgttgcagtacttgtggaaatagaaggtcactacaggaagaacaaggagcacaggtgttgactggccagcgccttttgtgctaagtaacccaaggagaagcagctgtgatacaatcaacgctgtgattatgcgtccatgaacacttggccaaaatgctgctgcactctcgtattcttgattatacacatttattatctggtggcggtatacaacgtacgcaaacccaaagaataccaatacaaaagggagcataaatggtgtcactgccgcatagacaagaccaagtaagaaatacagctgaatttgaggttcgcttgagtcaaaaccaatacttccagggtccattgcctcttccctgtctttctcagtcttgaccaagaaaaagtttttcaggtggaagatcactagtggcttcaatctcaatatctcaccagctaccccagcccaaccatcaaccattgtatatgttataaaaaaggttgccttcattggaattgcttcaccaatcgtccttggtatttcatttgctgactgatgaatatagctttttagctgctctaaagcagatcctgcaataatgcttgccagaaacacattgaagaatatgaaaatataatactttgatgcagatcttctctccagtgaagatattgaggtcaatccttcaaccttagacataaacattaatatgcttgggagcaatataaggaagatcttcagagcaattcccggaaggaaaccttggatgaatgatttaatagtatgctcttcaatcagaggcttcagaaacggcgctgccttctcaatcccttcaagatttgcaagagactgaacaaatgctattgggaacacataaaagaagttcaggaagaagaatgccactgcaattatcagccttcgaactgtaagggagacaaatggaatagacaaattatcccagtacacatcacgaggttctggagcccattctgtcaaccaaacagttgggttactggtttgctgtgtctgagcacaaactgctgcaccccaacgtgatcggaaggaaacaaatgctgctggtacaatggatttgggatcctttacaattttttcacgctcttctgcttcttcattttctatcctctcaatttctgatgtgtagtattcaatggcatccaccttcgtaccaaaacaaccaagaaaaccagtcttagtagtaggccttttagatgcattcctttcaaatctcagctgatagtagtcaagccaattatgcatctttgctttctctttcaccaatttagcaagtttatttgcattgtaaaccacctgatgtgtcagatagtgaccaggatgattcacaagaaagaaatgttccacaagctcactaattgattcatctggatcaggcggtatattccgcacaaggaccgtgaactgatctggtctgcgtttctctgatgaaagaaatcgcagtctcatctttgcaactacttcatactcacgtaatagtacatagcaggtccaaaatgtgaaaacatacgccattgccaagtgggctataaacctttttgatccaactggtatgtttgatattgaaagcttatcaacattgctgtgctctaacttcgagaattgcagagtatcattggtccaattaacagggacaagaacaatgaaagctagaactgagattggagcaaatattttaagtccgaccaagtaaatcctcagatacacagctgaatccagaccggcatggctaatcaactcatcctcaggcattttgagagcagcaggcacccaacttaaaaatttcaagtatgaacgcatgtccaaattgacaaacttccggacaaatgtacccccatgacttggactctctcttgcacctttgaggtaccattttgggaagtaaaccctatcattgattggctgcagtcgaaggaaagcaaatgcaactaggaacagtacagcacccattatgttgatagccgcagagagtcctatatcttgaattgtagccatagttgtcctttaaatagcttaggagaaaattctattgaatttgtctcggtcacaggaacaagagggcaacaatctcggaggagcggagcggagcggaggggcctaaccgccggcgcggcaggccgccatcgttccgcgaatgacgccgcaacccgcctgtcctcgtcttggcgcttctcctcctcctccgcgtccaacggtgatcgaagcggacggcgggagacgccggcgaccccctgcactgcactgtactgcgcagcggccgctactccactgggactgggccgcccacccgcccgctgggactcggagaagggagggtgatacggacaggatttttatcgccccttctcttctggcagcgcgcctcgtgccgaatt

SEQ ID NO: 37592 - DNA, 302 bp, Zea mays
  Clone ID: MRT4577_134288C.1
atcgcgagcggcctccctttgtcctatacttgacactccgtagcaactttattattacatgtatgaatacaaggctacattggcacatacatacagtgatacagctgcaatatacgtgaacaccctttgtctcgctcctgctttatctatgcaactgctggcatgcatgcagtagacgcctcgggagataagacccctgtaaatctgctagtacgtatgcatgcatgtgcacgatcgattggcgcgatggtcatatcatccggcggctcagtagtagggctggatcttccagcgctggttgt

SEQ ID NO: 37593 - DNA, 267 bp, Zea mays
  Clone ID: MRT4577_134289C.1
cggacgcgtgggcgcccttattttctatatttttttttttttttttgactcacgaaccgttgttttatttatttccaagtccaaatttctttaaagaataacattactatctgattcactacaacaagccaccagttccattccatcccattctttcagactcacactgcacacacaacatttacaggcaccataacgattaccatgcaacaacatatcttgtccacttcttaggacagacttataaaggcaccttttcaccttaca

SEQ ID NO: 37594 - DNA, 354 bp, Zea mays
  Clone ID: MRT4577_13428C.1
tttcgatgcctggatttgggtaatatgtgaggaggtgcaacgttctctgtgggtgtagatacaagtgtggtttttcacaggttcggatacaagaaaagagccgaattagtgtatgaatggagataactactttttttacttggtttctaacctgaatatggatttgtcgttgtattcttttgaatctagattattcttcgtttacagaattcctaccttaaagagttaatttttttatcttaaggtaggtgttttcacaatccgggcaaaataaacgtaagggttgtctatagaaaatagaatttaaatggtataagggatcaacctcctttaattgtttgataagattaattt

SEQ ID NO: 37595 - DNA, 198 bp, Zea mays
  Clone ID: MRT4577_134290C.1
caactattacactatcagcgaatgctcataatcagagtcagtggaatatgttgaagatgctcaaacccaaatagaccccaaacctacattatggtctcctattctgcaataactcgtacatctttcccatcttcgatgagtgcacccccaaccgatcctacctacactgactctttgtcggcctttccaaattcccca

SEQ ID NO: 37596 - DNA, 367 bp, Zea mays
  unsure (1)..(367): unsure at all n locations
  Clone ID: MRT4577_134291C.1
acgcccaacacaacataaatcgggtcgtctgggtccatttctttttgtgggacaaaccatcagcaacaaggcacgttccttgttccacaccccaggagaggggggggggggagcatgtttgttgatggatccaatccccctcccataaacatttttacaagatggcggggaacaagccatgtcacctgcccccgtcacgtccttaaaatttttttttatcccccctccccattcttcctaaccttttccgataaatgctcccccccccccctaanaccaattttcaaacaaatccacccccttccccctgctcantttacggcctcgacaaaacaacttttattttacccttgaaaaattttgcccc

SEQ ID NO: 37597 - DNA, 599 bp, Zea mays
  Clone ID: MRT4577_134292C.1
ctatcaatccatccattaaaccaattattggaagtggcgaattagcttaccataattaattctgacttgaaaccatgaaattgatgacgcctttcagctctagcatttccccgaatatatggtgagtgtcgcatcgaatcacacttcttcttccacatcgagaattctccggctgcgtactaatttgtttccttctacgcctaatcttctcggattttggagtgaacacaaatcggagacgtcatgtaggagctagcatcgaggcgaggcgaccgaacgacgatggcgagacaaaggtcggagatgaccggaaatcaacgacaaacactagagttccacgacgggctgctgtgatggggcgtcgaggcgctgtccagggcaaataggagatcaacgacctgcaacggacatggcaggttcgaggcggcgctgggctccatgggaggacagggagccggaagcaggggcgcggtggccagttgccatgaccgagcagggaatggcggctgtcgggtcggcgaccacacactctgtgttgtcgcccaggaccatggagtgtaggtgccgagcgccatggattggagctaggacggctagcg

SEQ ID NO: 37598 - DNA, 483 bp, Zea mays
  Clone ID: MRT4577_134293C.1
aggttccaagtaaagccagagctttcttcagtaaggtcctgatctctgaggttggaaatgggtatagtacccttttctggtctgataattggtgcagggtaaaagcatctcgaccattgcccctagtctgcattctataatcccaaagaggatagcaaaaagtagaacagtccatgaggcattgttaaacagaagatggatatctgacattagaggtagtctcactgttggagttttggcggattatttaaagctctgggattgtctctccgaaattgagctacaccccctcactgaagacaggcatatctttagtgtagccccagatggaaagtattcagctaaaacagcttacaagggcctcttcctgggttcctgctcatttggccactataagcgggtttggaaaacttgggctccagcaaaatgtcgtttcttcctctggctggtggctcataacaggtgctggactgctgacagatt

SEQ ID NO: 37599 - DNA, 309 bp, Zea mays
  unsure (1)..(309): unsure at all n locations
  Clone ID: MRT4577_134294C.1
gcgcccactcttccncggactcgtgggtgaatctggccactttgcacgtgaatacctcttgcggattggttcaagaggctggggtagtggaangcttctcatcctaattcctatatatctcagccgaagccgcatccgcatcctcagcccaagatatctaatgagcccaatctatatcataagcccgcgaggtccttctcctatgaggcgaagttacagcaggtcgccactggcatctccttcacggagtctcagcaggtcaccggcgcttgctccccctccttccaaaaataacaacaagtcaccacc

SEQ ID NO: 37600 - DNA, 221 bp, Zea mays
  Clone ID: MRT4577_134295C.1
gttcccccacccgggcaggggcttttaattttaaaaaaaatttttttttaaagaacccgcctaaagcggattttcaacaatttgccaccactaaatccgcgggtagattttttatgaaatatcccgggaaaaaaaggttcccctgccggatggggggccctctcccaccccggggccgacccgggggccgacccttgggccgacacttgggccccccccgt

SEQ ID NO: 37601 - DNA, 568 bp, Zea mays
  unsure (1)..(568): unsure at all n locations
  Clone ID: MRT4577_134296C.1
cccacgcacgcggacgatgacgaccaagnatgagacaatgaagcaaatgatgcccccaaagaatgccaccccgagggccactaagacggatcctatctcccgacctgatgcgtgtctgcatgatgccaggaatgttaccaggactgtgcctgtcttgatatctgatagctcatcttgtagtacaccttgtgttgctctcttcgtgacggtgcccttacgtgtgctctgaatctgactgccattgccattgacgatgctcataattaagaacacactctagatggcatgcccgcatgctatgaagctattctaaaaggtgataaatgatggttggatgctgcatttctggctctaattctgctgattattacaccgtaaaataagacctgcccttgttgcaacaatgatgtatataatgacctatatttgactgggattctgttacaatgtgtttgcaaagctgaatgtttggtttaatgtctaagagtcttctttgttggctgcattggaaaaaaaaaaaaaaaaaaaaaannannannaaaaaaaaaaaaaaaaaaaggggcggccg

SEQ ID NO: 37602 - DNA, 362 bp, Zea mays
  Clone ID: MRT4577_134297C.1
cccacgcgtccgctagttctagatcgcgagtggccgttctttttttttttttttttttcttgttttgggtttttttttttagcttcgggagggcctgcacattttgctgcacaatatgaaaataaatcttccaggatcttgatcgagttagatgaccagaaagtagcatggacaatttggaaaaaaatccaattggaatctaccgttcttgattcattaattttaaccttgcctaacgcatttcagtctactatattggtacttgacgtttcgatttatgtgcactctttgatcattctgtaattcttgtaacatggtattttattgccatctgaaatggtccacaaccagcaaatatagtt

SEQ ID NO: 37603 - DNA, 244 bp, Zea mays
  Clone ID: MRT4577_134298C.1
gatcgcgagcgccgccctttttcttttttttgtttttttctttgagaacgcgggacccataaacggtgttgttggagggttttgggtccaccaagggtttattagaaaggggggaatttcggatttttaagggtgatccacccatttcccaaaaagttcacaagaaaaatgaaaaaccccgggtacagcaaaactttttcattggaagggtccaaaggaatttgtttcatcccagagaaggggg

SEQ ID NO: 37604 - DNA, 718 bp, Zea mays
  unsure (1)..(718): unsure at all n locations
  Clone ID: MRT4577_134299C.1
ttccagatgctcgaccgaactgctgccgaccttctgcttctggcggcggtgccatgagaacgcggacaggccacaggccgctgctcctgccacgatgacgactgttccggcaacaacagcccctgtagagagcgtcgaaggcttcgagcagcctccgtcgccgcagttctggttgaggtcggccgtcttttgaatctgctggggcttgacagaggtcgattcaggtttccggggcgttctgctgtcgtcgttgccgtcgttaggacaagctttcagagaatcgaactgcgctccacagagctccggattgttctcgtacagaaacccctcgttcagcttcttcagaccagatggaacacttcctgaaagtgtgtngttccggaggtctagcgttgcaagacgagggatctcagcgagcttnggaggggattgagccgaagagttggttgaagctcaagtctagccgtgccagggccggcaagtccccgagggatgctgggatcgcgccgctgagctggttggactgaagggcgagaacagtggagcttgtttaggtggcccagcttgggttggaatgctccctgtgagctggttgtagccgagctgcagcacttggaggctaccgagtcgcccagctcgacggngatggggcccggaagaggttgttgacgnccnaggtagagcttcgcgaaggccagggagggcgccgagctcgcgc

SEQ ID NO: 37605 - DNA, 280 bp, Zea mays
  Clone ID: MRT4577_13429C.1
gttcactggtacataaatacctaggaaatatttttccagtctacaatttggtgctattgtgcagtaactaatagtactcttaccagaggagaaattatattaacgaccctgctaatatcctttcttagttatttgctccttgcaaattaaaaaagcaactaagagaaagaaaaacattgtagatatctatttatatttaaagtttatgtttcatgaactgcagctgcaggattctggcattttgcatgccattctccatcagatctgggatgatggctca

SEQ ID NO: 37606 - DNA, 432 bp, Zea mays
  Clone ID: MRT4577_1342C.1
ggcaggaataattgttctgaaacaaatagctaaggtgtacaactgttgcggtagcatacacgacatctactataccagataaatatggattttgattatcgttgaacgtacatatccttctccctggcttaagtgtttttcattcatccagacattaaagcttttttggtcgtctccatttgcaacccgaatggaaccccaatggatattgaatgtgctctctcttctgttaatcagctaggatggtactggtactggtaccaaacaggagcccacgactcagatgcgccaccactaagcagcctcgccgccagctccttccccatgacacaggcctggttagcaatttcctgaggctggaactgagagtaatggtcaacaagagtttgatgagacatggagtacaaataggaagataatttaaccatgagc

SEQ ID NO: 37607 - DNA, 451 bp, Zea mays
  Clone ID: MRT4577_134300C.1
aagcaaaacaaaaagtttcggggggggggccctaattggaaaacccgatacacatccatcttaagggagcaggcaggggacatgtttgggaaagcccaataataaaaaaaaaacacacccccttgggttggcttggattgggacaaaggggggcacgggcccgggctatacaaatatatatatagaggatgcccatgcatgcgggcggggcttggattatttctcgaactttggtcctgggaaaaaaaagcatgcgtttttattattattcaacacaagcatgatgcatcacatgtttggcttcatgttgagccggggggaaatttttatccccaaggacccgttgaacttggggaggagggctatccaaaaggacccgagccccgggctgacccttggggggcccaacgaatcgggaaaaccccccaaaaaacgggcctgtcgggcgggg

SEQ ID NO: 37608 - DNA, 807 bp, Zea mays
  unsure (1)..(807): unsure at all n locations
  Clone ID: MRT4577_134301C.1
ctttacgagaaatctcctactttcctggaagtgcgccagttcgagaaatatcgttgatagaatgaatgctcttacgcgctaatgaatgatgacttatttaaagaatttcttgatatcttgcagaatggttttcatgctaatctgaatgaatttcaacttatgcgctaagagagactctggtggaatcaaaccagtctcttgggaaaataaaatagatggccaatgaggtggagacaaacttagaaatggatggatctctttgtcagcttcttgtttgagaaaaagagtagtgactcgctggattgagatttctaggaaaaagagttgcgaacgaaatcctacactccctgtaggtggggctgggcgagaaagggtcccctctgaagcctataagttagtaagcaggccaaatattccaccggggtctttcttagcaaactcattgatggcagtacctaactaaagaagaatagcgctctttctttctttcaattacgtttcttgaatggttctgcacttagatcagtcagtacacacgaaaccctttaatcaagtgagtgccactttaactcagctctttcctagtgatcttgattgtccctagaagcatctcttattttcatatagaaattccatgggttttgtggtcgactgcacagtttgagagagaagtgctattgatttaaagaaacctcttctagattcgggttggagtcgagttgccaactanatgagatcacagtaggttagcctctgcagtcgaaactatctatgcgtgcgataaagtaaagtaaagtcggtcaatcg

SEQ ID NO: 37609 - DNA, 786 bp, Zea mays
  Clone ID: MRT4577_134302C.1
cggccgggccgggctgccaaatcgcctcacgcttccgtttcgaatccttcgacgcctcacgctcacgctcacgctgcttgctcctcctccccccccatccctccgcccctcccatggcgtccctcttcggggctcgccgccggcgatcgccggagtacgacggcgaggacgatagatccggcggagggagggccaagcgccggcgcctgtcgccggaggaggcggcggcgtcgccggcggagccgggcgcggcgacggggactagccacggctggctctccggcttcgtctccggagcgaagagggccatttcttccgttttgctgtcctcttcgcccgaggagaccggctcgggggaggacggggaggtggaggaggaggacgacgacgtatacgaagagggcatcgacttgaatgaaaatgaagatattcatgatattcacggggaaatagttccttatagcgagtcaaaacttgctattgagcaaatggttatgaaggaaacattctcaagggatgaatgtgataggatggtagagctaataaaatcaagagttagagattctactcctgaaacccatgagtatggaaagcaagaagaaatcccaagtaggaatgcaggcattgcacatgacttcacaggaacatgccgctccttgagccgtgataggaatttcactgaatcggtcccattctctagtatgagaatgagacctggtcattcttctccaggctttccactccaagcatcacctcagctatgcactgcagcagttagggaagcaa

SEQ ID NO: 37610 - DNA, 175 bp, Zea mays
  Clone ID: MRT4577_134303C.1
tcattattggcaaaaaaaaaaaacccttatggacgtacaaagcaacccaaaaacccgggccccatgtgactgtttgtctgaatctttaaccctatcctcctcaaccttgcgaacctacccaatggagctgttcaaaaccagggtcaccatcctgaaggacgtttaccaaaacgtt

SEQ ID NO: 37611 - DNA, 1987 bp, Zea mays
  Clone ID: MRT4577_134304C.1
ccggccgggatatttatatgaccgtgtaaggaggctttttggctgctttgcaccattgaccggatggaaacatcacctatcttccctgtctgattttcttgagaatggctactcacagtacctccaacatctacaagacagtcaggaaggtggtacgccttcctttttctcttacgccagaaaaagatttgccgttatttatatggagctcagaagatgtttcaatgatttgttgttacatgtcccgaaatccagtattctggaagtgaattacaacagtatccttttacttcttaaaatgcttgaagagttcaaccgcacgatgtgcaggtattctggggatgaaattaggaaagttttcttgtacagtaatgatgaacctgatcagacaaactcgagtgtagtcactcttggcaaaatgaggataaaatgccttgagaaactgagcactctgttaagttgcttgaagcttcctctaacatcctcaaagcctaccattcgtgatttctgcattaaaagcgcttccatagttttctgtactgtatctagctccacaaaaataaccgctaacaaaaaggtagagtttcttgtggttgatgaggctgcccagctgaaagaatgtgaaacactgatccctttgcgtctgtggaccttaaagcatgctgttctaattggtgatgagtgccaattaccagcaacagtcaaaagcaaggtttgcactgatgcattatttggaagaagcctctttgaaaggttgagttcacttggacacgaaaagcatctacttaatatgcaatacagaatgcatccttccattagtattttcccgaacactagcttttatgaagggaggatctcagatgccactaatgtcatggaaaaagaacaccgaaggatgtatcttccaggttctatgtttggtccttactcatttataaatattgaagatggaagggaggaacgtgatgaacttggccatagcaaaagaaactttgtagaagctgctgtcattgaagaaatattataccgtctccgaagagcttgctttaaaaccaaaaggaaagtcacggttggtgtcatatgcccatacaatgctcaagttgtagcaatccaagggaaaatagagaaaatgaggttcgacccattgcaagtaaaaactaattctgtcgatggctttcaaggtggtgaagaagacatcatcattttatcaactgtgaggtcaaactcggttgggaaggtaggttttctttcaaacgcacagcgggcaaatgtgtgtttgacacgggcaagacattgcctttggatcctaggaaatgcaacaactctagcaagcagtggatctatttggtctgatctagttcgtgatgcaaaggataggcggtgtttcttcaatgccagtagcgacaatgttatctctcgcgtgattgctaagcaaaggagagatctcgacagagttaatgttgaaaagagcatccatatctcaagttccaaaaactgcagggtttgggttgaaacgcgatccccaaatgacctgaatgaacagggcacttcttcgacgagtgtttcacattacgctggaatcccgtcaagtgacattgttgttgtttctgaattccagcgtccaagcaataaaaatgaggatgtcgaggatataactgtcattccaaataaagagaatgataaggatatcaatgctatgcccgttattccagataaagggaatgtcgttgatggcaaccatatcctcgccattccttgcgccatgttgagtaatctagctagatggtgtatccgttcgttccgatcttaattgttcctttatgtctcctatccctttttactcctaagtttacagcattatatataagtgtctctccataacatggtcggatgtttgatttttgtaatgtgggtttgaataatgaaaatgtatgtttgggcctttttagcctcccttgactgttgagagaaaaaaagctagtggtac

SEQ ID NO: 37612 - DNA, 630 bp, Zea mays
  Clone ID: MRT4577_134305C.1
gaaaaaaaggggttcccggtttaaaaaacggcctttgaagggtttaaccgggcccaaaaaagtttaaagaccccttacccgggtttttggggttcaaaccccaagggccccaaggggaaagggtgggggggggctttttccccaaaaaaaaaacccaacaccgggttcaaccccggccggaaggccccccctaaaaaatccccccccccgggttccttttggggggccttttaaccggaaagggggggaagggcaaacccgacctaccccccaaagaaaacaattttccggccggttaaaattaccaattggaaaattttttggggggttgaaccccgccttggaagggaacccttttttaacttttgggcccccctccaaggggggggggggggggacccgttaaaacccgggggaataattccccggggcggggaaaaaaaagaggggggggccccccccccccccgggaaggacgccctgcccacacacccggggggcttcacccccggcctaaataagggggggggcccccccggcaaaaagggggggccccccctttcttgtttttcccggaaaggggggatcccttttccgggtcttttaggggggggagaggggaaaccccct

SEQ ID NO: 37613 - DNA, 690 bp, Zea mays
  Clone ID: MRT4577_134306C.1
cccttcgtcctctcagcgcccgcatcggcggcgtcggcgatccgcccctgcctcttcttccccgccgactcgctgctgccaatccccccaccccaccagtagtccgactccgagtcgcgccaccaccatcctcctcttccccgactcgaccgatcccgtgttcaaaaggcaaggcaatctaatccccaaatcctgccctagcctgttgcggcgagctcaacacctccagatccatggcgctccccaccttgcccttcaatccctccaccccgatgggccccgggtttcccgactcggccatcctctgcagggtggcgcgtgtgtcggcggactggaacgcgaccaccgccgagtgccgcaccgaggacggccaagccgtggaggtgtccttctggctcgtcgacccgccgggcatctcctacttctccgtcaactgccccggcatcaagcacgagtaccacgcctggctcatctgcgccgaggacgccttcgtcctcttcagcctcaagttctggggccccgcccgcttcttcgtctacacggccgggaagcagtccctgcggctgctcccaaaccccaaccatgcctacttcggcgggcagcagtttggcctcttgccttgtggtgacgccgacggcgggcactttgccgtggccttcctcgacctcaagtggaatatccaaaacgatg

SEQ ID NO: 37614 - DNA, 205 bp, Zea mays
  Clone ID: MRT4577_134307C.1
ccgctttctgacgatggactacgatacgctagggtagggcgtctaccagctctcggtaatggcgggcttcatgatccataagtaccagggggtggggtgcgcactgccgacgaccagcgaccagcaccctaagatctaccgcttgaagctatgggccaactacgaagtatgagccaagagtatgtattggttcttcctgtggaaa

SEQ ID NO: 37615 - DNA, 380 bp, Zea mays
  Clone ID: MRT4577_134308C.1
ggacacaaattccaataacaccatacggaagattatcagtacagggccaccatcgatttatatcggtttacgggaactgaaaaattccgataacaccttactgaggaagcatgtcttgtatccctggggatgatgacaagatgccttgaacagaagccagccacccacaactccgttggaagttcctgggaactgcaccagagccagccacccacaaccacaaccagtaaaccttttaggccttgtttggttattcccaatacacatggattggatgggattggaaaaaattcttaaaaagtttgaattgtttgggattcaaactcatccaatcccactcaatccacatggattaagagctaaccgaacaagcccttaat

SEQ ID NO: 37616 - DNA, 312 bp, Zea mays
  Clone ID: MRT4577_134309C.1
ctcccacgctgcaagtgcaaaatccaacacgccgttaccgccatgaggccgccgccgccgccgcaggccctatcgccagagcatagcaccagcacgaagccgtcgtccgcggcgaagagggcgttcacgagccggacggcgctgtccaccaagggccacgaggcgccacccgagcgcaaaaagaggaagacgccgccgcccgattcgggggggggggaggccttggatgccacagagccggcatccaagaagaagctcgtgcttttcgggcgcgcgtgccgccttggcggcggggctcggggccccccgccc

SEQ ID NO: 37617 - DNA, 231 bp, Zea mays
  Clone ID: MRT4577_13430C.1
aggcccccagccagtctttccacagctctccactcgagaaacctccagtccagctccacccttcgtccactccagacttccagaggcaccacacacaccatggctcccagaaagcttgcggcggacgaagccttggcagcgactctcctcctggccaccaccagcaacaccaagcttggcccgctcccgctcggaccgcctgctccgcccgactacccactaagggctcct

SEQ ID NO: 37618 - DNA, 566 bp, Zea mays
  Clone ID: MRT4577_134310C.1
ctcgagttttttttttttttttttttttttttttttttttttttttttttttttttttttttttgggggcacgcggatgaacatagcaagagggatctgggcatattacatatataaaaagatagataatttgcatgggatgggggggggggcgaggccaaagctgttatcttaaccggatcatcgatcgcctcggacccctcccttatgactaatcaggatgcgggggggagcgtgcctggtttgtcggacccccccccgttgggcggcaggggcaccaccgggtcggaccccggcgccgtcggggggggggcgagcgcccacttttccttccactcctcgatcgggatgggctggtgccggcactcgaggctgcaaaaccccgggtcccccctgtacatgaaggggtcccggccgggtccgaggggggggttgcaaaacccccaggcgcggaggaacccgggggtctcggaagccgacaagtcggccgagttccggggtagcccccccagggccggggcccggcgggcgcggttcccccccagccattccgcgcgcccgggcgc

SEQ ID NO: 37619 - DNA, 1217 bp, Zea mays
  Clone ID: MRT4577_134311C.1
cgtaaaacaggtatcaaggaggataatcaaattccaaggaatggcaatgcatcaactgtttcatcactcaactcctatcacctaatgcagcatataagtgataaaagttttaaaacaacaaggaggtggcaaatgcaccggggcttgcctgaaataaacactatgttagtgttgttagatgaaggccacttgacgatcaactttcgttttgacatccgcttagtccatccatcttcaggctcattggccgacatcgtcttgtgggttgttttgatccacacccttcgcttcgcacgattttcagctagcgtacctgaaataaacactatgttagtgttgttagatgaaggccacttgacgatcaactttcgttttgacatccgcttagtccatccatcttcaggctcattggccgacatcgtcttgtgggttgttttgatccacacccttcgcttcgcacgattttcagctagcgtaccacttgacaaaagggagggggctggcgcttgggctttcattcatggagaacaaaagaaaaaggggaagctgctgctgcagaattagaggagggctactgctccacggaagaacagagaggaggctgggcacagagggagggcgagcaggggaaggaggtgccatggctgctggcgtggggagaaaccagggagcagagaggggctgggcgagctcagcttggggaggaagatgagggaggggcggccattggaaaccttagggcactggagggagctcaccatgggagaagctgcagacggccatgggaaggaagcacggcgtgcttgcagctgacatggggagggactcggctggtgcagcggccatggaggcgaggagatggctgggcgagcagggagggcgcggctggcgagctggagccggggagaaaccagagcaaggacagccggcgtggaggctaaggccgtcggcctgggaagaagatggcgtgtaggagtttggttgggacgtggctgataagctttgcatcctgggcatgctgcgtatggctgagtggatgagctacggtggtttccagggaacaaacgtgtctgatgctcagaacaataaagggtgtggtggttgaggttaaaatcgaagaaatatcttcattctcttttcctccaccaagcaatatctaatttactccacgattcttatttttgcacaccaactaatcctagatctaaatcttaaga

SEQ ID NO: 37620 - DNA, 628 bp, Zea mays
  Clone ID: MRT4577_134312C.1
agttcactccttcggctgaagacctgcctggtgccttcgagcatattgaaggtgaaattaatgatcttgacgaagttatagctgggcatggcgacttctgttccctggcagcttctcgggggacagctgttgcctttttgaagtctggctgtgaacacggaaagattgttaatagacccaacttcagcctgtcaccagcagacctagataacattcccagcctggcccgaagtattgcgaatagatttataaaattagtatggacaaagggtggacggagcaaagctggtgacgaagctcgaagccaccttaagctggtaacaaaatcataccttatgcttaccttttcctttgaattttgaatatagcttataatacttacatacaggttgaccaagccgaagctgaagttgcagagtaaaaagacgaagctccatggatgttgtcgaagctcgaatagtctgtaaaaatagctcaaaaaactcctgtgataacttgtataaagtatgatgatattaaatttcactttgtaatataatcttacttttctgtcaatgtatgaaatgctttggtgtggacgaaattaatacttttgagccgaaggcgaaaaacaccttcccttctttgc

SEQ ID NO: 37621 - DNA, 999 bp, Zea mays
  Clone ID: MRT4577_134313C.1
atggccagagttcgctccactgctagggttgaccgtgagggagatgagaccgaagctgttgagaccattccaatttccgaagccatgaagcggtctgggctggtgacatcggaggacgtccctgccgctggagcagagcaagttgatgttgaggagaccgattctgaggatgattatagcagtgcggtgccgagcaaacccagccacctggattttggaaaatccacagtctccaaaggtgaccttcctaagatgttaaaattgggctatttcaatgaagaaaagaaagagttgattcgctttggtggagaagaaactactccgaaaccaggaaaagatgaaatagtagtttttaagagtttcttcaaagctggtttaagattccctttaaataagatgattgccgatgtgctaaagaagtttgggatccactttcatcagctaactcctaatgctatcgttaggcttagtgtttacatttgggctctccgaagccaaggggtggaaccattttccgaaggtttctgccgggtgcacgagctgcattaccaaaccaaggccagaaaagatggattacatgaaaacttcggctgttacaattttgcttaccggaatactacaaaatttcccgtgattagctaccgaagcaagtggccggcaggctggaaatcggaatggttctatgtcaaagttgacgatgataaggagaagttggtccagagcccgctagagctgatcttcggagagaccagaccccaatgtaatatgacaccagagggtccaacccaaactgcactggctgaattcaggattatcgcggagcacattggcactagggacttggtgcaggaatttttggctttcaaagtatttccaactatgaaagagtgggccatgccgaagcttgaaagagagaactcatccggctgccctaccactacaaattcaagagacatttcaaagtaccctgccaggaatggctggatacaatcgaagtaa

SEQ ID NO: 37622 - DNA, 362 bp, Zea mays
  unsure (1)..(362): unsure at all n locations
  Clone ID: MRT4577_134314C.1
accacgcgtcgggcgatgcgtcggcactgcagacccggagggtaatcattcnagtgcagcggcgtcatcgacatcagctacgggagccccggcggtaacctatcactatgacacctcatgcattccacaagtctcagttggactagattttgtgcgttaaccatgtttgtaccgcaattatgagtactgctaatgactaacacaacatcatgcggactaaggcctgttgtaggtaaagcagcagctgtgacagatctcatgacaaatggtcgatgcaggatatgtgctgactgtcgtgcacctgatccgaagtggagcatctactaatattggagtgttgctctgcttaatatgtgcagatg

SEQ ID NO: 37623 - DNA, 670 bp, Zea mays
  unsure (1)..(670): unsure at all n locations
  Clone ID: MRT4577_134315C.1
atcgcccacgcgtccgcccacgcgtccgcccacgcgtccgcccacgcgtccgcccacgcgtccgcaaccaatgaacctggtgcactgatgaatcttgtagaagaatcaactgccgatgatgcagatgatgatgatactaaagattgtaaaggtttatttaagaacttaaagttctacttgagtcgagaggtgcctagggagtccctgttatttataattccagcatttggagggactgtttcatgggaaggagaaggagctccatttaaagaaatagacgaagatatcactcaccaggttgattccatttgcaataatttattacaccaaagtttaactatatagacggagacattgtgtaccatccctaaagtaagatgccactctaagtaccacgacagcaatgccatactagggcaatagttactacaatacaatttttgtatgtggctaaactgtcatattttacactctaccatcatatgatcatatctagcgaagtaaaataaaatggcctgtggatttttttatgcttgctagtatccatattgtaataaaaaataggagtatgatatcacatcctcacactatatnagcctttattttgaagagtcaatgatatgccctttgacggatacatgactcacagtgataataatgactaccacac

SEQ ID NO: 37624 - DNA, 3526 bp, Zea mays
  Clone ID: MRT4577_134316C.1
atggatcctaagggcaagggtatggtgatcaacgacaaggagaaggagactctcagcattgatgagctcaaacgtgacaagcccactgactcatgctcaaataacaagagaaaggatgggaagaagaaaagggatgcctacaccattggtagacatctctctattaaggatgggcttggtttccaaaagggaaccaagaaattaacaagccaaagggcctccgatctcatcaaggagaaagggaaggcacccttggccagtagttcgcattcctttcatgataagaagaaatgtgtctatttgtatgctcatgttaagaatgcctctgatattgcgcatcatgatggttgctatgatcatactgttttacctatacgtcatggtgctgtctttgattctcatgtcatgtttgcatcttatagctcttcatatgttcatggtaggagtagaactaggcgctgtgttcatcatgttgtttcacatgcgcctaggaatgcgtctaatggcccaactatgctttatcgtacttatgatccttcatgtgtgctaatttgtaaaaatgataaagtagttgctagaaatctggggcctaagtgcaagagaggcaagacttgcatttggtttccaaaatcttatgtgactaaccttgtaggacccaacaagagttgggtttatgcatctggggacacaagttggattattgacagcggatgcacaacccacctcctacgtaaagaaaaaggattcccaagatatgattatcttttgaaatgggaatcatggcaaggtcaaagatttggaagaagtgatggttcattagcttttaaaggtgtcttagacgacaagctttatttagttgatttcactaaagagaatgccgatctagatgcatgtttaatcgctaagacaaacttgggctggctctcgcaccaccggctatcacatgttggaataaagaatcttcataagcttctaaagggagaacatgtgttaggactaaccgatgtctgttttgagaaagacagaccttgtgcagcgtgccaggcaggcaagcgggataaatcagaaacccaaagtacattaaaacacttcctaaggagagcccaaaatgagtttgagctcaaggtcgggaaagcagatcctactgtttttactaagacttgtaattgtgatatgtttgtttgccaaatatatgtcgatgatataatatttggttctactaatcaaaagcattgtgaagagtttagcagcataatgatgcagaaattcaagatgtcaatgatgggtgagttgaacaatttccttggatttcatgtaaagcaactcaaggaaggaacgttcatatcccaaacaaagtacactcatgacttgttcaaaaggtttgggatgaaggacgcaaagcccgccaagacgccaataggaaccgatagacacttagaccttgacaagggaggtccctggtgtcttggagctctaagaaacaaacatctgttgccctatccattgttgaggccgaatatgttgtcgcagactaacatgacaaatgagcaaaggtacatgaagcaaattgagctggaagaggacatagtgcaaatctatatggtccaagtgaaaagccatagccgaagcttgatcatcgtgctcaaacgaagtgtcgcttttgattctgcttcatcacaagaggagaagcttcgtgaaaatcaaaaaagtcaacaacaaaaatttcaagaaattcataatcaaatggccagagttcgcttcactgctagggttgatcgtgagggagatgagaccgaagctactgagactgttccgatttccgaagcaatgaagcggtctgggctggtaacatcggaggacgtccctaccgctgaagcagagcaagctgatgctgaggaaaccgagtctgaagatgattatagcagcgcggtgccgagcaaacccagccatctggatttcggaaaatccaccatctccgaaggtgacttagctaagatgttgaagttgggctatttaagtgaagaaaagaaagagctgaccaaggctagaggagatgggttacatgaaaacttcggctgttacaattttgcctaccgcaagactacaaaatttccagtgatcagttaccgaagcaagtggccagctggttggaaatctgaatggttctacgtcaaggttgacgatgataaggagaagctggtccagagtccgttagagttgatcttcggagaaaccagacccccgtgcaatatgacaccagagggtccaacccaaattgcgctggctgaatttagagttatcgcagagcacatcggcactagggacttagtgcaggaattcttagctttcaaagtgtttccaactatgaaagagtgggccatgccgaagcttgaaggaaaaaagaaggaagtagaacttatccggttgccttaccattacaaattcaaaatacatttcaaagtgccctgccaagaatggctggacacaatcgaaaagaagggacttctgcgacaccctctgctaccgaagtagaggaaatcttaaagttggccaagagctgacaaaagctgaaaaagaagaactaaaagaatatgctatatcttgcgggtatcgaccgggagcgcttctcttcggtggcattgatgatgaaaggttgggctgcgtacgagatcagaccggcgcgaaggttatcggtactctatcaaagagtatcggtttcccgaagctcgaagcagatatcagccgctaccgacgacaacacattgtcggtagtttattttattccaattttaagagtatgctgttgagcaaagctttaaaaatgcagcaggacttagaagataaaaagcacgaagttataattgagaacttagagaacacgataaaaaagcaatcagttgctatcaaaaagaaagacttcgagcttcaaacaaccgaaggcttattagcggaggctgaagctaaaataacagaattaaattcgaagcttctctctcaatcagcaaacttcgaacaagaaaagctgaagcttaatgcaaaacttgaggccgaagtccaaaaaagttcagagctgaaaaaatcattgacaagccttcagaataaatgtctggagttcagctatcgatgcattcaacagctgaaacaggtgttctattttgttggagccagcagcgagaagtttactccttcggctgaagacctgcctagtgccttcgagcatattgaaggtgaaattgatgatcttgacgtagttatagctggacatggttacttctgtgccctggtagcttctcggggcacaactgttgcctttctaaagtctggctgtgaacacagaaaggttttcaatagacccaacttcagcttatcaccagcagacttggataacattcccaaccttgcccgaagtattgcaaatagatttataaaattagtatggacaaagggtggacgaagcaaagctggtgatgaagctcgaagccaccttaagccggatgacgaagccgaagctgaagctacagagtaa

SEQ ID NO: 37625 - DNA, 287 bp, Zea mays
  Clone ID: MRT4577_134317C.1
ccgaacccagacacaagtcttcactccttcctgcgagccctgaggaagccttctttccccagacatggccaacaagggtccttcctatggcatgagccgcgaagtgcagtccaaaatcgagaagaagtatgacgaggagctggaggagcggctggtggagtggatcatagtgcagtgtggccctgatgtgggccgcccagaccgtgggcgcttgggcttccaggtctggctgaagaatggcgtgattctgagcaagctggtgaacagcctgaccctgatggctcaag

SEQ ID NO: 37626 - DNA, 384 bp, Zea mays
  Clone ID: MRT4577_134318C.1
gggtaatctttgatgaagtgcattatgtaaatgatgctgaaagaggtgtagtctgggaggaggtcattataatgctcccgaagcacattaacattgttcttctttcggcaacggtcccaaatactgttgaatttgctgactggattggtcggacaaagcagaagaaaattcgtgtcacatcgaccaacaaaaggcctgttccacttgagcattgcctgttctactctggagaagtgtacaaaatatgtgagagggatatgtttcttgctcaaggatttaaagaagcaaaagatgctttcaaaaagaaaaatttgaataagtttggagtgaaacctggtccaaagtcaggaacccctgcagtacgtgctggaactcaaggcaaaa

SEQ ID NO: 37627 - DNA, 250 bp, Zea mays
  Clone ID: MRT4577_134319C.1
ggctaacatagacatctggctctggttggcttaagttggtgtacgaccgtattcattaattcctagacaacgtggatatagcttacgtcatgcggcatgtgttggcatggtggtatagcgtagagtaatgtatcttaggcgttcgtttcggccagaacatagcaggcatagtccttatatgacgtcgtgaagcatcatggccgaagagtcatgcactggcactcggacgtcgataggtgcatggagtggt

SEQ ID NO: 37628 - DNA, 577 bp, Zea mays
  Clone ID: MRT4577_13431C.1
atcagctagaaaaccacaggcccccaaaaacccaactgggggaattcggggaacaatcgggcaatagatccaaacgaaacgattttccctgccaccaaaataacaaaggcaagacaaaacccacccctagtaataggggcaggtaaaactccaacaaaccaagtaaacaaaggctttaccctttaaatgggggggtattcaagcaaaaactgggggcccttccgaaacattaaaaacattaacgttcagctggggacgaccccctcattcaatgatagattaccccgctggtgctcaaaaaaaacattgctctgctggaaatgctgggcaaaacggaggacctccatgggttcagcaaccttgggtttcaaagcatttggggactccagcaggggaaaaacctccggctgatccatttccaaaagcatgccagggaccttgggagcctgctcacgttccaggtgttaaacaaaaggatacaggttctcaccaagcataaatctttgctgatctgggggggcgttaacaagggcaggggctacccccccaattggaacagggtggggggcaatttttt

SEQ ID NO: 37629 - DNA, 804 bp, Zea mays
  Clone ID: MRT4577_134320C.1
aattcggcacgagaggccacgccgccgcctcaattatatggcgccggcgttctcggcacaggtccccgcgctccgacggggagcactgcgcgtgcggtgggtcacggctgcgctgttctcatcggggattctcgccggcaacaagccgattctggtgcgtgacttcgtgaggtcagcgttgtacgaccccaaccatggctacttctccaagcgggcggggccggtgggcgttcttgacgccagcatccgcttcaaccagctcgaggggaggagtgcatatatacagcaccttgataagctgtataagaagcatgatatcgcttggtttactcccgtggagctctttaagccatggtatgcctacacaatagcagcatcgattctgcgtacagcaaatctttcagtcccattgaagatatacgagattggtggtggctctggaacatgcgcaaagtgcatacttgattacatgatgctgaatgcgccaccaaaagtctacaatgatatgaaatacattagagattagctcctctcttgctgagaagcaattggaaactgttggtgaagtgcaaagccatttgtcaaagttcacggtggagcaccgggatgcaattaacagacctggatggggccgcacggatcctcatccatgttgggtgcttatgcttgaggtacttgacaatctaccacatgaccttgtctattcaccagatcaggtctctccatggatgggaagtgtggattgaaaaagttaaaggcagttcacaagcctccgaagtctataaccattacaagacccattga

SEQ ID NO: 37630 - DNA, 699 bp, Zea mays
  Clone ID: MRT4577_134321C.1
cgggctcggtaggcgccctgccgacgtgccgttgccgtgcggccacggcccacgaagcgagggcaccggttttttcccccaccctacgccttcgggctccgctgcgccggggactcctcgcttgtcgcagtccagcgtcatcggtggcgctcgcgcaccgacacggcgaaaaagtctgtgcgcgagctgatctgtcaatcgctctgactccatggccttcgtccatccactgcctggtctcccagcccaacaccgtgcgcccatgcttcattcttctccacctcttcttccgccctgtcggctgtcgccaccgtggctgcacccgcgtttgacaccggcgctgcatctgtcctcccccgttcaccatattatcaatcactttatcagtgatcaatcacaattgcagaagccacctctttcaccatggatcaatgaaattgaacagttttttattctcgtcggtgtccttaagtttttaaaaatactatactatgaagtctgaacacgttaataacagtttaacacggagaattgctgtctccgtgttgtctccacagtgaagaatcggatccggattgcaacccaccgtttttttctctgacctactcgttaatgtcacagccaccaggcaccttgttcttcatgctcgttcagctgtgggcgcctttgcttgctgccccatgatgtcgcaatcgatct

SEQ ID NO: 37631 - DNA, 1801 bp, Zea mays
  Clone ID: MRT4577_134322C.1
gtacggacccgcaaaaagagctccgtcagttcctctacctcctctgtaggagcacacttgtttcggaaaggaacgcagattcacgccacgccgccgcctcaattatatggcgccggcgttctcggcacaggtccccgcgctccgacggggagcactgcgcgtgcggtgggtcacggctgcgctgttctcatcggggattctcgccggcaacaagccgattctggtgcgtgacttcgtgaggtcagcgttgtacgaccccaaccatggctacttctccaagcgggcgggaccggtgggcgttcttgacgccagcatccgcttcaaccagctcgaggggaggagtgcatatatacagcaccttgataagctgtataagaagcatgatatcgcttggtttactcccgtggagctctttaaggtgccttctctgctttagcggttgaagagaatgaggttctttcagtttggtcactgatgcaccgttttccctctatggtgcagccatggtatgcctacacaatagcagcatcgattctgcgtacagcaaatctttcagtcccattgaagatatacgagattggtggtggctctggaacatgcgcaaagtgcatacttgattacatgatgctgaatgcgccaccaaaagtctacaatgatatgaaatacattagagattagctcctctcttgctgagaagcaattggaaactgttggtgaagtgcaaagccatttgtcaaagttcacggtggagcaccgggatgcaattaacagacctggatggggccgcacggatcctcatccatgttgggtgcttatgcttgaggtacttgacaatctaccacatgaccttgtctattcaccagatcaggtctctccatggatgggagtgtggattgaaaaagtaaaagttcacaagcttccgaagtctataagccattacaagacccattgatttctcgctgtgttgatattattggcatgaatgaagacaaagcttctgtcagtgaaaaactaacatttgctgcaaaaggagttctatcaaaagtattcccaaagcctcgtagagcttggttgcccaccggctgcttgaaactaatggatactctacatcaagctttaccgagcatgtcccttattgcttcagacttcagctatcttccagacgttagcatacctggtgacagggctccattggtttcatcaaagaaggatgggaagacatcagatcatcgcaactactttgatgctcagggtgacgcggacatcttcttcccaaccgacttccggctcctggagcagatcgaccataactgcgctggcttctcaaaggagcagaagaatcccggcgcattcaaacccgtgaagaagaggagaacgatcatacttgatactgcagccttcatggaggagtttggcatgccgctgaagacgaggaccaaagacgggtataatccgcttctcgacgatttcaagaacacaaagttctatctcagcgtccctacacacaacgttcctacccatagcaggaggaactagtcttctttccttttgctgatgtgtcacgagtcaggaaaagacgtctgacaggctagaatcggtctgtcattttgagtagtctgaatttgcaagttttcttaccttaaggtgctgaaaattttatagtttctcttttctgtagaacaaagtttttattatcatttttgacattgatgcatgggtaataaaaggtggaagaagactgactaacaaggagtcaaaccaaatgaatggtaaaagcaattacaggctgcattccacacgt

SEQ ID NO: 37632 - DNA, 1780 bp, Zea mays
  unsure (1)..(1780): unsure at all n locations
  Clone ID: MRT4577_134323C.1
gttcttgcctccactccacccccagctggccggctggccngaatgacgaacgatgaattcctagcagtactgcccccaccgcatgatcagctgcgagaggcggagtacagttcaagtcttgcagagctgcagctgcaggtgaggactgagagatcagagatggccagcccagctggggatctctctcttctctcctctcctcacagggcgccagggcagacgccaattgttgccagggctagaggaccagacggcagactaggagtaggctgtcctgtttccgttgtccgcccgcccaaccaccacaccctccccccggattataaacacagcgcctctcctcactcagtcgcctcctctccgtctgcgttcctgtcgtggcccacatctagccgtcgtcgtcgtcaagaaaggaggcgaccacaatgacgatgatggcgcctcatccgcagccactgccgctggcacagccgccggcgttcggggacaccacgctcaccaaggtgttcgtgggcgggctggcgtgggagacccacgagggcgccctccgcgggcacttcgagcgctacggcgacatcctggaggccgtcatcatctccgacaagctcaccggccgctccaagggctacggcttcgtgacgttcaaggaggcggacgcagccaagaaggcgtgcgaggatgccacccccgtcatcaacggccgtcgcgccaactgcaacctcgcctccctcggcgccaagccgaggccccagccgctgcagcacgtcctccgtccctcgcccccgcacgcgcacgcgcttccctctcctcaccagcccacgccagccatcgcggtgggatccaggagcgtgtcgccggtgccatggtactaccacccctccacgacgcgccctccgccgccgccggccgcgcaccagcagtaccacggcgtgctcccgttctaccccgccgccgccacctacgggtactccccgaactacgtcacggacctgagctacaatacgaaggtaggccaagcggcagctgccggcacggcggccgggtcctacctacagctacaggggcacttggcgtaccaggcggcgccagctcagggcggcatggtgccggtgtacccgttctaccactacccgtaccacgcctcgcactcgcagggcctgggcgtccccgccgcgcacttcctccccccggtctccgccgccgccgtcgtctcctccaagcccaccgtcgtggccactcccaaagcagtggagtggagcgggtgacgggttgcagctgaaggcacgaggcgatggtggtggtggcggcggcgactatgggcggcgcaatgaaaggcgctttgttttgttaacaagctgcacatgaagggtgtcggatgccgaagcgacgcaaggccgcattagttacattcattcaattccctctaacttcgaccacagtaccggcaacaacagtttgtaacaaacaaatgactggattcgtctctcgtttacctctgtattttcccaatggtaaacccgtttatcagtgtttgtagtgtagtagtccgatcgctgcaggtgacagcggccctcaataaaccgtcatagtatttcgccctctctgacttcgtgcgtggctgcacggacaccgtgccgggcaagaacagtctgtaacaaatgattcgattcgtctctctctcgcttaccaaccgtattatttttccaatggtaaacccgttaccagtgtctgtagggggcagcggcaccccaataataatcgtcataatatttcgccgttc

SEQ ID NO: 37633 - DNA, 502 bp, Zea mays
  Clone ID: MRT4577_134324C.1
ttcgagtgaccattataagaaaaatattttattattacttggttcatctttatgactttatccaacgggtggtggggttgcacttataactttttattaaaggaagaacaagaagaatgcagcagcataagcaatgcaaggaaggaacaggaaaatgaagatctaagtcccctatctgtgcttgaacccaccacctctctaagcgagagttgctggtcttctgagtgttcggacagcagcggtgggggtaaggtttatccatcactttttgatgttaaaaatggtcaggggaatttcttgattaacccagcatcagttgatatcgaggcaaagacaacagactcagcctcttcggcatcagcagatacatcggatgtttcagatatcacccaatgctctaaaagatcaagacacacagagctggagtacagctctgatgtgctgcgcagtgtgaacttgacacacagtgatctgggatcactcagatgcaatcaggatagat

SEQ ID NO: 37634 - DNA, 238 bp, Zea mays
  unsure (1)..(238): unsure at all n locations
  Clone ID: MRT4577_134325C.1
ctacaccaaggtcgatcgccagggtctggaggaattactcacatctatggggcagatccaagcgagaaatgataggtcctactccttgtcagagaggactggtctggctagacctatggtgtacctgcccgggctcgcaatggcaaagggggggggggggccatttcttatttcatccgccgcnccgctgcntctagcattgtccatgtccccctatagccctgtcgtatttccgtat

SEQ ID NO: 37635 - DNA, 2116 bp, Zea mays
  Clone ID: MRT4577_134326C.1
tctccgtttgctttgcattcaccccttgccgcacacatcaggaaggcgggcaggcgacgacaatgacgatgatggcgccgcatccgcagccactgccgctgccacagccgccggcgccgttcggggacaccacgctcaccaaggtgttcgtgggcgggctggcgtgggagacccacaaggacgccctccgcgagcacttcgagcgctacggcgacatcctcgaggccgtcatcatctccgacaagctcaccggccgctccaagggctacggcttcgtcagtcccccttttcctctcccgttcccggcccctagctccgcctgtttgttgttgttgttgtttttttttcttcatctggacgagcgaggtcgacccatatgcgaaacgtcgccaacctagcttgcttgcatgcacggcaggtgacgttcaaggaggcggacgcggccaagaaggcgtgcgaggacgccacccccgtcatcaacggccgccgcgccaactgcaacctcgccgccctcggcgccaagccgcgccccccgccacacatcctccgcccttcgccgccggccaccccggcgccgcacgcgcccgcgctcccctcgcaacaccagcccacgccagccatcgccgtggggtccaggggcgtgtcgccggtgccgtggtactaccacccctccacgacgccgccgccaccggccgcgcaccactacgcccacggcgcgcaccagcagtaccacggcgtgctcccgttctaccccgccgccgccgccacctacgggtacgtacacgcacgccgctcccagctccgaattccaatcccccgcccgcgacaaggtacgtttcgctagcccaattgaaaaagaaaccggcacggcacggcgttcgcgcacctcgagcgccgccaaactatctgcactgcacgtcgcgcgaggctacgaggatttcgtgtcctctgctcgttggcttcgggttggctggctccttgcgagcttgcggcgggcggggagggggaccagtcaccagtccagtgggcgcgcgcacacatgcgtggcagagcggctgctttggtttggaattggagcagccgagcacgcgaggcgggactggcgggaggcactggcgcaggcacagccgcgcacaggctggacctggaccggaccgcgctgcctcgtcgtgctcgcacgtgcccacgtgccggcctgcacggcggcacaaaaaaaaaagagagaggaggtggacatttcaatgctacgtactggacatggccatgtgttaagactcggcacattaattaccctagttataaacaattactactataaaagtagtagacgactgatctgtccctgttctctgccattttttatcgggttctactgtgcgcggcgcgccactgttacgtgcccctcccccaccccactcgtactgatcgatcgatctgtgctgttccgttcaggtacggccccgaattacgtcgcggacctgagctacaatgcgaaggtaggccaggcggcagctggcggcacgggcgggtcctacctgcaggggcacttcgcgtacccggcggcggcggcagcgcagggcggcatggtggcggcggcgcccaacggcatggtgccggtgtacccgttctaccactaccaccagtaccacgcctcgcaggggggagtcgccgccgcgcacttcttccccccggtctccgccgccgccgtccccgccgtcgtctccaagcacaccgtcatggccgctcccaaagtggagcaggtgacaggctgcagctgaaggcacgaggcgatcgatgatggcgacgacgagcggcggaacgaaaggagcaggccaaacaggctgagctgcacatgaagggtgtcgtccgtctgtcgggagggcccgaagcgacgcaaggcccgggcccccattaggccattgctacatcccccctctgacttcgtgcgtggctgcacggccaccgtgccgggcaagaacagtctgtaacaaatgattcgattcgtctctctctcgtttaccaaccgtatttttttccaatggtaaacccgttaccagtgtctgtagggggcagcggaccccaataaatcgtcataatatttcgccgttcccaaaaa

SEQ ID NO: 37636 - DNA, 495 bp, Zea mays
  unsure (1)..(495): unsure at all n locations
  Clone ID: MRT4577_134327C.1
ctcgagccggccggnccgggaatcccagatgtacgctcttcgtctttctcctgtccgaattccccaatcggactctcctcttcttgcncgatctccccaccccattccaccccgcccatgggtgcccacacgcaccagccctccacggcggcgacgctgccaggggaggcaccaccaacgccggcaacatcgcagggaactggggccagaaaggcaaagaaggcagcctggcggacgcctgcaactccgggatctacgcctacgtcaacatcgcgatcctcacaaccttcggcaacggacagaccccagaactcaaccaacacgaacactgcgaccccggatccggcagttttattggccagagcagcgacatccagacctgacagtcgatgggcatcaaggtgctcaactccatcggcgaggacagcggcagatacggcctctcctccaccgacgacgacaaaaaagtgagaagaatacatgcgggacaacttc

SEQ ID NO: 37637 - DNA, 249 bp, Zea mays
  unsure (1)..(249): unsure at all n locations
  Clone ID: MRT4577_134328C.1
aaggnttcagcacgccgcccgttgggaaggnagcttcgangcgncccgccgctgcgcgtcggccgggcgggctgagccantggcacgggcccttggggggcgcgaacgccctaacgtgggtcgggncgngcngcgagcagaggcgccggttgctancttggattctganttagaggcgttcagtnataatccgtcacncggtancttcgcgccantggcttttcaaccaagcgcgatgaccaattgtgt

SEQ ID NO: 37638 - DNA, 637 bp, Zea mays
  unsure (1)..(637): unsure at all n locations
  Clone ID: MRT4577_134329C.1
ccggccgatagccttgcgccgagccgacgtggtccgcgcgccgccagagccacgacgccggccagccctacagcgatctgcaggactctatggatctgaagcgccatgcatcgccagcgctactgcgacttgacattactctacatcaactcgaacaacagcaagagccagggattataggcaacagggattatacccgcaaggggctcatgtgacaaagaggggatgaacatcaatccctactgcattaacacctctttggaataaaaacctgcaaaccgaacatgcccttatggaagcaatccattgcaaacgaacattgcccttatgggtcactatcgtgtccgctaccaccgcctgtgcgcatcagagaccgacgagactgggaaattcagacatgcattcttctaccgatccgatgatagggtcggcggtcattgcctctgggctcacattgttcgagggccgcttctacgttgccgtagcgagcaaactgtgttcggcacattaaaacggatttctggccgccatacgaaacgaatggtaatactggctgatagcgccgtggacgctccctgtaataagagtggctgtgtacctgcactggctcatcatngaagatgttcaagcacgcgtg

SEQ ID NO: 37639 - DNA, 2237 bp, Zea mays
  Clone ID: MRT4577_13432C.1
tcgggggggagggcggggatttaagagataggtttcagcattcaattgcccctggtggacttgctggggatcgtcgtggtgttgtcccagcttcaggtttctcatttagttcccagcttttttcaattttgtcaagtcattaaggagaacaaagaccttgatctgcctgctcataaagttatggtggctactgtacgttgtgaggaaactggtaatgagtaagttggcagctttatagctgatgaggaatggcaacaatttgaggaggctgttcaacatgactttgttactgggtttgggaagaagctcagcagccttctggatagatgtttatcagagtatgacatggaggctatttattttgatgaaggtgtcagaagctctaaacggcaacaacttgagtctaaactgctacagcttgtcaatcctgcctatcaatctcttctaggtcacttacgtactagaactttagaagcatttaatgagtcctttgacaaggctctagaaaaggagggatttgctgcagccgctcgcaattgtactcaaactttcttggagaagtttgataaaggatctgaagatgctgctattcaacaagtgaattgggacacctcaaaagtgaaggataagcttagacgtgacattgaggctcatgtagcttcagttcgagctgctaaattatctgaactttgtgccaaatatgaggcacaacttaccaaagctctggcggaaccagttgaatctcttctagattcagccagtgaagatacgtggccagctattagaaagcttcttcaacgcgagacaaaaactgccgtttcaggtcttcaatctgctgtgtcagcttttgaacttgatgaagcaactgagaaagaactgcttgtgaagctggagaagcatggaaggagtgttgttgagtcaaaggcaaaagaagaagctggaagggttttgattcgcatgaaggacaggttttcaatgctgttcagccgagatgctgactctatgcccagggtgtggacaggaaaggaggacataaaagctataactaaaaccgctcgctcagcttccatgaagttgctttctacaatggctgcaattcggttggaggaggatggtgataacattgagaacactctttccgttgctcttgttgacacctcaaaacctgggactactgataggagtatccaattgaccgatccacttgcctccagttcatgggaaagggttgccgaggagaagactttaattacccctgtgcagtgcaaaaatttgtggaggcaattcaaggctgaaactgaatatacagtgactcaagccttagctgctcggaaagggtatctgaggagcaacctctaattacccctgtgcagtgcaaaaatttgtggaggcaattcaaagctgaaactgaatatacagtcactcaagccatagctgctcaggaagcaaataagaggaacaacaactggctgccacctccatgggcactagctgcaattcggcagggaattccaacacggatttcttcctgccatcctttcactgtcgacgaagtttgtgcccactgtaatgaacatcctgaagagattagccgacgagggtcaagcacctgcagccgccccagagaggcagagagagatggagctccaaccaaaacccaccaggaacggttcttcatacaccaacgcgacgtcggcggggtcatccagcgtaaccacttcggagatcggacctgagtattcgagcccggtggcgcaatgatttagctgacctttagcctttggctggaagcccactctagcgcagttgagggaaacagggtgcctctcgagaacataggaacttaggaagattttaaggacagtcaggtgccttgcagttttttctaagcctgcccttcccccaaactgatgcaaggtggtgatggggtggcactgcccatcactattatttaaggatttttgggggctgggggggttgtttgtaagagcattgtagaatgatttcgtttaatttttttggtttctgtaacatgaatacatgatatgtgatggttgtatagaagatctggggggcgtagtagtgcccattctacacagcttatactgggcagggggttgcatagttgccagaagcttgtacatgtctttaaaccgccatcggattgcgatggagtagtattactggtgttctggaataacacggaggaacgtgttgtgactaaaaaaaaaaaaaaa

SEQ ID NO: 37640 - DNA, 256 bp, Zea mays
  Clone ID: MRT4577_134330C.1
gtgatcttttatggtgaaactcctaagaaacaggtggttttgctggaaacttggtagacccttaattataatggtgctaatgagcactactgtaatataaagccaccattattttttatcatacatctgaatacattttacaaaggctattgtgagggcattattttgagcatctattttgaggtgatgtttaagaaaactttaacatcaaatcagattgtaaattaatttaaatatattgccttaaggacctact

SEQ ID NO: 37641 - DNA, 598 bp, Zea mays
  unsure (1)..(598): unsure at all n locations
  Clone ID: MRT4577_134331C.1
cgnactccaacacgttcagtccagggtgtgcctcttttgggagtgaattatacttttactcaattaggatattgtgtttctttggatctttgtttgattaatgattttttggatgagagtgtggctacaggatgaagcaatgcagttttttatggaacacacatgtgcagtatacaaatggaccatcaggttgcgggtatgttttttagacaaattattccattttttctattttgttgttccatcgagtctaattggattgggaatgcacatgctaactataccactagaacattagatcatgttgtttttggacaaataattttatttttccgttccaaatttctcccattaagtctaactggattcaagtgtgatattagaaatcaccaagggacaaatcatggtggcatttgaggttgttctttctaactgtcatgttatttttgttgggacttcattataaagattgatgtttcataatgattttcaatattggtccactctgtttaagtactaaagatgaattaacaattttagttgtcttgatgtcatctttctatagcctaatactatttccctcctttgtatcgaacta

SEQ ID NO: 37642 - DNA, 748 bp, Zea mays
  Clone ID: MRT4577_134333C.1
ttggtacctcgaggcggcgggaccgatctcacccattacaatctagacacacacgaagcgtactctatgtagggctgccacttcctcaactgggccttcctcatgttttccactcacatcggatactactcctgcaccatcgtgataaacgatcataccttccgtacttgtatataagcacgctgcctcgtgtatctgtggaactgcccatcggaaagcttcgacctgcttaggaacactgctacagacgatctatacaaagatagctgtgacccctatcaagagtgactgaaaccatccaccggactcataaatgaacactcggactgtattctatctttcacccagctgacccacagatacatctctcagataccataagaacagcactggagaccatgcgtgctcctgctgacccaggactgcacctactgccaactcgctgcactacggtaagaggcattggaattacatgcaattacatatgacaaggacttgaatcgaaggctatatcttagagacgacccatctcccatggtgcactaaacgtccttcatctaccttaccaataacctccctaggactgtgactgcaacaatttagtgacatgcgctctgctcttgacaacaatgtcatctatcacctacctacttcaaggacatcataggagagtccgacaccaaaggagctgtggcttcgagcatctctactacattgttatggctttcatcacgtccaagctactctc

SEQ ID NO: 37643 - DNA, 432 bp, Zea mays
  unsure (1)..(432): unsure at all n locations
  Clone ID: MRT4577_134334C.1
cccacgcgtccgcgactactggcttgtttgttttagtcgnccgatctgatctacagaaaaagcaggggcagggcagctagccatgattcagatgaacatgaagcagcctctcgtgctgcccgggcaccggggcaatgtcgtcggctcgcgcctggcgtcgtcgccctctgcggcggcggccagcaggcggaggggcgtcgtgtcctccccccgctcccggctccagcgccacatgcggctgccgaggatcagctgcagcgccaccgaggaggccagcggcgcccgggtcggccgtcaccgtggagaagatgctgacggtgacggcctcggtgcaggcggcgccggcatcggtcagatgtacttccagcgcgccctcgatgacgccggcgaccttttcgcaagacgctgctgatggagctcgtcagctccgag

SEQ ID NO: 37644 - DNA, 258 bp, Zea mays
  Clone ID: MRT4577_134335C.1
taccgccgccgccgcttccgtcgtctccgcccgccgaggccatgccgtcccacaagagggccggatcaagaagaagctggccaagaagatgcgccagaagcgccctatcccctactggatccggatgcgcaccgagaacaccatcaggtagaacgccaagcgctggcactggcgtcgcacgatactcggattctgagcggtctaagagatgctggctaatgatgctgcgggggtatagggctctgcaggctagtcagc

SEQ ID NO: 37645 - DNA, 376 bp, Zea mays
  Clone ID: MRT4577_134336C.1
cccacgtttttgcgtggaacgcttgtggctccaggtgcgtgggctccagaccgaggttaccgcaaacacgcccagcacacgaacacactccgaggcgagcttcgaggtgatcgtcgcggatgggcggcgagatgagccgtggctctggcgcgggctttgaccgcttcttcaccatgttatgcctggagggaggggtgtaccaagtcgaggacgcgttcaaggcggtggagacggcggttggcacgtggatcggggtctgcggctcggtctctgcctgcgttgatgcgcagaataaagtgctggatcagttgatggttcaaaacatggtgacacacctgttgcccatcaccttgttcgtcagtttgcttgccactgg

SEQ ID NO: 37646 - DNA, 856 bp, Zea mays
  unsure (1)..(856): unsure at all n locations
  Clone ID: MRT4577_134337C.1
ccggccgggtttcttatgaattttaattactgaatctaatttctgatccgccttgtgtctttactctaaatgatagtattactactttattcgcttgatgggacgcaaggcttcccatgtggcattggaatgtgctcttcaatcacatccaaacatggtatgttttttccttacttgcatgtgacctgtcacatttttttctcacatggatctggaagagccgcgtgagaggaagctaaagggttctggcttaagctgtatcaggtcaaattttcaccattgatccaacctctgctacggcaatttccaggtaggctccgcatcccctcccacaggttaatatttgaagtttgtgtttctctaaacacaaacatagcttcagtagaaaatagagactgatacaagtttatatttgaagtttgtgtttagcacacagtgatgtttatatttgaagtttgtccttttctttgaagctaatattttgtaagtcatttcatggctccacgccgcccgtgcccttgccggctgacgacgccagcggcaggtggcagcctgctagctggtgggtcgggcaagcgcaggatgggctcctctgatgatatggaccatggctacacgatatctccacaagatactcctcaatttcttcgtgccatttgacattccttttttgtgcttcggaccatggcttcggttcttgtgtgttttgtttccttttttagagttctttttcagtgttttttggatagattgtgctctttaacctatgacactcgcaactgaacggttccatatactttcagcatcgggcggtgtgctctntacaaagccttagagctgcctctcctgcaaagtc

SEQ ID NO: 37647 - DNA, 707 bp, Zea mays
  Clone ID: MRT4577_134338C.1
ccggccgggatagtaccattcactaatccaagacaaaacatggctgtgaatgtgagaaccatgtggtcgtcgatgggggcacaggttgcgatggttgtgacgttgatgttcttggtgagcggcgcatggtgcggtcctcccaaagtccccccaggcgagaacatcacggccacctatggcaaggactgactggacgctaaagcgacatgatatggcaagccgacggctgccggtcccgatgatgacgacggcggatgatcgtactaggacgggaacaatccccccttcaatagcatgggagaatgcgcaaacatcctcatcttctaggatgtactgggttgtgccttctgcttccagatcaagtgcgataagtctgcgaagtgctccgataagcccgtgatggcgcacatcacggacatgaactatgagcctatcgcggctcaccatttcgatttcattaggcacggcgtatttgcgccatgtgcaataatcgtggaggaagataagctcgctgaaggagattatcatcgacttgcagttcccaagggttaagtgccagtacgactccaaggtcaccttccaccttgataaggagtgcggtccctactacctgttgctgctggttcagtacctccattgcaaccgtgacattggaccagtgaacttcattgataaagcctctgacacgtacgaacccctgaattact

SEQ ID NO: 37648 - DNA, 1222 bp, Zea mays
  Clone ID: MRT4577_134339C.1
cattgggacctcgagccggccatccgcatctgcgattgtccacgtcacggcccgcgcccgcgccagtccgcattcgccgcaaacggacgcacgcatccccgctccccccgccccttctcgtcgccacgagtgtgtgctagggttccggcgtccggcgcgggcggtggcggccattccgatggaggcggatacggggtgtcggttggaggtggacgacgtcctctccttcgccgacgacctcgtcgtagtgctccgccgcagcgacgacgccgacgccaacgcgcaggtgatcgcgggcgcggggttgctgcggaccgcctgccgctccgagtccgaccacctccacctgcagctgaaagattatcagcaaaaaatatgctcctgcaaggacaagacagacaaagcaaaagctgaaacgattgctgctgatgaactgagtgtactgcaaaataaaatggaagaaaatcttcaggaagataaacaacttcgtgaagaattgagagctacacataatgaccttgaaaacctagaccatcaaagggcttctatacaagacaggaagaacgctatcaagaagaaggatgaaaacatgcggaaagccacatataaactttccatgtgcgtgtcagttacaaatatcataccaaatttggaagatcgggataagatctcaagctatactgtcgacaagaatgggaagaagatacagaagttcgagtttgagaagacgacgccaccagttgagatctgtaacacgctttggaaaacaatttagggcgtgcagatcgttgttactgtctgttaacgaagattgtcaattgtacttgtatatatagctgactagctgaggatggtggacctctcatcttcaattgtgcttgtttataactttatatagctgaggattgtcaattgtgcttgaatttagggccgtgcagatcgttgttactgtctgttgattttacagtgttttgatttcagtcagtataagatcggaagatttgcgctttgcaaaaaaaaaaaaaaaaagcggccctgcttcacttcctttctggttttgctttgactcacttgcttcccgttgtcccgtgcccttcttcctcgcctctcgtgaagtcgagacgcgtatccgtccagtagctttaaaaaaaaacttctcatgctaagaaaatccgtgcaccgttttcgtttcctattcacatcccaaaatccataatttttg

SEQ ID NO: 37649 - DNA, 1552 bp, Zea mays
  Clone ID: MRT4577_13433C.1
cctcgaggccggccgggccgggtttttcgaaaattacaatcacccaccttccaataaaagcgcacacgccttcgtgcacctccccggtctctccccctttcctctcccttcccccttcccccgccttccgccatcgccgacgctgactcccacaccggccgccgcgcgagccccggcaccatctccgcacgagcagaaatgggggatgcgtgtttctcaacacagctaattgatggagatggggtcttcaacgtctctggattggagaacttcatgaaggatgtcagattgggtgaatgcgggctctcctatgctgttgtatcaataatgggcccgcaaagtagtgggaaaagtacacttttgaatcatctttttggcaccaattttagggagatggacgccttcagaggaaggtcacagactaccaaaggtatatggttagcgaaggcccagaatattgaaccgtgcacccttgtaatggatttggaaggaactgatggaagggagaggggagaggatgacacagcatttgagaagcaaagtgcattgtttgctttggccgtttcagacattgtgttgattaatatgtggtgtcatgacattggtagagaacaggctgcaaacaagcctcttttgaagactgttttccaggtcatgatgaggttgttcagtcctcgtaaaacaacattgttgtttgtcattcgtgacaaatcaaggacacccctagaaaatcttgaaccaattttaagggaagacattcagaagatatgggatgctgttccaaaaccccatgcccataaagaaactccacttagcgaatttttcgatgtacaagttgtggcactgtccagttatgaagaaaaagaagagttgttcaaacagcaggtttctgatttaagagataggtttcagtattctatcgctcctggtggacttgctggggatcgtcgtggtgtcgtcccagcttcaggattctcgtttagttcccagcaattttggaaagtcattaaggagaacaaagaccttgatctgcctgctcataaagttatggtggctactgtacgttgtgaggaaattggtaatgagaaagtcggcagttttacatctgatgaggaatggcaacaattagaggaggctgttcaacatgactttgttcctggatttgggaagaacatcagcagccttcttgatagatgtttatcagagtatgacatggaggctatttattttgatgaaggtgtcagaagctctaaacggcaacagcttgagtctaaactcctacagcttgtcaatcctgcctatcaatctcttctaggtcacttgcgtactagaactttagaagcatttaatgagtcctttgacaaggctctagaaaaggagggatttgctgcagccgctcgcaattgtactcaaactttcttggagaagtttgataaaggatctgaagatgctgctattcaacaagtgaattgggacacctcaaaagtgaaggataagcttagacgtgacattgaggctcatgtagcttcagttcgagctgctaaattatctg

SEQ ID NO: 37650 - DNA, 229 bp, Zea mays
  Clone ID: MRT4577_134340C.1
cccatgaagatcttccagaggcacctcacaaacatgaggccctcatccaactaggctcatcctgatggattgtctgcctcatgacaaacatcaatacatacatttcttacgatactgtggggggcctgtccagagacgtcaacctcaaatggagacacggcccgggctcaggcgaacaccatgtctgcaacaaagacggcgcctacgtatggggatacaggccaatcta

SEQ ID NO: 37651 - DNA, 932 bp, Zea mays
  Clone ID: MRT4577_134341C.1
ggtttctgttcacaactcttccgagcatgccgtcgtctcctttgtcatcatcatcagctcagatctagcaacttcgccttctcaggtaagggctctgctcacatcttcatatccctgctactaggttttcgtcgtttatcctcgctcggattcttgtagatctcgctcaccttgtagatctcgctcagattcgtttgtcctcgccagacgcgctcacttcgcagctgccgctgtgcctatgctactgcatgggcctctgcgcctgggaggcttgcggcttccaggcttaagtcacgggacagcaggacttcagatttttttaggtctttgaaacaaggctagcgcacattagaatcgagagtctcagtacgaatgggaagtaccgtcataaatttatctttgctactagcaataggaagcaccgtcataaaattaactctggtaataaaatcgattggatatatattgtttctaggaaactaggaaggatcccgtgtagaaagtgtggctagctatcctttttcattggatcatttggctttttcttaaaatatttcttccaaaacagtctcacttttttcttaagttgtattggtgctccctaaggtcgaaagcaggaatattacttttctgcaaaatcgcaaaaatgcacacatttgggacttttcctaagctgtgtcttcgagcaaccaaaaagctgatgttaatttattttcatttttttaagagaagaaaattctttggatgaaaatattgatcattttttacatgtgtactgatcatttttttactggactgctgtcaggtataactggagtgctgtcataagtggagtgttgttagttacatgtgtgctgatcattctaatcacgttgttcgttgttcatcatgtgaagaaaattcaaagtttataactgatttttgttgatctg

SEQ ID NO: 37652 - DNA, 238 bp, Zea mays
  Clone ID: MRT4577_134342C.1
gcattgctcccttttactccttgttccactgatttccccagggcatccagtggaaagggtccctttaccaccagacagactccgagagaacaggtggtgcaaatccaaccgagtattcatacacaacaactggacttctggacagctgtcgacagaacaggtgccagggcatttcccacccctaacacaagcccaagatgaacgacaccgatgacatagaaatatcgccctttgaaaa

SEQ ID NO: 37653 - DNA, 149 bp, Zea mays
  Clone ID: MRT4577_134343C.1
aaaggaacccacgttagacaccactttgtaggggaaacaacatatattttccctgggctgcggccacaatagaacgcgagtcattattaaaagcgagggcccattattgacaaaccaaaaaaacacaaaccctgaatgaacaacaggca

SEQ ID NO: 37654 - DNA, 343 bp, Zea mays
  Clone ID: MRT4577_134344C.1
cgcgaacctgccgctaccgcacgcccgcagtcgccgcaaaatccgccgccacgaaccggccgcacgccagcctaccacctccctacgcccgcctgcccgcccgcaatcctgccaccgccgcgatctggctgcttgcccgccacaatccagccaccccgccgcgaccgctccgtgcatgccgcaaccgctgcgatccgcccgccctcctcaatccgcccgcccgccgcaatctggccgcccgcccgccgtgaccggcgagatccggtgcagcggcaaatgcaggtgtagagggaggcgacaatgtcccagatgctgtggagtgtgggtctgaaaaggacgggca

SEQ ID NO: 37655 - DNA, 1329 bp, Zea mays
  Clone ID: MRT4577_134345C.1
ggaaaaaaggattttggtatacgtaaatgcattaaaaaggggtccattttattatgtgatatatacaaactcatggaataaagcagctaggctccatacttattacaggtataatataagacagtctggcactagtctaaaaactaacctgacgacaataatctaagacggcagcttaggcaaaattcaaactaggggcttgacacagataagctatacactaaagacgaaagccatgcactgcttgcatcttcagagaagcttattctgcgccaccgcctcgcaaagctcctcctcgtaccgcaaaactctaggcgaaggtgcagctttacacgcaggtcttgccagccttggtggtggcatcgagcatcggagacgcttcgaagggaaaagggtaggagactcctggaaaaggacagctgtgattggcttcacgtcaaccagcctgaggcgtgaaaggcgagaggcatgtttcggagcccttggtgtccttggggtggaaacgcggacgtccttgccatctattcttaagaagggccaatgctctgttggaagaggggtgctgttcaggagcaactcctgtctgctccgatctggagtggtatagttgaaatggtactgtctagcaagttcaactgcttttcgaatcctttttgaaacatgaaaaaccaccttaagttcgtcgtggtgtaagcaacacatgatctttaccagcaaatcaagtggaagtgattcaagatttgaatcaccatcaaacgcagatgcatcaggagtctttggagtctttggcaatatctgccccttattgctaccaaatggcttaaaattgagtcttgcaggggacaaaattgttgtactgctttctaagagaacctcaggttgtggaggcaactccagctcatctttcgcattcaacagaattcttttcttcccgatgtccctgctcgtactcctactataacgaatctgagccaaggcaccaggtttcaagtacttattctttgcatgtttcactcgtttcttctgcttcattgttagtgatccagaccccatggtgattgctattcacgctgaaacaggccgcgcagttcaggacccagcggctccaatcctgcgaagagaaagggaaaccgagcgcggcctagctgttccctgacacctccggcgagcgcgagctggctgttccgacaccgccggcgaaggcgagccggggatgaatcaaggggcgccgcagccgcaggcagaccgcagacctatcgaaatattttttcctcccctattcctctgttttgctttaatcgagagcccggcccgccccgactcgaccaa

SEQ ID NO: 37656 - DNA, 373 bp, Zea mays
  Clone ID: MRT4577_134346C.1
cgggccgcctttggtttttttttttatttttaagggttttctcacaggaacattattaccacgggtcccgggtcctatttccccatgttctaaaaaagcaccctcaaacaattggatgggtttctaaataaccgggccaataatatccagcattcaaaacctccaaaaaaatcaggtttaggggaaaccaaagccaagccatttttctgcctttttctcgccccttgaaacggtacaaaccaaaaacatgcccgatccctttgaaacaaaactgtggaagggaaaactttaaaccacccccctgtaaaattaaccagggacaaaaaggcccaacccaatgaaaaaaaactgggtgccagccaggctttttttt

SEQ ID NO: 37657 - DNA, 423 bp, Zea mays
  Clone ID: MRT4577_134347C.1
ccggccggggactccgctccgctagccccgacgcgccctctagaggtcacggaaccagccagccagccaggcgaagctggtattttcggctcttcctcccgtcagagagcttgacgcgcggagcggcgcctccttcgcccgtttgtttggctagcgttgccaagaaacaagcttcagaagccggacgagaaggcgctgccgctaaccccacggcccccaagtagcagggctcataagagttttttggggctagaactgtaaagggatactgctgtctgctataccaaaccctctcttgtcgtgttacgctgcgctctgggcacggcctcgtgactgtacagtgctccgctccgccgtgccgtgctccaccgcaccggactatttttaaatctgacgaaaaaaaaaaaaaaaaaaggggcggcc

SEQ ID NO: 37658 - DNA, 444 bp, Zea mays
  Clone ID: MRT4577_134348C.1
agggccactcaaacaaattactcaattcactgcaataggaacgcttactcgctatacaacatgaagactatcgatcactagtgagttggacactaagccactcaaaacatggacacaaaatacactttgctttgcagggtttgtcctacaataagggcgatgctattaacaaagtgtgatagagcatgaaaagtactcaacgagccatcgtgatttggagaagccaaaatgctgtcaattttctgcatttacaccaccacttggacccaaatccctgatgttttggcatcatcttagttttgagaaaccggggtactctatggaatgccaaaattacacgccatcgtgatttggagaagccacggtatccttaactccaaaataccacgtacccaatcaggtcttccctcacaacaaactactaaagcctttcaacacaatacc

SEQ ID NO: 37659 - DNA, 1612 bp, Zea mays
  Clone ID: MRT4577_134349C.1
tagccggatgcaagccacgcggcacgggatgcactggggtggaagaggcagtggcgttgttcgctgagatggctgagaaaggattgaggctgagtgagaagacatttgctgcgttgatgccagggctttgcgatgaccagggcagggtggcagaggcccggaaggcagtggatgacatggcagagcggaggctcacgccaaaggacaagtcagtgtttctgaggcttgtcacaacgctgtgcaaggctggtgacttggatggggcgctcgaggtgcaccggaagagcgggcagttcaagcatgtgctggtggatttaagacagtatggagtgctgatggaaggcctttgctgtggccgcaacgacctatgacagagttctggaggccctgtacgccgaagaaaagacgttgcctgcgtactccatgctgtgcaagatcaacatcggtttataacccggtgatcgagttcctgtgcagcaatggtagcaccggctaggccgagacattcttcaggcagctgatgaagaaaggtgtggatgacaaggctgcattcaacagtctcatccgtggacatgcaaaagaaggtgtgccagaggcagctctgaagattctcgccatcatgacacgccctgtggtcccaactgaccctgaatctcatgcactgctagttgatagcttcctgaagaatgagccggctgatgcaaagacggcattagacagcatgatgcaacagggtcacttgccaagcccagctctgttcaagtctgtcatggaggcgctgtttaacgatggccgggttcagaccgcaagcagggtcatgaagagtatgattgagaagggagttactgagaacatggatgtggcacacaagatactggaagctctattcacgaggggccatgtcgaggaggcaatcggccgtgtcaatctgatggtggaaaatggctgcatgcctgatctggataagttgctggtcggcctatgtgacaatggtagagtgatggaggcgcagaagctggctgattttgcgttggacagggactttgatgttagcttctcgacctatgacagagttctggaggccctgtacgccgaagaaaagacgttgcctgcgtactccatgctgtgcaagatcaagaacaaaggaggtgttgtcagccagaaaggctgcgatgacttgatggagagcttaaaatccgaaggatactcaaagcaagcagatattctgtctaggatcttggcagagaatgcacagtcgacgcccaagaggggcagaagggttgccatgggtgcttagtgagctttgccagcttgtttagagcatctgtgtcttttttgttttacttcaagaaagatgtgatttctttcttttcatcgatgcttcttgagctatttatcaagtaggggattttggtcctatgggacgataagcaagggcgtttactttctgtttggaggatccctgatctgttcgtcttggcgagaagaaacatatgcaataatagacaaagatgtacctcccattatgagtggtgttgtcaaatttagaattaattacttttaacatactgcacttccaacatttttaccaatgacattttggattgaggct

SEQ ID NO: 37660 - DNA, 800 bp, Zea mays
  unsure (1)..(800): unsure at all n locations
  Clone ID: MRT4577_13434C.1
aaaaaatttctttaagcacaaaatatgttttgctgaggagatggcattcatgagcaggttggcgaggagaagactttaattacccctgtgcagtgcaaaaatttgtggaggcaattcaaggctgaaactgaatatacagtgactcaagccttagctgctcaggaagcaaataagaggaacaacaactggctaccacctccatgggcacttgctgcaatggctatccttggattcaacgagttcatgacattactgaggaacccgctttacctgtttgccatatttgtgatttatcttgttggaaaagccatttgggtgcaatcagaaatcggcagggaattccaacacggatttcttcctgccatcctttcactgtcgacgaagtttgtgcccactgtaatgaacatcctgaagagattagccgacgagggtcaagcacctgcagccgccccagagaggcagagagagatggagctccaaccaaaacccaccaggaacggttcttcatacaccaatgcgacgtcggcggggtcatccagcgtaaccacttcggagatcggacctgagtattcgagcccggtggcgcaatgatttagctgatctttagcctttggctggaagcccactctagcgcagttgagggaaacagggtgcctctcgagacatagaactaaagattttaaggacagtcaggtgccttgcagtttttttctagcctgccctttccccaactgatgcaaggtggtgnagggggtggcactgcccatcactattatttaaggatttttggggctgggggg

SEQ ID NO: 37661 - DNA, 147 bp, Zea mays
  Clone ID: MRT4577_134350C.1
aaagagttccggaactggagacggacctacgcccgacctcggtctttagcagtaatacaacagctatgtatatccagaaggaaaaagaaaaaaaacacctactaggacaaccagaccggagtactgatccaggtctacgagggtgag

SEQ ID NO: 37662 - DNA, 183 bp, Zea mays
  unsure (1)..(183): unsure at all n locations
  Clone ID: MRT4577_134351C.1
aaaaacagacggtctgatttactgagtcatncgtcagttctgaaaaaaaatctcttaaggatatcctaaaattcgtttgcttgaacagcctagtgccaggagtccaggacagctcactactattaaaatgagatgtaaaattacctgataatgtcataatttttcacaaaaaaaaggaggggg

SEQ ID NO: 37663 - DNA, 277 bp, Zea mays
  Clone ID: MRT4577_134352C.1
actaagtataccatttatgtatcctttataaggaatgtgctcctagccactgtcttctcctttccaggcatgactgaaatctaatcactggaaaccatgtgattctaaatatattatgtaaatgttaatgtattatgttttttaaatcattgcattcaatttttaatgtcaagaataatggacagcttttgtcaggtgactactaacaatgctccttcattttactacttcttaaaacaaggttggattctaaagataaagattttggagactctgg

SEQ ID NO: 37664 - DNA, 377 bp, Zea mays
  Clone ID: MRT4577_134353C.1
gtcccggtctgctcattctttcgcagtctgttgatatatatatgtatattcttttgcgtgggaaggactcctgtgtgttgcgtgaaaaaactggattccgcgtccgttaggacttaggagacctcatcgcgtaacagccttccaaaaaaaataaagagagcccgcttctcaaccagctgctgattaattggtgcagggctagcttgtaagaccgctcaactccagctttgcggccctccaactttccccaattcaagttcaatattggcgagcatgcgagtttgccctcttgcgtcatcgtccttgcgatcccctcgtgcctgtttctgcgtacgcctgccgtatacaacagttgcgccctgctctccggcaagcta

SEQ ID NO: 37665 - DNA, 425 bp, Zea mays
  Clone ID: MRT4577_134354C.1
ccgggaaaaatcccaaccaattttttgtttttttttgggaaccccttttgggtttgggggcccctttgccgggcccctttcatttgtaatcaaaaagggggcccccccaccgtggggtttctccagggcggggtttttaaaaaaaaactggttttttggcaccatttttttttttttttccaggaaggtcccccccaaggggttcccccctcccaagggttaaaaaaccttttgccccttttgggggccccccccaaattttgccccccccctttggttaaatggaaccaccttttttaagtaggccccagggtttcccccactttgctgagtcaaagctggcccaatttgttgcaccaccttttgttgtaggtccctaggggctttccccccccggagggggctaaataaaaatttttttaggt

SEQ ID NO: 37666 - DNA, 496 bp, Zea mays
  Clone ID: MRT4577_134355C.1
atgagggaggacgagtataatcacgaacacctccagccaaacatgactcggccgagcacacgtacatgggaacaactgcttttttttatggggaggacgagtatcctacagacacgagacacgacgaacacaaacagggcgcgggggaagactacgtaacacgtacgctcggacagggtaggacgaggacgtcccagtaggctctacaaggacacgggcacaggacttgcttaccaccggacaggcgcaggcgccgctgcttatttatctgccatgttctgaggcctcttctcttgattgatccggtgatcgacaccgatcgcacgggcggtggcagcagagcggcccacatgcacacacacgcgcacgcgcgccattgttggaccggccaggaataaccgggcgctactgtatggagcactctgcggggaggccctgctggaacccctcggggtgcaaaacacaagatgtagatcatgtgcttgaaactggaccc

SEQ ID NO: 37667 - DNA, 206 bp, Zea mays
  Clone ID: MRT4577_134356C.1
atctttttttttttaattatactcacaacaacggcggggtcacataatttttgttggggtacaatctaccctctaaatatttctacctatccactttcacattatatttgattctagattccatttcttctatacacaactattttccaaaacatttacatttataccaatttaaactacacagtgatcacttaatctattatctc

SEQ ID NO: 37668 - DNA, 1002 bp, Zea mays
  Clone ID: MRT4577_134357C.1
gcacgaggcttctgcaggatctcgtcccgggctgcaacaaggtggtcggcaaggcggtcatgctggatgaaatcataaactacgtgcagtccttgcaacggcaagtcgagttcctgtccatgaaactggccaccgtgaatccccagctggacttcaacaacctgcctaacctccttcctaaagatatgcaccagtcctgcggcccgctgcagaactcgcatttcccgctggagacctcaggcgcgccgctgccatacctcaaccaggggaaccctctaataggctgcggcctacccaacggcatggacaacagccagagctccatgcacccgctcgacccggcgttttgccggccgatgagctcgcagcagcaccctttcctcaacggtgtcagcgacgcagcgtccaaggtcgggactttctggcaagatgaccttcagagcgtagtccacatggatatggggcagcagagccagcaggagatggctcccacctcctccaacagctacaacgacggttcgttgcaaacagtgcacatgaaaatggagctttgacgtagctagctgaagaagtccagcccaaagcttcgacgcctccccccccctgtatatacagaacagagagggagagagaggaggaccagcctgcagcggaaaaaagcactcttgagattccccaccccactggtgtgatgattctttggacagagatgtgaaagatcaatcgccacgccggcggccggtcgatcgcaccacccccgccgcctgttgttagccgcaagatcgccggcgaccaaacgcggtgcatcgcatccccccggtatattctcagatcagacctgaattcgtcttcctctcaagcgagagggggaaaaaaagacctgtaatatcatttgtatcgccattatatttgtagctgattatatataaatatataaaatatcatccctcgtattcctcgtaaaaaaaaaaaaaaaaaagcggccacaaaaaaacgaacccc

SEQ ID NO: 37669 - DNA, 269 bp, Zea mays
  Clone ID: MRT4577_134358C.1
tcatcgacgcgccatgaagggatgatttgtttccaggagcaactaacaccgcgggtggaggacagttacaattcttgccggtgaaagtgacaatgcgaccgaatctgcacaaatatgtatatgcgagtggtttgtatttgtctgcaaaaacaagcaactggaacagctgggtcgggtgtacacggcgtaactgtaccgaatggtgtcaatgcccaagccgttgaaattgtctactgtctcgacttgtcccttgaacgcgttgagtttcc

SEQ ID NO: 37670 - DNA, 664 bp, Zea mays
  Clone ID: MRT4577_134359C.1
gggagaagacagccagcggatgaagcttctgcaggatctcgtcccgggctgcaacaaggtggtcggcaaggcggtgatgctggatgaaatcataaactacgtgcagtccttgcaacggcaagtcgaggtacatacatttcccactgtcaattcacagctggaatgactgcgaaactgcagggtttttttctctatcttgttgttgccgtttaagaacagaacagtcgtggatgcgttctatctgaacccttccccttcccttccacgtccatcttgcttgcagttcctgtccatgaaactggccaccgtgaatccccagctggacttcaacaacctgcctaacctccttcctaaagatgtgagcacacgccggcgatacatgatcgttcgcattgctatgtctggtagttcctggtaatcgagggaaccctgagcagctcatactccccgttctgtctggtgtgtgatcagatgcaccagtcctgcggcccgctgcagaactcgcatttcccgctggagacctcaggcgcgccgctgccatacctcaaccaggggaaccctctataggctgcggcctacccaacggcatggacaacagccagagctccatgcacccgctcgacccggcgttttgccggccgatgagctcgcacagcaccctttc

SEQ ID NO: 37671 - DNA, 545 bp, Zea mays
  Clone ID: MRT4577_13435C.1
cgccacatgtcgtcttgttcgtcacggtcgacccatcgcctatggaaggaaggcgcgagccggaggcggacggaggaaaggccgggggcctgccggcgtcggagccgtcgcacctgcatggccagccgccgcaggcagtacgggtacgggacgttccatggtcctcgacatcctgccgtcatgttcccgcaggctgccccgcctgccgggctcgggagtggcggctatcacaaccagtagtaagcttacgctcctggagagacatactacccccagcgttaccaagccgaaccagggtatggtcctgttgctgaatgaagacctgtgataatgaggcctctcccatgttgtggccttggcttatgctggcgtatggtcataactgtgtttttcttgcttgccattccatggttcattggagctttggttattatatgtgtgcgggttcatgaccaacgatagaaaccatgatacgttgcttgcacacttgctgtcgttgctgttgacgttgccatactcttgggggtaactaaaggaacgcacgt

SEQ ID NO: 37672 - DNA, 357 bp, Zea mays
  Clone ID: MRT4577_134360C.1
ggcggcctccgcggcggtgaggaggaggtgggtctccgtcccgcgcccatcgagcgggaggcggccattctccccaggctgcgccaccgccacgtgatgcgcctccgcgagattctggccacgcgcaagaaggtccacttcgtcctcgacctcgccgccggcggcgagctcttctccctgctcgacgcgtacggccgcatgacggaggacctcgcgcggcactactatcggcagctcatctccgccgtccggaactgccactcccgtggcgggtaccaccgcgacatcaaagcggagaaccttcttcttgacgacgcgggccgacctcaagggtggccgacttcggactccggcgcc

SEQ ID NO: 37673 - DNA, 579 bp, Zea mays
  unsure (1)..(579): unsure at all n locations
  Clone ID: MRT4577_134361C.1
ccggggggttcccacccagcgtgcccgccgccgaccgcctgcacaagcctgcggcgagatccggcgtcgccggcgagcttcagcaccggcacgtgctccggaaggaaatagcttccggtgacgtacgctaccctctccgcggcgtcccggagagcggggagcgcttttttgctgtcacccgcacacgagcgacgagctccaccacctgcccagctaaccatcaggaggtctggaggatcacaagtgccttggagaaccacaagtatgaaattgctgactgggaccttggtgccggaatatacatagacttctacgttctgaagaactcaatgcaagaaagaaatgccatggatgattcggattcactcgaggagatgagtgaatcatgcagaagtttctttggccgattaaacgattcgttgttagtctggggaagcaaattacctgttgagtcaagggcatgctactcgaagatggcagaggagctatgcgcgcttctggtggacaccccaagcgagacgctgaacctacccantggggtgtcttctgacgatgctcaacgctccagttccggacgag

SEQ ID NO: 37674 - DNA, 1387 bp, Zea mays
  unsure (1)..(1387): unsure at all n locations
  Clone ID: MRT4577_134362C.1
ggccgagcattccttgccccagcagtacattcacgcgttcaaagacggacaatttacgacatctccagtgtctcattctggggcttgattgtctgcacggctgccatttcttatttccttttgtttacatcagctagcttattacctgccatctggacttatattttgtagttagcaaggtaactagatattagaacggctcaaaattttcaccatttcttgtttccttttgtttacatcagctagcttattacctgccatctgaaattttaattaagtaaactgaaactttggttccacttttgcttttccaaggctctcaacttcatatttcaccatccagcacttacacaaaccattctgggagaacatggcgaaattgaactgaaaggagaccatagtttctttctgtataaaaaatatatatacgctggtcttgaccattctctcatttttgctaaaacttttgcaggccgagcattccttgccccaacagtacattcacgcgttcaaagacggacaatttacgacatctccagtgtctcattctggggcttgattgtctgcacgactgccatttcttatttccttttgtttacatcagctagcttattacctgccatctggacttatattttgtagttagcaaggtaacccactgcacaacccgctgctccgcctcgagcgcatgtgctgagagtggctcggcgtcatcttcgagtgggagggggtcatcgttgaggatgatgccgaattggaaaggcaggcgtggttgaccctggcacaggaggagggcaagtcgctgcctccctcttttgtgttgcggagagtcgaagggatgaagaacgagcaggcgatttctgaggttctctgctggtctcgggatccctccgagcttagaagttttatcacagtattgcgagtcatggagtagagatgatgctcaaaggcagtacattgtagaacttggtataccagaagaatggatgcatgaagctctgctaaccatcaggaggtctggaggattacaagtgccttggagaaccacaagtatgaaattgctgactgggaccttggtgccggaatatacatagacttctacgttctgaagaactcaatgcaagaaagaaatgccatggatgattcgggttcactcgaggagatgagtgaatcatgcagaagtttctttggccgattaaacgagtcgttgntagtctggggaagcaaattacctgttgagtcaagggcatgctactcgaagatggtagaggagctatgcgcgcttctggtggacaccccaagcgagacgctgaacctacccatggggtgtcttctaatgatgctcaacgctccagttccggacgagaaagcagtcgtcgtacctgca

SEQ ID NO: 37675 - DNA, 473 bp, Zea mays
  Clone ID: MRT4577_134363C.1
gataattaaacaacaaaatcaataataaaaacactaaaactttattttatgcaaaaaaatgtttttaaaaaatgtgccatatggatttaattttaaaaacactacaggtttattccgggcaaaaaaatgtttttacaatatgggcaaaatggatttaatttttgaaaaaagcatacccagacgggatattgatcgaaaaaacatttttcgtttataaatacataaatgagccctgattttttccaaattaaaggtactgggagggggatatgggtttaggacccccaaaccaatcaatcaaaaatttgttttcaatttccattttaaaaattttaaaatgataattttttggccaatccttaatttaaagatgtttggaaaaaagtgctgacttggccaaatttgtttaaaataactgaaggtaaaccatcttaaactttccattaaaaaaaagttttgcaaaagtggggttt

SEQ ID NO: 37676 - DNA, 261 bp, Zea mays
  unsure (1)..(261): unsure at all n locations
  Clone ID: MRT4577_134364C.1
tggccgttgcttctnncatgcatgtcgcgtacagctgctaattctgctcgtcaatcatgaacctaatactcagtcagacaagacacgccatgggattctagttttagatgacatctataaacttcagataatcaagaagagcgaccttgaagaatagcgtgaactgggttctggaaccattggtactgctgaccatggaaagtgactaggctcagatgttgctatactgagaatcatcgagcgatcatatgctgggaagtc

SEQ ID NO: 37677 - DNA, 843 bp, Zea mays
  Clone ID: MRT4577_134365C.1
taaatatacagctgcacgtatttcctagaaacctcatgatgagtttgttcaaacaatctattcattttattatcttttttttataaacatggcattcctggtatgaatatgcagtcacttcattcgttgttattttggctcagctaaccatcaggaggtctggaggatcacaagtgccttggagaaccacaagtatgaaattgctgactgggaccttggtgccggaatatacgtagacttctacgttttgaagaactcaatgcaagaaagaaatgccatggatgattcgggttcacttgaggagatgagtgaatcatgcagaagtttctttggccgattaaacgagtcgttgttagtctggggaagcaaattacctgttgagtcaagggcatgctactcgaagatggcagaggagctatgtgcgcttctggtggacaccccaagcgagacgctgaacctacccatggggtgtcttctaacgatgctcaacgctccagttccggacgatagcaggtcgtcgtacctgcaggacacactctccgtcttcaccaaaatcctttgcagcgatccgtagcacaagggtccacggtgttgccgtaatctgggtgaagggaagtgaagcctacaggcaacacgccgaagagtttgtacgtctcatgtttggtacttatagaaaaattaggaatgtataactatgacctgatgttgctccggtgaatttgtaactccgtctgaagacatgtgtcgggattttcgttgtatgtgatcgttgtatgtgagtaccaggtcttgtgaaacgttgacttgcgagctgtacagatagggagtgatttcctgggcttc

SEQ ID NO: 37678 - DNA, 778 bp, Zea mays
  Clone ID: MRT4577_134366C.1
gttcaaacaatctattcttttcgtcctcctcatcgatttatttatatgcttgctggacttgtatttttcatttatcttttttttgataaacatggcattcctggtatgaatatgcagtcacttcattcgttgttattttggctcagctaaccatcaggaggtctggaggatcacaagtgccttggagaaccacaagtatgaaattgctgactgggaccttggtgccggaatatacatagacttctacattctgaagaactcaatgcaagaaagaaatgccatggatgattcggattcactcgaggagatgagtgaatcatgcagaagtttctttggccgactaaacgaatcgttgttagtctggggaagcaaattacctgttgagtcaagggcatgctactcgaagatggcagaggagctatgcgcgcttctggtggacaccccaagcgagacgctgaacctacccatggggtgtcttctgacgatgctcaacgctccagttccggacgagagcaggtcgtcgtacctgcaggacgcactctccgtcttcaccgaaatcctttgcagcgatccgtagcacaagggtccacggtgttgccgtaatctgggtgaagggaagtgaagcctacaggcaacacgcctaacagtttgtacgtctcatgtttggtacttgtagaaaattaggaatgtataactatgacctgatgttgctccagtgaatttgtaacgccgtctgaagacatgtgtcgggattttaaaaaaaaaaaaaaaaacacac

SEQ ID NO: 37679 - DNA, 926 bp, Zea mays
  Clone ID: MRT4577_134367C.1
ccggccgggccgggatgttgtacgggcactaccagcaccgcccccggcgcgacgtgccggagacggacatcatccggtccgcggtggagctgtacgaggccgggatccggttcaggaagagcgtctcggacagcctgcacgacatccggttccggcacggcgtgctgagcatgccggcggtgacggtggacgactccaccgagtacatgttcctcaacatgatggcgttcgagcggctgcacgtcggcgccggcaacgacgtgacggcgtacgtcttcttcatggacaacatcatcgactcggccaaggacgtggcgctgctcagctccaggggcgtcatccagaacgccgtgggcagcgacaaggccgtggccaagctcttcaacagcatctccaaggacgtggtgctggagcccgagagcgcgctggacgccgtgcaccgggaggtgaacgcctactgccggaagccctggaacatgtggcgcgccaacctcatccacacctacttccgcagcccctgggcgttcctctccctcgccgccgccgtcttcctgctcgtcatgaccgtcatgcagaccgtctacaccgtcatgcaattctaccagggcggcggcagcggcagtgacggcggatcgtcggcggcgccggcaccggcgtgatgatcgatctctgcactgcagccttttgattgcattggtctgcatgcgtgatctgtttgagcttgttttgatcgcgttccttttccttgaggtatatcgattggttgtgtacttgtgtgtgttgattcttgtcgtggattccagttgttgatttctcctttttcggtctctttccgagtttgtttctatatttgaattaacgggttttcaaattatggaaaaaggaccatatgtgaaacacaactgtaaacagagaagatgatctgt

SEQ ID NO: 37680 - DNA, 898 bp, Zea mays
  Clone ID: MRT4577_134368C.1
atggatgggttagatccggcacatctactttctgaatgtccacttactgaggaaaggaaagcaaatgtctggatggcacttgctcctgcagcccatgtcccaggcgttggcgttgcagcagatgaccatgctgagaccacccatttcaggcttcctgcttctgcttatgaagcactgaatgagatcgtgagggtcatcatccagaaactgagcagcacagatgcaaagtctataatttctcagaccactgatcagctgatgctaaccatcaggaggtctggaggatcacaaagtgccttggagaaccacaagtatgaaattgctgactgggaccttggtgccggaatatacatagacttctacgttctgaagaactcaatgcaagaaagaaatgccatggatgattcgggttcactcgaggagatgagtgaatcatgcagaagtttctttggccgattaaacgagtcgttgttagtctggggaagcaaattacctgttgagtcaagggcatgctactcgaagatggcagaggagctatgcgcgcttctggtggacaccccaagcgagacgctgaacctactcatggggtgtcttctaacgatgctcaacgctccagttccggacgagagcaggtcgtcgtacctgcaggacacactctccgtctttaccgaaatcctttgcagcgatccgtagcacaagggtccacggtgttgccgtaatctgggtgaagggaagtgaagcctacaggcaacacaccgaatagtttgtatgtctcatgtttggtacttgtagaaaaaataggaatgtataactatgacctgatgttgctccggtgaatttgtaactccgtctgaagacatgtgtcgggattttcaaaaaaaaaaaaaaaaaagaagag

SEQ ID NO: 37681 - DNA, 719 bp, Zea mays
  Clone ID: MRT4577_134369C.1
cattgggtacctcgaggccggccgggttattgctctccgccgccacttctcctctgttatcgacaaggcgaagccccataggcggaggccctctccctgctcccacgaccctgtgggaggtatgcggaacgcgcgcgccgatgaatgcggcaaggctcgtactcgaggctggaatgatggatccgcaggataggagccgcatcatcgctgcatcactccaagtagctgcccgaacctcgagaaaagctgcggggatctgctgaatggcgccaagggtaaggatgctcttggcctagggccccgtgaggatgccataccaaggtgctccacgtcaccaccaggaagcctccctgtggatgatggaccaacacctgcgatcgcatttgagatgaggattcacaagcagggcgatagatctcctcaggacaccagacgtgtggccagcagatcacctcgatcactattgaaacaggcgtggaggctgaggtgtactatctagtgacgcttaatatgactacccttatcatttcaaaaggcttctagctgaacaggatatacttcgttcctagagtagaactcgcgaaacacatgaaccctagaacttcatatcagagtgattaagtgttatcgagggatcgcgctatgcatgtatcctgcttcaaatgatttcccctaatgtatgaatgaaaacggctaatggatgcccccaggactcattg

SEQ ID NO: 37682 - DNA, 733 bp, Zea mays
  Clone ID: MRT4577_13436C.1
aattcggcacgaggcactgctccaatccccgtactagaggcgtcacattcaaccacaaaaagaatattgaagtctggaagacggaggactggagcagtttggagagcatgcttcaggcgctggaaggctgctgccgcctcatcagaccagtggaatttttgacggcgaagccgagtggggagaggttctgcgatcgatgcataatgatgaatgaagcgccggtaataccccgctaaacccaagaaactccgtctctctgccactgacatgggaataggccatcgctccacatcctgaatcttgtttgggtcagcttccacaccttttgctgaaatgacatgtcccagataacccactgtggcttgagcaaaagcacacttggactgtttcagatataattgatgatgacggagttgagccaaaactgaagaaagatgttgcagatgatcctcccaggaggggctgtatacaagaatatcatcgaagaaaaccaacacgaatttgcgaaggaacttagagagcacctcattcattaaggcctgaaaggtagaaggggcattacacaagccaaatgccataaccagaaattcaaaatgcccatggtgagtgcgggatgccgtcttctccacatctgcagcatgcatacggacttgatgatagcccgatcttaaatcaagtttggtgaaaaatagagccccatgcaactggtgagcagttcttccactaccggaat

SEQ ID NO: 37683 - DNA, 442 bp, Zea mays
  unsure (1)..(442): unsure at all n locations
  Clone ID: MRT4577_134370C.1
aaggtccatgtgttntattatttcaaggagacacaggtnaggtncatgtncagcactacagcccaaatgnngaanaaaaaatcccaaaccgttgaaaccgaaccttaagaacatcngtctaccaaacaatgctgcagcggggacaacctgcgctcgtcttgggttcctggtctcaattcccattgtnggcnangaacaaatgcttcgatcatgttgaagctgacaactcggtctggtcgaagtgaatagcttcagttctgcgtgnctgaatatctttcgttttgtgtcgcccgttccttttttatttttcagtgggttaaagatccgcttccggcttctcgtgttgttgcngtttcacggtttggttgaacttccggggccgtctggctggcggcttcggcttggcgctgggcttggtttgcccaacgccttcggtcttgtt

SEQ ID NO: 37684 - DNA, 1705 bp, Zea mays
  Clone ID: MRT4577_134371C.1
ccggccgggaaaaaaaaaaaaaaaaaaaaaaaaaaaaaaaaaaaaaaaaaaaaaaaaaaaaaaaaaaaaaaaaaaaaaaaatccgtcaagaccttcggggggcacctgtaccgccacatccgggacaagaacgtgtacgagatccaccagatgtacgagggcggtttccagcgcctttccgaccgccttttccgcgacgtgccctggccctccggggaggccgtgtctccctactgcgacggcgaccacgtattcctcctcctttaccgggagctttggtaccgccacgcccacgcccgcctttccccgttcaccgccgggcaccgggccgagtcgtggaccaactactgcgacctttttagcgtcgtactccacggggtcgtcaacatgcagctgcctaaccaggggctctgggacatggtcgacgagttcgtctaccagtttcagagcttctgccagtaccgagccaagctcaagaccaagacggaagacgagctcaaccagctcaagcagttcgacaaggcgtggaacgtgtacggggtcctcaactacctgcaagcgttggttgagaagtccatgatcacgcagatcctcgagaaggagaaggaggtcttttcattgccctcactaaattttctattggagtagaatttttttctcaaccagcaaggggtctacaccattgtcattgggagccacatctcagccatctaccactacggcttcgcaaaccttatgatgcgcaggtatgttgaggccactcgtgaattcaacaagattcttctgtatatcctcaagtacaagcagtaccaccagaattcccctcagtatgatcagatactgaagaaaaatgagcagatgtatgcattgttggcaatttgcctatctttgtgcccacagaacaagctcattgatgaaaatgttagcacccagctgaaagaaaagtataatgacaaaatgacaaagatgcagaggtatgatgatgaagcatacgctgcttatgatgagctattctcgtatgcttgccccaagttcattacaccgtcgcctccaattctggaccagccgctaacaaactataaccaggatgcataccgtcttcagttgaagttgtttctctatgaagtaaagcagcaacagttgctttctgggattcggagttatctgaagctatattcaacaataaccattagcaaacttgcccaatatatggaagtggatgaagcaacactaaggtcgatggtgatgacacacaagaccaaaatgcatgcagttgacagtgaaggaaagatagtatcaagtgcagactttgacttctacatcgtcgaggatgtgattcatgttgtggagtccaaacctaccaagcgtcatggtgattactttttgagacaaattttgaagtttgaggaaatgattggtgaactggagaaggtacagcttgactgaaatctgatagcgatcatggagagaaatgtcactgtttcctttttgctctcttttgtactccgttgaaaccccatcttttttttttttgtttccttattgactctgaagcccgttgaaaccggccattattaaccgtgtaccgtgtaatgttacttactagtaaattgctcgctccttgcgcgagtcgtcggctgatgcatttacaaaaaaaaaaaaaaaaaaaaaaccaaaaaaaaaaaaaaaaaaggcccctagggcc

SEQ ID NO: 37685 - DNA, 1472 bp, Zea mays
  Clone ID: MRT4577_134372C.1
gttacttgctggtaacgtacaggccgcttttctagatttaccaattgagggggagaggtaccttggtttgattatgtggtatcaattatcacctgatacaccactcgatattatcattcgttcttacgatcaactccttgttgagggcaaagttccctatcctgttcctgtatatatagatgaaggacctcttgatgaagcacctcagtggtccccgggtgaccattttgatatctccttctacctaatgcttcttcatgccaataaagatgagaagtttgggctgctaaagactatgttcagtgcattctcatcttcattcgaccccttggattatcatttcatatggcatcagcgttcgattttggaggctgttggagctttcagttcaaaagatcttcacttgctagatttaagttttgtttatcaattgctttgtcttgggaggtgccattgggctatctatgtcattctgcacatgccgtatcttgacgatgccccatacattcatgagaaattaatcagggaagttttatcacagtattgtgagtcatggagtagagatgatgctcaaaggcaatacattgtagaacttggtataccagaagaatggatgcatgaagctctggctctttatcacgaatactatggagataaacagggtgcactggagaatttgattcagtgtggcaactggaagaaagctcacactattttcgtgacttctgttgctcattctatgtttctgtcatctaaccatcaggaggtctggaggatcacaagtgccttggagaaccacaagtatgaaattgctgactgggaccttggtgccggaatatacatagacttctacgttctgaagaactcaatgcaagaaagaaatgccatggatgattcggattcactcgaggagatgagtgaatcatgcagaagtttctttggccgattaaacgattcgttgttagtctggggaagcaaattacctgttgagtcaagggcatgctactcgaagatggcagaggagctatgcgcgcttctggtggacaccccaagcgagacgctgaacctacccatggggtgtcttctgacgatgctcaacgctccagttccggacgagagcaggtcgtcgtacctgcaggacgcactctctgtcttcaccgaaatcctttgcagcgatccgtagcacaagggtccaccgtgttgccgtaatctgggtgatgggaagtgaagcctagaggcaacacgccgaagagtttgtacgtctcatgtttggtacttgtagaaaattaggaatgtataactatgacctgatgttgctccggtgaatttgtaacgccgtctgaactcctgaagacatgtgtcgggatcttcgttgtatgtgagtgcgtgtgattattacagggaagggcagcgtcacggcgacccgtgcttcggggtacattggagattattgaggccttcgtttcagccgt

SEQ ID NO: 37686 - DNA, 1451 bp, Zea mays
  Clone ID: MRT4577_134373C.1
gtcttgggaggtgtcattgggctatctatgtcattctgcacatgccgtatcttgacgatgccccatacattcatgagaaattaatcagggaagttttatcacagtattgtgagtcatggagtagagatgatgctcaaaggcaatacattgtagaacttggtataccagaagaatggatgcatgaagctctggctctttatcacgaatactatggagataaacagggtgcactggagaatttgattcagtgtggcaactggaagaaagctcatactattttcgtgacttctgttgctcattctatgtttctgtcatctaaccatcaggaggtctggaggatcacaagtgccttggagaaccacaagtatgaaattgctgactgggaccttggtgccggaatatacatagacttctacgttctgaagaactcaatgcaagaaagaaatgccatggatgattcggattcactcgaggagatgagtgaatcatgcagaagtttctttggtcgattaaacgaatcgttgttagtctggggaagcaaattacctgttgagtcaagggcatgctactcgaagatggcagaggagctatgcgcgcttctggtggacaccccaagcgagacgctgaacctacccatggggtgtcttctgacgatgctcaacgctccagttccagacgagagcaggtcgtcgtacctgcaggatgcactctccgtcttcaccgaaatcctttgcagcgatccgtaggtgaaggggagtgaagcctacaggcaacacgccgaagagtttgtacgtctcatgtttgatacttgtagaaaattaggaatgtataactatgacctgatgttgctccggtgaatttgtaacgccatctgaagacatgtgtcgggatcttcgttgtatgtgagtaccaggtcttatgaaacgttgacttgcgagctgtaccagtccggttaaatgagtcgtggttcgtctgggaaaaccaattacctgttgagtcaagggcatgctactcgaagatggcaaaggagctatgcgcgcttttggtggacaccccaagcgagatgctgaacctacccatggggtgttttctaacgttgctcaatgctccggttccggacgaaagcaggttgttgtacctgcaggacgcactttccattttcaccgaaatcctttgcagcgatccgtagcacaagggtccccggtgtttccgtaatttgggtgaagggaagttaagcctacaggcaacacgccgaaaagtttgtacgtctcatgtttgggacccgccccccccccaggaatgtataactatgacctgatgttgccccggtgaatttgtaaccccgtctgaaaacatgtgtcaggattttcgttgtatgtgaggaccaggttcttgtgaaaaaaaaaaaaaaaaaaaaaaaaaaaaaaaaaaacacccccccacaccccaag

SEQ ID NO: 37687 - DNA, 301 bp, Zea mays
  unsure (1)..(301): unsure at all n locations
  Clone ID: MRT4577_134374C.1
attcatctcttttaacctaccaaaccaacctaccaacaaaaannctttgccatttaaaaaagtccttgtaactacacccaaacnaaaanaaacctaaaaactactacatcttttataactacatctctaactaaacatccacattttatataacaaccaacacccccaaactataatatcanctacatacactaccatcaccccctcaataaatctccattatcacccattccaactaccacctctcctccaccaattccatcacccctacttcctccaccaccccattacctacctacaa

SEQ ID NO: 37688 - DNA, 683 bp, Zea mays
  Clone ID: MRT4577_134375C.1
ctccttttcagttgttgcccttgccggcctggcatttgttcaacctttcctctctctctctctctctctctctctctctctctttctgctacagccattttactgatgataacagtgctaattggtcaatttcacatatatttaaatatatatatatatatggagctaatactggtgaagtagtaggtgtggttgtgatcatgcataaactaactgttgctgccacatggattggagagggagatcgatccacagaaaatggtatcatttgtcaagtgcatgttaggacttgatgctgttgtttgggacattattgggtcgtcattgttggagaaagttgtgtatctacttacagaattggatgttaatataacatgggaagatattcttcaagatgaacacaacaaaggtatatttgacatggagcttgaggatttggctgaggatgaacataaccttggccgcacaagtgtagagacttgaattcatatatacttagttaggctcaatgttagcataaacagttgatgagcaagttttcccattagtattttagtttgaatttagagtacaattatgtatgagttatttgataatgcttatttatgagatattgaatggtgtttatctatattgtattaattatagtgttattaaatatatgtgtttgttttttctctttt

SEQ ID NO: 37689 - DNA, 1170 bp, Zea mays
  unsure (1)..(1170): unsure at all n locations
  Clone ID: MRT4577_134376C.1
ggcgcactggagaatttgattcagtgtgacaatggaagaaagctcatattattttcgtgacttctgttgctcattctatgtttctgtcatctaaccatcaggaggtctggaggatcacaagtgccttggagaaccacaagtatgaaattgctgactgggaccttggtgccggaatatacgtagacttctacgttttgaagaactcaatgcaagaaagaaatgccatggatgattcgggttcactcgaggagatgagtaaatcatgcagaagtttctttggccgattaaacgagtcgttgttagtctggggaagcaaattacctgttgagtcaagggcatgctactcgaagatggcagaggagctatgtgcgcttctggtggacaccccaagcgagacgctgaacctacccatggggtgtcttctaacgatgctcaacgctccagttccggacgagagcaggtcgtcgtacctgcaggacgcactctccgtcttcaccgaaatcctttgcagcgatccgtagcacaagggtccccggtgttgccgtaatctgggtgaagggaagtgaagcctacaggcaacacgccgaagagtttgtacgtctcatgtttggtacttgtagaaaaattaggaatgtataactatgacctgatgttggtccggtgaatcgaggagatgagtgaatcatgcagaagtttctttggccgattaaacgattcgttgttagtctggggaagcaaattacctgttgagtcaagggcatgctactcgaagatggcagaggagctatgcgcgcttctggtggacaccccaagcgagacgctgaacctacccatggggtgtcttctgacgatgctcaacgctccagttccggacgagagcaggtcgtcgtacctgcaggacgcactctccgtcttcaccgaaatcctttgcagcgatccgtaggcgaaggggagtgaagcctacaggcaacacgccgaagagtttgtacgtctcatgtttggtacttgtagaaaattaggaatgtataactatgacctgatgttgctcaggtgaatttgtaatgccgtctgaagacatgtgtcgggattttcgttgtatgtgagtgtgtgtgatgattacagggaagggcagcgtcacggcgacccgtgttcnggggtacattggagatt

SEQ ID NO: 37690 - DNA, 2302 bp, Zea mays
  Clone ID: MRT4577_134377C.1
gaacacatatactggctgtgtagtggatgctgctttattcatgggtagatcatttcgtgttggttggggaccaaatggtttacttgtacattcaggtagtctggtcaatagtcctggaactgtcctatcttctgttattcacatagagaaagttgcaagtgacaaagttgtgcgtgatgataaggataagattaaggatgacctaacagaactatgtttttctgctccaatggacctccataagagtcttgatcatgactttctagagactgagtctgactcgttcagattgaagcttcaaaaagtcatgacaaatcgtttggttttgcctgacatctgcaggtcatatattgatatcatcgaaaggcagcttgaagtcaatgatttatccatgtcttcacgtgtgctgttgatgcatcaagttacagtctgggagttaattagggtcttgttctcagagaaagcaactggtagccagttggactctgttggtgatgatgatcaggaaggcatggttttagacaaaaaagaaggctctgtcgacatagaccctgaagcactccctttgtttaggagagcagattttagcaattggttacaggacagtgtttgccatcgggtccaaggagaggtgggttccttaaatgatgccaggtacttggaaaatatcctcgtccttttgactggtcgacaattggacacggccactgaaattgctgcctcaaggggtgatgttcggttggcaatcttgctaagtcaggcaggtgggtcaatgtcaaatcgatctgaccttgcgcaaacactggatcagtggaaaatgaatggtctagattttgattatattgaggaagactggttaaaggtatataggttacttgctggtaacatacaggccgcttttctagatttaccaattgactggaagaggtaccttggtttgattatgtggtatcaattatcacctgatacaccacttgatattatcattcgttcttatgatcaactccttggtgagggcaaagttccctatcctgttcctgtatatatagatgaaggacctcttgatgaagcacctcagtggtccccgggtgaccattttgatatctccttctacctaatgcttcttcatgccaataaagacgagaagtttgggctgctaaagactatgttcagtgcattctcatcttcattcgaccccttggattatcatttcatatggcatcagcgttcaattttggaggctgttggagctttcagttcaaatgaccttcacttgctagatttaagttttgtttatcaattgctttgtcttgggaggtgccattgggctatctatgtcattctgcacatgccgtatcttgacgatgccccatacattcatgagaaattaatcagggaagttttatcacagtattgtgagtcatggagtagagatgatgctcaaaggcaatacattgtagaacttggtgtaccagaagaatggatgcatgaagctctggctctttatcacgaatactatggagataaacagggcgcactggagaatttgattcagtgtggcaactggaagaaagctcatactattttcgtgacttctgttgctcattctatgtttctgtcatctaaccatcaggaggtctggaggatcacaagtgccttggagaaccacaagtatgaaattgctgactgggaccttggtgccggaatatacatagacttctacgttctgaagaactcaatgcaagaaagaaatgccatggatgattcgggttcactcgaggagatgagtgaatcatgcagaagtttctttggccgattaaacgagtcgttgttagtctggggaagcaaattacctgttgagtcaagtgtcgtgtttgacagggcatgctactcgaagatggtagaggagctatgcgcgcttctggtggacaccccaagcgagacgctgaacctacccatggggtgtcttctaatgatgctcaacgctccagttccggacgagagcaggtcgtcgtacctgcaggacgcactctccgtcttcaccgaaatcctttgcagcgatccgtagcacaagggtccacggtgttgccataatctgggtgaagggaagtgaagcctacaggcaacacgccgaagagtttgtacgtctcatgtttggtacttgtagaaaaaattaggaatgtataactatgacctgatgttgctccggtgaatttgtaactccgtctgaagacatgtgtcgggattttcgttgtatgtgagtaccaggtcttgtgaaacgttgacttgcgagctgtaccaa

SEQ ID NO: 37691 - DNA, 522 bp, Zea mays
  Clone ID: MRT4577_134378C.1
ggatagggtcaaaacatatcatccggggcccccccccaccccctccattttttttcaatctcataatttccctattttccctatcccatccaaattacattttctccatctttctccttccattatcttttaatgctacaccttacacttacatacatttactcctatacttatcttcaacagctccttctcccacattttctcacatcacatctctctttttatttcattctgtataaatataaactcattatactccctctatgcttccctatctccttttattccttcccctttctcgtgatgaagccctattttgttcctaccactgtccttcccttcttgacatgcaaagtagcccacccctctatacctctccttgtactttaccttccaatcttgtcacaccttcatctcattttctcttattccttccatatcccttgccactcttacttaatccctcttgcctacctctgaatttcctacccttcccttatacttcccactttcctatattat

SEQ ID NO: 37692 - DNA, 306 bp, Zea mays
  Clone ID: MRT4577_134379C.1
gataagttgcgactggcgagagaaccaaccggaacgtgtgacgactgacgactgaggtctgacgaggccaaaacctcgctgactcgccccgccgccgccccgcccccgaccgcgcgtcctccgccggcgctatggcccgtaccaaggtgtacgagctccggggcaagagcaagacggacctgcaggcgcagctcaaagagctgaagtctgagctctccctcctccgcgtagccaaggtcaacggtggcgcacccaacaacctctcccagatccaggtgccgcgcacctcgcatcgtactcgtgctc

SEQ ID NO: 37693 - DNA, 206 bp, Zea mays
  Clone ID: MRT4577_13437C.1
acgcccactcatccacccacattgaacatgagataatactatctctccatatactgggtaggggtaaacttaaaagggcggtggtaaatataactatttaacgatattaccatctattattacgataaatactattgaaccaactgctgttgtgacctatgagatgtccatttaatcctataatgcaactgtcaacatgatgttta

SEQ ID NO: 37694 - DNA, 275 bp, Zea mays
  Clone ID: MRT4577_134380C.1
acggagttcgagacgaggcatgggcgtgggctgaatccgccctgcagctcaactaagccgcgctggaggcaaggtccctagaacgctctgaggagacggagacggactcatcgggacgaccgcggtcgccgtgagggccgggtgtggcaggcgtatccccgcaagggtcgtacttgtacgacgcggcgtggacacgcgccaggggcgatggcatagccaggaaagcgcaaggcgccatccacgggctccagccgaaggcaaggaatcctgcccgg

SEQ ID NO: 37695 - DNA, 235 bp, Zea mays
  Clone ID: MRT4577_134381C.1
acagcagacacaaatcgtcttttttctactgttgaaaaggaaaaatcaatacctgagggcctctaaacatccaagagcgtgaagtaaattccgagtagaggtccaactttcaaggctctccctatctctagtccacaatcgtgccttttggaagctcgtacaggttcacattaattccattttatttttattaatcattctctcctatttatcttgcttttcttctttttccttt

SEQ ID NO: 37696 - DNA, 319 bp, Zea mays
  Clone ID: MRT4577_134382C.1
ctctcgcctacgtacgccaagtattggattttgactatcggacccaacaggtggcaatgtgcggccggttactaaccttgcagccatcggtgctgtctgctgctgcactatgtgcaatgtcctgtgttactgtcatgaccgtgtcaagtacctaggatcattttgctcacagacgcactcgaacttgacctgaatgttccctggagactacagatgggacaccggcagtctgtccacaaacccataggcgttcgcgcagaacaagacgacagaggtgatccaatgtcggtagtcgatgctttgttcactcggctacata

SEQ ID NO: 37697 - DNA, 296 bp, Zea mays
  Clone ID: MRT4577_134383C.1
gtcgccacgacgatgtaccaggggtaccaactggtctttacgggaaggcccagggcagggcggcgagagagctgctagcgcctggtcgcgctcagcggcaccgcagtgtccgtgtcaccactgtgcaattgcatgcagacgaaaagaagaagaaaaaacatgtgttttagttagtttcgtgtcaaggagcgttggtgctcccatgagcaaaatcaatccagaccacaccctccacatccaacggtgctgtgtcagggggttttgtaaaatgttctttgcaactctgtacattttat

SEQ ID NO: 37698 - DNA, 249 bp, Zea mays
  Clone ID: MRT4577_134384C.1
agagctcacaccttttgttgtgctcgtaacaaagaccgacctcgttcccttcgaacgaccagaattcctttgtcagcggcgggtggttcaacccccctcgggagcacttcaacctcaacatgcccgcgttctttcagatcgcgcaggagaaggtcggtatcgtgcccatcttttaccgcatggtggcgtgcacgaagcatggcggcattctgtacaccatctccttgaacaatgtactttaatatgttg

SEQ ID NO: 37699 - DNA, 315 bp, Zea mays
  Clone ID: MRT4577_134385C.1
gggcccaacaaaccggccccgacatttattagcttaccccccccaaaaaccaaattaaaaagggaaaaaacggaacaggggggccaaaaaacccggcaaagccccaaaattaatgggggccaaaaattgggccacccaaaacgggggggacccaggcttcccggaaagggcccggggcaaaaaaagggggcaaccaacgggcccaggggtccttgaccccggggggtcaaaaaaaaaaaggggaaaaaacccgaaatccccccggtctaagaaaggagggcagggctgaaaccccaaaaatcctgggggaacccg

SEQ ID NO: 37700 - DNA, 165 bp, Zea mays
  Clone ID: MRT4577_134386C.1
cgcggccgccctatgtcttttcgtgttcaaccattgatattctgctgttgattcgactgttaggcttgagaagtcagcatcctatgatgagatcaaggctgcggccaaagccgaggcataaggtagcctaaagggcatcctgggttacgttgacgaggaccttgt

SEQ ID NO: 37701 - DNA, 276 bp, Zea mays
  Clone ID: MRT4577_134387C.1
aatctctgcttgatttattattaaatcattatagcagtgaagtggtgccattttctctctcttaagccccatttgaaaggctagagaaggggatatatatactatgttcaaggtttgtaaggttgttaatgtacataattgcagattgcaataaaagcttagatacattttgtaaacccaacccactaaatgagcaggttacaagacaaatgtcaccagcctcaagtattttatgaactatttactgagggtagttatgttaaatagattataatg

SEQ ID NO: 37702 - DNA, 570 bp, Zea mays
  Clone ID: MRT4577_134388C.1
gagaactcaacgaatgaaattcattacttgcaaggaacatccgttacacttgaactcgctctgtggccgagttgagggagggacatcatcggcactcccaaaagctacatgctacagcgaaaacgcacagttgccaattctacaacaaatctggtgggttctgatttctgaatgtatctagagagctcttggcatgctgagataaataagaattgcctcaaaaatgaagcatcgcatacgtacctggtggctgggggtcctcttcatgccccccgccacgtgagctactagctgttaatacacatacaggtgaagatcaccgtgcctgtgggtgaaggccgccacagtttcagcttttcagttcgaccacacatggacaaggccatgccggttgccagtgtagatctcatcacgatcttcgtcatagtacagagctgtgatgtcctcaagggcctccgagactgtattctggaacctccatgctttcttttgcttgcttgaatttccagggtttatttttgccaagcatttgccagtcagtatgctgctgatatttatagagccagcatt

SEQ ID NO: 37703 - DNA, 325 bp, Zea mays
  Clone ID: MRT4577_134389C.1
cactttttagtaattttcttcttttttttttttttttttggggttttttttacacaaaatttcgggaagccccaagggcaattcataacaggtaaaaatgcccagggtgtgtaccctaaccatacacccacggtctaaaacccaaagcccgttttaaatggatgggttccggaaaaagggaaacccttttggaccccgggtgaaaccgcagaacccaagttgaaaccctcgtcaagggggagaaaagccttcccattgttaatcggtagtggtcaaaggcgaccaagccgctgattcccccgggggagcaccgggcgttccccca

SEQ ID NO: 37704 - DNA, 675 bp, Zea mays
  unsure (1)..(675): unsure at all n locations
  Clone ID: MRT4577_13438C.1
cggnctcgtggcaactgagaaagaactgcttgtgaagctggagaagcatggaaggagtgttgttgagtcaaaggcaaaagaagaagctggaagggttttgattcgcatgaaggacaggttctcaacgctgttcagccgagatgctgactctatgcccagggtgtggacaggaaaggaggacataaaagctataactaaaaccgctcgctcagcttctgtgaagttgctttctacaatggctgcaattcggttggaggaggatggtgataacattgagaacactctttcccttgctcttgttgacacttcaagacatgggactacagataggagtatccaattgtccgatccactagcctccagctcatgggaaagggttgctgaggagaagactttaattacccctgtgcagtgcaaaaatttgtggaggcaattcaaagctgaaactgaatatacagtcactcaagccatagctgctcaggaagcaaataagaggaacaacaactggctcccacctccatgggcacttgctgcaatggctatccttggattcaacgagtttatgacattactgaggaatccgctttacctgtttgccatatttgtgatttatcttgttggaaaagccctttgggtgcaatcagaaattggcagggaattccaacatggatttct

SEQ ID NO: 37705 - DNA, 292 bp, Zea mays
  Clone ID: MRT4577_134390C.1
tcaatatctttcattatttcaaccttttttcttgatccaactctcattattacgggcgggatcaacaaataccattcaaccagctacctgcacccaaccccgaacaattataggcatcaaaccgacagacaggattgcactttactgcatctatacagcaagaacaactaactaccattttgtacatttactagtgagagccccgttacctaacagacacaaccacattttactatcattctaccactaagctatgcttaacgctggctcctacttacaactgcaattgttg

SEQ ID NO: 37706 - DNA, 482 bp, Zea mays
  Clone ID: MRT4577_134391C.1
gtggtggtgggggttgttttttttttttttttttttttttttttttttttttttttttttttttttttttttttttttttttttttacactcaaaaggggggatttgaataaaccaaacagccaaaagggcatgaccgtttttcgaacgaaccggggggggggtttttttttttttttttttgggtcacacggcacacacacatacatggaccacggggtacatacatgcttccatgcccatgcaagggtacgggcacccccggggagattttttttagtagcccctagcggtagacaagtggcccttcgtcatcacccggtggtgggtagattttattctgaccaccatcgatgatccggccgggggggaccggggaatgggtggtctatctaacaggcggccgctcccgcgcggggtcttggttttagttcaccctggagccctcgcgggagggcctctcggggctaggggtccttaccc

SEQ ID NO: 37707 - DNA, 328 bp, Zea mays
  Clone ID: MRT4577_134392C.1
taaaaaaaaaaaaaaaaaaaaaaaatttaattaaaaaaaaaaaaaaaaaaataaaagaaacagataaaattaaaattaaaaccaaccaacataaaaaatactcactaaaataataacaatcttcctaattccatcctactcactgccatacattcccgtatattcactctcacggcttcattcaactcgtctatctccaacttattaccctttacaacaataattcccaaatctctaaaccccattatgccccatgctcaatatcatttctcactcaccttatatctccaatttccaacataccattttcccccgatctaatacatat

SEQ ID NO: 37708 - DNA, 118 bp, Zea mays
  Clone ID: MRT4577_134393C.1
cacacgcgtccgcacacacgtccgcacacgcgtccgctacatgcttgtctatatacgtgagagtgacaaataggaaataatttgtaatgtcgattagaaggacatcgctgagcatttg

SEQ ID NO: 37709 - DNA, 555 bp, Zea mays
  Clone ID: MRT4577_134394C.1
gacagcacgacgtccactctaaccatcccttagccagccaatcaccagccgctctcccaaactgttgccgctttgtttcagcagctggcctgcaagaacaaacaactttcacgtgaaaagacctcgaatcgacaaaatccatattcgtcaactcaacgtcaaaatgcgtaccacccgcatcatttctctgacgaacttttgcgtcgcctcgtctgcgctcgcgtttcaggtgtttgtcctctacccatggcaccaccagctgcaacacgactttgaagacctgaagaacgagcacattcgtgtcttaaagactatcagtgcacactctgttgccagccgggcacagcaagcatcgtctcagacataagctcacacacattgcagagccgagaatggccttgcacaatagaataatatttcgcccatacaagcactggcgtcccatccttttggctcacgcccagtacatggcaaacttggagacggagttttcccgttggtatatatagccgacagagcgttcgacttttaagcaatagatttcttttatccctc

SEQ ID NO: 37710 - DNA, 299 bp, Zea mays
  unsure (1)..(299): unsure at all n locations
  Clone ID: MRT4577_134395C.1
gggcaccctatggtacatgattcgcgttgtcaagaacacncacttcatcgggcaccgttacattacacgcggcataccctcnctccaanccncattaatagtctccatatcaaccaaccaattcgaccccatgttacacacttctgcacaaaaaacaatacaacatctcctactagagctcccttccctacacgcaaatactaaggctacattaaaacccttctgaccttcactatattgcctcaactatgatcgacaccatcgcctgcgtcattcacaacatacattctccctgggtg

SEQ ID NO: 37711 - DNA, 458 bp, Zea mays
  unsure (1)..(458): unsure at all n locations
  Clone ID: MRT4577_134396C.1
ccagaccatagtgtcgtttatagacaaactttggcatagacccaagcagaaaaaccagattacttccgtatagcaccatgaggggttacatgatcaccgatatgcagattattgaacatactgataaaggttggggaggagaggatgtatatatcatatttacaagaagcatcaacattttgaagcaacatgagctgaaaccatagctttctggtttatggttcaaatttcacctatttgcctggatggaagaaattctccttcagaacatgctcccattttgtaggtgaaccgccatactggtcaacttctactgtgacattgaggccttttgctgtctcaagcccaggtgagcatgttgaagctcatatttgagtttacaagctgaagcttctgcttcaatccacaagtttctatagattgacgcttgagaanacttagtgttgtcaagcatctta

SEQ ID NO: 37712 - DNA, 140 bp, Zea mays
  Clone ID: MRT4577_134397C.1
cttcctctcctccatctctcaacgcctgaagctcaccgcgtatctggtcctcgccgcggattttgtttcacgtgaggatatccagcccctcgtcggcgagtgtgtggaactggcatggtcaagtggtgtgttcgccggcg

SEQ ID NO: 37713 - DNA, 458 bp, Zea mays
  unsure (1)..(458): unsure at all n locations
  Clone ID: MRT4577_134398C.1
ccgtatctcggcgcagcaagtagtcaggcaagtctccatttccagatctcaacacaggcaagtttccagttccctggtcggctggtccttggtcctcggcggatccggatctcaacacaggtacaggtatcgtgtatacatgtatcatcgtgtagtattccatgtactgagtattatgtttatcaattataaattagtatgtactgagtatactagtattccatggcatacatgtatcaggctctctcctatctagaaaaaaaagattaggacatttcaactcgtattatgtttatcaattataaattagttcatgttttctcagtgttcatgtactgtggtcagaaggctcttgtagatttgtttgtgtttagcaattagtccttattgcanngtgattacatggnttgngtttgggagcacttcacanggtatgaggtagaggttcaggaagctga

SEQ ID NO: 37714 - DNA, 615 bp, Zea mays
  Clone ID: MRT4577_134399C.1
ctcgagttttttttttctttttttttttttttttttttttttttttggaacaaatataacaagtttccacacgcctattggccacttgggaaacagggaattccacaaatgtaaagggcagtaggcttataggctaagatcccatagacaacatttctccaacaataaacagggaccagggtctctgcttataaaaattcgtaagggcattggcacatgagaaacacttaaataaagagtggaaacattttattgtaggtcctaagtatatattggccgaggggatgggatgatagattcaccgggccatttgatcgctttaccgcaggggcagcattcacaccccatagaagctaccccccgcatgcatgcttgccgcttgccgttcaccgcggttgggggccgcggccattgatgctttttgcttggacagaggagcttggctcggccttgagccgccctcatgggggcttcgccagcggcccaagcccagttctcgggggcttccgggagccggagccctctcgccgttcccgcttggcccttggccgctggccccttttcgttgcccgagagccttccgggatgaccgtggcgggggccggggccccccag

SEQ ID NO: 37715 - DNA, 169 bp, Zea mays
  unsure (1)..(169): unsure at all n locations
  Clone ID: MRT4577_13439C.1
cacacttgttggtggtttgaagagagnacgaagaggttttagaaattattacgggcgaaancaaannnngngnngncntcactctgccttcatgcatacaaacaaccatgaacaatattattcaatattataggcctggccttaaatatacccatcttactgattttgg

SEQ ID NO: 37716 - DNA, 409 bp, Zea mays
  unsure (1)..(409): unsure at all n locations
  Clone ID: MRT4577_1343C.1
gcggacatgttcctcatccgattcgcttcccccaaatggaatccccatgggtctgctccatccatgggaactctcaccatgcagccgatcggtcccacccccgccccggctgcgcaggaagaccagaggaacggggagaatcttcctaccgtggatgctaccgatttgagtgacatcgactcgggtggggttatcctcaagaactcggatattgtttccggggatttggcagtcgtcgtcgtcagtggaggtcagggtntaggctcttcagcgattcctagctgggcacggtgggttctgggaggtgtggtgtacacggtcgtgccgttttacttcagtagttgggcatttggaagacgagaccgtggggtttgtggagattgctgtgggggttgtggagcatatagct

SEQ ID NO: 37717 - DNA, 356 bp, Zea mays
  Clone ID: MRT4577_134400C.1
caacaagcaacatagcaagcggcatccagtggcaacaatagagcaacaatggagaccacgatggtgaccctgcttatgctccttgctatgcctacatgtgttgctaacgcgacagttaaccctacatgctcacatgctcgtatagctgcccttattgctccataccttccatcaatcatagcatcagtatgtgaaaacccagctgttcaaccatataggctacaacatgcaatcgcagcaggcaacataccttgatcgacctcgttgtgtcaacaatcgccagccctatcttcggtgcaatcattggtacaaaccatgatggcacaacagctgcaacaactcgtgctacctgtgat

SEQ ID NO: 37718 - DNA, 1842 bp, Zea mays
  Clone ID: MRT4577_134401C.1
cggccgggaggccggcgcctcagcccccacgcgtccgcgtacccgtgggcaccaagagctgctggcaccaccaaaccaatcgctggatttgtccagagtatttccggtttcaccgccctagatctgacccgagacgccgcgtcttcgctgagatggcgattactgtgaggcggtcgacgatggtgcgcccggcgcgggagacgccgcggcagcggctgtggaactccaacctcgacctcgtggtgccgcgcttccacacgcccagtgtctacttctaccgccgcgacggccccgtgccggcggcggaggggttcttcgacggcgagcgtatgcggcgcgcgctggcagaggcgctcgtgccgttctatccaatggcgggccgcctcgcgcgggacgaggacggtagggtcgagatcgactgcaatggcgagggagtgctcttcgtcgaggccgacgcgcccgatgcctctgtcgatgactacggtgacttcgcgcccaccatggagctcaagcgcctcatcccgaccgtcgattacaccgacgacatctcggccttcccgctactcgtgctccaggtgacttatttcaaatgtggaggcgtctcccttggtgttggcatgcaacaccatgcagcggatggcatgtctggcttgcacttcattaactcatggtctgacctctgccgtggagctcaaatttctgtcatgcccttcattgaccgcacccttcttcgtgctcgtgatccaccaactccatcttttcaacatatcgagtaccagtctgccccagctatgttgtcctccacaacccagttccttgcttccaagtcaaagccacctgccactgctgtggacattttcaagctcactcgctcagaccttggccggctgcgctcacagcttcctgcaggggaaggtgcaccccggttcagcacatatgcagtgctagcggcacatgtctggaaatgtgtctcccttgcacgcagcctacctcctgaacaacccaccaagttgtattgcgccactgatggccgacaacggctacagcctccactaccagatgggtactttggcaatgtcatcttcaccgcgacaccacttgctgaggcgggcaaggtgaccagtgagctggcagaaggagcagcagtcatccagggagcactggataggatggacaacgactactgccgctcagcgttagactacctggagcttcaaccggatctgtcagcacttgtgcgtggagcgcataccttccgctgcccgaacctagggctcaccagctgggtgcgccttcctatccatgatgctgacttcggatggggccggcctgtgttcatggggccaggtggcattgcgtatgaaggtctggcgtttgtcctcccaagtgcaaatggcgacggcagcctgtccattgctatctcgttgcaggctgagcacatggagaagttccggaagctaatcggcgaagcttaaacggtgccaactgttgaaggaggatgttattgggcgagaaggattatgctctgcccaaattctcagataaaatactgaagtttcaagtgaacccagtggctgcactttcactttgaagacttgcagaggaaattcatggtcacttcattttgtgagattaattatagagaaagggtagaaattatatgaagaaacatagtaaaaaatcattgttaggaacaaactccaatagcaggctctacttgtacgtcgcagacataagctgagactgagctgcgattgcaacagattatactcttctatcaggttgactgaagttccctcagtggccaatcttggatctttctgcaggtgttgtgcacatctt

SEQ ID NO: 37719 - DNA, 810 bp, Zea mays
  Clone ID: MRT4577_134402C.1
acatcagattcccagtcgcgcctccaagcccactagcgcaacgcaagtcgcctcctccctcgttcagtccaggtccagccatggcgcgcctcggcctcttggccctcgcggtggccgtcctcgcgctagcgtccggcgtggcgtcgcaggcgccggggccggcgccgtcggccgactgcgcgtcggcgctggccgggctcatgggctgcctgccgtacgtgcagcaggggagcacgcagggcaagcccgacagggagtgctgcgccggcgtcaaggccgcgctgaagagccccgccaccgtcgtctgcctctgcgccgccgtcgggcagaactacggcatgcccgtcaacctcacccgcggcgccgggctgcccgcggcgtgcggcgaagaccccgccgccttgagcaagtgcaacaagcccacagcttccggaacggctccggcagtcccaagcccgggctcttccaagtcgtcgtcgtcgtcggcggcggcggcgatccgatccccgggctcagcgttcgccgttgtcgtcgccgcgactctgctctcgcactgcctcctctgaagatgcccgggtgtttggtggttttagttcatgatgatgagttgtgacgtgaacctgtgtatccgcactgtgccataattcgttgagttcaattgactaatcgaccatgttggctgttggcatactgcatgcagctattcatgtcgttctgcaaggaattgctgtgtccaggtacccaccttaacgttcacaaaactatgctgaaaacaacgcaatggaacacgtctcgttttagtttcaacac

SEQ ID NO: 37720 - DNA, 515 bp, Zea mays
  Clone ID: MRT4577_134403C.1
ccccctaatacctaaaataaatcacaaaatgatttccatggaaaaggccatacctgaaaacagtttgaaccgatctacaaggccatgtcccattcttttaacattaacaacaaaaagagcctgttgtgaaaccaacaaaacccaatcttttcccggttaaaaaaacaggggggggagggactcatgttgacaggttcccaccaccctgttgccaaaggtttataatatcgggggcctggttaaaaaagataatcatttgtttttgaaaaatccacttttttttttccaacttggctttaagctcctcccacgcgttctttcggggccaaaattattacgggctcaacgggatgctgccataaccaaaaaccagctggtcgagtgctttgccgatgttcttttccatccaaataaacttgaataccaaaatcgggtcctgtttttcggacaccaccaccttattttccgtttcctcctggtggaccgggttcacacttccacctagttgcgccttt

SEQ ID NO: 37721 - DNA, 181 bp, Zea mays
  Clone ID: MRT4577_134404C.1
tgtcataactgtagcaccagcgtacgggggggctttttcccatggaggtgctgatccttaccattgcaactgtcgcgtacgcatgcagccgcaacttcacatgatggcccgtttgtgcctggcatccacaaccgattatatcacggacccaagcgaatgcgctggcatccttctatttgct

SEQ ID NO: 37722 - DNA, 478 bp, Zea mays
  unsure (1)..(478): unsure at all n locations
  Clone ID: MRT4577_134405C.1
ttccagcgtcgaccgacgcgttcgatcctgtgctaaacccggttcagaatctgtcacagtggaaggaagttaagagtctcaaggcccaaccagtgcatggtaaaatgttggataaggagaatgtaaactcagtggcagatgtaggtccaagccatgactgtaattatgcaagccacacaaggatgaaccctagcttgtcaagtaagaaggaaaattctttagacgctagcctctctacctggttggtttcttctgagaactcagcattggacaatgtgcaaagcaaatctccttgttccatctcgtcagtaaacctgaagcaatcatcgactccatctccacaaagatctccaagaactaaccgcgaaggatctccgatgttgggtacagttggaagttactggtattgcacagagtatgacaatgagcactgttcttctagatccaattcangaactactgggattcccaattcaac

SEQ ID NO: 37723 - DNA, 1984 bp, Zea mays
  Clone ID: MRT4577_134406C.1
acctcaggcggcgggcgggtgcattgcaccaacaacttttggtggcggggtccctgtccctggccggctttgcccacaggccacagcgcatcacaccaccgctttatagcgccaccccaccaccctcgtctctccccccgtcgagcacacaacacaccctcctcgtcctccaatccaatcaacctggtagactcgcttcgcttctcccccagccgtcggacggagctcctcgcagtcgcagcagccgccgatcagcctgcgctcgggctcagcgctggaaggtgttggaagagaatagcctgaaggttcacagtaaccttcatctgtcggaagatgtatcgggctaagagggctgcattgtcaccgaaggtgaagcgccgcgtcggcaagtacgagctcgggcgcaccattggggaagggaccttcgccaaggtccggtttgcgaagaacaccgaaaacggggaacctgttgctatcaaaatccttgacaaggagaaggttaagaggcacagattggttgagcagattaagcgtgaaatttgtatcatgaaattagtaaggcaccctaatgttgttcgactgtttgaggtgatgggaagtaaagcaagaattttcatcgttctggaatatgttaccggcggagagcttttcgaaatcattgctactaatggaaggttgaaggaagacgaagcacgtaaatacttccagcaactgattaatgctgttgattactgccacagtaggggagtgtatcacagagacttgaagctcgagaatttgctgcttgatgctgcaggaaatctcaaagtttctgactttggtttaagtgctttaaccgagcaagtgaaggctgatggtctgcttcatacaacatgtggaacccccaattatgttgcccctgaggtgatcgaggatggaggctatgatggtgcaactgcagatatttggtcttgcggagtaatcctctttggtctctgctggaatttacttcttgcgccgaaatcacgatttctcagatactggagcatccttggttcaaaaaggggtacaagcctcctgtttttgacgagaaataccaaactagcttggatgacgtggatgctgcttttggagattcagaagaccggcatgtgaaagaggaaactgaagatcagccaacctcaatgaatgcattcgaactgatttctctaaaccaggcactgaatctggagaatttgtttgaagcaaaggaggagtataaaagagagacaagattcacctcacagtgccccccaaaagagataatcacaaagatcgaagaagctgcaaagccgcttggctttgatgttcagaagaaaaaatacaagatgcggatggagaacccgaaagcaggtagaaagggcaatctgaatgttgcaactgaggtcttccaaatagccccatccctgcatgtagtcgagctaaagaaggcgaagggggacactctggagttccaaaagttctacagaagcctgtcgacccagctgaaggatgttgtgtggaagtgcgacggcgaggtggacggcaacagcgcggcagcatgaaagcgccctttgaactttccactggacggcgccggttttcctttgtacatagcttctctttcggatgatcccgtgtccattgcagagtcaagttctttggtttatttgttgacggcgagtaagcccggtgaaacaaccgccctggaggctgttgtggatgagcttactggcgtgtttagttcgtttcatggtcgggaggttggatggaatggaaaccacaatcaaggctgtagtagtgtgtagtaacgaggtacggagtatcgaggtagatacatcagatggtgtaagggagtaccagttgttagttcatggcttcaagcttagcctcccttcaatttgttcgatgatgtattacttcacaataaacattattatttagatgtaaaaaaaaaaaaaaaaaaaaaaaaaaagaaaacgaggag

SEQ ID NO: 37724 - DNA, 2013 bp, Zea mays
  Clone ID: MRT4577_134407C.1
aattcggcacgaggcacaacacatgctcctccaagactcgcttcgcttctcccccagctcggacggagctcctcgcagtcgcagcagccgccgatcaacctgcgctcgggctcagcgctggaaggggttggaagagaatagcctgaagggtcacagtaaccttcatctgttggaagatgtatcgggctaagagggctgcattgtcaccgaaggtgaagcgccgcgtcggcaagtacgagctcgggcgcaccattggggaagggacctttgccaaggtccggtttgctaagaacaccgaaaacggggaacctgttgctatcaaaatccttgacaaggagaaggttaagaggcgcagattggttgagcagattaagccccaaatttgggcgaggggtagggaacgcacgtgctcctcgtcggtcggaagggtacgccacgcgagagacgcggggagaagcaggcaggaagccaagaaagcaagcagagagccgagccgacagtccaacaagtggagggtagaactcgtcgcgccgcctccgcccccgcccccgcctccgcctccggtggttagttcctctctcctcgtcatctcaccgcccgccccacagaaatctgccccgtgctttgccaccggtgactgcagtctgcagaagcagctagccatggcggcggcggccttcgatgcctacaccgacaagaacgccatcttccgccgcctcaaggccaagcccgagaacaagatgtgcttcgactgcaacgccaagaaccccacctgggcctccgtcacctacggcatcttcctctgcctcgactgctcggccgtccaccgcagccttggggtccacatcaccttcgtcaggtcaacgaacctcgactcatggactccagatcagctgaaaatgatggcgttcggaggcaacaaccgggcacatgctttcttcaagcagcatggatggaccgatggtggcaaggttgaggcgaaatacacatcaagagctgctgaactgtacaggcagatgctcaacaaggaggtcgctaagagtgccattaccgataatgccctgccgtcctcacctgtcactgtgtctgaggcttccaagccatctgatgacttccctgaattcaagctctcagacgcaccagcaccgccggcggagaatctgaatgggaagcatgaacccaagtcccccaaatctgctccacgttcaccaaaagctgctactcatcccacctttgccacttccgtgaagaagccattggcgcaaagaaggttggaggcaagactccagggcgagataatcgtaaactccgaacaagctgcaatgaaagctggtatgagcattcagaaaaaaatccaagatgcggatggagaacccgaaagcaggtagaaagggcaatttgaatgttgcaactgaggtcttccaaatagccccatccctgcatgtagtcgagctcaagaaggcgaagggggacactctggagttccaaaagttctatagaagcctgtcgacccagctgaaggatgttgtgtggaagtgcgacggcgaggtggacggcaacagcgcggcagcatgaaagcgccctttgaactttccactggacggcgccggttttcctttgtacatagcttctctttcggatgatcccgtgtccattgcagagtcggttttgcaagcaagttctttggtttatttgttgacggcgagtaagcccggtgaaacaaccgccctggaggctgttgtggatgagcttgctggcgtgtttagttcgtttcatggtcgggaggttggatggaatggaaaccacaatcaaggctgtagtagtgtgtgtagtaacgaagtagatacatgcatcagatggtgtaagggagtaccagctgttagttcatggcttcaagcttagccccccttcaatttgttcgatgatgtattacttcacaataaacattattacttagatgtatgaggtgagcaaaaaaaaaaaaaaaaaagcggcccaccgaatagtgagctc

SEQ ID NO: 37725 - DNA, 259 bp, Zea mays
  Clone ID: MRT4577_134408C.1
aggcgtcagattcttcctccctggttccccacggcggccagcagggagcaagccagcagccatggtgtccatccctcctccctcaacactggcccacaggcgcccaggcaagctttccccctggcgctcgctccctataggcgagcagcagcacccccttctcagcggcaggagcagcagctcctttcctccatggccatggcgccccctttttctcttccctgccgcggccaggaaacgcccagcccctcggctctct

SEQ ID NO: 37726 - DNA, 166 bp, Zea mays
  Clone ID: MRT4577_13440C.1
gctctgcctctgtttaagggtctattattaaagtacaactttcgcagcgatatcactcacctgcaagctcagacttcgataatacccacactttatgacactctatgttgttcagatggaacacaccacatgtcacatataaagtgaggactgtgtactcacacac

SEQ ID NO: 37727 - DNA, 111 bp, Zea mays
  Clone ID: MRT4577_134411C.1
gttccctcctggagccggggacaaatagttcagctttgtatcacatttttacagcgagaagcaacaaccggtctgggttaccacaatgggaaaagaggtgacacacactga

SEQ ID NO: 37728 - DNA, 377 bp, Zea mays
  unsure (1)..(377): unsure at all n locations
  Clone ID: MRT4577_134412C.1
acaatatattttcantggtgcatttaagggtttagccggttttttttaacaaactatacaaatgtagatttataataaataaagaaaataaaattaataacaagattttttttttcttcaagatttgtgtttagataaacaacaataaaaaaaacggtttatgtatgaatcttcagacataaaaacaaaaaaaaagtgaaagaaaatattgatttatagattcgaaacaattgataaagttttcatcaaaattacttaaaacatcaaagatgttgaataatttgaagaatatttaagtagaaaataaatttttaaatttgaacataaaacaataaaataaatctacacattcttttatatgatacaattgatttatc

SEQ ID NO: 37729 - DNA, 630 bp, Zea mays
  Clone ID: MRT4577_134414C.1
gctcgactcgcgggtcagcagcagcagcaactcggggagtttccgcgtcgagatcggcagcgtcagcaaccgccgctcctctgccgcgggcgacgaccgccgcacctactcgctcggctccttcgactaccgcgtcgacgaggaggtggaggccgtcgtgtcccgcatcacccgccccgcggtgtcggcggcggccaagtcggagacacaggcggcgcccggagaggcgctagcggaggcagccgggtcccgcggctggctgcgcgagtacgtggaccgcctcgcgtcctcggcctcctccctctccgggcggtggagcgcgcggtggagccagggacaccacagcgcgcggtggagccagggacaccacagccgcagccatagcaaccggcaggaagactcgttgtggtgggacccggaggcggcggcgggcgcggcgatgcaccgcgcgccggacgaggaggagccggggttcgtcgccctgtaccgttggatcgtcggggtgtagccaggcaactgtaattacgggaccgcacgagggtgtttttgtgaacatcttatgccttcagtttttttaaaaaatctaggactcccattcattggtaaaaatacaaaaaaacaatcagctcc

SEQ ID NO: 37730 - DNA, 860 bp, Zea mays
  unsure (1)..(860): unsure at all n locations
  Clone ID: MRT4577_134415C.1
ctcgaggccggccgggcatacttttcgatggctagaggacttctttggtctacgtccatttgcttgtccacgagccggctagtttactctgcttttttgagttttccacgtctctctacaattgtgacttgtgtcattgtgtgactgttagaccacctatagatgcggttcaactagccttccgactccccctcttgagagttccgctccaccgcggcgaaggaagtggcggagggagttccgctccaccgcggcgaaggaagtggcggaggaggaggatccgcgcctgcgctgggccttcgtgcggaaggtgtacgtggccccccgctgccgtctggcccacgtacgtcgccatcctcttgtccctgtccccgctcggactcttcctcgctgccgctgtgtcggcggatctggccgggtagcccggtaggaagcgccgtgggaagaggagacaggcgaggtgttcgaccgccgccggcagcttaggacgtaccacgtctctgttctatgggttcacgagtttcggggccctacatggattctccgcctccgcctcgtccgccatcgccgccgcgacaccctcctcaccctcagggggagcgtcacggcggcggggagatgccgtaccaggacgcggaccacaggctccgcgcgctggtcgggagcgtcgagggcttcggccgccacgccatcgggggcctctacggagccatccaccgcgtcacgtcgctccaagacacggngcccgggagtctgagggaggcgtgccgcgcggaggagcccctatgatccgtcttcgaggtgtccgggaccatcacctccacttctacctccgcgtctcctcgtacaaagacatcgac

SEQ ID NO: 37731 - DNA, 1153 bp, Zea mays
  Clone ID: MRT4577_134416C.1
cccgccgtcttctcacccccgctgcctccgcggtttcgcttccccccgtcttcccaagcctttgcttcgctcttcgcttcggattccctctgctcatggccgggagagggaaggcgatcggctcaggggccgccaagaaggccatgtccaggagctccaaggccgggctccagttcccagtgggaaggatcgccaggttcctcaaggccggcaagtacgccgagagggtcggcgccggcgcccccgtctacctcgctgccgtgctcgagtatcttgctgctgaggtaaagaagacttccaattttgcggtggtagtgttcgatttggttttgagcactaggaattttgggtcctgtggtttcctgtcgtggaaattgcctggattactgtagaacaactggggggatttcagatgacgatctagatttcggcgattgctatgctagttcactgtggaaccagtgaggattttgaccgactaaaccgttgggactctctgcctgctcgttcgtgcaggttctcgagcttgccgggaacgcggctcgggacaacaagaagacccgcatcgtcccgcgccacatccagctcgccgtccgcaacgacgaggagctctcccgcttgctgggcacggtgaccatcgccagcggtggtgtcatgcccaacatccataacctgctgttgcccaagaagtctggcggcggcagtgccaaggctgcggctggtgatgaggactagaccgaccacgcctagcctttcatccggtggtggcacctcttgtggatgctgccgtatcaacttgtgcctgtgtagtacgctctagaaatgccttaggtgttgcgttgtagttcgggatgtgtctccctgtaccactgccaaggattagttctgtatattttgctataaggagtgcatcctttggacgacctgtttatcaatcctggtatcccagtttgcatttcgtgtccaaatcttggttagtccatttgaaaaaaaaaaaaagccttaaaaaaaaaaaaaaaaaaaaaaaaacggcccttagacacaaccaaaaaaaaaaggttgttatccgagtatttgaacgccccccgcacagatgatgaattgacatacgatctccgacgccggcgaaggcgcaaagcagcaccgacgagaa

SEQ ID NO: 37732 - DNA, 458 bp, Zea mays
  Clone ID: MRT4577_134417C.1
cgcgaatctcgacgatcccccccctccccccccttccttccttccttcaagatgcggttcagctagccctccgacccccctctcgagagttccgctccaccgtggcgaaggaagtggcggaggaggaggaggatccgcgcctgcgctgggccttcgtgcggaaggtgtacgcgcccccccgctgccgtctggcccacgtacatcgccatcctcctgtccctgtccccgctcggactcttcctcgctgccgccgtgtcggcggatctggccgggtagcccggtaggaagcgtcgtgggaggagacaggcgaggcgctccaccgccgccggcagcttaggacgtaccgcgtctctgttctatgggttcacgagtttcggggccctacatggattctccgcctccgcctcgtccgtcatcgccgccgcgacaccctcctcacccttaggtgagcgtcacga

SEQ ID NO: 37733 - DNA, 2164 bp, Zea mays
  Clone ID: MRT4577_134418C.1
cattgggacctcgagccggccgggaacgtgccccttcgaggcggccgggaaccttttttcccctctgcacgctactctctcccttctcactaccccgcccgtcaaagcgagagcgccgtatcaccggtctatccatcccttcaccgctgcctcgatccgcgccgaaagatacctttcccccccttcctctcgcgccgccgttttggtgcgaccatggcggcggagggggaggccaagaacccgtccggcggtggcgaagggggtaacccccagcaccagcaggcagtgcaggctgcgccggcggagccgccaacggcacagggggaagcggtgcaggaggctggagcgcaggtgacgggacaagagccggagggggagaaggcgaatcgagatggggagggcggcgcgggggagaaggacgacggcgcgtgcagagatctggttctggttgaggatccggaggtgctcgccgtcgaggatccggaggaagctgcagcaaccgcagcactccaggaagaaatgaaagcgctcgtggcatccgtccctgacggtgctggggcagcattcacagccatgcagcttcaggagctagagcagcagtcccgggtttatcagtacatggctgcccgagtacctgtgcctactcacctcgtcttccccgtatggaagagtgtaaccggtgcatcctctgaaggcgcccagaagtaccctactttgttgggcttagcaacactctgcttggacttcgggaagaaccctgaaccagaaccagggaggtgccggcgaacggatggcaaaaaatggcgatgttggagaaacactattccaaacgagaagtactgcgaacgccacatgcatcgcggtcgcaagcgtcctgtacaggtcgtcgaggaagccgagcctgactctgcttcaggctcaaaatctgctcccggcaaggccaccgaaggcgccaagaaggttgacgacaagagcccaggtagcaagaagcttgccgtggcggcggcagctgcagctgctgtgcagtctacgtaattgatgcagcattttagtagtcgcaggaagagcatggcggcgctggcaactagcgccttcttttcattgcatgtgatctttagctataacctcatttagcacactcccagtggtgtccgtgggaggaggaagccgcaagcacttcccccgtagggtgtcgactgaaaaaattcacttgtagctgtatagtttgatctctagctttgtcgtgcctccggccttcaggtaggcgatgcggcatgatgttataaatcctctcccagaactgacaatatcgcattgtaacccaagaagccggtgcaagaacctgtgaaactgcattgatgtgccttttgacgtccacctttattttgggctgtgctgtgcgcaattatgtgattcatcagttgtataacaaagtggaagatgcataattttatgcctcgtggaggctgtgactgtcatgccggagaaggccggcgaccgagaggacgtggtggcagggtcgatcagctcggaaggggacgccttcctcaatggcgcgctgccctgcctgatcgataaccctgggtctgtcttcaggccagaggagtactaccagcagtggaccatggagccagcgtcgccggcgctcaaggacataatacagctctgcgcaggatggcagccggtgccccgccccccggatgatcgctgactttcatcattctgatatgctgcagctcgcttctgtaagaatattcgtttcacggaagcactgcatttgtatgcatctcatcctaggtaattcaacatttgtttcatggtagagtggcatttgtatgccactcctcttcatctgccccctctctgaaatgtagtagaaaagttgttatggttttctatttgtgtctttatttatggtacatacaattcccaatgtaaagatatttctctcatccatagcagtagtacaacaggttttagttgtgtgaatgctaattgaaaaaaaaaaaaaaaaaaaaaaaggaaaaaaaaaaactaaaaaaaaaaaaaaagccggaaaaaaaaaacgggcgcgggccgcccagggatcccagtgcacccctaaattaattccgtatccgagcctgcactagaacgagtcctacctatgctcagtgggattagg

SEQ ID NO: 37734 - DNA, 489 bp, Zea mays
  unsure (1)..(489): unsure at all n locations
  Clone ID: MRT4577_134419C.1
aaatccatacttaacttggtaaccatacccaaacaacataantcggagactaagcaatactgtgggtcagcgctacaaactagtattacgttttacactgcaaaattatattgataccttattttagaaaggggaacggaagagcaacaggatacatattctgaatgttattctggctagtgacataatgcaacaacagctcaattataataaacaaatcaatgccccgtccttcctttgaggatcttggaaacagccctaatagttgaaggcgttgtccggcagcaccctccgatgaggctggcccccgcctcctgccatctcttcgcgagagcgtcgaagcttttgtgacccaagcactcaaccggcagccacctcttcgctctcccgtcccaaacttcgccgctgttcgggtaaactgcaatcgccttcttggtttgcttcctaaattcacatatgatgccctcgatgaactgaggaggggtgcag

SEQ ID NO: 37735 - DNA, 376 bp, Zea mays
  Clone ID: MRT4577_13441C.1
ggtcgaccccccgtccgctcaaacagcctttcctgcccacgttttttttgccgatttttcttttccgcgaacaaagctcctgagcccgagtgtgggccgccggtttcctcccctattcatgaagactgcaagaactgcctctacctatacttctaacctgtgattcaccggacacaatatgtgaagggccattcaattcttatgagacgcctgatgaggctcctaccaaacaacaccatgctgtgttcggatagacatcagttagtggcgtcttatgcatgaataatataaatcatgttgctcataacaaacaacccttatataatataccatgggccgcctatttagaggatcccatcatacatcctcgtgcttg

SEQ ID NO: 37736 - DNA, 161 bp, Zea mays
  unsure (1)..(161): unsure at all n locations
  Clone ID: MRT4577_134420C.1
cgatatcatcgttcttcctatcttctactgcggcggcgacacgcagagtttgagatctcgntgcncccgcgcgttgtgccggtactacttcgcgacagagcgtgcgagcgaccgcctgcgctaaccagcacgaacatcatcagacggatcaaagcaaattt

SEQ ID NO: 37737 - DNA, 548 bp, Zea mays
  Clone ID: MRT4577_134421C.1
atatatttcacgaagaataatgccagcgatctatctctgagaaagaagacaataatacacattctacgactgcaattttagctaaacaatgcatagcaattgaaggaaaaaagaatattaaggaagttgcctgaagttaaggtcaaattttcttttctcctctgtggataccatcatattgatttcttgttggttatattcttaacccgttggtgaatgaagatgttattttccttgttatctttaatttattcttgccagctactgctatgacaatataatagtaattgtcaaatttaagtgttgaaattccactactttgtgtaccaccatatgctaaaatatatatagtaccaccatctgctaaaatatatatggtaccatcttttaaaattcctctacgaaggtgtgttaaagtaagcctgcaaatgcaatgttctttcagatctttatgtgtaaaaattatatgggactttcaggcatgttttttttcttttttactactctcaactaatttattttttgtgtgcgtggtaatgaaaatggag

SEQ ID NO: 37738 - DNA, 3040 bp, Zea mays
  Clone ID: MRT4577_134422C.1
gccggccgggctcgcgaagctccgcgcttggcgtggcgtgatcgagccgagggctgatctcgtccacacggcactaggatttctccttcccctcccgctgccgttcacgtcctcaataaataccccaccctactccatcttctcgtgttgttcggcgcacgcggagacagcccgcgatcccgatcccgatccttcttcacgcgaatctcgacgatcccccccttccttccttcaagatgcggatcaactagccctccgaccccctctcgattctgcacaaccgctcgtcactctccaaatttgctgcacctgccctctccaaagttcttgcactcgtccctctccaaagttcctgcagattcacttctctccaaagttcaggaggatgtgtggtgtgacagcgctacaacaaatctgtcaacggggactctcatcctcttgctcatagaaagaactgcagtgttacaggtaggtaattactagagtactactactaagtaaatctgtcaaaggcagtcatggcatccatatccttcacatcagtactgggagtggcacacgcaccgcacacatactactacatctactagtatgtagtggagtgcttgaaaggcataagcgaattttcttcttgtttggtctacgtccatttgcttgtccactaaccggctagtttactctgctttttgggttttccacgtctctacaattgtgactgttagagcaactccagtagttctctaaaaaatagcttgctaaaatcatgtttagcaagttgctaaatagctattggaagtaaaaaataacttagtttccaatagttgctcatatttaggaagtagttcgattttgaatctagctttagcggccctgtccctatgagatctgcctgataataaggttgagagcagaggatatgagggcggaagaaaaaagttcggtcgatatgaattatggatgagtggtggtccggtgacgcaacctatgagaaagttaggttcgacggtgaaggagaaacttgcgtcatacgtgtttgacctagctacctcattatgctagaaaataaaaaaaagagtgtgttataactggctatctcactgtataggaaaggtaaaaataatcacgctagtgtgaagaaattgacgtcaactgtatttagggagttcctaccgagttgctaaatgtggagagtaaatagagttgaatagcaactaactaaatttagcaagtctatttagagaaccattggagaagtatttttctgttcacttcttaaatttaagatttagagagttatttagagaactattgaagttgctcttagaccacctataattgtgactgttgaccacctatagatgcggttcaactagccctccgaccccctctcgagagttccgctccaccgcggcgaaggaagtggcggaggaggaggatccgcgcctgcgctgggccttcgtgcggaaggtgtacgcggccccccgctgccgtctggcccacgtacatcgccatcctcctatccctgtccccgctcggactcttcctcgctaccgccgtgtctgcggatctggccaagtagcccggtaggaagcgccgtgggaggagacaggcgaggcgttcgaccgccgccggcagcttaggacgtaccacgtctctgttctatgggttcacgagtttcggggccctacatggattctccgcctccgcctccgcctcgtccgccatcgccgccgcgacaccctcctcaccctcagggcgagcgtcacgtcggcggggagatgccgtaccaggacacagaccataggctccgcgcgctggtcgggagcgccgagggcttcggccgccacgccatcgggggcctctacggggccatccaccgcgtcacgtcgctccaagacgacgggcccgggagtctgagggaggcgtgccgggcggaggagcccctgtggatcgtcttcgaggtgtccggcaccatccacctccactcctacctccgcgtctcctcgtacaagaccatcgacgggcgcggccagcgcgtggtgctcaccggcaaggggctccggctcaagtcatgccatcacgtcatcatctgcaacctggtgttagaaggaggccgtgggcacgacgtggatggcatccaggtcaagcccgactccaccaacatctggatcgaccgctgcaccctcgccgactacgatgacggcctcatcgacatcacgcgccagagcacagacatcacagtctcaagatgccattttatgcggcacgacaagacgatgctcatcggtgccgaccccacgcacgtcggcgaccgctgcatcagggtcaccatccaccactgcttcttcgacggcacgcgacagaggcacccccgcctccgcttcggaaaggttcacctctacaacaactacacgcgcagctggggcatctacgccgtctgcgcaggcgtagaggcccagatcgtgtcccagtgcaacatctacgaggcaggtggagggcccccaaagaagacaactgtattcaagtacatgccggagaaggccggcgaccgagaggacgtggtggcagggtcgatcagctcggaaggggacgccttcctcaatggcgcgctgccctgcctgatcgataaccctggatctgtcttcaggccagaggagtactaccagcagtggaccatggagccagcgtcgccggcgctcaaggacataatacagctctgcgcaggatggcagccggtgccccgccccccggatgatcgctgactttcatcattctgatatgctgcagctcgcttctcgcttttgtaagaatattcgtttcacggaagcactgcatttgtatgcatctcatcctaggtaattcaacatttgtttcatggtagagtggcatttgtatgccactcctcttcatctgccccctctctgaaatgtagtagaaaagttgttatggttttctatttgtgtctttatttatggtacatacaattcccaatgtaaagatatttctctcgtcaaaaaaaaaaaaaaaaaaggcccctatg

SEQ ID NO: 37739 - DNA, 241 bp, Zea mays
  Clone ID: MRT4577_134424C.1
tactgaattccttcctccggattttcaatggccacctggggcgcaccagacacctctcgatttacggtgctcttcctgccgcttgaccctacctccagctgaaccaattccagggttggcgggcctttaaccataaaagataactcttcccgaagccccctccggcgtctccggacttcctaacatctccgtctgccgtcacgtcccatctctggaaatcttaaccccattcccttttctt

SEQ ID NO: 37740 - DNA, 417 bp, Zea mays
  Clone ID: MRT4577_134425C.1
cgataaaattggaacgatacagagaagattagcatggcccctgcgcaaggatgacacgcacaaatcgagaaatggtccaaatttttcagatgacaagatgttctacaatggtgttgtggagtcatttgattctgtttctaagaggcacaaggtcgcatatgatgatggggatgtagaggtactactgctgagggatgaaaagtgggaattcatcagtgaggtatgcacagatgcacagatgattttataattttgcactgatttcttgtttctgattaacttttactctgacaggagaagggagcttctgtggcatctgaaaagccacgaggcagaaaaaggaaagtggatgcggtgaaggaagaaaatacagaaacacctacaagtgatgctgtggatactccaaagaaaagagga

SEQ ID NO: 37741 - DNA, 383 bp, Zea mays
  Clone ID: MRT4577_134426C.1
aaaaaactgggatttgtatatactaggaaaaaaaaaagcaattatacaccctgggccgttacgggggcaaacaaacttatggggggggggataccggcaaatttggaaacttgaagggaactggaactcgggaggtttcccatccgatatctttttaatttggggaaacaactaccactatacaaaaaccattggtctaggggggcttaatcgaaagctgggttgtaaaaggcagaatcccatccaaaaaaaaaagggtgtaatgggccaaaaacttttgccatgggattgaaaaaaaattcctgtatccaacagcctttcccccggggaaggggaagaaacccttgtacttgataaaaaacttgccgaaggggtttgtcttt

SEQ ID NO: 37742 - DNA, 388 bp, Zea mays
  Clone ID: MRT4577_134427C.1
tgggggggcgcctcatattgttagttatacctcatcagaatcttcatgcttaataaccgctccttgtataccctgggggatggatgcccacgggttacaaaacttaacattaatggatgttccaatttcatcgacacttcgtttatttaccttacctgccgctgtaaaaacctcaaatgccttaacttgtttggattcgtaaaggctgttacttacatagcttttcaagtacttttccttttattaaattttgccaaccatctttctagtataaaacttctacttaatttctatatattttgtgcaggctattgctcataactttgggcaaattcattcttttaacctatgcttgtttgatgatgttacaaattaaggagtgaccatc

SEQ ID NO: 37743 - DNA, 566 bp, Zea mays
  Clone ID: MRT4577_134428C.1
gccggccgggctcggactcactcatctgacgagcctgattctctccccgctcccctcctgaccctttccttcgccctcaaagctgccgattccccgtccctgagcctccgaactcatgatctctggccctctgcaggggccgtcgccgaatgatgacggcgtgaatacactcctgatcttggcgtccacctgtctagaacaatcccaatcccaatctcaagcccagagatccaccgatagccacgccgccggcaccatcaccctgcacaaggaccaggacctgaccgccggccgcacgtcccacaaagatcaaggacgggaaccgctccttggtctgcgactgaaccctgaatcgacgtaaacgcccgcgtccgccacaaaattcacccgcctgcacgacgcatacgcaacactctctcaaagggagacatcaccaagctacaactcgacaaggaccgcgagcctatcctagagcgcaaaagcgcccctgcgagaggagacgaataaggacagtcacgattaagcacatgcgcatactgattattgctttgacgacacaccacaga

SEQ ID NO: 37744 - DNA, 147 bp, Zea mays
  Clone ID: MRT4577_134429C.1
ttttgatttttctggtaacacaaatacccataggggtatggggatcacacacatatatgtatagcttaccccttgatcttactggcctgtgcctccatccattatctagcttacatgcagggcgcgcaatcactcatgtatatacta

SEQ ID NO: 37745 - DNA, 510 bp, Zea mays
  Clone ID: MRT4577_13442C.1
cacacatgaacaacgcatgcatttgaacaagagccaaataaacaagagagcctttttttcatccaataatatgtatgtacacttgcattttggtgacattctggagtgtggttttgatggatgtccaaaacgatcagcatgtctgggtgcggatgttgaggagtgcgaccctagtgtgcaggatgctcctgaacacctcgtcgctcccggcttccatctcggggatgcacgcgtcgagccgctccattttttccagagcggagagctccctgtcctcgtcggaggcgggggatttgccgctcctggggaccaaggacatgaacgtcgccgtagccgccggtttcttggaggaggcggcaaaccgggcggctggcgcaggtgcggcggacaaaacggcctcgagggcggaaaacacggccggggacgcggaccccggggcgcccagggcctcggcgagcaccccggacacctcgaccttgggggggggggccgctggcagtggcaacctgc

SEQ ID NO: 37746 - DNA, 215 bp, Zea mays
  Clone ID: MRT4577_134430C.1
gccagaggaaccgatgctgaaaaccgggttgaaccacactttttttgaacccataccagaagaaactaaggggggagaatacaaagacagtgatgactattaaaagcctaaaccagatcaataaaaccgataaacacaaccaaaaccaaaaaaaaagaaaaaaaaccaaacaataaaaactaaaaacaaacaagagaataggccgaaaaaataaa

SEQ ID NO: 37747 - DNA, 276 bp, Zea mays
  Clone ID: MRT4577_134431C.1
aaagggaaactgacaaagatggggtggctcacggcccacgattaccctcgattattcaacagtttccgcaacattgctaagcttttaaaaaccggcattttattgggatccctgccacatgcaaaaccgcactacaaggaaccactctaacggggcaattgctccgggaaacagtttttgatggacaaacacatggggggcacaccctaacaaaggggaacacaccctattcatcagggacgcaccctgaaaacgcgggacccacaagctggatgc

SEQ ID NO: 37748 - DNA, 282 bp, Zea mays
  Clone ID: MRT4577_134432C.1
gcgattgggttcctcgaggccggccgggatcgatcggactgccctggtcgccgccgtttcgaccactgtgcgtcgtcagtgtagggtggcttttatttaggaggtgatacttcatcagctgtctggttaattggattttgtactattgattgattattactactcctaggcgataagacatatatggtgatcggtgaaactcgaagtgtaaatgaatatatatacatataattaataacgagctggttaatttcaaaaaaaaaaaaaaaaaaaggggcggcc

SEQ ID NO: 37749 - DNA, 366 bp, Zea mays
  Clone ID: MRT4577_134433C.1
tgaaaataagccggtactttatggatattttaaatcctctgctacatggagggttaggattgctttagaattgaaaggtgtagattatgaacaaagatttatcaatttattaaagaaggaacagctttctgaagaatacaagaaagtgaaccctactcaaaaggtaccttcttttataacaaaagaaggtaaattgttaactcaaagtcaagccattattgaatatcttgataaggcttatccaaatgaacctttccttccaaaggatcccactgaagaagctcttgttcgagaaatttgtcaaattattgcttgtgacattcacccacttcaaaacctcggagtccttcaacgtgtagcagggga

SEQ ID NO: 37750 - DNA, 289 bp, Zea mays
  Clone ID: MRT4577_134434C.1
ggtccacttcgctcgcaaccttccccagccatggcgaccgcgacgcggaggttgctccccacgctcctcaagacaggaggtcattattacctcatgagggagagggacgggcaccacctcacctacgccgccatagccagacaccacggcgcactaacgcacccaaagcaccgcattcccacaccccaacacagaagagatgaccaacatcatgaagcactgccactagaccagactcctgacccagaacgaactcttcctcgaccccaccaactacatgatcatccaa

SEQ ID NO: 37751 - DNA, 725 bp, Zea mays
  Clone ID: MRT4577_134435C.1
tgggtacctcgaggccggccggggtaattctgttactttattctcctgatatttatgagcatcgtttaagcaaaaaaaaaaaaaaaaaaaaaaaaaaaaaaaaaaaaaaaaaaaaaaaaaaaaaaaaaaaaaaaaaaaaaaaaaaaaaaaaaaaaaaaaaaaaaaaaaaaaagttggcccgccatcaagaatttgtccttctgaaagtttccaaactcccttcccttcccttgaacccactccaatggggccctccctcctcgccgccgtctaagcctcgcccttcctcctacccggaagaagccgaaggccgttgggcgctgcccccacccgccgggccgaattgcgcggggccgcccttaagaacaaccctgccaagggggcaccgcaaaacaaccgggggctcgtccgtcttcagaaaatccctgaaaaatctgctgggggggaattgctaccaaaatctgctgtaaagtttgaaaggaatctgatgggggaaattctatcggttggggctgatgttagagaagttgaggctggaaaaaaggttctcttctcaaacatcaatgcttacaagggggaccttgatacggatgaaaagcactgcttctgccggaagtcaaatttgttagctgtagccaaatgaattttaccatgaaaattacagacttacctgcccatgctccaactgcatggacttatcttgcacctactttgttgaacttgaa

SEQ ID NO: 37752 - DNA, 282 bp, Zea mays
  Clone ID: MRT4577_134436C.1
acgcattccttccatctcccaagacctcctcagacccgagaagcgcactgcggccatggacgccaccggcactggagctggagggaaggcgaagaagggagcggccggtcgcaaggccggcgggccgaggaagaagtcggtgacgaggtccgtgaaggccgggctccagttccccgtcggccgcatcgggcgctacctcaagaaaggccgctacgcgcacgcgtcggcagcggtgccccgtctcctcgcggcgtctggagtactcgcgctgaggcctggagc

SEQ ID NO: 37753 - DNA, 604 bp, Zea mays
  Clone ID: MRT4577_134437C.1
cattgggtacctcgaggccggccgggagcgctgcttaccgactatctcgacaggcaccgccgcataaccgaaggttcacgaagatggcggtgccgctagatgatccggcttatcatgtccaatacggatatgccctgagagatgccccatcttgaccgctacatttgccttacgccaagctgccttaggcctccaggtgatcgactcccgcctcatgcgtaaacccaagggatgcaccttgctgcccaatattgcatatgcgtccgattagaataccaggcactactcttccctcactcttcagaaagtttgttgttcactatgtctccgatctggacctgctgctgatgcaccacaagacttactgtgctgagatagcccactatgaggcctcccacaagtgcaagaaaattgactagtgtgctgcacaaatgaacatcctggtcaccaacaagcttgccacgctccacttccaagatgacaatcgtcctgttgcgtaggtttgatagggttctgctgctgttgcatatgtcactgagatggatgtacttccgtaccatttctatgcttatgatagactcttcttatggacagatttatgcta

SEQ ID NO: 37754 - DNA, 307 bp, Zea mays
  unsure (1)..(307): unsure at all n locations
  Clone ID: MRT4577_134438C.1
tttttnttaatatgtacagagttatgagtgtttactttaatctgaagttgcactggtgttcacaaaactgggaaattgggcaaagggattacaattccagtttgtgagcaggggtaaccaaacacataacactttcaacattcnnacccccctgaaaaaaggaagggtggggtgtcttgggagatagttcntttgccgacnngatcttggcctggcgttatgccggaggaggtttcccggngcttcccttggcacnggcccccnttgatcattgagcaccccggagggttnngttgtcgatctttga

SEQ ID NO: 37755 - DNA, 477 bp, Zea mays
  Clone ID: MRT4577_134439C.1
ctacttccccaaacactacacttaccggcaggctgcagtgctgctcacgctcaattcgtgtacgatctcttgaggacgcatacatggtgttcgacgaaatgtagcactaggatgtcatctcctgaaatgccatgatcgccaagttcgcactcgtgggttgttcgaccgtgttgctgaggttttcaagcagttagtggtgtagctgaaggcgcgataacaatggatggtgtcgaagcttccgttacggcctagctccaccaatgtatatgcacacgttactatttacttgtatgtttgattaatcttatttaatgacatcagctgggatcattatgttatatggctatctccagctgtccttgtattacacatcttatttcaaacttcacctgtgagcctaactaagcacacatacatcgatgctcacggtttgggaccatgttatgaaactgtatctaaatttacaacaattatctc

SEQ ID NO: 37756 - DNA, 344 bp, Zea mays
  Clone ID: MRT4577_13443C.1
ttccgtcttctacggttgcctcttcccttcccctcaagccgccgccaccagagaaaaagagagagagagagggagagatgagcctgcagattccggctaggtcacgcggcctccgccgcctcctcctgctgggtggagaatctggcatccggcggtcgtactccaccggtgaccgtcgccgccgggtgatccgcgaggcacgggatgaggaggaggacgaggccttcctccgcaccctcaacttcggggctgacccagagaacaaccccctgcccccaccgccgagacgcggagggggagcccctgacccctccgccgccggcgccttccctgctgacatcctc

SEQ ID NO: 37757 - DNA, 245 bp, Zea mays
  Clone ID: MRT4577_134440C.1
agaatttcttatttataacggacaacaaccactatttggctcgaccgaccctccttgggctggccggtttgcctcttagcccgcctagccaacatgggccaccaacgcctttttggaccgcccctgcctccacgagcctactttggctagttatcccttggtcatggccatggctggccactggccgttgttggctggtcgcagcttgacattactggccacgactaactagccaaatttttctc

SEQ ID NO: 37758 - DNA, 3603 bp, Zea mays
  Clone ID: MRT4577_134441C.1
aattcggcacgaggcgagggaggcgaggaagacgcacctcctccgcccctcgccctccgcccctcctcgcccacgccgacacccatcctcaccgtatccgcggtcgcaaatggcgctaacctcccaaggcatcaccctccgttccccgccagcggggccccgcggccacggcgggaggcggtcctcttccgtgcccaccgccgcgaccccgcgcgtcttggggcagccccacgcggggcaagccttatccatctcgcccgtcaggtatgaacccgccgctcgcccaccacggggtgttcgtcacgaaggtcagcgcgaggggagacccctccccctccccctgcccctcctcgtcctcggaccttcccccctcgtcgacacctaccctcaccgcatccgcggtcgcaatggcgctagcctcccaaggcatcaccctgcgttccccgccagcggggtccgggggccacagcgggaggcggtcctcttccgtgcccgccgccgcggccccgcgcggctgggggcagccccacgcggggcaagccttatccatctcgcccgccaggtacgaaccagccgctcgtccaccatggcgaggctccctcgctgccgccatacgtgccgctgcctcggccggtgcgcaccacggcagcgacccggtccctgccgagcccagaatcgagctccccgcgatatttaccgtcttctccgaggccgctaagaccggcgctgccttcttcatcgcctcgtcgagcgcggccttcctcctcggctcgtttggggggagttcgtaggcggtgctgggggtctttttggcggcggttgcgtcgggggtggtgggggatcgtgaggatgtggtgtcgttcgaggatggggtggagacttctgattcggactgtttcgcggagcttggggaaaaccgcacattcaaaactagctgcttcaacaccaggaaattgtctcctgtctttgttgctggtcccaacatggatgaggctccacctgtttggatcgacagagttggatttaaagccaacataacagagagcttcacacgtcaaagcaaattcacatatggccttgtggttgaagagattacaacacgtgatgaaactaatactgtctgtacccatggttctcgagcaatgcctagcggcggtctgaacatggatggacctcccacaaccctcagtggtactggagttgaccgaatggcatttcttcaggctaatataacccgtgacaatactgagtttgtgaatggtgcaattgttggagacagatacattttccagttagaccaaggtcttggcattggaagcaaaaacccgttcttcaaccgtcatcaacttactctgaccaagttcatcaatttaaataagcaagagaaaggtgtcggcaagccactaccagctgttttggttcttcatggtcattatgctggttgtgtgggtgatttgccgagctatgacgcctttgcacttggagggccttattctgttaggggctttagtaatggtgaactgggcgcttctaggaatattcttgaggttgctactgaactgcgtgtccctgtaaggaacacacacgtttatgcatttgtggaacatgggactgaccttgggagttccaaggatgtcaaaaggtaccctacagagtttttcaaccgtgttggtcatggatctttatatgtgctagatgttaaaccttgggttagggaaacaggctctgaagaatataaattcacttgctttgttttcaaatatacaagttaatccacgtcctgatgagacaaaggaagggggcatagtagttgaaattaagcttaagaagctggaacccaagtcagctgaagtaagcacagaatggagtattgtacctgggcgtgagggccgaccaactttggcatccatacaacccggaggaactgtgtcatttgagcaccggaacatctatggtctaaatagatctattgttggttctgttacatccagcaacctgctgaatcctcaggatgatctttcattcaagcttgagtatgtccatccttatttggatggtgtcgatgatcgtagtaaaaaccgcacattcaaaactagctgcttcaacaccaggaaattgagtcctgtctttgttgctggtcccaacatggatgaggctccacctgtttggatcgacagagttggatttaaagccaacataactgagagcttcacacgtcaaagcaaattcacatatggccttgtggttgaagagattacaacacgtgatgaaactaatactatctgtacccatggttctcgagcaatgcctagcggcggtttgagcatggatggacctcccacaacactcagtggtactggagttgaccggatggcatttcttcaggctaatataacccgtgacaatactgagtttgtgaatggtgcaattgttggagacagatacattttccagctagaccaaggtcttggcatcgggagcaaaaacccattcttcaaccgtcatcaactgactctgaccaagttcatcaatttaaataagcaagagaaaggtgctggcaagccactaccagctgttttggttcttcatagtcattatgctggttgtgtgggtgatttgccaagctatgatgcatttgcacttggagggccttactctgttaggggctttagtaatggtgaactgggcgcttctaggaatattcttgagcttgctactgagttgcgtgtccctataagaaacacccacgtgtatgcatttgctgaacatgggactgaccttggaagttccaaggacgtcaaagggaaccctacggagtttttcaggcgtgtaggtcatggatcttcatatggcgttggcgtcaagcttgggttggtaaggggagagtacatcgtagatcacaatgctggtactggaactatttttttcagatttggtgagagattttgagtatgctgcctcccgttaccgtggaaggcagacttttgaggtactttgtttagcgatgtttgtggactgtgataggactcaaacggcattggagctctgctgaaataatgaagctattttctggggaagagtgatagctagtgtgaaattaaattttttctatgtaggatgtaagatctgttctttcagagcttggagctcataaatagatgaatattcagaaacgttgtcccaatttttaccgtcagttgtgtttgtgcttctgacaaattgtccatttcgttttgcccggaaccttttgtcaattgcttatctacagttttgtttcattttcagattgtgtaaaaaaaaaaaaaaaacggaaaaagatggcccgggtacccgtgttacggcgcgctgtgcggcgatagaggtcgagctgcgagcaggccctgcgtgaactagtcaacggcagcatgctcgtgggtgcgctgcacgcgcccatcggcgttgactgcgcccacgccgcctccttggggcccatggccaccgtcgggttctgaactcctccggtagtaggcaaacctggtgaccggacatgccatgcatggctccattagtgtatgccgcgagcccgcgacaaataaatgtgtgcttggtgaaggggtttcagcc

SEQ ID NO: 37759 - DNA, 243 bp, Zea mays
  Clone ID: MRT4577_134442C.1
cgacccacgcgttcgcccacgcgtacgccatgggccgggccgggcgttccggcttacggagagaacagaccggctcgaccgttcagcgggtgatgcgctcttgtccttaactggacgggacgtgcctacggctctgttactttgaagaaagcagagtgctcattgcatgcctattgctctggatacatgtatcatgggatatcaacatacgattgcccgtcctattgctgaatggcccttagg

SEQ ID NO: 37760 - DNA, 2804 bp, Zea mays
  unsure (1)..(2804): unsure at all n locations
  Clone ID: MRT4577_134443C.1
ctcctcgccctccgccctcgctcccccagccgacgccgacacctatcctcaccgtatccgcggtcgcaaatggcgctaacctcccaggcatcaccctccgttccccgccagcggggccccgcggccacggcgggaggcggtcctcttccgtgcccaccgccgcgaccccgcgcgtcttggggcagccccacgcggggcaagccttatccatctcgcccgtcaggtatgaacccgccgctcgcccaccacggcggtggtggagggagtggatggggcgcggggggtggtggtgccggtggcggggggggtggagacttctggtaccggctcatctcttccggcgcggcgcacgcggacgacaagtcatcgggggattgggacgcgcacgggctccccgtcaacatgacggtgccgctcacgaagctgagcgggctgaagaggtataagctgtctgagctcaagttctttgatcgggcagctgccagcggtggcgcctatacggggccagaggattccttcttcgaaatggtgacactgcagcctggtggcgtgtacaccaagtcgcagctgttgaaggagctcgagacactcgtctcctgtggcatgtttgagcgggttgatctggaggtgaagcccaagccagataacacaattgggctcacagtctcctttgtggagagtgtgtggagttctgcaaagcagttcaagtgcatcaatgtggggcttatgtcacagtcagggcaggttgacttcgaccaggacatgacagagagggagaaaatggattacctccgtaagcaggaacgtgattaccagcagcgtgtacgaggtgccaatccctgcatcttgccagaaaatgtacgtggagaggtgctgggaatgatgaagaagcaggagaaagtgagtgccaggatgctgcagaagatcagagatcatgtccagaaatggtaccacaatgagggtttcgtatgcgcacaggtggttaactttggaaaccttaacaccaatgaggttgtgtgtgaggtggtcgagggtgacatcaccaaggtggagtaccagttccaggataagcttggaaatattgttgaaggaaatacccagcttgcgatcatagaccgagagctgccgcagcagcttcgacctggccacatctttaacattggagcagggaaacaggctctgaagaatataaattcacttgctttgttttccaacatagaagttaatccacgtcctgatgagacaaaggaagggggcatagtagttgaaattaagcttaaggaactggaacccaagtcagctgaagtaagcacagaatggagtattgtacctgggcgtgaaggccgaccaactttggcatccatacaacctggaggaactgtgtcatttgagcaccggaacatctatggtcttaatagatctattgttggttctgttacatccagcaacctgctgaatcctcaggatgatctttcattcaagcttgagtatgttcatccttatttggatggtgtggatgatcgtagtaaaaaccgtacatttaaaactagctgcttcaacaccaggaagttgagtcctgtctttgttgctggtcccaacatggatgaggctccacctgtttggatcgatagagttggatttaaagccaacataactgaggtttgcatgatttcttcccacttttttctactttgagaagtactgttccagaaatatatgtaacatgatggaaatactatttggattctcagagcttcacacggcaaagcaaattcacatatggcctcgtggttgaagagattacaacacgtgatgaaactaatactatctgtacccatggttcacgagcaatgcctagcggcggtttgagcatggacggacctcccacaacactcagtggtactggagttgaccggatggcattccttcaggctaatataacccgtgacaatactgagtttgtgaatggtgcaattgttggagacagatacattttccagctagaccaaggtcttggcatcgggagcaaaaacccattcttcaaccgtcatcaactgactctgaccaagttcatcaatttaaataagcaagagaaaggtgctggcaagccactaccaggttgttttggttcttcatagtcattatgctggtgtgtgtgggtgatttgccaagctatgatgcatttgcacttggagggccttactctgttaggggctttagtaatggtgaactgggcgcttctaggaatattcttgagcttgctanctgagttgcgtgtccctataagaaacacccacgtgtatgcatttgctgaacatgggactggaccttggaagttccaaggacgtgaaaggaaaccctacggagtttttcaggcgcgtaggtcatggatcttcatatggcgttggcgtcaagcttgggttggtaaggggagagtacattgtcgatcacaatgctggtactggaactattttcttcagatttggtgagagattttgagtatgcaacattctgccactgtggaaggcagacttttgaggcactctgtttagcgatgcttgtggactgtgataggattcaatcggcactggagctctgctgaaataatgaagctattttctggggaagagtgatagctagtgtgaaattagtttttttctatgtaggatgtaagatctgttctttcagagtttggagctcataaatagatgaatattcacagaaaaaaaaaaaaaaaaaaaaaaaaaaaaaaaaaaaaaaaaaaaaacaaaaaaaaaaaaaaaaaaaaaaaaaaccaaacaaaa

SEQ ID NO: 37761 - DNA, 606 bp, Zea mays
  Clone ID: MRT4577_134444C.1
cccggggctacccacagtcctacaagcagtcgcacgcaagggctaagagacaaatcggccgacatggctcgcacgcaatctgccgcagcggtcgctcgcggaggccgcggtgctgctgctggcagcgggggcgacgacctagacagccgccatcacctgcgggcaggcgagctccgacatcgcgccctggctctactacgcccgtaggacggggaccgggccctccgactactgctgtagcggcataaggaacctgaagagcgccgtcagcaccgtcgccaacaggacacgccacctggaactggcttaagaacgccgacaggggcagtgagagtcctaaacgccagctacgccgccagcatcccatacatgggcagagtgagtatcccgtacaccatacagcaccttgaccgatgtgctccagggtgaactaaaacctcaaccaatcccgacgacaggcgcctgatatatccaccaagcactgcggcttcgtcgacagacgggatctcagtctggcgtgccgaggaagtgtattgccctacgcctgatgagaaatagctacttgtgtactggctatgtactaccacttaagctctcttgccagtg

SEQ ID NO: 37762 - DNA, 542 bp, Zea mays
  unsure (1)..(542): unsure at all n locations
  Clone ID: MRT4577_134445C.1
tttacccctccgctccgcggccggatccacactcctccgggaggagagggcacatcaggccactgtgggcgaaaggacaccccgtacgcctgtcctcgccgatcaggtccagattgcccacacgcatcgatggatcgcttacccgttgcgaccactgtaagtctttcctttgcgcccgttgcgacggataccgggagaggcgggcacctgtgattccgtgccgctcgccctctttccggctcctaccgcaacaatattgttgccaatctaagcaactcaaataatgtggggggagcctctttaacggcttcatgcttaggcactcctacttccagctggccagatagattatgactcaccccacgatgcgaccattgagcagctattttcagcggatcgactggggaatccttcttgtcaccaagattacacctcctggaccttggatcttgcatgtcacaaaatgaagtgtgacatctgactgcatctgtcccacagacatagctccacattatgcgatttgggcgcanggttgaggaccc

SEQ ID NO: 37763 - DNA, 267 bp, Zea mays
  Clone ID: MRT4577_134446C.1
ggggaaccggttaaaacttttcattcaacaaagacaaagattcgggggtaacattggggttttttacaaggttttacttacattgcttggcaaaaaaatggatggaacacgttgcttgaaaaaggttcattgtctggttgcagaacaataacactttagctggcccaatggaagtccccttgggtgttttgtttttaagcggacgggatttgaatctcggctttattaattttctgttgcaggttcttggggtacttggcgtttgcg

SEQ ID NO: 37764 - DNA, 124 bp, Zea mays
  Clone ID: MRT4577_134447C.1
aaggacaggggcgtgttaatattcatcaaagagggccaggccaagtacgcaccctatcccgtgcccggggaccaagtacctttttttaaagccgcggacttggttttttccctaggggtaatgc

SEQ ID NO: 37765 - DNA, 986 bp, Zea mays
  Clone ID: MRT4577_134448C.1
gcaagaaccggctagaaggcctccgccaatgggccagcggtacgacccagagccatgctggaggcagtcccggccgccgcaggaactgagcaccgggcagacaaaggagcagttcgtcgcggagatgcttgccagaccctcgagcgtggagtcgggccccgggagaccgcacgcgaggcctaggcagcagcaccaggacaccccagcagctcaagccaggccgcagccggctgcgtccgaggtgagcgtcttgtgcctccgtcgttaaaaaccgtacgtgctgatccgaatctgatcgccgcgaagtctggttgtctgagttccgctcgatctgtctgtagaaaccggcggcccaactcgacgcgaactctgtgcgagcgaagctggagctcgcgaagaacgccaagctcgaggcgaccaagaggaagctccaggaagggtaccaagaatccgataacggtatgcgtgctgctgctgctgctatgggtataggatatccatccttcattgtgctggtggttcatgcattgtgctgtgctgcttgatggaccgagaatctgatctccattttttttttcggttctctgcttcgcgccaccgcagcgaagaagcagaggaacgtacagatggtgggtccgcagaacctgcccaagcaagggaacacgaacaacaaccgtagtttccagcctagcggtagcggcaggccaaggagtagcggcaacgtcaatagcaacaggaactggtcaagatgagaggcaccgatccaattccgattccaattccttcaagagcggcaggatcccttttctttttctttttctttttacatcggctacaacaatttttagtctaggccagtagtacataaacagcaataaggcttgttttcggaattgcatgtttggcatgtcacaatgctcggctggctggtctttgccgatgaaacctgtaaagataacactaccaaattctgatcttgagctagg

SEQ ID NO: 37766 - DNA, 264 bp, Zea mays
  Clone ID: MRT4577_134449C.1
ctcatttccatactattcgcctcaggaggtgcagtctctccaacctagtacatacagcgttctgactcatgtattccgcctcagcaaggatgctttgaatagggatgaatgctgtgatctcattgatagcgatctctcagttgaatacagcgccgaaaaacctcctctcagcctctgtagcttgctcttacagctacaggggcgcgtgcggatccaggaggtctcggaataccaggaccggaccgttcagctgctgctaaataa

SEQ ID NO: 37767 - DNA, 746 bp, Zea mays
  unsure (1)..(746): unsure at all n locations
  Clone ID: MRT4577_13444C.1
ccggccgggaaaaacttgaatggcagagccttacaacttagcacctcatggagtaccctcgtgtcacaaggagatttgcaataaaccagcatcttcgagcacgttgcatctggacgccgagggtcccctgtatgagttatcctcgctgctagatgagcttccaatcaggaaagggctgtccaattactaccaagggaaggcccaatcattcacgtctatatctgatgctacaagtgttcaagaccttgcaaagaaagtttcatacagtaagaggatgagagcaagcaaaagctattcagtaggattagacatgaaccaacggacaatcattgtatcaaggccgtgcaacaagatgatagcaaagaggccctcaaatggttcatttgctagagtaatgccaggaactagcaacaccagcaatttgaacatcagcactaaatcatatgcccaccagaacaagagagttgcaacacatattgatctgtaacaaagggaaaactagggtgacaagcctccactttccattgacgagctgtgcttcgtgtgtgctttatgcatgaaaatctgaacaatatttgtttctacaatcaacctgatttcttatgtgcttcatttcatgataaataaaaagatcgatcantcaaatggatgtaatgggagtaacggtgagtcataataaacaaagcccaacatggcagaaaatacagttatcgtcatcacgaaaaaaaaaaaaaaaatttgcgngc

SEQ ID NO: 37768 - DNA, 253 bp, Zea mays
  Clone ID: MRT4577_134450C.1
cggtatctgataacgcgaaacttctttgacattatatagtgggagcgaaaagacaaaactggattaccccactacaatacgagccgaccgtaaacccatactacacaaaccggcttatttatacaaataatatccagaccgtcgatggcggtgacggtcaatactactggcacctccaacgggacgactcctagggcgtgtccccacggatactgcggacgagctggatgtccctgccataattcgacgctct

SEQ ID NO: 37769 - DNA, 262 bp, Zea mays
  Clone ID: MRT4577_134451C.1
tgcgcttgcttaccgtgcgaccattaccttctgggatactgattagggaacgagtactgttgatataggaattcccgccaaacggcctttacgacgtcgcagtctttggccgttctggctgcgtcgctcgagggcagcccagagacccgggaccatttctcacaggacacaagtggtcatggacggccccctgttatttctcgagagagccttgacacgctaacccctggaggaagaatgcatcactcgtcggccgcatgct

SEQ ID NO: 37770 - DNA, 298 bp, Zea mays
  Clone ID: MRT4577_134452C.1
gcgagtgtagcaagctgcacacacattgaaggggacaaccacatgcgcctaagatcccgtcctccgcgtccagatctttggcgaggcggtgaccgtcgagggatcgccatggcgttgagggctttccacgtgtcccatggcaccgcggcagcgcctctgccgcctttcgcgcggaggatgatggcccagttcgtggtggttgtcattgtcgacaacattaacattgtcaaactctgtaaagaaccctataccccttcacgagaggttcattgccaaattacccatgtactaccacctt

SEQ ID NO: 37771 - DNA, 257 bp, Zea mays
  Clone ID: MRT4577_134453C.1
tcgttaaaatccagagatactgttaggggaggaggctatggtaataaagccaggaggcacaactggactgtcctattctacgcagcacatctctttaatctgcagcgagtgaggtctagatgagattgctgaacgagattcttccactcgcttatgggggacttacatggtgacattgcactaaggcttctgggatacaatatcatgtcacttgctggactatgcagatcttattattggaccatgcagatacacca

SEQ ID NO: 37772 - DNA, 396 bp, Zea mays
  Clone ID: MRT4577_134454C.1
gcacagcggtgggaagccgactactagaatctggaaaagttgggctcctaacaaatgctgtcttttcatttggctggtggaatatatcaggtgttggacaacggataaacttactagaaggggtttacaacatccggagtgctgccccctttgtgattagcagcaagaaactatcaaccacttgtctcttgtgtattttctaggcaagtttggtttgagttgctgcggagagccaagttgcaggagctgatgccacagcctaaggagcaaaattttggtgagtggtggaggaacagcttccttaaagtgcaagggcagactagaagagggttcaattccccagtcattcttggggcatggatggtttggaagcatagaaaccaatgcggttttcaa

SEQ ID NO: 37773 - DNA, 1351 bp, Zea mays
  Clone ID: MRT4577_134455C.1
gggtacctcgaggccggccggggcaggcattgctgtgctgtgccagtgatgactggttacccataccatacatacatacaactgctctctctgtggccactgctgtacatacaatcgcaaatatattatgacgtgtctgcaagtgcttcctcacttcactgctatggggcacacacgctctctttcgctctctgttaattgaccaactttctctgtcatcctggtcttccctcgccacaaaacaccatctgctctgctctctccctctgtcttcccttcctccttcccaggaactccattgcactatttccaccccaagaacacagcacagagtcggatccgaatccacaggagaggcagaagcacaactcactccccactccctccacccatcagctagccatgggcaaggactgcggcaaacacggcgacgacgacctccggcgctcgtgcaggcgcctgctagccaccatcgtggtcctcgcgctgaccgtgggcgtcgtcgcgctgatcgtctacctggtgctccgccccacgcacccgcgcttctacctgcaggacgcgtcgctccggcagctggacctctccaacgccaccaccagcaccagcaccagcaccctgctctccaccgcgatccaggtgacgctagcgtcgcgcaacccgaacgagcgcgtcggggtctactacgaccgcctcgacgtgtacgcgtcgtacaagtaccagcagctcacggtggcggcgtcgctgccgcccgcgtaccagggccacggcgacgtcggcgtctggtcgccggtgctggccggtcccaacgtgcccctcgcgccctacctcgccgacgcgctccgccaggactgccaggcggggtacctcgtcctccaggtcaaggtcgacggccgcgtccgctggaaggtcggcagctgggtctcgaaccactaccacctcttcgtcacctgcccggccttcctcgtcaccgccggtggcaacggcgcgcccggggccgccgggttcaggttccagaccaccacctactgccacgtcgaggtctaggtctagccggcctcttgcctgtctgtgctgctgtgtcgtccgtactccgtatacaaacagaggccgccgcctgcgaaggaaacagagagacaaaggcctgccttgcgccatgtatcatgggatggctgcctgtctccctcgctctctctaagctagctgcactgcctgcatgctgctggtgtgcatgttagtgctgcagtgatgcggatgtaaaggatggtaaaaaatttctgcttttcttcttcttttcagtaaggttctcctttaacgtacgatcaattacagtcgctgtcttcgtcgtccc

SEQ ID NO: 37774 - DNA, 239 bp, Zea mays
  Clone ID: MRT4577_134456C.1
ggtgctcttaacgtggatgtgaatgagttccagaccaacttggtgccctaaccgaggatccacttcatgctttcctcctatgctccagtcatctctgctgagaaggcctaccacgagcagctgtctgttggcgagatcacaacagcgccttcgagcacctccatgattgccaagtgcgatcccggcatggtaagtacaggcctgctgctcatgtaccgtgtgatgtgtcccaatgagtg

SEQ ID NO: 37775 - DNA, 1711 bp, Zea mays
  Clone ID: MRT4577_134457C.1
cattgggaccctcgcgtctggcgcattggttccctcggggccggccgggattccttcactgccagtcttgcatcccgtccccgtccgcgccggccgacgccgccttttcgtccccgcgtcagcgtcgcggctccactgagcgtgcgtgtcaccggcgggaggcaagggcaggcggtggtggcgatggcgtccgctgacgcgcgcttggcggggatcgcctcctccatccgcgtcatccccgacttccccaagccagggatcatgttccaggacatcacgacgttgctgctcgatcccaaggcgttccgtgacaccatcgacctctttgtcgagcggtacaaggaccaagggatcaccgtggttgctggtgttgaagctagagggttcatttttggtcctcctatcgctttagccattggcgcaaaatttgtgcctttgaggaagccgaagaagttgccaggcgaggtgatctccgaagagtattctttggaatatggaactgacaagatagaaatgcatgtcggagctgtacaggccaacgaccgggctcttgtagtcgatgatcttattgctaccggtggaacactatgtgcagctgtcaaacttattgaacgtgttggagcaaaggttgttgagtgtgcttgtgtcattgaattgccagaactgaagggccgagacaagcttggggacaggccagtttttgtccttgtggaagcagacgccctgagcattccttcactgccagtcttgcatcccgtccccgtccgcgccggccgacgccgccttttcgtccccgcgtcagcgtcgcggctccactgagcgtgcgtgtcaccggcgggaggcaagggcaggcggtggtggcgatggcgtccgctgacgcgcgcttggcggggatcgcctcctccatccgcgtcatccccgacttccccaagccagggatcatgttccaggacatcacgacgttgctgctcgatcccaaggcgttccgtgacaccatcgacctctttgtcgagcggtacaaggaccaagggatcaccgtggttgctggtgttgaagctagagggttcatttttggtcctcctatcgctttagccattggcgcaaaatttgtgcctttgaggaagccgaagaagttgccaggcgaggtgatctccgaagagtattctttggaatatggaactgacaagatagaaatgcatgtcggagctgtacaggccaacgaccgggctcttgtagtcgatgatcttattgctaccggtggaacactatgtgcagctgtcaaacttattgaacgtgttggagcaaaggttgttgagtgtgcttgtgtcattgaattgccagaactgaagggccgagacaagcttggggacaggccagtttttgtccttgtggaagcagacgcctgagcggaacttgggacttctcagagagtttggcgccgtcgatgctcagtttcccatgttaccatgttggctattttctggctgacgcgtaataaagttttattccaaattgtgatcccctgaatgatttgtcaatgtagacatgattgctgatctttgtaaactgtggcttatgttttgtcaaaatggttctaattattcacatcaattaaggataaatcctgattggagcttgttgtttgttccgaaaaaaaaaaaaaaaaaaggcccctaggcaaccattgatgaaataaagttgccatcacaat

SEQ ID NO: 37776 - DNA, 151 bp, Zea mays
  unsure (1)..(151): unsure at all n locations
  Clone ID: MRT4577_134458C.1
agcaggacttcatgacagacctacgtttccagtcctttnccacggccgtgctgcacgaggccgncgagtcctacctcgtgggcctcttcgaggacaccaacctttgtgcgatccacgcagagcgcgttactatcatgctcaaagacatcca

SEQ ID NO: 37777 - DNA, 529 bp, Zea mays
  Clone ID: MRT4577_134459C.1
gtcatgtcttgcatcccgtccccgtccgcgccggccgacgccgccttttcgtccccgcgtcagcgtcgcggctccactgagcgtgcgtgtcaccggcgggaggcaagggcaggcggtggtggcgatggcgtccgctgacgcgcgcttggcggggatcgcctcctccatccgcgtcatccccgacttccccaagccagggatcatgtttcaggacatcaccgtggttgctggtgttgaagctagagggttcattttcggtcctcctatcgctttagccatcggcgcaaaatttgtgcctttgaggaagccgaagaagttgccaggcgaggtgatctccgaagagtattctttagaatatggaactgacaagatagaaatgcatgttggagctgtacaggccaacgaccgggctcttgtagtcgatgatcttattgctaccggtggaacactctgtgcagctgtcaaacttattgaacgtgttggagcaaaggttggtgagtgtgcttgtgtcattgaattgccagaactg

SEQ ID NO: 37778 - DNA, 1147 bp, Zea mays
  unsure (1)..(1147): unsure at all n locations
  Clone ID: MRT4577_13445C.1
ccccccctttttttttttttttttttttttttttttttttttttttttttttttttttttttttttttttttttttttttttttttttttttttttttttatccaaataagtgacagatgtccatttcttgcttcatgtcaacaacgaagagacggagttcataagtataaaatagcacaagaaatgaagaaatattaatgtactaatctatcaagatcacatggagtaagggcaactatcactcgctctccggccgtgagttcacaaaatttctccgactaaacaagacgcttatccaaccattggatagctctccctttttctcctatataaaaaaacataagctgcgtccctcccgggtcaaaacattgaatgggagagccttacaacttagcacctcatggagtaccctcgtgtcacacggagatttgcaataaaccaagtgacgatagctccgagtcttacaattccttctctggcgcgtccagtgggtccttgtgctcatcagcttccaacatgtctgatgatgcaacttcttcccacctggccatcgctctgagccatcctcagnaacaaaaaatttatggtatttgaacttaaaggcaagtttctgctgaagttacatactttgaatctatgtacacattacctgaaggaatatctaagctgtcattcaccacccattccttttcgaaatataaaaacacatgaattgccaactaaaagagatgttgctacaaacatacaatttttgcaaccttcagagcaatagttttgttccccgagcgagcctacgattccacatcctttttcttaagaacgacccagtaatgatgtcagttgaatcatttattgcttagccatctggtatagtctccaatagaatcaagatcgcaatcttttgttattccaagatgatcaagtagaattcttaaaccaccaccttttgaagtattgaggggaacaatatcaattgtatttgaatgcattttgataacatgtgctttccctctgctcagttctgaaaaatgctgccttaggacagatgaatcctctttggtactatcaaaaagagtaatttctgaatagatgaatattccaaaaggtcctcaattgaatgcatcacttttaccttgttttcattat

SEQ ID NO: 37779 - DNA, 1196 bp, Zea mays
  Clone ID: MRT4577_134460C.1
cattggtacctcgagccggcgggatcgaccgactctcggcaacggatatctcggctctcgcatcgatgaagaacgtagcaaaatgcgatacctggtgtgaattgcagaatcccgcgaaccatcgagtttttgaacgcaagttgcgcccgaagccttctggcggagggcacgtctgcctgggcgtcacgccaaaagacaccccgtccccgtccgcgccggccgacgccgccttttcgtccccgcgtcagcgtcgcggctccactgagcgtgcgtgtcaccggcgggaggcaagggcaggcggtggtggcgatggcgtccgctgacgcgcgcttggcggggatcgcctcctccatccgcgtcatccccgacttccccaagccagggatcatgttccaggacatcacgacgttgctgctcgatcccaaggcgttccgtgacaccatcgacctctttgtcgagcggtacaaggaccaagggatcaccgtggttgctggtgttgaagctagagggttcatttttggtcctcctatcgctttagccattggcgcaaaatttgtgcctttgaggaagccgaagaagttgccaggcgaggtgatctccgaagagtattctttggaatatggaactgacaagatagaaatgcatgtcggagctgtacaggccaacgaccgggctcttgtagtcgatgatcttattgctaccggtggaacactatgtgcagctgtcaaacttattgaacgtgttggagcaaaggttgttgagtgtgcttgtgtcattgaattgccagaactgaagggtcgagacaagcttggggacaggccagtttttgtccttgtggaagcagacgcctgagcggaatttgggaattctcagagagtttggtgccgtcgatgctccctctctggagacaacacagtttcccatgttaccatgttggctattttctggctgacgcgtaataaagttttattccaaattgtgaccccctgaatgatttgtcaatgtagacatgattgctggtctttgtaaactggcttatgttttgtcaaaatggttctaattattcacatcaattaaggataaatcctgattggagcttgttgtttgttctagtaatgttgcttttttgctttgtttgtgcaaccattgatgaaataaagttgccatcccaaaaaaaaaaaaaaaaaaggccccta

SEQ ID NO: 37780 - DNA, 1247 bp, Zea mays
  Clone ID: MRT4577_134461C.1
tcgaggccggccgggaacgactctcggaacggatatcccggctctcgcatcgatgaagaacgtagcaaaatgcgatacctggtgtgaattgcagaatcccgcgaaccatcgagtttttgaacgcaagttgcgcccgaagccttctggcggagggcacgtctgcctgggcgtcacgcggtgccagcctcgcgtctcgtccccgtccccgtccgcgtccgcgccgccttttcgtccccgcgtcggcgtcgcggctccactgggcgtgcgcgtcaccggcgggaggcgagggcaggcggtggtcgcgatggcgtccgccgacgcgcgcttggcggggattgcctcctccatccgcgtcatccccgactttcccaagccagggatcatgttccaggacatcacgacactgctgctcgaccccaaggcgttccgtgacaccatcgacctcttcgttgagcggtacaaggaccaagggatcaccgtagttgctggtgtggaagctagagggttcatttttggtcctcctatcgctctagccatcggtgcgaaatttgtacctttgaggaagccgaagaagttgccaggcgaggtgatctccgaagaatattctctggaatacggaactgacaagatagagatgcatgttggagctgtacaggccaacgatcgggctcttgtagtcgatgatcttattgccaccggtggaacactctgtgcagctgtcaaacttattgaacgtgttggagcaaaggttgttgagtgtgcttgcgtcattgaattggcagaactgaagggccgagacaaacttggggacaggccagtttttgttcttgtggaagcagatgcttgagcggaacttgggacttctcttctcagagagttagagttagcgctgttgatgctacctctctggaaacaacaaagtttcccatgttggctatattctggctgacacgtaataaagtttcattccaaattgtgatccccttagtgatttgtcaatgtagacatgattggccccccttgtatactgtggcttattattcacatcaattaaggattcccatgtttggtgcgaaaaaaaaaaaaaaaaaagggctgacgggtaataaagtttttttccaaattgtgatcccctgaatgttttgtcaatgtaaacatgattgctgatctttgtaaactgtggcttatgttttgtcaaaatggttctaattattccccccaattaaggataaatcctgtttggggct

SEQ ID NO: 37781 - DNA, 1396 bp, Zea mays
  Clone ID: MRT4577_134462C.1
ctgtgcggcgctcgaggccggccgggcccggggaccctcgaggccggccgaaataaaaagagcagcggagcggagcatgctcttcattccttcactgccagtcttgcatcccgtccccgtccgcgccggccgacgccgccttttcgtccccgcgtcagcgtcgcggctccactgagcgtgcgtgtcaccggcgggaggcaagggcaggcggtggtggcgatggcgtccgctgacgcgcgcttggcggggatcgcctcctccatccgcgtcatccccgacttccccaagccagggatcatgttccaggacatcacgacgttgctgctcgatcccaaggcgttccgtgacaccatcgacctctttgtcgagcggtacaaggaccaagggatcaccgtggttgctggtgttgaagctagagggttcatttttggtcctcctatcgctttagccattggcgcaaaatttgtgcctttgaggaagccgaagaagttgccaggcgaggtgatctccgaagagtattctttggaatatggaactgacaagatagaaatgcatgtcggagctgtacaggccaacgaccgggctcttgtagtcgatgatcttattgctaccggtggaacactatgtgcagctgtcaaacttattgaacgtgttggagcaaaggttgttgagtgtgcttgtgtcattgaattgccagaactgaagggccgagacaagcttggggacaggccagtttttgtccttgtggaagcagacgcctgagcggaacttgggacttctcagagagtttggcgccgtcgatgctcagtttcccatgttaccatgttggctattttctggctgacgcgtaataaagttttattccaaattgtgatctaaaaaaaaaaaaaaaaaaacggaaaaaaaaaaaaaaaaaaaaaaattccttcactgccagtcttgcatcccgtccccgtccgcgccggccgacgccgccttttcgtccccgcgtaagcgtcgcggctccactgagcgtgcgtgtcaccggcggaaggcaagggcaggcggtggtggcaatggcgtccgctgacgcgcgcttggcggggatcgcctcctccatccgcgtaatccccgacttccccaagccagggatcatgttccaggacatcacgacgttgctgctcgatcccaaggcgttccgtgacaccatcgacctctttgtcgagcggtacaaggaccaagggatcaccgtggttgctggtgttgaagctagaggggtcatttttggtcctcctatcgctttagccattggcgcaaaatttgggcctttgaggaagccgaaaaagttgccaggcgaggtgatctccgaaagagattctttggaaaatggaactgaaaagatacaaatgcatgtcgg

SEQ ID NO: 37782 - DNA, 888 bp, Zea mays
  unsure (1)..(888): unsure at all n locations
  Clone ID: MRT4577_134463C.1
aattcggcacgaggttctcggcgaggcgacgctctctcccctcctgcaggcagtcaccattacgaaaaaagccaacacccggacggaaaggttggagcggggaggaaaactcgcgcaagatcccgccttttccgtcggggtctgacggccccgctcccccaccggaagccaggcggccgcaaagcagaggccgtaggcggcggttgctgaaacctatatcacgccaagcgcctgcgtagtcaagggctactcgagccttgcccctcccatggaacagcgggacgcgacgcagccagaggcggcggcggaggagcgcgaccaggagcggccctccattattcctcctcccaaggaaaacgaggataaagatctgaagctaccttctcgtgtggtttctttattatttggtggtgatatatcgacgtcagcacaaacatttgagaaatggctctcattagtacgtaagaggagtggggctttccggccatctgggttcccacatcgaggttcaaggattgaagtcatgccaagtgggagcttctcactatttggtagcggggacttaagtgaacacttgattagagaagcaccaacaagaaaagatccattggactgcgatcaatctcctgaaatgagcttgtgggagagacttgggaactcttctgcactggacattgagtcatctgaattttcatggggacgtgttgttgtctctgcatcatacagaacatagtagtagttccgaacaaactgaagacgaaatgaataaagctcttgaggtgactgtgaactctgggtggcgtagtgttctttggctctatttagttttcaggntaacattggagtccagaagcgcaccctgttataaagttttcgtcatcaagatgc

SEQ ID NO: 37783 - DNA, 1059 bp, Zea mays
  Clone ID: MRT4577_134464C.1
ccctcaggctgggatcttttttttttttttctttttttttttttttttttttttttttttttgcaccgataagctccaatcaggattatccttaattgatgtgaataataagccacagtatacaaggaccagcaatcatgtctacattgacaaatcattcaggggatcacaatttggaatgaaactttattacgtgtcagcaagaatatagccaacatgggaaactttgttgttgacagagaggtagcatcaacagcaccaactctaactctctgagaagagaagtcccaagttccgctcaagcatctgcttccacaagaacaaaaactggcctgtccccaagtttgtctcggcccttcagttctgccaattcaatgacgcaagcacactcaacaacctttgctccaacacgttcaataagtttgacagctgcacagagtgttccaccggtggcaataagatcatcgactacaagagcccgatcgttggcctgtacagctccaacatgcatctctatcttgtcagttccgtattccagagaatattcttcggagatcacctcgcctggcaacttcttcggcttcctcaaaggtacaaatttcgcaccgatggctagagcgataggaggaccaaaaatgaaccctctagcttccacaccagcaactacggtgatcccttggtccttgtaccgctcaacgaagaggtcgatggtgtcacggaacgccttggggtcgagcagcagtgtcgtgatgtcctggaacatgatccctggcttggggaagtcggggatgacgcggatggaggaggcaatccccgccaagcgcgcgtcggcggacgccatcgcgaccaccgcctgccctcgcctcccgccggtgacgcgcacgcccagtggagccgcgacgccgacgcggggacgaaaaggcggcgcggacgcggatgcggacggggacgagacgcgaggctggcaccggaggaagagcatgctccgctccgctgctcttttcttttgatctcggcgccgcccggccggcctcgagggtcccaatcgcccataggagt

SEQ ID NO: 37784 - DNA, 1123 bp, Zea mays
  Clone ID: MRT4577_134465C.1
cattgggaccctcgaggccggccgggatgctctttggttgcctcgagcccggccgggatcttccttcactgccagtctcgcatcccgtccccgtccgcgccggccgacgccgccttttcgtccccgcgtcagcgtcgcggctccactgagcgtgcgcgtcaccggcggcaggcgagggcaggcggtggtggcgatggcgtccgctgatgcgcgcttggcggggatggatcaccgtggttgctggtgttcgcctcctccatccgcgtcatccccgacttccccaagccagggatcatgttccaggacatcacgacgttgctgctcgatcccaaggcgttccgtgacaccatcgacctctttgtcgagcggtacaaggaccaagggatcaccgtggttgctggtgttgaagctagagggttcattttcggtcctcctatcgctttagccatcggcgcaaaatttgtgcctttgaggaagccgaagaagttgccaggcgaggtgatctccgaagagtattctttggaatatggaactgacaagatagaaatgcatgtcggagctgtacaggccaacgaccgggctcttgtagtcgatgatcttattgctaccggtggaacactctgtgcagctgtcaaacttattgaacgtgttggagcaaaggttgttgagtgtgcttgtgtcattgaattgccagaactgaagggccgagacaagcttggggacaggccagtttttgtccttgtggaagcagacgcctgagcggaacttgggacttctcagagagtttggcgccgtcgatgctccctctctggagacaacacagtttcccatgttaccatgttggctattttctggctgacgcgtaataaagttttattccaaattgtgatcccctgaatgatttgtcaatgtagacatgattgctgatctttgtaaactgtggcttatgttttgtcaaaatggttctaattattcacatcaattaaggataaatcctgattggagcttgttgtttgttctagtaatgttgctttcttgctttgtttgtgcaaccattgatgaaataaagttgccatcacaataactgaataatggctgatgtatggagatggacttttggatt

SEQ ID NO: 37785 - DNA, 228 bp, Zea mays
  Clone ID: MRT4577_134466C.1
aaccccaatttccagggttttttatttttttataaaaaatagttcgttttcccttaggaaattaaaaatttataaaaaaaagggttgttaaactagccctaaatacatgatttaatccctaacccctactgatcttacattaccgttccgaagttttaaaataggctcgtaaacagagtggtaagcagcatttaaaaaacctacctattaagtaagcatgcctttagc

SEQ ID NO: 37786 - DNA, 610 bp, Zea mays
  Clone ID: MRT4577_134467C.1
cgacgccaaaccggcgaattccgtggtgtacgtctccttcggcagtctgaccacggtggcgagagaacatctcgaggagctgctccggggccttgaggagagcggcaggccgtacctctgcgtcatccggaaggacaacaaggctgcactcgcggatgccgagacgaaggtagacgaggagctcaagaacggcatcgtagtggagtggtgcgaccaggtgcgggtgctgtcgcacgcggcggtcgggtgcttcgtgacgcactgtggctggaactcggtgctggagagcctggcggcgggggtgcccatggtgtgcgtgccccggatgtcggaccagcgcaccaacgctcaacttgtcgtgcgcgagtggcgcgtcggcgtgcgcgcgcaggtggacgatggtggcgtgctgcgagcggcggaggtgcggcggtgcatcgacgaggcgatggggaatttggaggccgccgcggaggtgcgacgcatggcggcggagtggaagcaggtagtgacaaaggccatgggaaaaggagggtcgtcggatcgtaatctcatgacgttcgtggatggcgcgaggaacgccgtttgaagattggcatgtgtttcttta

SEQ ID NO: 37787 - DNA, 383 bp, Zea mays
  Clone ID: MRT4577_134468C.1
attcggctcgagcggctggagcaacatgttttggcgccaccgtggcgctaatagatgcggccgtgtacagcaacggagagggctcggcccccaccctcaggggctcgcttctgcccatgtttggcccaccgccggagccgctgccggcgagtctcgaggacaagctgaggcgggtgagcgaggataaccggaggctggccgccgtgctggacgcaatactcggcgaccgctcaaccgtgcgagcgctggccacgttatcttcggacgggggcactgcagtggccgccacccagccatcgcgatccagggaccggacggtgcgtgcgcgcgccaagccttctgacgccgacgccaaccacctcagggactgctaccagtggcgc

SEQ ID NO: 37788 - DNA, 248 bp, Zea mays
  Clone ID: MRT4577_134469C.1
tcggtcagagaagccaaaacaggttggagagggtaaaggtgtggatactgagtccactagagtcgaatctgtgactataaatgaagatctaaaagaaaacgatccagacgatgacagatgtcgttagtatatacctgtatgaacgtctgaatacaacatctgctgatcctgctactgagatagatataagtaggcgagagacgttcttatcttgaacagactttaattagagttctgatatgtcatag

SEQ ID NO: 37789 - DNA, 3253 bp, Zea mays
  Clone ID: MRT4577_13446C.1
ctatgaccagagatccttctatatgcagatgtggacaagtatgctagcattgaggtctctgtgttgctttgtgatgatgatttcatcaggaagctcaacaaagaatggagggatgaggatcatgctactgatgttctgtcaatgtctcagcatatcccagagcttgatattcccattctgcagttgggtgacatagtaatttctgttgacacagctcgacggcaagcagaagaaaggggccacacacttgttgatgagataagaatcctcatggtgcatgggctattgcatttattgggctttgaccatgaagtcagcaaggtggctgaagaagagatggagaaggaagaagaacatattttaaatactcttgaatggagaggaaagggattaattaagagtgcttatgatattgctactgttatggaacatttacaaaattctgttgaggctgatagcaatatagagaaagtgatcctacaagagaaacatcaacataaactaagccatatcatctgtgatatagatggtactatcatggatcatgaaggtggcctgcatgaaaaatcaataggatctttgagagaggcaattgcaaaaggagtaaatgttatcatggttactggaaagagtcgggcttccactattagaaccttcaagcttcttgatttctgcgaaaaaggtgattttatttcagagacttcgcctggtgtatttttgcagggttcacttatctatggaagggatggcaaaaaagttcatagagcagaattggatttagatgtctgcaaggaggcattgctgtactccttgaagcatagaattcctcttgttgcgtactgtgaggaacaatgtctaacattgtttgaacacccatttgttgaattgttgcacactgtacataatgaaaacaaggtaaaagtgatgcattcaattgaggaccttttggaatattcatctattcagaaattacttctttttgatagtaccaaagaggattcatctgttctaaggcagcatttttcagaactgagcagagggaaagcacatgttatcaaaatgcattcaaatacaattgatattgttcccctcaatgcttcaaaaagtggtggtttaagaattctacttgatcatcttggaataacaaaagattgcgatcttgattctattggagactataccagatggctaagcaataaatgattcaactgacatcattactgggtcgttcttaagaaaaaaatgtggaatcgtaggcgcgccaaaggaacaaaactattgctctgaaggttgcaaaaattgtatgtttgtagcaacatctcttttagttggcaattcatgtgtttttatatttcgaaaaggaatgggtggtgaatgacagcttagatattccttcagatcatttcgttgagatacatgggaagagaattaaatgggccacatccttgtgcaactggagcttaccatgtgacatttgcttttgtccaaagtcatctgcaacgccatttttaactctacatagattttttgtagttttgttttgtgtagcatagcattgataaatgttgctaaataaatgagttaatggtttctccacgttgatattattcatatgaaactaatgctgaagtataatttatgggtaggaattcaatggatgcattgtgatgacgataactgtattttctgccatgttgggctttgtttattatgactcaccgttactcattacatccatttgattgattgatctttttattgatcatgaaatgaagcacataagaaatcaggttgattgtagaaacaaatattgttcagatttttcatgcataaagcacacacgaagcacagctcgtcaatggaaagtggaggcttgtcaccctagtttcccctttgttacagatcaatatgtgttgcaactctcttgttctggtgggcatatgatttagtgctgatgttcaaattgctggtgttgctagttcctgacattactctagcaaatgaaccatttgagggcctctttgctatcatcttgttgcatggccttgatacaatgattgtccgttggttcatgtctaatcctactgaatagcttttgcttgctctcatcctcttactgtatgaaactttctttgcaaggtcttgaacacttgtagcatcagatatagacgtgaatgattgggccttcccttggtagtaattggacagccctttcctgtggaaatcgtgttaattgaacatgagttggaatgctttgcatctgaagtgaaatttatagaagtaatgttgactatccatcttttataatcatgacattgtgttatatatccactcagtcttttttcctttcagcaaatatacatatgaagttgaactctgctgcatacttatcatagatcttgtgcaaaagggaacctctactagttatcacagagcagtatcaagttttgttgagctgaaagtgaatttgcaagctttttataacaaataacagatcattccattgtatggtagggacagaagcttgctggtttaatagaagataatagtgcaaagaaatcgcaaaacttattgaagcatttgtaattttgaggctatatctttttctaccttcatcatgaatgtaaaagttacaaaactacattgtgaagccacattgtgatttatttgtagaaattggacagcttttatgacttttcttcaaggtaaatgattataaacatgcacctgattggaagctcatctagcagcgaggataactcatacaggggaccctcggcatccagatgcaacgtgctcgaagatgctgaggatggctcagagcgatggccaggtggggaagaagttgcatcatcagacacgttggaagctgatgagcacaaggacccactggacgcgcccgagaaggaattgtaagactcggagctatcgtcacctggtttattgcaaatctccttgtgacacgagggtactccatgaggtgctaagttgtaaggctctgccattcaatgtttgacatcaaagggacgcagcttatgtggatatatataggagaaaaagggagagctatccaagtggttggataagcgtcttgtttagtcggagaaattttgtgaactcacggccggagagcgagtgatagttgcccttactccatgtgatcttgatagattagtacattaatatttcttcatttcttgtgctattaaaaaaaaaaaaaaaaaaaaaaaaaaaaaaaaactcgaggaggggc

SEQ ID NO: 37790 - DNA, 151 bp, Zea mays
  unsure (1)..(151): unsure at all n locations
  Clone ID: MRT4577_134470C.1
cacaggttgagcccctngtagctaccacccggacaacatcctgagactccctcctacgttctccatccccgttttcctcctgcgcttgcccgatcaactcgcaacggcacccgccttctctgacacatgagcgggcgcgagccgactcagg

SEQ ID NO: 37791 - DNA, 171 bp, Zea mays
  unsure (1)..(171): unsure at all n locations
  Clone ID: MRT4577_134471C.1
tgctcgagttttttttttttttttttttttcacnannaacgaaaggcggngggcaggaattnnncacgaggatnnngngcaagttgcaaatacattgatcccttaggggttgagatggaaactgccactttggagggaggacgtgagtcanctgcacgtgccgacatacac

SEQ ID NO: 37792 - DNA, 346 bp, Zea mays
  Clone ID: MRT4577_134472C.1
tctagggttttgcttcctccccgagaaaaatcgaggcctcagccccccggagcgcgccgcgcctcgcctcgccgatcggtcgctggagatgtcccgcacgctggtgcagccggtggggcagaagcggctgaccaacgtggccgtggtgcggctgcgcaagggcggccagcggttcgagatcgcctgcttccccaacaaggtggtcaactggcgcgaccgcgtcgagaaggacctcgacgaggtgctccagtcccacaacgtctactccaacgtctccaagggcgtcctcgccaagtccaaggacctcatcacgatcttcgccaccgacgacctcctccaaatctgc

SEQ ID NO: 37793 - DNA, 798 bp, Zea mays
  Clone ID: MRT4577_134473C.1
ccgtcccctctttctcccccttcctccgccccacccgacgccctcgccgcctccagcttcttccaatccccccctttccgtctagggttttgcttccttccccagaaaaatcgaggccgaccccctaatccccgagcgcgtcgcgcctcgccgaccggtcgccggagatgtcccgcacgctggtgcagccggtggggcagaagcggctgaccaacgtggccgtggtgcggctgcgcaagggcggccagcggttcgagatcgcctgcttccccaacaaggtggtcaactggcgcgaccgcgtcgagaaggacctcgacgaggtgctccagtcccacaacgtctactccaacgtctccaagggcgtcctcgccaagtccaaggacctcatcaggatcttcggcaccgacgacctcgtcgaaatctgcgtcgagattttggagaaaggggagctccaggtttctggcgaggagagggaggcgcagctgtccgcgcagttcagggacatcgccaccatcgtgatggagaagactatcagtactgagacccggcgcccctacaccatgaacatgatcgagcgcatcatgcacgagatacactttgccgtcgatccaaaccttacctccaaggaacaggcactgagagttattaagaagctaatcgagaaccctgaatacaagataaagcgtgcaccattttgacagtgcggttcattgcacctaagtccaatcttgctggccttatggagaagcttgatgggtgggatgcaattgttctttcaaaggatgagtctgccgatca

SEQ ID NO: 37794 - DNA, 588 bp, Zea mays
  Clone ID: MRT4577_134474C.1
ggttgcacagactgggggggtcgtcagcgtcccaggccgtcagtaatcctacaccgttacattatactgtgcgtactatagtcccgtgtactacgcgtcacgagactgacatggacagccggtaatgacttgtagtcgatcgagaagagtgatgtctctagagtccccatattgacgaggggagacaccacaaccaggatcgagactgttaaggtcccgaggaagttctccagtcggtaccatactcgcggtaccgagtacactgggatgacgcttgtccgggatttgacgaaggacggggaggagaactccccgggcggtaggaagtagaaggtctaaattacagctggtaaggcgtgaaccctcctgtcaactactttgatacgggtctgctggtttacgggggagaggacgatgctaaacctcaacgctaccagcagaaccttttgagacgtgcgtacgtagtatgtgcccaggtctagggtgactaccgaacggggtagccacacgaccagttacgagatgctaaaacgggtcccatcccagactagtaggacggaaggtaggtttcccaaccgtcaagccacg

SEQ ID NO: 37795 - DNA, 277 bp, Zea mays
  Clone ID: MRT4577_134475C.1
ggaattatacaggaagcaaaaacaagagctcatggattatgtcactcaaccagcagtgacacatacgtcacgtgattcgccagcaactcattcacccgcaactcctgggagtaatctgttgggagcaacgctctacaaaggggggggaaaattttgggggggttaaggcccaatgttgttgggggcttattgcttgttctggcatcagcacgacgtaactagcttttgccacaagcttgggtgttagttgtggaggggagaggccagtgagattgtt

SEQ ID NO: 37796 - DNA, 244 bp, Zea mays
  Clone ID: MRT4577_134476C.1
gcaaatccactcctggagcccgcggaccccgagcacgcgcctgacagcccctgctggcccggcgcgcggcgtcgccaggccagctatggcccccgacccggtggccgccgagaccgcggctcagggacctaccccgcgctacttcacctgggacgaggtggcccagcgctcagggtgcgaggagcggtggctagtgatcgaccgtaaggtgtacaacatcagcgagttcacccgccggcatcca

SEQ ID NO: 37797 - DNA, 402 bp, Zea mays
  Clone ID: MRT4577_134477C.1
cggtcctaaattaccgggtcgagccacgcgtccgaatgcaagcaacaggaaacggatttcggagtcgccgcttcactgtagactggccactagttgttcacagcccgagcgtggctggattctagaaattggaaaccccactaccttgttgtcatgctgtgtgacacacgtagtacaaaggtcgtcttgaacaacatgactgcacatgcagcagagaggatatttcgtgacctgaaaatgtcagcatctgctgttctgtactgtgcctcattggcgttaacagtgcataggtatttgacatgcataaatgaccgtgcaagtatttgacttagactgacgaagacttgtacgacggcatttcatttaggaaaataagaaactccaaacagagttgaaggaaaa

SEQ ID NO: 37798 - DNA, 549 bp, Zea mays
  Clone ID: MRT4577_134478C.1
cggccgcgtgggcggacgcgtggggcaaggatgtgccgaatctatgagcatattgaaaaggtcagtggaatagggaatcagacaaaagcacaaaacagcacaacagtactggaacaagttatggcttcccatgattgtgtatcacacacattaacttggactgcagctgtgcttaaatgttaagatatgatattcctcccatttacctatcgggtccattctttgctaatatgtgatttcttatcaaatcgatatcctttttttatgttactgctaataacttttaactgcatatcactatgtgatttcccctattttctctaatgcagatgctctgttcatttaatgttaagatgttggtcctttctgccatcccagagttggttagcacatgggtgtcaggatttggcttcaaacctatcgaagatgctgaaaggaaacaacttcataatgtaaacttgatgttgtttcctggaacatccttactaacaaagagattggatggatttattatggccacaaaaccaggttcactacctgtttgcttac

SEQ ID NO: 37799 - DNA, 334 bp, Zea mays
  Clone ID: MRT4577_134479C.1
ttggacgtgcaccctagcctccactgcgctggcctcattgagaacagaaaggaaggacaatgtttcagccccaattaggcctatgcgccttcagacttcatgaggactggacgtataactgctgaaagcgtcctatacaggttcgggaccttggtcaccgatgttctcagagggaagcatatgccaccgagccatgcccttgacctgattcgggaccgcaacttcagtatgctatgacactcaagaatagagggctaatttttaaatgaggaaggaacacaaatggacctattagatgcaagaggcctttactataaaccctctgagcgaccta

SEQ ID NO: 37800 - DNA, 742 bp, Zea mays
  unsure (1)..(742): unsure at all n locations
  Clone ID: MRT4577_13447C.1
cattgggtccctcgaggccggccgggaaaaaaatatgttaccgacatttactggggggattctggaaaatgcataaccccaatgtcagaaactttcgtgtctatggcgtccaggatgtcatagaagaccacactgtcctcctcgtggctcgcgcgctgcgaaacaggcgcaaatttgctttggagatttggccgggcgtcatgtttgagaaaggtagcgaagagttcatggcattgatcggctctcctattggcaaaactattgccggctttctcatcacccacaaaccttggctcggcctgaaatatatcacgcacgtcatagttgtttgtgacggaaacgatcaagaccgttgcacaagaggtatgggtaagatgcacttattcttcaccatcgatgatgtgcatttcgagaatgaacaaggcagtgatcagagcgatgggaacggagagacgggccaggttgaaagctatgtcttccaagtgagggatgacgggaagcacgttatccgggagcacaaggtcacggcgaatctctaggatgatgtaaacacgtgggattccagggtgtgatggatgtgtgatttcgggatatagcaaacaccttcggactccagcggaactgctactcatcgcattaccgaccgccattcctcggncgtatagcgtaattaatatatctatgctgcttcaaaaatgaaaaaaaaaaaaaaaagcggccctcgagctcagctttttgtccc

SEQ ID NO: 37801 - DNA, 171 bp, Zea mays
  Clone ID: MRT4577_134480C.1
aaacacaaaaaaacagtaggacactgaggtcattaaggggcctggccaacgggaaaaagaacataacggcaaggcaggaacatggaaagggacccaagaaggagggtacaggaaagctggccgaacaccaaggggcaaccgccataaagggaggggggcaaaaagccaaaa

SEQ ID NO: 37802 - DNA, 322 bp, Zea mays
  Clone ID: MRT4577_134481C.1
tggggttttttttttttttgttgcgattttacagttcatttgtggttttattggtatatcccatattttttatacatgaaaaggggtgtgggccttaaaaaacatacctaaaaaatttttggaaggggggtggcctttacaggaaattattttgcgccctgcctacttttgggggggaaccaacggggccctaagtctgtttagcccccctcaaagatgacagaggtccactccttttaaaattaaggccaggggccccgcggtaacaaaagaaagccccccatggaaacaaggggggttatattaatcaggctttggagga

SEQ ID NO: 37803 - DNA, 168 bp, Zea mays
  Clone ID: MRT4577_134482C.1
cttcataagtagcccgtgaattttagccatttcagggaagtaacattcgcactcaaatcgcctcacatgaggctagccttagctcaatctatcctagtcctagtgtggtgctatcagcacgcaccaggttttttgatctaaaaaaaaaagaaaaaggaaaagaaagaa

SEQ ID NO: 37804 - DNA, 1621 bp, Zea mays
  Clone ID: MRT4577_134483C.1
cattgggtacctcgaggccggccgggctttcatctttgcatccatccattcatccatccccccacacagtaagcaaagcagcaggcatcttcatcaagattaaccaacaattaatcatagctactcatggagctagctactgtgtgtgtgcagtgtgcgctcgccccttttcgctagctatatacgcctataaattagaggcgcgtgtgtgtagtctttgcctcaccgagttcgtcggtcgtcacctgatattctttcgacggacacacatatatacacacacacaagcatatatacatacacgccgacatatagggatgatggcttcctctagtcctcagcgtgcagcgggcgccgccgtcgccggcgtgctgctggtggcggctgccgccctgtgctcatgcggcgccatggcgcagctgaccgcggactactacgactgcacatgccctgacgcctacaacatcgtgaagcaggtcctgatcgaggcgcacaagtccgacgtgcgcatctacgccagcctcacccgcctccacttccacgactgcttcgtccattcgcgtggggcatatctctgctgtatgcatgtcttcaattagggctgcgatggctcggtgctcctggacgccgttccgggggtggccaactccactgagaagctggcgccggccaacaacaactcggcgcgggggttcccggtggtggacaaagtgaaggcggcgctgtaggacgcctgccccggcgtcgtctcctgcgccgacatcctcgccctcgccgcagagatctcggtcgagctgtccggaggaccaaagtgggcagtgcttcttgggaggctagacagcaagaaggccgacttcaagagcgcggagaacctgccgtcgccgttcgacaacctgacggtgctggagcagaagttcgcggccgtgggcctccacaccgtgggacctggtggccctctcgggagctcacacgttcgggcgggtccagtgccagttcgtcacggggcggctgtacaacttcagcggcacgaaccggccggaccccacgctcaactccggctaccgggcgttcctggcccagaggtgcccccagaacggcagcccctcggccctcaacgacctggaccccacgacgccgaacctgttcgacaaccactactacaccaacctggaggtgaaccggggcttcctcggctcggacaagaactcaagttgggccccccgggcccgggggttcccgggccccgcctccaacaattccgcaccagccaggccgccttcttcagcagcttcgcgcagtccatgatcaacatgggcaacatccagccgctcaccgacccggccaagggagaggtctgctgcgcacagtggggtgggtattgataataaatctacgacgacgacgtgtgtagttagaaacggacgtgaatgcatgtgcatgtgcccggccgggtcgttagtacaccgacaagcaagagtgcactagcgctatggatcggactatatggtgcacaactgcacatgcatgcatataatatcagggcctcgtcgtttcgaattgtttgctgtcgacttcaattaatagtttctcataaatgtgcaataaagaggaacccaattct

SEQ ID NO: 37805 - DNA, 889 bp, Zea mays
  unsure (1)..(889): unsure at all n locations
  Clone ID: MRT4577_134484C.1
ctgngtcgtcacctgatattctttcgacggtcttgcatatatacacacacacaagcatatatacatacacgccgacatagggatgatggcttcctctagtcctcagcgtgcagccgtcgccgccgtcgccggcgtgctgctggtggcggctgccgccctgtgctcgtgcggcgccatggcgcagctgaccgcggactactacgactgcacatgccctgacgcctacaacatcgtgaagcaggtcctgatcgaggcgcacaagtccgacgtgcgcatctacgccagcctcacccgtcataaacgatttcatatatataattgctcaaacgaatatatcacactgcttgtccacctagctaataagccatgcatatcatgccaaaatatatgctacgacgacaaaaacacagggccccgcatacatgcgcctaacttgttggtgcacatgcaatgtatggatcgaatcgattattggtctaataataatacaaattacatggcgtgcacacatgcaatgcagtccggaggaccaaagtgggcagtgcttcttgggaggctagacagcaagaaggccgacttcaagagcgcggagaacctgccgtcgccgttcgacaacctgacggtgctggagcagaagttcgcggccgtgggcctccacaccgtggacctggtggccctctcgggagctcacacgttcgggcgggtccagtgccagttcgtcacggggcggctgtacaacttcagcggcacgaaccggccggaccccacgctcaactccggctaccgggcgttcctggcccagaggtgcccccagaacggcagcccctcggccctcaacgacctggaccccacgacgccgaacctgttcgacaaccactactacaccaac

SEQ ID NO: 37806 - DNA, 1639 bp, Zea mays
  Clone ID: MRT4577_134485C.1
gttggttattgtattgtttatccgattggaggagggcatgcatcttcatattaacaattaatgctactcatggagctagctactgtgtgtgtgtgctcgccccttttcgctagctacacgcctataaatttgatggctccccgccggccggggcggcaccgagttcggtcggtcgtcacctgatattttttccgacggacacacaagcatatatacatacacgccgacatagggatgatggcttcctctagtcctcagcgtgcagccggcgccgccgtcgccggcgtgctgctggtggcggctgccgccctgtgctcgtgcggcgccatggcgcagctgaccgcggactactacgactgcacatgccctgacgcctacaacatcgtgaagcaggtcctgatcgaggcgcacaagtccgacgtgcgcatctacgccagcctcacccgcctccacttccacgactgcttcgtccaagtacgggctgcgatggctcggtgctcctggacgccgttccgggggtggccaactccactgagaagctggcgccggccaacaacaactcggcgcgagggttcccggtggtggacaaagtgaaggcggcgctggaggacgcctgccccggcgtcgtctcctgcgccgacatcctcgccctcgccgcagagatctcggtcgaactgtccggaggaccaaagtgggcagtgcttcttgggaggctagacagcaagaaggccgacttcaagagcgcggagaacctgccgtcgccgttcgacaacctgacggtgctggagcagaagttcgcggccgtgggcctccacaccgtggacctggtggccctctcgggagctcacacgttcgggcgggtccagtgccagttcgtcacggggcggctgtacaacttcagcggcacgaaccggccggaccccacgctcaactccggctaccgggcgttcctggcccagaggtgcccccagaacggcagcccctcggccctcaacgacctggaccccacgacgccgaacctgttcgacaaccactactacaccaacctggaggtgaaccggggcttcctcggctcggaccaggagctcaagtcggcgccgcaggcgcagggcgtcaccgcgcccgtcgtcgaccagttcgccaccagccaggccgccttcttcagcagcttcgcgcagtccatgatcaacatgggcaacatccagccgctcaccgacccggccaagggagaggtccgctgcgactgccgggtggctaatgatgattaatccacgacgacgacgtgtgtagttagaaacggacgtgaatgcatgtgcatgtgcccggccgggtcgttagtacaccgacaagcaagagtgcactagcgctatggatcggactatatggtgcacaactgcacatgcatgcatataatatcagggcctcgtcgtttcgaattgtttgctgtcgacttcaattaatagtttctcataaatgtgcaataaagaggaacccaatttctcctgttaaaaaaaaaaaaaaaaaaaaacggccgccgcccctttttttttttttttttttttttttttttttttttttttttttttttttttttttttttagggaacagggatttagattgatgatatataatgcagac

SEQ ID NO: 37807 - DNA, 565 bp, Zea mays
  Clone ID: MRT4577_134486C.1
ggccgcccttttttttttttttttttttttttttttttttttttttttttttttttttttttttttttttttttttttttttttttttttttttttttggggggaaaaccaggggaacggggattaattaaaaattgccgggggggggaacgggttaatttctcgctaataaaaaatctggattcgggacgagctccaacagcaacatacccccaaagggcttaactttttttttggggggttgggggaggcccaactttttggcttttttttgattgcaaccagggactgaagaagaggcttttaccggaattaaaaaatgggccccccaatctgatccacatgggggaaccaactcttttactcagtctcaattaaaagaggggaaggggcttttgtttctccctttggggccggaatcctttttctgggggaggggttcggaggggtcggggacccaaaaaaaagggcttttctcccccgggggccccttttttaaatcccccccggcgcccccaccaaagggggcgccgggggcccgccccccccccccgaaaagggggaa

SEQ ID NO: 37808 - DNA, 220 bp, Zea mays
  unsure (1)..(220): unsure at all n locations
  Clone ID: MRT4577_134487C.1
cccggnntggganacccgggcgcgacccacagcgtacgcttgctccctctacatcgaccccgcttgtttcgtcttttagcgcatcaatctccggcagggggggctagccataatagagcccgtcatcaaatacagctgggtcgctctggagcgatggctgccctagcatcttttccgtacgcatcccatcgtcctccagaggtgcgtacgagacatctac

SEQ ID NO: 37809 - DNA, 1364 bp, Zea mays
  Clone ID: MRT4577_134488C.1
attgggtacctcgaggccgggcctcaccgagttcgtcggtcgtcacctgatattctttcgacggacacacatatatacacacacacaagcatatatacatacacgccgacatatagggatgatggcttcctctagtcctcagcgtgcagcgggcgccgccgtcgccggcgtgctgctggtggcggctgccgccctgtgctcatgcggcgccatggcgcagctgaccgcggactactacgactgcacatgccctgacgcctacaacatcgtgaagcaggtcctgatcgaggcgcacaagtccgacgtgcgcatctacgccagcctcacccgcctccacttccacgactgcttcgtccagggctgcgatggctcggtgctcctggacgccgttccgggggtggccaactccactgagaagctggcgccggccaacaacaactcggcgcgggggttcccggtggtggacaaagtgaaggcggcgctggaggacgcctgccccggcgtcgtctcctgcgctgacatcctcgccctcgccgcagagatatcggtcgagctgtccggaggaccaaagtgggcagtgcttcttgggaggctagacagcaagaaggccgacttcaagagcgcggagaacctgccgtcgccgttcgacaacctgacggtgctggagcagaagttcgcggccgtgggcctccacaccgtggacctggtggccctctcgggggctcacacgttcgggcgggtccagtgccagttcgtcacggggcggctgtacaacttcagcggtacgaaccggccggaccccacgctcaactccggctaccgggcgtttctggcccagaggtgcccccagaacggcagccccttggccctcaacgacctggaccccacgacgccgaacctgtttgacaacccctactacaccaacctggaggtgaaccggggcttcctcggctcggaccaggagctcaagttggccccgcaggcgcagggggtccccgcgcccgttgttgaccagttcgccaccagccaggccgcctttttcagcagcttcgcgcagtccatgatcaacatgggcaacatccagccgctcaccgacccggccaagggaaaggtcccctgcgactgccgggtggctaattatgattaatccccgacgaccacgtgtgtagttaaaaacggacgtgaatgcatgtgcatgtggccggccccccccttagtacaccgacaagcaagagtgccctagcgctatggatcggactatatggtgcacaactgcacatgcatgcatataatatcagggcctcgtcgtttcgaaaaaaaaaaaaaaaaaaaaaaaaaaaaaaaaaaaaaaaaaccccccacac

SEQ ID NO: 37810 - DNA, 283 bp, Zea mays
  Clone ID: MRT4577_134489C.1
tcccactcgttctaaaaaaacaaacaatactttataaataaaaaaaaaaaaaaaataaagaaagccaatattaaacaacaacaactactaaaaactatcctacaccaaaaacccaaaataattcttccaaccattctccatcaactagcaccaccatttgttccacttttacctaactatttacagcctgttacatcttttttactagctcctcattcagccctaggtgctttatgacctacagtgatctctcatgacatccaagctttcttacatcaccatt

SEQ ID NO: 37811 - DNA, 286 bp, Zea mays
  Clone ID: MRT4577_13448C.1
gaggcaaaaagcccttttttgggacattccaccgggctcaagtcaggataattttacccaaggggccccactggtacaaaactggttggcccaataaaaaacaagggcccccaaattccggcaactttgggaaaaaaaaacccttgtaaaaagggttttgaaaaattaggacccggcctttaaaccacaaaaacttgggttggaaagaaaagaaaaaaacccgaaaggcctaaaaccaaaacccaacccggcccttttttttttccctaaataaaaaatgtttacc

SEQ ID NO: 37812 - DNA, 193 bp, Zea mays
  Clone ID: MRT4577_134490C.1
cccacgcgtccgcccacgcgtccgaaaaaaaaaaaaaaaaaaaaaaaaaaaaaaaaaaaaaaaaaaaaaaaagggcgggcgatctaaaaggatccgggggttcgtactcgtgcatccaacttactacctcttgtatggggccacctaaatttattttactggcccctaatttacatcgactggactgggaaaa

SEQ ID NO: 37813 - DNA, 556 bp, Zea mays
  Clone ID: MRT4577_134491C.1
gccacggcaccgcaccacacgcagggcggcagtagcacaccagcagcgcaaccggccgcgcgtgatcgatgggcaagtgcgtgaggatccgcggcagcagcaagccgcgcgccgccgccgccgcggcggcgtcgtgcctcacgctgtgcagcgggcgccgcgtgccgccgtcggaggcgtcggcggcgtgcagcccgaggacgagaagcaggccgcggcgccaccgcggggcaggcctccggcggtggtgcggcgccaaggagagcgcgtacggcggcagcccccggcgccacaggggcgagggcgaggccgacgcgcggagcccccgtggccgggtgctcggtgtcggtgcccgccagcagcagctctgcgccgacgacgggctcggccagcagcacgaggaggaggcgtctgcgacgatggccggcgactgcgacgacggcgcgggcgtggcgaaagtgaataaggcgaataaacacgagaacgacgagtgcggctgccgcgtcgtcggcggcgtcgccagccagacgccgtcgccgtcgccgtcgccggcacc

SEQ ID NO: 37814 - DNA, 341 bp, Zea mays
  Clone ID: MRT4577_134492C.1
aattcctggagcgacccactcctcgcacgcgtttctatactgatcaagttttatcttttattccatcaacatctacaacggtggtttatactgatcctatgacgactctgataaacatttagttacaatacattatcaacacttctctttctccttcaacaactctgagaattacatcatgaaaggtataataaacctccaagaaaagcaaatgaagaactttacgatacactatgcggacggtaatcttctatgactaattatatcctccactttcacttaccactctcttcgactaacttttgaacatagatatccattgcaaatccaaacctaaaatc

SEQ ID NO: 37815 - DNA, 220 bp, Zea mays
  Clone ID: MRT4577_134493C.1
acgacgcgtccgctcacacctccgctttagatgcctcagctgatctgatcacactctgatggctttacacaggaactagacggctctcccatggacaaatctaactaccacacgacgcatatccaagccttgaaatcacacatcaactgcatcttatagcccaacctctactatcaatacaactatactataacctacatggacgtagccactaacataa

SEQ ID NO: 37816 - DNA, 245 bp, Zea mays
  unsure (1)..(245): unsure at all n locations
  Clone ID: MRT4577_134494C.1
atgtggtagtcgtgtgtgggagagtcaccatacaagactgggctaccgatagacttggatcacgttactgatgcgattctaggaagactcaaggnattacattacttacacgtggctctaatcagagaaaatatgacgaggtgtgcttagtattgggcgttagagtgcgagtagattgatgtgtagtgctactattgagggagtgcaattaatttttgggatttatagaattgtgtgaatggggt

SEQ ID NO: 37817 - DNA, 373 bp, Zea mays
  Clone ID: MRT4577_134495C.1
aagagaagaatgtttgcttatttatcaaatatatagggagcaagaaccagaagaggtgtacaatatccttccaatagggtctcagaaaatcagtacaaaacttacaatccagtagcaacataggagaaacaattatttcgcactgcaaatgaacttcggtaggtaacagtggatcaccgttgcgatagtcctgaaacaaaaactcctagccacattgaaaacaaaataacagcgcaacaggaattcactcctgtggagaatatatgttggtaggtactggttttaggctcttagcctatgagcatcttgttatcttccaagaaactgtaggtgggcacctcaaggttgtacggggcagggcccttgcggattc

SEQ ID NO: 37818 - DNA, 578 bp, Zea mays
  Clone ID: MRT4577_134496C.1
cccccaccccaccccaccctcaccctacccactcttctgatcttctccatgtgccgcctccgtctcctcctccgccccatctcgtggcctcatctccatccccttccgcctcccatgtgccgactacgactcctccttaccttcttcctcctcctccgacccatcccacacgcgttccaaccgggcagacactctccggcgctgcaatgcgctctcaactacacggagctgctccccttcctcgcgccgccgctgccgagggacgacgcctcccgctgcgcgggcgccacgcagtccgacgcctttctcctctcgctacacctcgcggccacatagaacttcgtgctcccacccgacgcctcctactgcctgtacccgatacgcgccgagctctcctacccggtccccacgtccgactgcggtctctagggcctcaacaccgccctcgcctccccggcctgtggcaacgcatacacggtcgtcgactttgacgcgctcgttccgcccagctcgagcgtggacatcgacatgcagatgcgaccgcgaactctccgccgtccctgactggaccgcctgct

SEQ ID NO: 37819 - DNA, 550 bp, Zea mays
  unsure (1)..(550): unsure at all n locations
  Clone ID: MRT4577_134497C.1
ttntttttttttttttttttttttttttttttttttttttttttttttttttttttttttttttttgggtttttatataatattaatggattttttttgggcaagaaaaaaaaaagttccatccaaaatgcaacaagaaaaaaaaaaaaggagatgcgggaataaaaaaaaaaaggccaagggggggggggaataaaaaagaagaaatggggtggaaaatttttataaaaaaagaggaaaccgggaggggaaaaaagaggagaaaaaagggggccaccaggggggggaaaaaggggacaaacaactgaggcccccgcccaaagcaatgcgagaaaaaaaggagcaactggcggcgaaagggaagggggggaaaaagcagccaaaggggggaaggaaagaggacgctttgggggaacaaacggggaaaaggctggaccaccctgggaaagaaaaatgtgataagccgccggacccggttggtccaaaaataggacgggccatacaaaacctgggggaacattgtagaagaggggcctcaaaggggccgcca

SEQ ID NO: 37820 - DNA, 4819 bp, Zea mays
  Clone ID: MRT4577_134498C.1
tgggtacccccgggggtccccgggaaaagccccgtccaccaaaacccgcatccataaacaagaaaaagaaaagaaaacccctgttgccagcgacagaagaagaaggggccccttctccttggttgcgttgcgcctccctcctgtctgcgtgcgtgcaatcgacgcagaggcgcgggcgctcgcaccaccacaaccacgacccgatggctttcatgcgctcccgctcaaatgcatcttctggcatgggagttgctcctaacattagggagacattcgttgagcttcaaatgaagaaggcattccgatatgttatcttcaaaatcgaagagaagcaaaagcaggtggttgtggagaagacaggggctactactgaaagctatgatgattttttggcctctctcccagagaatgactgccgatatgcgctgtatgattttgattttgttactggggagaatgtgcagaaaagcaagattttcttcattgcctggtccccatcgacatcccgcatacgtgctaagatgctgtactccacgtcgaaggaccgcatcaagtacgagcttgacgggttccactacgaaatccaggcgaccgacccatcggaggtggacatcgaggttctccgggagcgggctcactgaagctggttctccttttgaagggacctgtggaggacctaaacctccaaccaataaacaaggcaaggagccgggcggccccacaccaaaacccgcatccataaacaagaaaaagaaaagaaaacccccgctgccagcgacagaagaagaaggggtcccttctccttggttgcgttgcgcctccctcctgtctgcgtgcgtgcaatcgacgcagaggcgcgggcgctcgcaccaccacgaccacgacccgatggctttcatgcgctcccgctcaaatgcatcttctggcatgggagttgctcctaacattagggagacattcgtcgagcttcaaatgaagaaggcattccgatatgttatcttcaaaatcgaagagaagcaaaagcaggtggttgtggagaagacaggggctactactgaaagctatgatgactttttggcctctctcccagagaatgactgccgatatgcgctgtatgattttgattttgttactggggagaatgtgcagaaaagcaagattttcttcattgcctggtccccatcgacatcccgcatacgtgctaagatgctgtactccacgtcgaaggaccgcatcaagtacgagcttgacgggttccactacgaaatccaggcgaccgacccatcggaggtggacatcgaggttctccgggagcgggctcactgaagctggttctccttttgaagggacctgtggagggccgtgaaccttcagccagatgcaaattcaattatcaacgatgaagctcccgccgtggtgtttgttaataagttcctgtaagcatatcatttagtcgctatgcatgacactagctgaagcgctatctaagctctattggtatgaggtttggttgccgtgttgccgagcctgtaaacgaagcaagatttgcaaacttgttatattgtggtattgatgatactggattactggctgtgggttgttcgggaaaaaaaaaaaaaaaaaaaaaaaagtgggttcaacagccaagagtagtggtattcagtgcttcaagtgtggaggtcgtggtcatgtcataaaagagtgtccaaataatcgtgtgatccttgtgactgatgatggagaatatacatcagctagtgaagaagaagctgaagcaggaaatgaagatgacattgataaatctgaagaacatacgggatgtgaatttgagcatggtactactcttgtggttacacaaatcttgagtgttcaaatgaaagaagctgaaattggacaacgacataatctttttcaaacgcgagcaaaagtgcaagacaaagtagtaaaggtgatcattgatggagggagctgccataatcttgcaagtcgtgagatggttgaaaagcttgatatcaagattggttataaggtgaaagtttcgttcaagattggagagtatgttgacacagtggagtgcgatgttgcacccatgtctgtgtgtcacatgctgctaggaagaccttggcaatatgaccgatattctcagcattgtggaagaacaaatcaatacacgctagatctgaaagggagaaagtttgtactcaagcctatgacccctcaacaaatcatggttgaacatttacaaaagaaaactgaaattagtgcagcaagtagaggaggagaagagcaaaataaattgagtgccatccacaattcggactttgaagacgtgtttccacaagaaacaccggctggactacctccaattcgagggattgagcatcaaatcgatcttattctaggggctgcacttcctaaccgtccaccatatcgaaccaatcctgaagaaactaaggaaatacaaaggcaagtgcaagaacttcttaataaaggttttgttcgtgaaagcttaagcccttgtgttgttcctgtgattttagtacctaagaaagatggatcttggaggatgtgtgttgattgtagagctataaataatattaccgttcgctatcctattccacagctagatgatatgcttgatgaattaagtggttccacattttttactaaaattgatttgagaagtggataccatcaaataagaatgaaaactggagatgaatggaagactgcatttaaaacaaaatttgggttgtatgaatggttagtgatgccctttgggttgactaatgctcctagtacttttatgagattaatgaaccatgtcttaagaactttcattggaaaatttgttgttgtctacttcgatgatattctaatttacagcaagtcttttgatgaacatgtgaaacacattcgacaagttttagatgagcgtagaaaggagaaattatttgctaatcttgagaagtgcagtttttgcacagaccatgttgtgtttcttagctttgttgtttcagcaaaaggaatagaggtggatgaatccaaggtgaaagccatcaaggattggccagctccaacgaatgtaagtcaagtaagaagttttcatggtcttgctggtttttatagaagatttgtgcgagattttagtaccatcgcttcccctttaaatgaattgacaaagaaatgtgttgaatttaaatggggaaactcacaagaagatgcttttcaagaattgaagaaacgtttgactgaagcacctgtacttattcttcctgatttcactaaaacttttgaagtagaatgtgatgctagtgggattgggataggaggagttttaatgcaacaaggaaaacctatagcatattttagtgaaaaattgggaggtgctcaattaaattattctgtgtatgacaaagaattgtatgctttggtccgagcgcttgaaacatggcagcactacttatggccaaaagagtttgttattcattccgatcatgaagctttgaagtatttgaaaggacaagccaaactgaaccgtcgccatgccaaatgggttgagtttatcgaaacatttccatacattgtgaaatataagaaaggtaaggacaatgtggtcgctgatgccttgtctcgaaggaatgtgttgttgaatcaactagaggagtcacatggaggcggtctaacaggtcattttggacaaaagaagacttatgaaatgctcagtgatcatttctattggccaaagatgaggagagacgtcatcagatttgtggagcgttgtgtcacctgtcacaaagctaaattttcaaaaatggctcattttatcccatgcaacaagagcgacaatgcttcacatgttgccaatttgtttttcagagaaatcttgaggctacatggagtgcccaagaccatcgtatctgaccgtgatgtgaagtttgtgagctatttttggaaaacaatgtgggcaaagcttgggactaaacttttgttctccacaacatgccacccccaaactgatggacaaactgaagtggtgaatcgtacattatcaatgctgctgcgaacaatggtaaagaagaacttgaaggattgggaggaatgtttgccacacgtggagtttgcttataatagggcagtacattctacaactaatttatgcaccttcgaaattgtatatgggttcaaatctattgctccgatagatttgttgccccttccattgcaggaaagaactaatatagaagcttccaagtgtgctgcctatataaaaaagatacatgagaagactaaggaagcaattgagctcaaagcagtgcgcaaggctacaagcatgaacaagcataggaagaaagtgttatttgaaccgggggacttggtttggattcacttgcgcaaggagcgttttcctgagcagcgcaaatccaaattgatgccacgaggggatggtctatttcgtgtttttgccaagatcaatgataatgcatacaagatagatcttccaccaagctatggcgtgagcaacacgttcaatgttgctgacctcttaccatatacaagtgaagacacttcagagtcgaggacgactccttttcacggggaggaggatgatacgaccacgacattaagaaacacgttacaacccccaaggcatactacatcaactcaggtcccatcgacatcccgcatccgtgctaagatgttgtactcgacctcgaaggaccgcatcaagtatgagctcgatgggttccactacgagacccaggcgaccgacccatccgaggtggacattgaggtcctgcgggagtgggctcactga

SEQ ID NO: 37821 - DNA, 2247 bp, Zea mays
  Clone ID: MRT4577_134499C.1
atgccaaaatttgatggtagatctgaccctgaagattatttcacatgggaattgaaggtggagaaaatcttccgcctacataattatttagaggagaagaaacttgcaatggcatctcttgagtttgaaggatatgctctgatttggtgggagcaacttcttagtgatcgtgaagaagatggagatgaccctattattacttggcaagagatgaggcgagaaatgagaattcgttttgtgacgaagcattatcggcgtgatctttttgataaattgcagaatttgagtcagggaagtttctctgttgaggagaattataaggagatggagaaggccatgattagagccaatgtgtatgaagatgaagagcaaaccattgcatccaccaaagctgaacgtcagctgcaacaagatgctaagagcaccaagcccttgtcatatggtgcacgaaccatgactggaggaagcaaatcaatctcaaggtttactgctgcatcctcagcgacaaaaggttcaattggaggcttgcaatccaatattcaaggcaattctagtgcaaagaacggtgttgctccaaacacgagttataaaccagcagcatccacttcaacatcagtaggttcaatagccaagagtagtggtattcagtgcttcaagtgtggaggtcatggtcatgtcataaaggagtgtccaaataatcgtgtgatccttgtgaatgatgatggggaatatacatcagctagtgaagaggaagctgaagcaggaaatcattgtggaagaacaaatcaatacacactagatctgaaagggagaaagtttgtactcaagcctatgacccctcaacaaatcatggctgaacctttacaaaagaaaactgaaattagtgcagcaagtagaggaggagaagagcaaaataaattgagtgccatccacaattcggtgagcgagtgctacaagccaaattcaagagataaaaggaaggaagagggagaacatctagttatgctagccacaaaatctgagctgagagaagtgaggaacaacccatatcaagtgctctttgtacttgtgaacaaagatgctttgatttctcctaacgacataacatctcttcctagtgttgtggctgatcttttgcaagactttgaagacgtgtttccacaagaaacaccggctgtactacctccaattcgagggattgagcatcaaatcgatcttattccaggggctgcacttcctaaccgtccaccatatcgaaccaatcctaaagaaactaaggaaatacaaaggcaagtacaagaacttcttgataaaggttttattcgtgaaagtttaagccattgtgccgttcctgtgattttagtacctaagaaagatggatcttggaggatgtgtgttgattatagagctataaataatattactgttcgctatcaccatcctattccacggctagatgatatgcttgatgaattaagtggttccacaatttttactaaaattgatttgagaagtggataccatcaaataagaatgaaaactggagatgaatggaagactgcatttaaaacaaaatttgggttgtatgaatggttagtgatgccctttgggttgactaatgctcctagtatttttatgagattaatgaaccatgtcttaagaactttcattggaaaatttgttgttgtctacttcgatgatattctaatttacagcaagtcttttgatgaacatgtgaaacacattcgacaagttttagatgagcttagaaaggagaaattatttgctaatattgagaagtgcaatttttgcacagaccatgttgtgtttcttggctttgttgtttcagcaaaaggaatagaggtggatgaatccaaggtgaaagccgtcaaggattggccagccccaacgaatgtaagtcaagtaagaagttttcagggtcttgctggtttttatagaagatttgtgcgagatttcagtaccatcgcttcccctttaaatgaattgacaaagaaaggtgttgaatttaaatggggaaactcacaagaagatgcttttcaagaattgaagaaacgtttgactgaagcacatgtacttattcttcctgatttcactaaaacttttgaagtagaatgtgatgctagtgggattgggataggaggagttttaatgcaacaaggaaaacctatagcatattttagtgaaaaattgggaggtgctcaatgtaacacctcaggtgttacttag

SEQ ID NO: 37822 - DNA, 637 bp, Zea mays
  Clone ID: MRT4577_13449C.1
cattgggtacctcgaggccggccgggagacatacaatcaaaggatgccatagcatcatcctctccactgagtcgtgcatacgcgtacatacgacgtacagatcaacggttgaccactcctgcgcgcggcgacgtgtgctacctcaccacgacaacatgggctcggcgcagaatatctgacagagatggcgaagacctgctgaatccctgctacatatcgctggggccgaaccatgtgcagagtatccccatccggtgcagaaatggcctcgactggatcgccttctcctaccgcgaccatagagggaagctgcacaccgacgctccctgtgtaggaaactgcaaatgatagggcacggagacgatcacactggaggcctcgtattatgtaacactgagtgtgtcatgaaccacgcgcccgatcatgatcatgaacgtggatcgctgcatcacctccatcaaagccgtgagcaagctcctcagctacctgcctttctcacacagtgtgaacagcacgcaccacagattgcccgtgatcgacagtatcaccatattgatgttcacacgcgcactgtatcttctcgaacccatcaggttctacataataccttatgccctcactgctatagaatcaacta

SEQ ID NO: 37823 - DNA, 3385 bp, Zea mays
  Clone ID: MRT4577_1344C.1
tcgagccggccggacctccagtcccaggagcgtggcctcactctcctcgtcgcatcccccctcctcatcttcgcagcgcgggcggcggcaatggcgatggcctccacctacgcgccgggcggaggcgcgcgggcgctcgcgcagggtagatgcagggtccgcggtcccgcggggctgggcttcctcggcccctccaaggccgccggcctcccccgccccctcggcctcgccctcgccaggcggatgagctgccccgtcgcggtggccgccagcttgttatgcacagcatcggaacagtgagataaccgaggaaatgatgcaggagatggactacaatgctgaccgtgcatggtatgactgcgaagaacacactaccatgtttgatggtgatcattctatgtatcttggagatgataattcctacaaaaagagggaagcagagatgccgaagaagctgactcgtagagatggtagcctgatgacccttgctcaaagcaaaaagatgtcacagatgactgctgataatgctcagtgggaggatagacaattgttgagatctggagctgttaaaggaacagaagtgcaaactgaatttgatgatgaggaggaacggaaagtaatacttcttgttcatgacacaaagccccccttcctggatgggagagttgttttcacaaaacaagcagaacctgtaatgcctctgaaggacccaacatctgatatggctattattgcacgcaaaggttctagtctggttagggaaatccgtgaaaagcaaagcatgaacaaatcaaggcaacgattttgggagcttgctggatctaagcttggcaatatcttgggtgttgagaaaacagctgaacaggttgatgcagatactgctgttgttggtgaccaaggtgagattaattttaaagaagaagcaaagttttcacaacatttgaaggataaagcagaagctgtcagtgattttgcaaaatcaaaatccctttctcaacaaaggcaatatcttcccatatttactgtccgggatgatctgctacaggttgtgcgtgaaaatcaagtggttgtggttgttggtgaaactggttctgggaagactactcaactgactcagtatctgcatgaggatggatatactaccacaggagttgttggttgtacccaaccaaggcgtgtggctgccatgagtgttgctaagcgagtcagcgaggaaatggagactgatctgggagataaagtcggatatgccatacggtttgaggatgtcactggtccaaacactataataaagaatattttatgggcctgtttgcagtatatgacagatggagtgcttctccgtgaaaccttgaaagatgctgacctcgacaaatatcgtgttgttgtcatggatgaagcacatgaaagatcactcaacactgatgttttgtttggtatactgaagaaggttgttgcacgtagacgggattttaaactaatcgttacatctgcaaccctaaatgctgacaagttctccaagttcttcggaggtgtgcctgtattccatattccgggtcggactttcccagttaacattatgttcagcaaaacaccatgtgaggactatgtggaagctgcagtgaggcaggccatgactatccacataaccagcggccttggtgatatcctaatcttcatgactgggcaggaagaaattgaggctacctgctatgcgcttgctgaacgcatggaacagttaatatcgtcatccaccaagactatccccaagctagagattctgcccatctactcacagttgcctgctgacttgcaagccaagatttttcagaaggctgaagagggcgctcgcaagtgtattgttgctaccaatattgctgagacctcattaacagttgatggtatcttctatgtcattgataccgggtatgggaagatgaaggtgtacaacccgcggatgggtatggacgccctccaggttttcccagtcagccgggcagctgccgaccagcgtgcaggtcgggcaggaagaactggccctggcacatgctacagattgttcacagaatcagcctaccagaatgagatgctccctaaccctgtgccagagatccaaaggactaacctggggaatgtggtgcttttactgaaatccctcagagttgaaaacttgctcgactttgactttatggacccaccgccccaggagaatatcctcaactcaatgtaccaactctgggtgttaggtgcattgaacaatgttggtggccttacagaaattggctggaagatggtggagttcccgttggatccaactctggcaaaaatgcttcttatgggggagcagctagagtgccttgatgaggtgctgaccattgtatccatgctatcagtgccgtcagtcttcttccggccaaaagaccgagcagaggagagtgacgcagcaagggagaaattctttgtcccagagtctgaccacctgacactcctgaacgtgtatcttcagtggaagtcgaatcagtatcgaggcgattggtgcaacgaccacttcctccatgtcaagggtctccgcaaggctcgtgaggtgagatctcagctgctggacatactgaaaaccctgaagatccccctgacatcatgccatatggaatgggacgtggtgaggaaggctatctgctctgcgtacttccacaattccgcccggttgaagggtattggggagtacgtcaactgccggaatgggatgccgtgccacctgcaccccagcagtgcgctatatggccttggctacactcctgactatgtcgtctaccatgagcttgtcctgaccaccaaggagtacatgcagtgcgtcaccgcagttgatccacagtggctagcggagatggggcccatgttcttctctgtgaaggagacagacacctctcttcttgaccacaagaagaggcagaaggaagagaagacggcgatggaggaggagatggagaagctgaggcggcagcaagcagaggccgcgcgcatggagaaggagaaggaacgggagaagagagctaagcagcagcaacaggttgctatgcccggcctgaagaagggtgcgacttatctgaggcccaagagaatgggtctgtagataagacctgatataacttaactgtctccggtgattttgttactaggctgagggaacttgtaatgtgtagcctgctcaagcagcatgtaaaacaacacgtcaatgtgaatgtatacaacatcgacatgtgaaaaaatgaaaagaaaaatagagtgttgtcgacatagagtttgattttttgctgagttagctcttaaaagtatgcagtcattatgtttgatatggtatgtcctcttaatgaaaaatatgattctt

SEQ ID NO: 37824 - DNA, 907 bp, Zea mays
  Clone ID: MRT4577_134500C.1
agaggaggagggggggtctcttctccagttctcctttgcttgcgcctcccgtctgcgtgcgtgcgatcgacgcagaggcgggcgcgggcgctcgcaccaccccgatccgatggccttcatgcgctcccactcaaatgcatcttccggcatgggagttgctcctaacattagggagacatttgtcgagctccaaatgaagaaggcataccgatatgtcatcttcaaaatcgaagagaagcagaagcaggtggttgtggagaagacaggggctactactgaaagctatgatgactttttggcctctctcccagagaatgactgccgatatgctctctatgattttgattttgttactggggagaacgtgcagaaaagcaagattttcttcattgcctggtccccatcgacatcccgcatccgtgctaagatgctgtactccacctcaaaggaccgcatcaagcacgagctcgacgggttccactacgagatccaggcgaccgacccgacagaggtggacattgaggttctccgggagcgggctcactgaagctggttcgcctttgaagggacctgtggagggccgtgaaccttcggtcagatgcaaactctattatgaaatgatgaagctcccaccgtggtatttgttaataagttcctgtaagcatatcatttagtcgcgatgcatgactctagctggtgaagcgttattgaaagctgtatcggtatgaggtttggttgtcgatactgtaaacgaagcaagatttgcaaacttgttatattgtggtattgattatactggattactggcctaagctctattggtatgaccgtattaggtttggttgccgtgttgccgagcctgtaaacgaagcaagatttgcagacctgttatactgtggtattgatg

SEQ ID NO: 37825 - DNA, 1908 bp, Zea mays
  Clone ID: MRT4577_134501C.1
gcatgcacgcgtacgtattttttggacctctagacggacgcccggcggggggggggggttttttttttttttttttttttttttttttttttgggtaatgtatgagttacatatatccacatgtttatatacaaaaggcaataaagcaccaatggtacgtgaaaagcacattacaaaatgccaacgcgaagatacttatttcagacattaacagggccgaatgcctatctgaattgtaaggttatacatatacatatacgtaacactggcatcgacacgatgggacacccatcgtgtcgagatcatattgctctgagcttaagctgcgcaccgtgcataggatgcaaggttatcatggtatgcggcgcatgagcataggatggcgcgagcccgaactcaaaccgctggaggatcatgcagagcgccatcttggcctccagcagcgcgaagttctggccgatgcagatgcgcgggctccaaccgaacgggaggaacgcgccggggtccttggaggccctggacacgccctcggagaacctatcgggcctaaactcgcgcgcgtcgcctccccagatgtccgggtcgtggtggatgagcagcacgggcagctccaggatcacgccggcggggtaggtgacgcctccgacctccatctccttgtacgtttgtcggacgacggaggtggccggcgggtacagtcggagcacctcgtagagcaccatggtcacgactttgaggcggcttaggccgtcatactcgggcttgtcgtccctgccgaacagagccgtcacctcctccctcgcgcggtcctgccactccgggtgcatgctgagcaccaccatcgtccacatgagcagcaccaacgtggtctccatcccgacgaagtagaacaccttgcactcctcgatcacgtcttcgatcgtcatccccatgtcgtctctcatgtttgtctccagcagtagacccaccaggtcgtctttggtgccctcgccttgttccatcgcctggatcctcttcccgattatctctcgcaggattgactccacctccctgttgttcctgcgcatcttcctgttgttcgcggtaggcaagtacatgtagccggggatcatgatcttccgaatgttggtcatgacaagcgaagcttgctcgacctgtagctggaagatccttctcccttcgctgtagctgctgctgaacacggtgcgagaaatgatgtctcccgtcaggttctgcagctccggccagacgtccagctcgcacgagccgtcggagccaagggactccgccgcccacctgctcaccagctcctcgcagcacgtagaaaacgccggcagcatgcgcttgagcttctcaagatggaacgcatggttgaggatcctccggtgcttgacccacttctcgccctcgtggctggccacgccggagcccagcatcttggacagcgccgggaccttgagcttctcgaagtggccgaacttgttggacagcacgtccttggccaggtccgggtcgacgatggtcaccttggggctggggccgaaccaggacatgctcgtcctcccgtgctccaggaccagccggtgcatgaacggcgtgactcgcggcgcggtggaggctagcaagcggcgggggccgcagggcggtggtggccgcgggtggaggcgagcaaggagcgggagcgctggcggccgccggggtgctggagattaggttgccacccctccacccgggccgtgcagctcgcggcgaaggccggcaacatccgctgggggccctcgaggtggaacgcaggacggggagtgccgccgcgctgggccggcgcgtccaggtcgggggtgtcgagggcggtgccatggaccccgtggggaggcgcgacgtgggctccacgccggggccgaagaagag

SEQ ID NO: 37826 - DNA, 882 bp, Zea mays
  Clone ID: MRT4577_134502C.1
atgccgagaaatatggtaaatcggcagttttgccacactcaattaaattattctgtgtatgacaaagaattgtatgctttggtccgagcgcttgaaacatggcagcactacttatggccaaaagagtttgttattcatttcgatcatgaagctttgaagtatttgaaagggcaagccaaactaaaccgtcgccatgccaaatgggttgagtttatcgaaacatttccatacattgtgaaatataagaaaggtaaggacaatgtggtcgctgatgccttgtctcgaaggtatgtgttgttgaatcaactagaggagtcaaatggaggaggtctaacaggtcattttggacaaaagaagacttatgaaatgctcactgatcatttctattggcccaagatgaggagagacgtcatcagatttgtggagcgttgtgtcacctatcacaaagctaagtcaaaattgaaccctcatggtttatatactcctttacccactccaaaaattccttgggaagacataagcatggattttgttttagggctgccgatgactcgaaaaaagagagattctatttttgttgtggttgatagattttcaaaaatggctcattttatcccatgcaacaagagcgacgatgcttcacatgttgccaatttgtttttcagagaaatcttgaggctacatggagtgcccaagaccatcgtatctgaccgtgatgtgaagtttgtgagctatttttggaaaacattgtgggcaaagcttgggactaaacttttgttctccacaacatgccacccccaaactgatggacaaactgaagtggtgaatcgtacattgtcaatgctggtgcgaacaatggtaaagaagaacttgaaggattga

SEQ ID NO: 37827 - DNA, 727 bp, Zea mays
  Clone ID: MRT4577_134503C.1
ccgtggtgaccggagggaaccgggggatggggctggagatatgccggcagcttgcggggcacgggctcgccgtcgtcttgacggcgagggacgacaagaggggcgctgaggcagccgaaacgctccgggaggaggggctatcggacgtcgcgtttcatcagctggagatcagcgagcccgccagtgccgctcgtctggctgctttcgtaaagaagaagttcggcaagcttgacatactggtcaacaatgccggagtgctcggggtgaccacggacgtcggcgacccggcgacccttcaggaaacgcttgcaggcaaggatgggatggagagagccgaatggctgaggcaacggaccacacagaccacccaggatgcagaggactgcctgaggatcaactaccacggcaacaagaccgtcacggaagccctcctcccgctcctccgatcatcctccgacggcagaatcgtcaacgtaacctcagcctgggggctgctcaggtatttcagcggcgacgagctccggcgggagctggacgacgtcgcaaacctcacgacgcagcggctcgacgagatgtcggacctgttcctcgaggacctgggcaagggcaatggcgcgctggagcgccgcgggtggccggccgacccggtctacgcggcctacatggcgtccaaggcgctggtgtgcgcctacaccagggtgatcgccagggaggagggcgccgcgct

SEQ ID NO: 37828 - DNA, 298 bp, Zea mays
  Clone ID: MRT4577_134504C.1
acttttgaacaaagatgttttgatctctcctaacgacataacatctcttcctagtgttgtggctaatcttttgcaggactttgaagacgtgtttccacaagaaacaccgactggactacctccaattcgagggattgagcatcaaagcgatcttattccaggggctgcacttcctaaccgtccaccatatcgaaccaatcctgaagaaactaaggaaatacaaaggcaagtgcaagaacttcttgataaaggttttgttcgtgaaagcttaagcccttgtgttgttcctatgatttta

SEQ ID NO: 37829 - DNA, 155 bp, Zea mays
  Clone ID: MRT4577_134505C.1
cccgggaaacgctgtacttgtaattctgattaatacagggaacaaacggaaaaatatttcaaatcttgggtcgccaaacattacaaacctaaaaaaggagaaaagggttaccgcttccacctgaaagttatcagggttattgcaaaatcaggggc

SEQ ID NO: 37830 - DNA, 960 bp, Zea mays
  unsure (1)..(960): unsure at all n locations
  Clone ID: MRT4577_134506C.1
ttgcgttgggaccctcgactccggccggggccaacaccaaaacccgcatccataaacaagaaaaagaaaagaaaacccccgctgccagcgacagaagaagaaggggtcccttctccttggttgcgttgcgcctccctcctgtctgcgtgcgtgcaatcgacgcagaggcgcgggcgctcgcaccaccacgaccacgacccgatggctttcatgcgctcccgctcaaatgcatcttctggcatgggagttgctcctaacattagggagacattcgttgagcttcaaatgaagaaggcattccgatatgttatcttcaaaatcgaagagaagcaaaagcaggtggttgtggagaagacaggggctactactgaaagctatgatgattttttggcctctctcccagagaatgactgccgatatgcgctgtatgattttgattttgttactggggagaatgtgcagaaaagcaagattttcttcattgcctggtccccatcgacatcccgcatacgtgctaagatgctgtactccacgtcgaaggaccgcatcaagtacgagcttgacgggttccactacgaaatccaggcgaccgacccatcggaggtggacatcgaggttctccgggagcgggctcactgaagctggttctccttttgaagggacctgtggagggccgtgaaccttcagccagatgcaaattcaattgtcaacgatgaagctcccgccgtggtgtttgttaataagttactgtaagcatatcatttagtcgctactcgctatgcatgacactagctggtgaagcgctatctaagctctattggtatgaccgtatgaggtttggttgccgtgttgccgagcctgtaaacgaagcaagatttgcagacttgttatattgtggtattgatgatactggattactggctgtgggggttgttcgggaanaaaaaaaanaaaaagcgg

SEQ ID NO: 37831 - DNA, 1038 bp, Zea mays
  Clone ID: MRT4577_134507C.1
aaaatgggaaactccaagccgggccgggacccaccaaaacccgcatccataaacaagaaaaagaaaagaaaacccccgctgccagcgacagaagaagaaggggtcccttctccttggttgcgttgcgcctccctcctgtctgcgtgcgtgcaatcgacgcagaggcgcgggcgctcgcaccaccacaaccacgacccgatggctttcatgcgctcccgctcaaatgcatcttctggcatgggagttgctcctaacattagggagacattcgtcgagcttcaaatgaagaaggcattccgatatgttatcttcaaaatcgaagagaagcaaaagcaggtggttgtggagaagacaggggctactactgaaagctatgatgattttttggcctctctcccagagaatgactgccgatacgcgctgtatgattttgattttgttactggggagaatgtgcagaaaagcaagattttcttcattgcctggtccccatcgacatcccgcatacgtgctaagatgctgtactccacgtcgaaggaccgcatcaagtacgagcttgacgggttccactacgaaatccaggcgaccgacccatcggaggtggacatcgaggttctccgggagcgggctcactgaagctggttctccttttgaagggacctgtggagggccgtgaaccttcagccagatgcaaattcaattgtcaacgatgaagctcccgccgtggtgtttgttaataagttcctgtaagcgtatcatttagtcgctatgcatgatactagctggtgaagcgctatctaagctgtaaacgaagcaagatttgcaaacttgttatattgtggtattgatgatactggattactggctgtgggttattcgggaatgtctctgcctctctggtctggtgtctggacgtggttgtggtgtggcttgctcggcatcgccctggtgtttgggtctggcccccggactgtcggattgtctgcatctgttagatgtacttgttctaatcaaagcaggttccaagtttcctaccgt

SEQ ID NO: 37832 - DNA, 1797 bp, Zea mays
  unsure (1)..(1797): unsure at all n locations
  Clone ID: MRT4577_134508C.1
cctggagcctcgacccggcggggacccaccaaaacccgcatccataaacaagaaaaagaaaagaaaacccctgttgccagcgacagaagaagaaggggccccttctccttggttgcgttgcgcctccctcctgtctgcgtgcgtgcaatcgacgcagaggcgcgggcgctcgcaccaccacaaccacgacccgatggctttcatgcgctcccgctcaaatgcatcttctggcatgggagttgctcctaacattagggagacattcgttgagcttcaaatgaagaaggcattccgatatgttatcttcaaaatcgaagagaagcaaaagcaggtggttgtggagaagacaggggctactactgaaagctatgatgattttttggcctctctcccagagaatgactgccgatatgcgctgtatgattttgattttgttactggggagaatgtgcagaaaagcaagattttcttcattgcctggtccccatcgacatcccgcatacgtgctaagatgctgtactccacgtcaaaggaccgcatcaagtacgagcttgacgggttccactacgaaatccaggcgaccgacccatcggaggtggacatcgaggttctccgggagcgggctcactgaagctggttcgccttttgaagggacctgtggagggccgtgaaccttcagccagatgcaaattcaattgtcaatgatgaatctcccgccgtggtgtttgttaataagttcctgtaagcgtatcatttagtcgctatgcatgatactagctggtgaagcgctatctaagctgtaaacgaagcaagatttgcaaacttgttatattgtggtattgatgatactggattactggctgaaggaaaaaagggaacaaaaaaaaaaaaaaaaaaaaaaaaaaaaaaaaaaaaaaaaaaaaaaaaaaaaaaaaaaaaaaaaaaaaaaaaaaaaaaaaaaaaaaaaaaaaaaaaaaaaaagggggggggccctttttaggggaccaaatttaactcccgggggtttaaaatttttttttttttttttggggccccaaaaaaaaaatcacgggcccgggttttaaacacagagaatgactgccgatatgcgctgtatgattttgattttgttactggggagaatgtgcagaaaagcaagattttcttcattgcctggtccccatcgacatcccgcatacgtgctaagatgctgtactccacatcgaaggaccgcatcaagtacgagcttgacgggttccactacgaaatccaggcgaccgacccatcggaggtggacatcgaggttctccgggagcgggctcactgaagctggttctccttttgaagggacctgtggagggccgtgaaccttcagccagatgcaaattcaattatcaacgatgaagctcccgccgtggtgtttgttaataagttcctgtaagcatatcatttagtcgctatgcatgacactagctgaagcgctatctaagctctattggtatgaggtttggttgccgtgttgccgagcctgtaaacgaagcaagatttgcaaacttgttatattgtggtattgatgatactggattactggctgtgggttgttcgggaatgtctctgcctctctggtctggtgtctggacgtgggntgtggcttgctcgggatcgccctggttggtctggtgtctgctgggtctggcccccggacggtcggattgtctgcacctgttagatgtacttgttctaatcaaagcatgttccaagttcctgaccgtaaaaaaaaaaaaaaaaaaagcggcc

SEQ ID NO: 37833 - DNA, 540 bp, Zea mays
  Clone ID: MRT4577_134509C.1
atagacgcggtaccgcgcgaactcccatagatctgagcgagccaccctgcgaatcttcacctgacgcaccaaatctggtcagaaacggtgaagagttcggacacgatcttaagcgtcgttgatttaagaccacacacaaacacatctgtttgcccttcccccctatttttttccttttcggacgattcataagaacagacctgcaaggtttgcagatctacctgttcaagaaccagggaccttgttttggacgcccagaacgaacccttgaccctgcggatctgctcgatccgttttggatctgcttgcttttttctggatctagagagaatgttcaagtcgatggtttatttcgtgaacatctcaatcggggaggttgaggtgtggcccaagggccaggcgagcgcaggcctggccgtggcggcgtgggcgcgagatatccgcgttgaccgcctttccccgcccagcgagcggtgccctccgctggccgtcatgcacaccgtggccgtcgccggccgatgccttgtcatggagtccagg

SEQ ID NO: 37834 - DNA, 127 bp, Zea mays
  Clone ID: MRT4577_13450C.1
tctttacacataaatccaggtgtacgggggagcgttttcgtcatacgggagagtactttccatccaatattttatgacacacactgatttctcttgccttctctactattatgtctgaaaataacat

SEQ ID NO: 37835 - DNA, 487 bp, Zea mays
  Clone ID: MRT4577_134510C.1
ttttattttttttcttttttttctttttttttctttttttttctttttttttttttggggaaaaacccagaaaaaacacccctttagatctaaaattaaatccggcccgagaaggacaggatcgaggggggggggatccccggggggaaaccgggggggccttaaaacaaaccccaagaccagaaaacccaggcgaggagcgagccaccatggataatggggggggcagttgaaaggattttttttacggggccccgtttttatatttaaacccccgggggggggccccccccttttgactttgggggcccaatggcgggccgggccaatttaattgcaactgcaaaaagaacaaccccaagtggggccccacttggagggggtggaaaccaaacccccccccttggggggccccttaaaacccccggggcttgccttgggggtccgcccggcaaaaaccctggtctttaccccgttgggggggggg

SEQ ID NO: 37836 - DNA, 297 bp, Zea mays
  unsure (1)..(297): unsure at all n locations
  Clone ID: MRT4577_134511C.1
caaccaaggcnaaagagaaggcccacagcaacagcagcggagacagcccaggccgacccagccaaagcgaccaccaccagacaccccacgcacaagcaggaaggcaaagacaagcgcgggaccaacaggncagaaacacgggggggggggacgaaacaagcaancaccaagcccgagacggcccacgacaagacaaagacagagcccgacaggaccaccaacaaccacaccgaccggagaaaccaggaccccaccaaggcaacaggaacccgaagaaaagccccgagagagaggaac

SEQ ID NO: 37837 - DNA, 389 bp, Zea mays
  unsure (1)..(389): unsure at all n locations
  Clone ID: MRT4577_134512C.1
caccgaggcgcggcgacccccaacccagcgccgagggggacgccagccagcgcccggagcaccagcggaaggacaggcacgacagcaccagcggaccggagcagacagccacccaccccacccggaacancgggccggggacacgccgcagaagggcgccaacancggcgacacgangaccaacgacgaccncangaccgagggacccgccgccgacccagggaccgacggccggacgccgggcaccaacaagcggaccacccagcgcgagcaggncnacaaggaacgccgacacgcggggggccncaccaacggacccaacaacgtaagcacccaacgaccgnggccggaacagcgaaaagaaacaaanaacgacacgacaacaaaag

SEQ ID NO: 37838 - DNA, 270 bp, Zea mays
  Clone ID: MRT4577_134513C.1
gcagcaccgggaagcaccattttttccttaggattaacttaaaacaaatcctgacaggagtaacagcatccattgttccacaggccatgctggttgaaacatgggtctggtggaaccgaggtttaacacaccactaacaactggccacccattcagttgcctgcgctccctgggcggaccaattccctaaccactggtcacccacccgttcccttgtggttgcccatgggtcccattgctgacggcgaggtcctccccgacggccatttt

SEQ ID NO: 37839 - DNA, 218 bp, Zea mays
  Clone ID: MRT4577_134514C.1
tcgttcacacgtaagagaataggacgaagggaggttttgaatgtacgatctagttgtttagacataacttgacctgaatctcaagcgcagagtatgcattttctgaaccgtgttgcatttgttcaaaagatagtatcatttgatgggctagggaacttgaggatggatatggtgttcacaggatggctcttgcctgactgcgttgtagaccctgtatt

SEQ ID NO: 37840 - DNA, 1823 bp, Zea mays
  Clone ID: MRT4577_134515C.1
tcgaggccggccgggagaacctcctcacttcccgcaatgactggctcactgctgggtgctggacggatggccccctgtctgtttcgctttcgccacgtgaccccgaggcccgagcccgaagcggcggcgcgccgggcgtcttgacgtccccaatgacgccgcgcgtcgtggacggacctccgcagcttccctctcgtccgttccgcagtccgcacggggaggggagctacagcgacctaccgccgaggcgggccccaaccgcaccacgcctacttcaaaccctctcccacccccacctcctgccgttctcggagctgatcaagttcgcttctgcctgcgtgctctgctggagagctagatggcgatgccgtccgggtggaggggtatcctgggcttccactacggcatcgtgcaggcgccgttgggccccgacatctccggccccgagctcgtcgccgccgtggcgaacgccggcgccatcggcctcctccgcctccccgactggccggcgccggatcacgtcagagaactgatccggaagaccaggagcctcacgtccaagccgttcggggcggccatcgtgctggccttcccgcacgaggagaatctcagggtcgtcctggaggagaagctcgacgtgctgcaggtctactggggggacttccccaaccaccgggtccaagaggcgcatcgcgccggggttaaggtcttgcatcaggtcggcagccttgaggaggcagctaaagctaaagaagccggtgtagatgggatcattgttcagggacgtgaggcagggggtcatgtaattggtcaggaaggactgtttccactgttgccacgagtagtagatcttgtttcagactcgagcattccagttattgccgctggcggaattgtagatggacgtggctatgttgccgcattggcactcggtgcccaaggtgtttgtttaggaactaggtttgttgctaccgaggaaagctttgcacatcctatttataagcaaaagctaatcgagatgagtcacacagactacacaaatatattcggacgtgctagatggcctgatgctccacagcgggtcctggaaacacccttctatgatgagtggaagaataatttcccagaccaggaaacagaggaagatcaacccatcataggccactctatcatccatggtgtgcacaaggatattcgtcggtttgccggtactgttccaaacgcgacggcaacaggagatatcgacatcatggccatgtattcgggtcagggtgttgggctaatcacggagatcataccagctgctcaagttgtcaaaagtctggtcgctgaagcgaaggaagtcatcagagaaaagctttctggttaccaatagaatccttcctgaactgcaaactagaagtatctgtgtgtgagtagtcaccaatcagaataatcggaagcaccaaggtttaggtttgattcttgtgctatttttaagtacaataaagtaaaaaatgatgaaaataaacgagactaacaaaggtattctgtcagacatttgtgtgcgtgtgtgcgcgctctgcatatctgtaatagttttggagtgtcttcacatagccctgaaggtcttcaaaagggtatttttggaggataggttgcaaaccaaacatatgtgatttaggtttggatgttggttcggtatgtccatcaatccaaacatgttttacaaaatggtcatgagaaatactatataaactcttaaatggcggccttgtacaggttgggcaactgatatgatagccccaattaaaacaaaaaaaaaaaaaaagccgccctcgagc

SEQ ID NO: 37841 - DNA, 271 bp, Zea mays
  Clone ID: MRT4577_134516C.1
ggttattccaaaggggagagaaatcctgtttatatataaaagggacatacggccagggatgggatacaaaaacaaaccgcccgtggatccatacatacacccggcggccctgactgactgacgacgacagggaggatccggggattatagatggagggggattttaattagcccctaagagagattagggggcaagccggagccccggaagggggtggggggtcaagcctggggggctgttttacctgacgcaattggagcgaaacgttgg

SEQ ID NO: 37842 - DNA, 312 bp, Zea mays
  Clone ID: MRT4577_134517C.1
ctccgtgacgcgtgggggacaatagaagcggaaggaatattattaacaatgttgcacctaatcgccgctcagatcccagccgcatagacatcaaaggtctctacgcatctaacctggaacggggtgatgaagtacaaagctgcagcatctgcaaggattcatggaaccgatctagcataaatgccaatcataggcacaagaggcaagaataggcaccaagggaagcgacggcgactacggcacggaattgaattggccctaggatccctcaatggtcagaaaccaggagaatctggtgtgactgaaagggag

SEQ ID NO: 37843 - DNA, 517 bp, Zea mays
  Clone ID: MRT4577_134518C.1
aggccggccgggaccctctctggtcgagcgagcctagagagcgagagagcccgggccgagagacagccagccatggcgctgcgtggcctgtacaacgagatccggagaaggaagcttccctacgcgtcgttttacctgaatgcgcccttgcgctgcgacaacgccaagaagagactcgatccagtgcgtgccatcgctacatcaaaaagtacgtcgatgctctgtcagcgcacgctgtctaccttcctcgaatcggagaaatgaccttctcgtactccaacctgctggactgctacttggcccacctccacaacctcgagaatatgaacaccaccggctgcatagaactacatcctctgcaccttcctctgcgcagctgcggctgagcacgggggactttcataggattgcattcggaggtgatgccattctgctgtcttctgctgttgagctactgaacgtcatgttactttatccgttgatgttgtacccagactgcacgaaactgtgcagctta

SEQ ID NO: 37844 - DNA, 676 bp, Zea mays
  unsure (1)..(676): unsure at all n locations
  Clone ID: MRT4577_134519C.1
tacgcctgcggttccggtccggaattcccgggtcgacccacgcgtccgccgagtcggggctatttctggtgttggcgcggctccaagaagactcactgtgtgctgccccacacatagagaaggagaatgagcgagtcgggctcaaagtccagccagcccctggcctccaaacaggaaaaggatgggactgagaagcgaggccggggcaggccacgcaagcagcctccggtgagtcctgggacggcgctggtcgggagtcagaaagagcccagtgaagtgccaactccgaagagacctcggggccgaccaaagggaagcaagaataagggcgccgccaagacccggaaagtcaccacagctccagggaggaaaccaaggggcagacccaagaaactggagaaggaggaagaggagggcatctcccaggagtcctctgaggaggagcagtgatcaccactcgcagtgccgcctgctccatagccactgaggagcagctgtcccctgggactggaagccctgctcccaggcccctccccgcccccactgcacactaccgcaccaggcaccagctgcaggctctgctccgcancacccaagggagcaggattcggctcagtccctgtgccctcctcccgaacacacctgccccatcctgagcaggctaacttcccattta

SEQ ID NO: 37845 - DNA, 423 bp, Zea mays
  Clone ID: MRT4577_13451C.1
tttttcccaaaaaggggtttttttccataaagcaccagggggcacaagtcccattcccggggaaaggccctttactaagtgaaacaccagttgggttcgagaattggggggagggcaagcataacccccaattaaaatccgttcccaaaattgtaaccaacccaacgggaagataaattattcactggttgcaaaacgccaggcccatccacaggcccccatttttcagaaccaaagggggggcgaactttagggccccatgccccaaaaggggtttttcccaactttaaaccccttgtcgaacagggatatttgggggtttttcacccccatttttttttccccggagaaaatggctattttaaaacccgtaataatgggcacgcccctttttttttgttggaatgcctcccggcccttttt

SEQ ID NO: 37846 - DNA, 702 bp, Zea mays
  Clone ID: MRT4577_134520C.1
tctcgtccatctcttatctaccaaacaccaccaccaacttcattcacaatgggttacgagaagggcgatgctaagaagggtgccggtctcttcaagacccgctgcgctcagtgccacaccctgaaggagggcgagggcaacaagatcggtcccgagctccacggtctcttcggccgcaagtccggccaggtcgccggctactcgtacaccgacgccaacaagcagaagggtgtcacctgggacgagaactccctcttcgattacctcgagaaccccaagaagttcattcccggcaccaagatggccttcggtggcctcaagaagcccaaggaccgcaacgacctcatcaccttcctccagaacgagaccaaataagcgcatccacacctcccacggaccgcttactctaccaccaccgactgtcatgacccttctataatctctttggactcgaccacaccaccctttctttccgattgtaccaacacccgacctcacgatagacggacgattgccggcgatggaagcagcaacgcggtaacagcgattgctcttcctcgcccctgtgtagattatgtttggaatatccatattggcgcttttcgaattctggtgctggcctgcatattcggtttgggattagcggcacaatcgaaatgaacaatcttctcctctccaaaaaaaaaaaaaaaaaggccccta

SEQ ID NO: 37847 - DNA, 836 bp, Zea mays
  Clone ID: MRT4577_134521C.1
cctcgaggccggccgggaaaggctatcgccagcccactccattccactcccacgagatctaaactcgttatatcaacatccacctaaccacccaccaaacccgcatccatcatgtctgtccaggatagagcccaggcgcacctctcgcagctcgacaaggagcttagcaagtaccccgccctcaacaacttcgagaagcagacatccgtccccaaggcctacgccgtcctgggtctcgctggcctgtacttcttcctcatcttctttaacattgctggcgagtttcttgtcaacattgctggcttcgtcatccccggctactactcgctgaacgccctgttcagcgccagcaaggttgatgacacccagtggttgacatactgggttgttttcgccttcctcacagtgttcgagagcgctgtcagcgcggtttactggttccccttctactacaccttcaagttcgtcctcattctgtggatggcccttcctcagacctctggtgcccagattgtcttccgttccttcctccagcccgtcttctcgcgctacttctccgaatctggatccactgctgccgatctccgcgccaaggttgactcggctggcaagtcccacgcttcttaagcgtctcttgtgtacaacttgtttctgatggccgcatgaccaggcaatgaagaggtggtggacaaatcggccgaagcgatcgtttggtttaatccaaggagctggttcctgtggttcagcgcactgatcccatacggcatgcggctgcagtgacttgggcgcattatgcaaatgagaacattcgacctatggattccattggcgagcgt

SEQ ID NO: 37848 - DNA, 376 bp, Zea mays
  Clone ID: MRT4577_134522C.1
aaaaaaaaaaaaacatataaaaaaaaaaaaaaaaaaaaaaaaaaaaaaaagggaaaaagagagaaaaaataattaaagtgtatgacatttaaaaacatatacaaaaatagaggacccattatctgcgtggacttttttcttatcaaagcattgttacgtttcgctgacataatcattcgctttattctgcatcagaaataatttacgctaccaatgttttaaaacgtacaagacctaactatacttgtaattgccaacattaaggaattagagtcacccccacatttttcatatatccttggaaggcttacatttcaaacgtatcgacctttttacatattgttcaatctttttgggaagattattgacttcccac

SEQ ID NO: 37849 - DNA, 664 bp, Zea mays
  unsure (1)..(664): unsure at all n locations
  Clone ID: MRT4577_134523C.1
aatcttagttagtgcctccgctgctgcagactcctccttttcgatcccttacactcagcgcgcgccgtacctcccatgcgaacatggactcacgaatgaagngattatacgcgcctctgcctccccgctcgcgcgcatagcccgaccgaagttcctggatgcgtaggcaaagctctacttatggaagtaagttgcgattgaggtgtaaagctaaatgataagcggcaacgcggtgctggtcgaccaggtctacctacgacaagctgctctctgatgtggccaagcacaagaagatctccccctccattctatcctatacgtgtcaggatccatggctccctgtctcggaggtctactcaaggacctgatggcgcgtggactgatccgcttgttctctgctgactcaagccagcagatctactcctacgcaacacatacctaaggatcgtgtattcccttgattgccctctctggatgagctcggcttctgtagaacagctgccatctctgccatagagcttgctatgtgctatggtagatgaggttaggttggcttgtctatgataccttatctggtctcaatagattgtgtctatggagatctgacttgcgacgtctgatccgcgaatatgccactcgatctaaactactgttatgctgcaaa

SEQ ID NO: 37850 - DNA, 474 bp, Zea mays
  Clone ID: MRT4577_134524C.1
gggggggggtttttttttaaatttttttttttttttttttttttttttttttttttttttttttttttttttttttttttttttttttttaaacccccccaaaaaagttttttatttctaaaataattgcttgaaaccaaacaaattttgggggggggggggaattcaaacataaaacaaaacatgtccccccctgggcccccaaatataaaatactccattacatattaatacccccccaaaactaaaatgtccacttcaaccactaaactttttgccccattttttaaaccaaacaacccttttttaatctgttcaaaaatttggaaaaattatccggttgtcctttttatcaaacaaattagtacccccccaatactcctataaaacttttgatgtcccacagtccacaactagctgcaaacacctttggatttttgctatggcattttccttaaaaacaaaacaaaggcc

SEQ ID NO: 37851 - DNA, 290 bp, Zea mays
  Clone ID: MRT4577_134525C.1
acgattttaaatcctaacaaacacaccaatctcttttctctaccaacaatctcacatccaatagtgagattttttatactcggggaacacccatcccattttcctaatcactacaatctccaccatcatcaccaaaaaccattaatatccctttccccaaaaacacatttccctcaagattttccacgactcaaaaccctattatctcaaccccacactattccattttacacaaaaaactcccatttaccattataaacccttcttctctcaattctgaatcctttttc

SEQ ID NO: 37852 - DNA, 280 bp, Zea mays
  unsure (1)..(280): unsure at all n locations
  Clone ID: MRT4577_134526C.1
gcaaggccacacacacacacacaccactaggctaggttagccttctaatcgtcgtcgagaagcacgcagggcgcgcacgcaatctttttttcaanaanagagccgatcgagcggggggggggggggttttttttttttctnccaanannanggnggcgggagctggggggggcttggccctggccgcccccaccgccnaggcgaggaacattaagaccacnacgacggttaagatggtacgactcggtggtgcagtcgtagaccttcccgcccttctacc

SEQ ID NO: 37853 - DNA, 140 bp, Zea mays
  Clone ID: MRT4577_134527C.1
aaaaaaacgctgaaactgttggtggacaattaggagttaggagatacgtatacccagggcagaaattgggctatttttcacaataatccttgcagccacaaaaattgattctactcctttttgtttcacttggttggtcg

SEQ ID NO: 37854 - DNA, 954 bp, Zea mays
  unsure (1)..(954): unsure at all n locations
  Clone ID: MRT4577_134528C.1
tgtaattcggcacgaggcgcaaggggcgggctaggttgcctcgcccttcacccgtcgtgagtttgacactctccctcccggaccttccgtccctgtcgttgcccctggtggcccacctcgccctggggcacgaccaccgactcactttgccgtcgatccacacaccggttcatgtccgacgggggaccgctacctncctggttaccgtccactgccctccccgcatcccggccggccgctgctctcccgtcgcaggctcccgtccggccgctgctctcccgtcgcaggctcccgttcggcggcccgcgctccccgcgaacggcggctggcagcaagccgctggcggcgcacggcatctccacgtccatgtggcacgacgcgcgtctctgggacgtgctgctccgatgcggcgtcatgggtgccgcggacagcgtcaccaacgtgtgatttgtggcgccgaggacctccccggtggggtcgacgacaactgcaagtacgacaccagcctgcaacgcatctcggatctcggattttttgccaccaatcagcaagagcggcaggagggagcagagctggagatggggcggtgctggtgctgctgccggtgcctaaagctgctctgcttggttctcctcccaccgatcagcttgtgcctcggccgcagctgctgctccaatctgtccccattctcatcgtcgaagatctgctctgtcttctatggtgcctagagtcagccttcagggagagaccgctcccgcaggccaagaagtcgtggggctccgagattgccagtagcggtggccggagctcctccgatgtttccacaccatatgctacaacgttttgtgcttccacgccggatgccacaatagacaagctgaggaagaaaggttanaattgntgagacaaaggatatatgtaccatatcactgctcctctatccagcatcggggt

SEQ ID NO: 37855 - DNA, 438 bp, Zea mays
  Clone ID: MRT4577_134529C.1
tttttttttttttttttttttttttttttttttttttttttttttatttttttattattcttgtagttagctaatgtataactaacagtgttccaatcgattatcgcacacatgccatgcagcagtccggaaaaaaggggcccaaaacccaggggcaagaaaacgaaaaaaaaaaggggacccaaaggaaaaaggccaaagggcaaagaaggaaccccaaaaggaggggccccggaaaaaggggatgaaccccaggaaggccagaaggggcccccaaaagaagccccgggggaaaaaaagggagacaagaaggcaaggggaggggagaaggaaagccagggaaaagggggagaaaaggggggaagaaggggaggaaatggaaacggggggggggaaaaaaaggggggggggccaaaagaaaagggccccgaggagccc

SEQ ID NO: 37856 - DNA, 537 bp, Zea mays
  unsure (1)..(537): unsure at all n locations
  Clone ID: MRT4577_13452C.1
ggaccgagggaacattcaattgtttaattatgcattcaagagggacaaaggggctcagccccgttgttttttttttattattacgaagatttttatgcctgcgtgctagctcgctcgaactagaaagtattaaactcttgggggcgcgagggcgcgaccccaagcatttattggggacaagctatcaggagctgctgggctagcaagggaggttgggccctggggcgacgcggagctgctggcaggactgattggactagcccacgcgcccgttcatctgggcggggttggtcccctaggactccagggctccccttatggccctgatggtggccccgaagccctgcgggattaagcggggcactttgttaatacagaaccagagcgccctcttgaacgcgatcacggggtactgcgccaccctggtggggcccgcgagcccctttaaacctatgtccctcccggggggcccgtatttagaagttcacgagatctgcagcgggccgggcccttagtacttntgccccggcgcacacg

SEQ ID NO: 37857 - DNA, 1435 bp, Zea mays
  Clone ID: MRT4577_134530C.1
acacttgtcctttacatgagaaacatatatatatcttatcatcggctgctcttaccacagcatgctatctagagttccaaacaacaactttccaaatattaatcaaatccaataacaacaaccagtgtaataagatatctcagaacattttcaaattttgatatagctgcttggtagtttttttctcgattatcagagttctgtttctcgatagtcttccccaagcacgtaggcagggttaaaacagtacccgccaccaggccgcaaccacacactacagccactcaggcccacacacacgcctgttaggacgacggatgcgacgagccgccccgttctgctttgttgtgtgctgtatcccatccagagtcgcaccatcttgcttgtatgatgtccccggctcagccacgtctccttggttggtgacactcctcgatccttcgaagcctgcttgtccccaagcaggtgcaaatggaaagcactgacgaagcgcctcctggttctcccatgttgcaagttcaagtggaagcccagaccattccaccaggacttgctgcaccagacggttgctcttggacaggccacgagtttgtagcacacgaattggcacacgcgctctggaagtgacatcggaagcgttggggaagctgttcctttaaaacccgtgaccggtagcggccgtcggcagttggatgccgaagaccactatcccgggagtagttgtcatagcagtggccaaataggggcccatcggtgtagtcagcggcggcaggaggatgccccagcatcgatccttgagcagcgaaggggcttggagcttcgaggatgcccggcgttggtgtggagaagggccctggtggaccgagcacgcccagcaaggaggcaccaccgatccgcatgccttggttccactggatctccatcttggtgattttcgaacgcacccaatccatgttcgatcggagcccttcaatggacgaatccacgcaaggacgccaatagtcgaacagttgcagtgcgtactcgagggcgccgacacaggtgctcgtatcagcctcgatctgacgtaaacgtccttccacaacggcgtccgaagcagtcaaatgtgcttccacatcggcacgaagggaagacgagaactcggagacggatctggacgcgtccgccgccgtggactccagggcggacacccgcatttcccacctgccctccatggactggaaccacttatccagttcagcaagcagggatcgggtttggtgctccagagcgagggtgagggtcgaatcgaaggaggaagaagtagatggcaccatgaggcaatggagtggaacagggatcgaaccctaatctgatactagatgttagtgtaggtaggaaggcccagtagaggagagaagggaggcaggtaggagaggtctcgattatcagagtt

SEQ ID NO: 37858 - DNA, 300 bp, Zea mays
  Clone ID: MRT4577_134531C.1
atatggttatggaactgtgtgttactacaactgaaaaactttttccaattaaaataaattttattttttttcaatttacaaccttacttgctttcttttttcaacacataaacatacatactttttttttctgggcaataaaaaaaaacttccttttctcaagaaaaggggggccaaaacatttcttcttgcacaacctataacaattggacaaaaaacctatggcccacaaatggtaggccctttacaaccaaacctgtctaactggaggcacaactgacggccgtatcttctttcaag

SEQ ID NO: 37859 - DNA, 532 bp, Zea mays
  Clone ID: MRT4577_134532C.1
attgggtacctcgaggccggccgggagactgagatgcccttaccttatctgatgactgtgtggaactggtcgtctagatgacttaattcgcactatgcccaatctcgcctgagcttgcgaactattgaatgtaacatggccagaacttgtttgtgcatgatttccacagagaatggatacacttcatgatctcactccactctttcagatagagcacactcagccacttgagccggaactctctcatcaagatcacactcaccttctaggacgagcagtgcacgaccttcatgacatatgatctccattccatcatccataaaaatttcacagacgactgaacatttctcgctgcactaacaattcaatccacaccgtttcagatgctagccacttgctagctttattcctgatgctgaattccaggcacgaaaactaagtgacggatacactgccccagaaagggacatgaccggccagtacaccctcaagagagacgtctaccgctttgtagatctcatgcttgaactat

SEQ ID NO: 37860 - DNA, 363 bp, Zea mays
  unsure (1)..(363): unsure at all n locations
  Clone ID: MRT4577_134533C.1
gcccttcgnnagcggcccgcggcgggcgagggacccactatcacttcaactttgatgaaagcaatgagagctgnntttggtaannnaaaaaaaaaaaannaaaaaaaaaaaacacaaaaannaaaaaaaaaaaaaaaaaaaaagcaccttcggcccgcgaaccaccccttaagggccgaaattcccagcaacacttgggccggccttttcttgggggggagtgccgagcttcgtgtcaccaagcctgtggcggtatatcattggtccattagcttggtttccttgtggtgaaaattggttatcccgcttcacaaattcccaccacaactataccaagcccggaaagcataaaagtgtaaaagc

SEQ ID NO: 37861 - DNA, 171 bp, Zea mays
  Clone ID: MRT4577_134534C.1
tcggtctccgtcttctgcggttctgccgtttactcttccactttggcctccggtctggcaagtttaagcttcgcctccagccatgggtaaggagaagttttacatcaacattgtggatattggccacttatactctgttatgttttcatccaccttacatctgatctacat

SEQ ID NO: 37862 - DNA, 274 bp, Zea mays
  Clone ID: MRT4577_134535C.1
aaaaaaaaaccaggcatgattttctaatgagtcattatgttatcagccctaaccagcaaaggacaacaacacaggtaataatcttaagggaaacagtgagtggcacaacaaaaactgactccagcttgttccatataaaacaacgcgaggctgcctgcgtgactgcttccacatccccttcctaaccttcaaaacagtcgttcggctggaatcctcaatggatcccggccaatgaggcaaggcaaccaaaacaaacattggagcaatggaacca

SEQ ID NO: 37863 - DNA, 569 bp, Zea mays
  unsure (1)..(569): unsure at all n locations
  Clone ID: MRT4577_134536C.1
cccagcgtccggcagaagagaaaacagaagttctttactggcacagcgagaagctggcaattgcttttgcattacttagttcagaacctaatactgntgataagnaattgtngaaaaacttgaggatgtgtttagactgccataacgcaataaaattgatttcaaggttgtatggaagggaggttgttgtgagggacagaacacgcttccatcattttagacatggattctgctcttgtaaagactattggtaactccttatgcatcagacacatttacggatccagaaaaaaaaacaggaatgaaaaaattcctaggaaaaagtggcggcaacggaaacagttgaggcattttcccggccgtatttacggatccaatatttgtacggggaaaatcttgtcggtattcccattttttataagaaattaagctaatccaagcatcgaagcccaccaaccatacccattctcaggcatcatgcaaacgatctggacttttgtgaactgtagactgttgtatttatggtgatggacagcattgttgtataaactgcaaggcaaggtgcctta

SEQ ID NO: 37864 - DNA, 180 bp, Zea mays
  Clone ID: MRT4577_134537C.1
aaaaatggtgtttgaatgttattttaaaaccggtaattggacacgaactcttttaggttttccattttttcattaaagttggcggaataaagattaacagacatatcggattacacggtggaaatgcggtataatgtggtaacggtcaaaagaattaaaaccttaaagctcaaagtcata

SEQ ID NO: 37865 - DNA, 2112 bp, Zea mays
  Clone ID: MRT4577_134538C.1
tggacgcgccgtttcgaggccgactgggctccgcattccaacgctcaaacaccacccgggcggctgcgcccccaactccccccgtccgcccaacgcccatcccccaaaaggctccgatctgattccgagccccgccaggcgccagccttctcccgccgcgtcgcacgtgcgcaccaccccatactcacgctcgagccgcgatcccatccgggggtcccgatgcggtcgccggcgctcctggccgccgccctagccgcggtggcactcctagctgccggtgccggagtcgcggtggccgcgacggaggaggcctacgtcacgctactgtacggcgacgagttcgtgctcggcgcgcgcgtccttgggaagtccctccgcgacaccggcacgcggcgcgacatggttgtgctcgtctccgacggcgtttccgagtactcgcggaagctcctacaggcagacggttggatcgtgaatcgtataacgttactggctaatcctaatcaatttaggccaaagaggttttggggcgtctacaccaagctgaagatatttaacatgacaagctacaaaaaagttgtttaccttgacgcagatactatagttgtgaaaagtatcgaggatcttttcaagtgtggcaagttttgtggaaacttgaagcattctgaaagaatgaattctggtgtgatggttgttgaaccctctgaaactcttttcaatgacatgatcaaaaaaatgggtcaattgccttcttacacaggaggggaccagttttctaaattcatattattctgattttgccaactcccgtgtctatgagccagactcgcctttaactcctgaaccagcgacacaacgcctttctaccttgtataatgctgatgttggtctttacatgctagcaaacaagtggatggttgatgaaaaggaattaagaatcatccattacacattgggtccccttaaaccctgggactggttcacagcgtggcttgtaaaacctgttgaaacatggcaggatattaggcaaaaacttgaagaatctcttccaggaactggtgggggaaggaaccctcatgaccagctggttgcaaaatattgttcattctcccattttgcttgctgctatttggttattaccaatcatgttttcagacagaccaggagttggtaagtataagatctctatgtgcttttgctagaagagctcgccataaatacaagtctgaagagtcacttccatcttattcagtggtgggttcatcttctgcatttggtatttcaagccaaaggttatcaaatggacatttgaaactaccttcttattttggggcaattgcggtgttagtctgcttcgtgtctgctggtttctctcttgcatttgctttcgctatcattccacggcaggttatgccatggacaggtttgctactgatgcttgagtggacctttgtggcattcttcttattgtttgggagttatctccgttttgtctaccggtggggaagtatcagtgcaaaccatgtgggatttagcaattctgactcatcggagaatcatatgggtccaggccatcagcgaaatatgtctgactgcgacatggatgcaacattttactggatagggatggcatctatagctactattactgtactgttaccgactatcttgggcataactgcattgttcacaaagctaggattaatggtcgctggtggtattgtgctggcatcttttatgacatacgcagcggagcatcttgcaatctcagtcttcaacaagggtcaaaaatacaggaatgcgtcaagaactcgaagcttttgtttttaacgtttaagtaaaaaatccttgttgtattgtaggtagttttgtacacaaaaagaatgatgattcatttttaacacgtggcttcctgcccatggccccttttttttgtagcgctgatgtcacgccaacttgtggtaaataggtttccgacattgtttctgtagcacagttgacatgaagattacagacatgttttgggatcgtgacccgcttttactcgcttatattgatgtttatggtgagattgtagtaaaaaaaaaaaaaaaataaaaaaaaaaaaaggaaaaa

SEQ ID NO: 37866 - DNA, 349 bp, Zea mays
  Clone ID: MRT4577_134539C.1
tgtggcggcgaatcgcagggagctgtggagctgtactccgagctccggaacatgtacccctcccttgggtacaaccatcacaccttcttggcgctccttgtggccggcgcccagctcatggatagggagcttgccaggcaattccattgccatttggtggttcttgggttcttgtctgatgtgaaaattgccagctctcttcttgatgtttataggaaatgccattgtgttgatgatgctaggaatctgtttggcgaatgcatatcaaggatgtgcgtatgtcgacgacagtagtttgtgactgtgctgaagatggccactaggtaccgctcgtcagctctttgatcag

SEQ ID NO: 37867 - DNA, 261 bp, Zea mays
  Clone ID: MRT4577_13453C.1
cttgtgtttttttttttatatgtttttctatttgtgctttttaaagggaaccaaacaggactcgatttatttccatatgtacctaccaagtttcatggagggcacctggacccccgaaacggagatctgcctattgtccattgctgtatttttattacggataaattcgtttgacctatataccagacaccgggaacccatggcaagaaggattttgtttttctaacaggacaactttagttgaggtggaaccaaaatgcc

SEQ ID NO: 37868 - DNA, 372 bp, Zea mays
  Clone ID: MRT4577_134540C.1
atttaaatattatccaaagaaagaacattggagacatgacaagaacattaaagaagagcatgaggatctatatgttgaagcacaataagagaggagatgtaccaaactgatacaagcaaattggatgagaggtttttttacctcggggaggagactacccaagttctgcatgctaacacatcctcacttgaagcctgacattcagaaaacgacaaggcgctgagtttatctagcgaagaaaataagaagctaaaggaaaagctggcactactagaaacggcgcatttcattgaagatggtcaacctgagctatagctaatgaaacaagatagcgaggaaatgatactccgcgacaccgagatggaggccccc

SEQ ID NO: 37869 - DNA, 533 bp, Zea mays
  unsure (1)..(533): unsure at all n locations
  Clone ID: MRT4577_134541C.1
ccggccgggacctacgcggacgaccaaatcttgacgaaacgacccaaaaacaccaactacgggcattatccgaaaaaaggaaaacgagcgttcgaatcgcgaatccttgatccatcaaatttatcccaattggcgactgagcgcaaactcgtttattcttaatcatcatgtctttccgaggaggttcgcgaggacgcggcggtagtggatttggaggccgtggcggtggccgcggtggcttccagcagcgagacatgggtcctcctgcacagatcctcgaaatgggcaagttcatgcacgcctgcgagggcgagatggtctgcgagtccatcaaccccaaggtcccccacttcaacgcccagatcttcctcgagaacaagacggccgtcggnaaggtcgacgaggtcctcggncccatcaaccaggtcttcttcaccatcaagnccaccgagggcatccaggntacctctttcaaggagggcgacaagttctacatcggntccgagaagntcctggccctcgacaagttcctt

SEQ ID NO: 37870 - DNA, 289 bp, Zea mays
  Clone ID: MRT4577_134542C.1
cttaactgttgcttctgttccaaatgaaagcttcatgcaaccacgagtgcagaggctgggcatgaaggagggtctgtaggaaactggaattgctgttctgtggggagccaggcatccatgcagaggcagaaactccagaaccatttagctttaaccactcccattcttgttattagtactctggtcacactgtgatgccatgaagacccaccagcattagaatttgttgaataccgctctgcaacctgggcagttacttagccacctgattcttagtgtcctcatctgt

SEQ ID NO: 37871 - DNA, 321 bp, Zea mays
  unsure (1)..(321): unsure at all n locations
  Clone ID: MRT4577_134543C.1
gttccagtgcgcgggtctgtggagagccgggcgcgagcggcggcacacgaggggaaaagagctcagcggagaccaaagtcagccgggagacagtgggtctgtgagagaccgaatagaggggctggggccacgagcgccactgacaagcaatggggaagagacagataaacaagagcgaagacagcaccaaggatgacattgatcttgatgccttggctgcagaattagaaggagctggtgctgccaaagaacaggagcctcaaaagtcaaaatgngaaaagaacaaagagaaaaaaaagcaggactttgatgaagatgata

SEQ ID NO: 37872 - DNA, 424 bp, Zea mays
  Clone ID: MRT4577_134544C.1
accttaaaaaacccagagcatattaccagagcacacggacttaatgccatctagcagattcacaaagcggtggggaattaattaagaacactaccagtctagttatataaaaaaagaagtttgggaaccggaacttagctgcaataatagcacggctcatattgagcttctacagacttgagcatctaaaacaatgggcttgaacactgtgcgctattccaagattactgcacgtcaacagaacttacctttccgggattttttgccctaatcactaccatcctacatgaggtcataagctcaaatggttaagttgtccctaatgggcctgtttatcagagggatatctttgtttgaatcctccccaagggattctaactcggacatagcttgatcaaacgcctgctttgcaacgatgcaagct

SEQ ID NO: 37873 - DNA, 2167 bp, Zea mays
  Clone ID: MRT4577_134545C.1
ggattttagacatgttagatatgctgttagtgatgtgctacttatcaactgaagttcttgggggtgactccaccgctacaaatatttcgtccaaagtttgaaactctggtgtctctggcatatgggagctgcaacaatgagcagaactccaagtggcaacctgtagaggctaccctgttttgtatacaagcaattgctagatcagtctcaattgaggagcgagaaattttaccacagattatgtcactgcttccctgccttcctcaacatgagcagttgctacaaacagtttgtttgaccattggagcattttcaaaatggattgatgctgcaccagctgaattatctattctaccacctctagttgatattctcaataagggtatgagtacattcagaggatacagctgcggctgcttctatggcctttaagtacatatgtgaagactgtaggacgaagttctcagggtccctggatggcctcttccagatataccatattgcaatcagtggagttggtggttataaagtttcttcagaggactcgttgcatttggttgaagccctaagtgtgattatcacaacgcttccaccagaatctgctagtagagccctggagctaatctgccagccagtaatcaatcccttgcaagaatttatccagcagggtgatcaagttcttcaacgagtccctgctcggcatttaactgtacatatagaccgactatcaagcattttcagcaatgtgaaacaaccagaagtagttgctgaagctgtatatagatattggccgacactcaagagtatctttgatcaacgagcatgggatacccgtaccatggagtcaatatgccgatcttgcaaatttgctgtaaggacatgtggaagggtcatgggaatgacgattggtgcaatgcttgaagaaatccaaactctctaccaacaacacaaacagtcttgttttctttacttgtccagtgaagttatcaagatttttggatctgatccatcttgtgcgggctatcttactaacttgatacaaatacttttcagccatacagtgcaacttctcagaacgattcaagattttacagccagaccagatatagctgatgattgctatttgttagcatcaagatgtatccgttactgtcctgatctatttatacctacagaaacgtttcaaagattggttgactgtgcaatggctggtataactatacatcacagggaagcctgtaaatcgatcttgtcttttctatctgatgtcattgatcttccaaactcatctgacgggggacagtaccgtaaagttattaacacaatcatacttcaccgtggcgcaacccttactagaataatgattgctgccttaacaggggcgctaccatctggtcgtctggaggaggtttcttatgttctgctgtcacttagcagagtctttggtgagaacatgctgaactgggcaagggaaagcattaatcttataccgccacaagccctaacagatgcagaacgtttgcgcttcttcaacaccatatctgatgctgcttctgggtccagtctccataccataacagatagatttggtgaaatctcagatgtctgtagacgaaacaaaacagtgcaagacctagttcaaagtgccttgcggcctcaggatttgaccgtcacggtggttcgacaacagatgtgataactggatgtctctgcaaggcaagtttagaaagccagtgagtcagtgttgattgaagactcacgtcatcttgggaattttttcttagttcatacaggtttgagttgcggcggcatacagttcagatttgttcagagcatagataggccagttagcattgtaattctttcgtgtttcccctttgtacatgtgccacaaattgtgtatttggggagggagataagttgtgttgtattatctcaaaaaacagtgttatacttggtataactggcagatcatgaggtatggtgatctaccgtgggcctgattttgcgttggccgttcagcttctttttgtaaagtagggtggccatcgattttattatgtaagcttataccggttgttaaagaaaattctagtctgtgttcccttatggtcaccaaatgtaatggccctaaaggtaattcaagtttgatgattagaacttgtgc

SEQ ID NO: 37874 - DNA, 2368 bp, Zea mays
  Clone ID: MRT4577_134546C.1
ccggccgggtcgttggcagtagggaaaacgcattgtcggctgtaaagggtagaacgtctccactctcccgtacgccgatacccactgacgccaccgcccgaagcctccccgagaaacaggagccggcgcggggatgtcgtccatctcgcggaatctccggcgatccctcgccccggaccgcctgcgccgcctctcccagcacccgcgagagtatgtgacgtcggagtgccaccgccccgtcgtcctccacaagcgcggccccgacatcctccacgacccctggttcaaccggggcacggcgttctcgatgaccgagagggaccgcctcggcctccgcggcctgctcccgcccaacgtcgtctcctcgcagcagcagatcgacagattcatgcttgatctgaaacggctgcagagatatgcaagagatggcccgtctgatacttatccattggcaaaatggcgcatccttaacagattgcatgacagaaatgaaacgatgtactacaaggtactaatagataacattgaggagtatgcacctatcgtttacacaccaaccgttggacttgtttgccaaaactacagtggtctgtttcgacgccctaggggaatgtactttagtgcagaagatcgtggggagatgatgtccatggtgtacaattggccagctgatcaggttgacatgatagtggtgactgatggaagcaggatattgggtcttggtgatcttggggtgcatggtattggcattgctattggaaaattggatttatatgttgctgctgctggaataaatcctcaaagggttcttcctgttatgattgatgtcggaacgaacaacgagaagctccttaaggatcctctttatcttgggctacaagagcaccgtcttgagggagatgaatatgtttcagttattgatgaattcatggaagctgtttttactcgctggcctaatgttattgtacagtttgaagatttccaaagtaaatgggcctttaggttgttgcagcgttacagaaagacttatcgcatgtttaatgatgatgttcagggaactgctggtgtcgcaatagcaggccttttaggagctgtacgggcacaagggaggccaatgatagattttccaaagcaaaggattgttgttgctggcgctggcagtgctggtattggagtggtgaatgctgcaagcagaaccatggcaagaatgttgggaaacaatgacgttgcttttgagagtgcgaggagtcaattctggatagtggatgcccatggcctaataacagaagaccgagaagatatcgatccagatgcacggccttttgctagaagaaagagtgagcttggtcaccagggcctaagtgagggggcaagcttagttgaagtggttaaaaaggtgaagcctgatgtcatacttggattatctgctgttggtggtttgttctcgaaggaggttctagaggcactaaaagattcgtcctcgtcaaggccagcaatttttgcaatgtccaatccaactaagaatgctgagtgtacacctggggaagcattttcaattctaggtgaaaaggtcatctttgctagtgggagcccatttcatgatgtggatcttggtgatgggaagattggccattccaatcaagggaacaacatgtacctctttcctggaatagggcttggaacccttctgtctggtgctcgggttatctctgatggaatgctgcaggctgcagctgaacgtttggcttcatacatgaaagaggaggaggttctcgaagggataatttatcctccaatttccagaatacgtgacatcactaaggaggtggcagcagcagttgtgagggaggcagtagcagaggatctagctgagggataccgtgacatggatgcacgtgagcttgcacgactcagtgaggaagaaactaatgaatatgtcaagacgaacatgtggagtcctgtctatccaacaataatatacaagaaggactagatagctctatttgctattttgcatatgttcaatgatcatgtatgatatactttaggctgcgttctggaaggcactccagaagtgtaggcacgttagttataagaaaacagccttcattgttcattgaccttacttttaattgaatttagtacacgagacaccttaggccacagttcctgacgtactccatggtgctgaaacatttcccatctcaaatatcatcaactgtaccactactggaactgtagtccaatccctctcagatgttaaaatcctgtgtgtaactttgaacacagaccaaataacaaagccagaaatttgccagaggaaatctgttctggcaacttgtttgcctgaaatcgttaaaaagttaaa

SEQ ID NO: 37875 - DNA, 400 bp, Zea mays
  Clone ID: MRT4577_134547C.1
gggggggggccgttttaaattaaaaaccgggggcctcccccaagaaaaaaattccaacaggggggctataattcacccgaccctggcaggggggttataaaaataggaccaaaacccttcccctagaaccccttttgggggccccctctttgggagaaaaggcccccttggcaacccggacctttcctatctcggcctgaacccccggggggtccccagcaaaaagccccagctggccccccaacccgggcctttggggaacacaccggggcccttgtgcccttactgggggtgggggcccccccctgcccctggtgtcgccccccaattctgaaaacccccttcgtgggagaacgaccccccccatgggtacaaaaaccgggtcattgcattcggggtc

SEQ ID NO: 37876 - DNA, 1248 bp, Zea mays
  Clone ID: MRT4577_134548C.1
gtttaagtaaggaaaaacactcaacccaagaggagagacatccagaaggcagtgcatggaaggcctagaaaagttacccagaagtcagctcttacctgtatgggcactgctgtcagcatgtcagagtccttatcttaacccatacctttggggaacatagcggggcctttttttgtgcaagaaccatgtatcgggcctttgttagtagcgtcacaactgcaggacttaccaccatgctacaaacatgttctcttggttctggacaacatgatactaaagttctagaggcactaaaagattcgtcctcgtcaaggccagcaatttttgcaatgtccaatccaactaagaatgctgagtgtacacctggggaagcattttcaattctaggtgaaaaggtcatctttgctagtgggagcccatttcatgatgtggatcttggtgatgggaagattggccattccaatcaagggaacaacatgtacctctttcctggaatagggcttggaacccttctgtctggtgctcgggttatctctgatggaatgctgcaggctgcagctgaacggtgactcccttgatctcttgccattaaaccttgtaacacaaaaacacaatcgggctattacttacatctttaactgtaaaatttactgtgtaactttttatgtagtttggcttcatacatgaaagaggaggaggttctcgaagggataatttatcctccaatttccagaatacgtgacatcactaaggaggtggcagcagcagttgtgagggaggcagtagcagaggatctagctgagggataccgtgacatggatgcacgtgagcttgcacgactcagtgaggaagaaactaatgaatatgtcaagacgaacatgtggagtcctgtctatccaacaataatatacaagaaggactagatagctctatttgctattttgcatatgttcaatgatcatgtatgatatactttaggctgcgttctggaaggcactccagaagtgtaggcacgttagttataagaaaacagccttcattgttcattgaccttacttttaattgaatttagtacacgagacaccttaggccacagttcctgacgtactccatggtgctgaaacatttcccatctcaaatatcatcaactgtaccactactggaactgtagtccaatccctctcagatgttaaaatcctgtgtgtaactttgaacacagaccaaataacaaagccagaaatttgccag

SEQ ID NO: 37877 - DNA, 344 bp, Zea mays
  unsure (1)..(344): unsure at all n locations
  Clone ID: MRT4577_134549C.1
gctttttcttcttgttttttacatggtttaagtgganacaccgcatttcattatgaggcatttaatattataacaacatactttaatcagaccgacatatgtcctaatatatgcaactaccaacataatagtttcttataactaacatcacttgtgtaaacagataaatgctcttgtcaaactacctaatattgcaggtatgctgatgtttgaaggaaccaactataaaaagtggctgatttacagatacaagatattctgcgccccacttcgatacttgcaaaaagttgaatttcataagttcctgcgccctcaatgaggtgtcacctcgattacagcgttct

SEQ ID NO: 37878 - DNA, 311 bp, Zea mays
  Clone ID: MRT4577_13454C.1
gacgtgcccgcgacggggcagggctttctgtgcagtcgcttgtgccctaccgtcgtgccgttggccacgggcgcgccgttcacgtacactcgtgtgctcgttccactgcgctgccctagtgccacgtgcttctggatccgtaccacgttgaacgcccgtgcccgcgcgcccggtcgtcgtcgcattttgaaccagttcctcgttcggcgcccgtcctcggccgtcggagcccagtacgtgttgtcgtggtcgttcattatgttgcgcgccgttaaccgtgcgccgtgcttgttgctggtcctggcttagct

SEQ ID NO: 37879 - DNA, 221 bp, Zea mays
  Clone ID: MRT4577_134550C.1
tcgtccggacgtatacggcaagaaagatcctcttttcataactgtatgattcagattacagcgcgttccaattcagcagcctaatgaacctaatactccaatagttcacgtttaatctctcactgtacaagatcaacatgctaaccaagtgagcaccaagcaacgaactaatcgacaatatcaccacacaacagggcttacactcatacccggagttgtat

SEQ ID NO: 37880 - DNA, 264 bp, Zea mays
  Clone ID: MRT4577_134551C.1
gggtggggtttttttttctttttctgttctcggaaacaaggcccaaccagaaacaatcgggttttttaaccttggaaaggcccgggggccctttgccccgcccgggtgtatggggatctccaaacaattttcagcacgggcggggggataagaaaccttctttgggctgggacttatgggctaatttatcccgggggggctttggggcctctcatccccccgggggggggggggcaactccggggtcccgggggggggcccggg

SEQ ID NO: 37881 - DNA, 264 bp, Zea mays
  Clone ID: MRT4577_134552C.1
attaggctcttattttttttcgtgtttttttattttttttcttttttttttaagacaaaaaaatattcaaaacaagcccggtttggtgggattaaaacccgccccagcgcggtttatcccaaattggggaccccgcccagcccgggctcaatttcgtggttttggtggagggactaaaaacgcgggcgcgtgctttagtccccccttgtgtggggacccgccccaggcgtattgctaccctttgtgggcgcctagaaatgtccc

SEQ ID NO: 37882 - DNA, 334 bp, Zea mays
  Clone ID: MRT4577_134553C.1
gaggccacggtgcaggtgggcaatgtgaacgttgtggcatgtgattccaaactgctccgacagtaggtctgcgtacactcgaggtcaaggtaggaagctgataattgcggcgacgaggggtctgtctgctcgtcagtgtacacacctaggctaccgcgaggctgggtctgtctgcgtcagttctagacgcctatgctacagctcgaacggcatttcataggtcttctacgtaatgtatctgtgagtcctattatcccctagtatacgatctgctgcagctataccggccaatagtatggcatggtatggctgcaggcagccgcacacctgaggt

SEQ ID NO: 37883 - DNA, 226 bp, Zea mays
  Clone ID: MRT4577_134554C.1
gcctttgccttccctccgcgcttgttttagagccagcggacggactgagcacaggaaagccggacggacggacggagccggacgcgcgagatggagatggcgggggcggccgaagcggacacgccgtcgcaggagccggtgcgcacgggccggagcaacaccatcctgctccccatcggcggcatccttctggcctacctgctttaccgcttgcttcgcccgcgcc

SEQ ID NO: 37884 - DNA, 272 bp, Zea mays
  Clone ID: MRT4577_134555C.1
ggacaaaccaaacacccctccaaactaacccgggttatatttttcggcaggggaaacggaaaacagattttactggggggccatttattatagaggactccaacaggggccgggcagccgggcaggcaagggtacacaaagctagactgcattactaggagtagtagcaagcatgcattattggactggaaaaaaagctaaggcttgctttaacaacctagctcgccggatatatacccaaaacacacccgcttgctgttgcagggcaatac

SEQ ID NO: 37885 - DNA, 352 bp, Zea mays
  Clone ID: MRT4577_134556C.1
aaaaaacaacacgcagggggttataattaaacaaacccaaggacacaaaatccaaaccggccgggacttttggcttgggaccaaaaaaaagcccggacggaccacggcctaaaaaagggggaacactcactggcaggggcacgcgatccaccttaatagagcacacgggccttggccaggggaaccaccttgaaacaaaattttgggaaaaggaaaccagaacccaacacacatgccaacggtgggtaggttttaaacgccgcccacgggcaggacaccctgggactgggaccttaaataaaggaggtgggcctgggcttgccggggggggccgccttgggggttgtttccc

SEQ ID NO: 37886 - DNA, 481 bp, Zea mays
  Clone ID: MRT4577_134557C.1
aattaataacccagttttagtggcacacactaacataacagttaaaacaagattaagcacacagcccattgttggacagcctgggttgggagggggggggggtcatcccaatcccaagcccgaaacagatcacgtaagacaccagatgaatttgctttggggtagcagggggcatgggaaaagggcattaaacaatattaaatactggggggaaaacgggctaacaggggggcgagtcattatgagcccatctatcttttaaggatatatcccagtagcattcccaggagagcaagggcccccacgaccacaaaggggaatccacctttcgggtggggggcttccctcctgggaagggccagttcctttcgaagcttattgttctgctgaagggaaaagttttttttttttgtcaactttgaaataaaagcaaatgtttaggaggggaagccctttggatctataggagtttttacagccg

SEQ ID NO: 37887 - DNA, 874 bp, Zea mays
  Clone ID: MRT4577_134558C.1
gaggccggcccgggcttgggaaatagtgaaatccatgtaaaagaatacttggagacgaataaagttcaaaaatttgaaaagagggacttggagtcaggatgagtaccaaaacttgtttgatttggtaaatctgcacatgcgtgtgaaagcccatcaaaacatcaatactggtcaccgtcatataagagataacatttcttgggaggctatcagtgaaaaattaaccactcgtagagccgaagaatgctgcacgaaatggtacgggcaattggcatcgccgctggttaaacaaggaatctgggcagatacagatgactacatgttagtggaagcgcttcaaaatgtcgatgctgtttgtgctgaagatgtggactgggagaaccttctcgagcacaggtctggggagctttgccgtcatagatggaaccagatgattcgcctgatgggtgaccacagatataggcctttcattgagcaagtggaagtgcttgcaaggcggtactgcccagagatgcttgcgtacaggaaaccagtcgcaggtggatcctcggccgacgaacctgctggagcctctgacttgtaatatgggatctttagaaacgttagcagcatatggttctagagctgccaagggtgtcgtcagcactctgatctcaacaaactttggtattgttgagggcttatgtatcttctggatttgaaatcacggatgttttatcgcccaactaatcatgatttggggctcgattagagaacgactaggaatcaggccgtccagttagaactaatagtctgattaagtgttggatgactgttgaaaatgcaatgtgaacttagcagctgtgcactgcacttttaccttggacaaaaaaaa

SEQ ID NO: 37888 - DNA, 140 bp, Zea mays
  Clone ID: MRT4577_134559C.1
cagaaacccccacgacaaaaaacgtcacaacgcaaggtgcccctgcacaacacccggaaggcaagcacaaggaggaccacccgacggggatgccccacaaaggcgacaccactgacaaccaacagggccgcccacgcatg

SEQ ID NO: 37889 - DNA, 4352 bp, Zea mays
  Clone ID: MRT4577_13455C.1
acgaaagaattggttgaagcgaagctagctctcagacgagctgggatacgagtcgaggctgtcaattggattcccccatccaattgaagacaatccaaagatttcgttgatacaaagaaaaaggaaagaagggtagaaaaagttattagatagcgaagcgaagtaagtccaatgctatctagtaatttttctacctacctacctactattggatttgaaccaatgactcccgccgtatgaaagcaatactctaaccactgagttaagtaggcaatttatcaccacaaaagaagccccattacttcgatcgattatagattgaatcctttttataagcaataccgctccgttattggtatgtttatgttatatagtaaacggatcaaagggatatcctctggcattagagaatattcatcttgacaagaaattatctatatgttaagatatctctgacaagggctatagctcagttcggtagagcaactcgtttacacgtgcgccaatgcttttcaagggaactttttatgcaatgaacataattgaccttgttgcaaaatcaatgtcttacttcatggattcgaaagaatagaagaacagtagcctgacaatgacaaacagctggttcagtccgattcaggtgccaattaaggtgcttactcaaatagaactcctattgatttgctagttgataaggtaaatatccagcccactcaatgctaggcgtaatgaggataagggcctccaaaaaacttcttttcgttctatgaactttaaggtgtatgaagtctcatagtaaactcttgcagcggaacgatagagactccatttcacttaggttgatttaatttaggccggaggcagacctaagtcaaggtagtcctcctttgaaacactttggtattgttcctagatagatcataagacaaataatcaatcagagcacagggagccatcttattatctttccctaaagaaaaactatggcgaattaactgatctttacattagttgatgaaagagcccaatgcagaaaaatgcatgttgggtctttgaaacagttcgaatcatttcgataataatctgtttgatctgttttaccgagaaggtctacggttcgaatccgtatagccctaatatatacgtcttttttccattttaggatggatatcttatgtttcctttagtatagttttcttttccttatttagtacttgtttatagactcgacggtcgattgcgccatagaatagagataaaagcattaccataggctcattcatcgaaacgcaaatcagagagacaggaaaagaaaaaagaattttgatcaaatcaatagaaggaaggatcccttacctgatttgaatttcatcctcctttaaataggatatgctctaagtcttcccatactttcctataatgactgcaacgattttctccattttgcgaattcctattttatttgaagtatattactatcatatacattatctaaatttacattatctaaatcgatccactttaaataaaatagaaaaaatcgaaagaaaaaaaaaaaagaaagagtaaataataaaacaggatattctgtttcataattctgaaatagagttcttttttttagtattactcctcattaggatgtatatattaatcatcctattttaatatatattaatcatcctattttaattaggttctaatccaattagtagtaagtattttcttttttatttaatagtctctgactatcattaaataaagggtagagcaattcttttttctagagattctagagaaagtgagacaaagtgaagcgaaagagttttctttgtataagaattaggtctatatcatatctaaatagaagggaaatcaaaaagaagggaagtggggattacattggatgaatccttaaggaagacatatcacaaaagaaataaaggctaaagtaagcgctccttgcctttggtttgagcaaaacagattcttgtttcaccgaggaaaagagagaagttctggataaattgacaatgtcaacttgaattgactaattcagttccgcctattccacattaatgggagtacatttatgtttctgcttcacgaatatgatattttttggacatttctaataatagcaagccttattcctattttggtattttggatttcaggacttttagccccggttagtgaaggaccagagaagctttctagttatgaatcgggtatagaacccatggggggggcttggttacaattccgaatacgctattacatgtttgcgctagtttttgttgtttttgatgtggaaacagtctttctctacccttgggcaatgagtttcgacgtattgggtgtatccgtttttatcgaagctttcatttttgtgcttatcctagttgttggtttagtttatgcatggcgaaaaggagccttggaatggtcttaactgaatattcagaaaaaaaaaaaaaagaaggaaaagattccattgagacaattatgagtttgattgagtttccgttactcgaccaaacaagttccaattccgttatttcaactacactaaacgatctttcaaattggtcaagactctcaagtttatggccccttctatatggtaccagttgttgtttcattgaatttgcttcattaataggctcacgattcgactttgatcgttatggattggtaccaagatcaagtcctagacaagcggacctaattttaacagctggtacggtaacaatgaaaatggctccatctttagtgcgattatatgagcaaatgcctgaaccgaaatacgtcattgctatgggagcctgtactattacagggggcatgttcagtacagattcctatagtactgttcgaggagttgataagttaattcctgtggacgtctacctgccgggttgcccgcctaaaccagaggctgttatagatgccctaacaaaacttcgtaagaagatagcgcgagaaataattgaggatcgaactctatgtcaaagtcaaaagaaaaatagatcttttactacccgtcacaaactttatgttcggcgcagtactcacactggaacttacgaacaagaattgctctatcaatcaccatctactttagatatatcttctgaaacttttttcaaatccaaaagttcagtatcttcctacaaattagtgaattaggaggggttcttttgtgcagaaaaagaaagaaaagagcagtacaatctttcaaacttgcatttgaaatgtgaaatatttatacaaagggggagagatcaagacaatgcagcagggttggttatctaattggctagttaaacatgacgtggttcataggtctttgggcttcgatcatcgaggagtagagactttacaaataaaagcgggggattgggattccattgctgtcattttatatgtatatggttacaattatttacgttcccaatgtgcttatgacgtagcacccggtggatctttagctagcgtgtatcatcttacgagaatacagtatggtatagataacccagaagaggtatgcataaaagtctttgcccaaaaggataatcctagaatcccgtctgttttctgggtttggagaagtgccgattttcaagaacgcgaatcttatgatatggtgggaatttcttatgataatcatccacgtcttaaacgtatcttaatgcctgaaagttggataggctggcccttacgtaaggactatataacccccaatttctatgaaatacaagatgctcattgagtgataataaattcatgttcacttatacaacacaattccagattttattcaagtcaaggaatattctgacgttctgttcctaaacgaaatgaatgtattgggctgggcgtttccgtttaaaaatagaagctttttcgtgcttgcttgcgaatggcctgaatggaatgaatattaagataaataaaagacaaaaaataaaccattgagaaagttattcattcttatattaatttcctatacttgaccgaacaacttccaattccgttatttcaactacaccaaatgaattggtcaagactctcctgtttatggccccttctattctattagtttcagatcgtgcggggaaaacggggttcgaacccgcgacttctggcgtgacagaccagcactctacccaactgagctaacttgctgtttttccagtcttcgagcaatgatgtgagacatacctgtttcccttactagagccgagcggttgccaggcccgcgtccttccccaattggcaggcacgattgcagtcccataaggtccttgacccctaccttttctgagattcatggaatcatcgtgtcg

SEQ ID NO: 37890 - DNA, 1173 bp, Zea mays
  Clone ID: MRT4577_134560C.1
ttctctcgcgggaagacaaaacaattattagctactaattaatgatagaccgacatataaataatgaaggtacaatgatgatgtccttattatcattatcatatactagaaactgtgtaagggggtgtttggaagtaaaatgctttgctaagttgtcggtcgtgaactcatgattggactagactctagagtaaaactagcagttggctgtcactgtcaaacgtatatagagaaaacaagctagttggattatatgcagcccatcagcacacctgcctttgggttttccccaaacttactgctattatattgaagctagtgtgtcacctttacccatgactcctcactcctgagcattattaccttacttatatccgacaaaaaaaagaatgatttacctactagggtgcagctggggatggacagccgaacagtcttcagacttcaacacccacatgcaaatgttcctcagatagaaacagacttcgtacgacgtatttttaattcacagtcatcttcctgttttatttgaaaatgacttctttagggccttttttttacaagatactatcttttttttccttcaacgacagtgaaatgttgtatctctttacttctgaatctgcttgcattgctagcttagcttattatgtgacaaaaaaaaaactgtgaacagcgttggttcaaaaacctccaactgaacctctccgctagtgtgtctgtccactaaacacgttttcttttttttatcacgatttgatacgtcaaccgaaacaaaagagaaagataagacaaaagacagcacagcacacctgtctagcgttctctaatctcttgtctccatgagtccatgcactgtacccccactcccctcacactctacatgccgatactttgctgcgttgactcggccacatgctttgcaggctacgtttttttaatttattacacgttacttggctcatctacagtagaaatataacacataaatatctactgactaacagtagtatataaatatattacatataaaaccatattagcgtctaaactattattattggaaaaaataaaattcaattccaagaatccagaccgagttcgtgttctcgaaaacaaagtcggtggacactccaggactgcttgtttggtacttgagcctcgtgccgaatt

SEQ ID NO: 37891 - DNA, 1100 bp, Zea mays
  unsure (1)..(1100): unsure at all n locations
  Clone ID: MRT4577_134561C.1
cattgggtacctcgaggccggccgggaacagtcttttccgctgagagctcagaatcttcgtaagctagacaacatatcccagttaagcgaagcagttcgcgggtcgtcggtagcttcagcgcccggcgcccggcgagcagctacggcagctagcaggctccctcctccattaattggtggttggtgctacctttttcttcgtttagttttcagcctgagaatgatgggtggagggctaataaacacctggaagaaatgggagatccaagtactggtgctccttagcttcacgctgcagctcatcctcctggcgttcgcaaggatccgccgccgcaaaggctccgctccgctgagggtcctcctctggttggcctacctcatggccgactccacagccatctacaccctcggccacctctccctccgcgccagttcaggcgagaagcaggtcgtcgcgctctgggcgcccttgctgctcctgcacctcggcggcccggacaccatcacggcctacgccttcgaggacaaccagctctggctgcgccatctgctgaacctcgcggtgcaggccatgggggcagcctatgtcctgtaccagtctgtggctacccaaacccaccagagggccttggtcaccgcctccatgctgatgttcgtcaccggccttgtcaagtacggggagaggacatgggcgctgaagcgtgctaacatcgacagcatccgaggcggtctcgatctgcaggacgacagagaccgtcgccagccgtacgatgggagggctggaacggcggagctggagctggactcggaggaggttctgctgggcgctcactacgtgttcaacgcctgcaagagcttcttcaccgacgacctgatcacgtcgggagcagagcgcgaagctatcagcaggggcatacagttcaatggcggcaggtacacgcacgagctgatcgagatgcagctgtccctgatgtacgacatcatgtacccacaaggcggcggtcatctacacgtggtatggcatatgcatccgtctaatgtcaccggcggccccctgngcgtcgntcttcttgttccgactgagcagcagccgcggccat

SEQ ID NO: 37892 - DNA, 534 bp, Zea mays
  Clone ID: MRT4577_134562C.1
gggggttgggggtgttgttttttttttttttttttttttttttttttttttttttttttttttttttttttttttgtttccttgttgtttcccagctttcccttaccgggacccgcatgagagccagccctccccattgtcataccttttggggggggggggggggaaggcccccacaattccccccccgaaaaaggccggcggccacaaggccaaaccccagagggcccaaagagggaacaaacaaaaactgggggggcaaaacaaaaagcccactcaccagaaaaaaaacccgcccccccacccgccccaaaaaaaaaaaccacgcgcgcaaaaaggaaaaacgagggggcccccccagggggggaaacccgtttaccaggggggcccccaacagctgattttcctacaaaaaaaacccccgagaaagtagtaaaaaaaaacccccccccccgcgagaaaaggggcaaaaaacccaccccaggggggcccaccctgttaaaaaacaagaacagggtggggaacggggggatc

SEQ ID NO: 37893 - DNA, 374 bp, Zea mays
  Clone ID: MRT4577_134563C.1
ctcacatgtatgtcaatctattcatattctacctcaaagaaatactcctaactgcttgagataaaaatatttctcctgttatcaaaaatcccatactcaaacatattcctcaagatcatgcttaaatcatgctttcacagcttacaacgtacctttgttttcatataatacacaaaatccaactctccacatttacttactacaactctaatcctcgtttttcaaccctatacaattaacagatcaaactctatccacactaccaactttaatcatatctcactatacatgaacgtcacttaaccatcacaacactttctgtctatacatacaacatgcaatttaaaagcatatacatctgctatcacaataaa

SEQ ID NO: 37894 - DNA, 360 bp, Zea mays
  Clone ID: MRT4577_134564C.1
taagtaattaaagaatggcattaacagttttctataaaccacttaaaaaattataataatccgacaatttcaccactttttagagagcatcaaagattctgtcttcccaactgagcttatacccttttttgacaaatctatactgaatgtcaatcttgtccctactgattaagaatttactgagccattcaagcattctactccttttgaaaggtaactaataaacctcatcgaaccttctgataataatacttccaatgctacttcttattcttctgcttccactagtacaactgcttctaggactatcacaatgaaccattctttaccatcaaccttcctacaaatcacgttctcaaa

SEQ ID NO: 37895 - DNA, 138 bp, Zea mays
  Clone ID: MRT4577_134565C.1
gccctttaccacatgtgaatctcacaccgagggacagcgacgaggtatccaatggtcggccctgacgtgatcgaagtgaccttctgcaacgacaggatttacaccaccgttacatactccgaccatgctgtggagcgc

SEQ ID NO: 37896 - DNA, 199 bp, Zea mays
  Clone ID: MRT4577_134566C.1
ccacacccgtccgcccgggctggttagttccgttcaattggcccgcctaacctttagcctcggggccaggggaacagtggcgatgctgatgcaaggccccttgttagtgacggactgtaccccgacgggcgtagggtggttgtcttcgtccgggcggggtcggttgggcccggcggtcgggcccacggggaagcggggc

SEQ ID NO: 37897 - DNA, 1176 bp, Zea mays
  Clone ID: MRT4577_134567C.1
cagccatgcagttaggctcgttagaaccagtttatgatatatactgatactaattatgatacatgtcgaaggtatttatgcattccggtacactatgcaaaaatcaacaaacatttacgtaaaatgtgaataaaaatatcataaaaacctattgaagttggcataaatatgtatacaaaatagcataaaacagggccgtcaatccaccaccgctcgccgcctagggaagtctgtcgttgtcgctcgcgcgtagggaaggttgacgtcgtcgcgggagggagacgccagcgaacgccactccacggcgcgtgcctccgggattcgccgtcgtgtgtgctcctccaagatctgtcgctgctgctgctgaaacctatcgcgcctcacgtaaccaccgtcaccaccgggcctagggtgcgccaccgccgctcgtccggttcgggagggacgtcggtgcttgcccgctgtcacacctggatttcggggcaccaagacccgggcgcgaacataatcaccaggtgcgctgggaccaagtctcacacatatgatgaatcatggcacaggatcgaatgtcacatctttactatatatcaggagttctatacaaaataaatagataattacattataaggagacaacggtccagcaacccaaagttgactgggagacgacggcctagacctctcacgaactcgccacagcatcctccatgcgcctcatcctgcggtacctgctcttgacctgggacttgagattccaggtaccaggatgatctccagatgactcgtgacctcacgttgtattttctgacggtagcagagttgatccttggtgcgtgcagactccatgctcggactgctccatcgcgctttccacatggtggcggagaaaaattccgtcgtaggagctccctggccgtggtttgatgggtcaaggaatacgcgggaggcacgattttatactaccacaggtcggtttggggaggattgaacagagctcggatttctcgcaggttgttgagattgtcgcgccatccgcggggaaggtgaacccagccgcccgattcacccggtgaggacgacgcccttgaccggcggccccacggtaagagcgctacagtttggggacggttggttggcgaggtcccaagcgcgatctgtggggatctgatgatgaat

SEQ ID NO: 37898 - DNA, 405 bp, Zea mays
  Clone ID: MRT4577_134568C.1
cccacgccttcacccatctgacagaccagtcttccgcactaaacgatcctacattggcgtcgcgcactacaacaggcatattggcgtctccatcgatgaagcggacgactaacatgagttacagcctacgcctgacggcgatgcataccacctaagcgacaccttcggtcgaccacttactcccttcgacgaaacctgctacacctgcttcagtccctcatccttctactacgcaccgcactacgcctactccgagccgtacgactactctcaccactccaagccaaagcccatctacagcttccgacttcagcatgagcaacagtcgtattactgtagcggatactgatccaggcccgaacccgctgccgacgatggctgttgctatggatctcgctttggatc

SEQ ID NO: 37899 - DNA, 530 bp, Zea mays
  Clone ID: MRT4577_134569C.1
ggacatcgacttcatcaattaaccaaatcgacataataacactagaaaatctattaactagccgatagaaatactaaaacgaaaagcgagagcgacgatagcttctttttaaaaaaagcgtttttcaaggccacgagcacaactacgatttctgattctgccattacgtcgagcacgtggtgagcaccacacaggatttgttgctttatccaaactctcgggatttttcgacgacgcaagggatgttgacgagttagaggcctccagggtcgagcacgatagggggcttcggagctcaacacaagtggcgcgcaactggaagatagatcgtcggaatcgacggacacgtcgcggacgcggcgtgaattgacgacgaggagcaatggggtgtcacagcacacgaagggcgacacgaagatgttgggcaccgactatgacagattctagggactcgacgagctggacagagcagagagccaacccctgtgttgcgtcaacgtcaacggcagcgcgactcaagtgagaccccg

SEQ ID NO: 37900 - DNA, 284 bp, Zea mays
  Clone ID: MRT4577_13456C.1
cgcacaccgtcaacggtctgacccaccccttttaattttgccccaccaaccagcaccatgggggaggtctccggagcgcgaggggcctgcaacacaggcaacgaagacaccgctccgcgcggacctgatgaggaggaaggcaaccctgggcacgggaagaagccccaccatcagggtcacgatagaaacacaggccacccccccaccgacaaacagaagaacgcgaggcacccgcacgagcaggaacaccaaaggcgccggacagcgccacctgcccaagccct

SEQ ID NO: 37901 - DNA, 221 bp, Zea mays
  Clone ID: MRT4577_134570C.1
ttcttgtcacggcgtggacggggaccaccggcgggccgttggacacgatcacgcaggtctacgccatcgagataggttagcaccactagcctacgccggtgcccgtcaaggctgcgcacctgactgtagagctccagcgggacacgatggtcctacacatgcaacagcagaacgcgacgcatgatcatgtgctacagactcaagcacctcacgcccgggag

SEQ ID NO: 37902 - DNA, 236 bp, Zea mays
  Clone ID: MRT4577_134571C.1
atggtccccattccggtatggcatatctggcctggcagggcgtaatggattttggtttcgaaaggggaatacttggagcctatagcaaagaagcccaattctccaacaacaatatctcctgctctagtcattccaaccatttgcaggttaaaaggatagtcccatcaataaatccattgccacttgaacgccataagacttgcctctttttgtgttttcactttgtctccgtcgcc

SEQ ID NO: 37903 - DNA, 675 bp, Zea mays
  unsure (1)..(675): unsure at all n locations
  Clone ID: MRT4577_134572C.1
tcccgcgagtcggctgcgatggcatggaagaaccctctccatccatcctaccagagccacgtcctctcttagagagggagcgacgaggcggaggagaggggacgggagattactcctgaatctcatccgagtcgctgctaaactcaatcacggaaggattgtgacgacgcaccatgattgaaaaggttttgaaactgtgaaccggttgaggtgtgtgagagagaaggctctaaatgttgtgaagcgactaaggcgagagtggaaggagtgggagaagagaagtggagtgtccaatatatataggcagttgagctggtcctcaggaccggttcaaccgcccccatgggccagttcaactggttctgaccagtgtggtcagagagccagaaacagcagagggaagacgccaaaaattcaaatttctaacgcaggattctgaaaaagtgtactgcagagattccatgcgccacacaaaaaaagtcaaaacaaagtttctgcgcagatgagaccggacgacanaagaaaaagctgcgcaaaaaaattaatttctgcgcgccctgctgccctcacacttctgcgcgggaagtgacaaaaaaaatttccttgctgcgcgggcgacacagcttttgcagaagcgaccgatcacaaaaaaattactgcgcgagctgtctaact

SEQ ID NO: 37904 - DNA, 575 bp, Zea mays
  Clone ID: MRT4577_134573C.1
gttgtgtgtttttttttttttcccaaactatgcctgctaggcaacactggcactggcatcatgcctgggcctgcacaagtaaaaggaactatcaattcattgttcccaccaacatacaggctcttccattccgtccacatcctcgctttcacgggcaaatatctcgtagcactgacattctttgtacttcctgatgcacgtgggaatcatccatcccaagcggcaccgtatacacaaagttgcacttccactgcagacagtttcaagtttcagacagtcttcaaaactgttccgatgacggcttatgcataagcctttgcagagtgaatacaccactgactggaccaatgttcaggtctctttggtcttgcccttcttggacttggatgacttcttgttatggttcttggaaccatggctgttcacccaggtgtagtcgctcagcaccaagaaagggtcggcgttgtccgtgacttgtgacaggttcaccgccattggtcttgagttcttcgagacccacttcaggtaggagctcttttgggcgtcaggctttgccatgatgcttcccggccctg

SEQ ID NO: 37905 - DNA, 279 bp, Zea mays
  Clone ID: MRT4577_134574C.1
tggggccggctaccgccgccatcgattctcatctcacgccttcttcatcccccttttctgcaggcccagccggacgctctctcctgatcttcctccgccgtctcctcctgtcacccgcttgctttgaatcccttttttctgctcctccatcgctactctcctacatgactgtttcttctaagaagcatgacctctaatttaatcaaaaatttttaaaagaatattatgttttacacaaaattaaattatgcatttcttttcttaaattctataaatact

SEQ ID NO: 37906 - DNA, 327 bp, Zea mays
  Clone ID: MRT4577_134575C.1
atctactacagctgctggagtgctaatgcgctcgggtaaagtcgcaactgtgcaaggactgactgagtgcaaacacagatatgtttccaacaagggaattacaagattgatatctctagtgaagagaggatagtcatacccaaaatttgcccatgatgattcgcacaaaacacatgcttgttcgcatgaaaactgattttccagttgaggggctgtagggtgcatgctgacaccatactgttcaagcgcgttgagctgtgcaacttggtaaacggttactattactgctaacctttaacatagctcccgaagatgacttggtactta

SEQ ID NO: 37907 - DNA, 314 bp, Zea mays
  Clone ID: MRT4577_134576C.1
aatctcttgatgttgtctcttggtccggggcggatcaaactaagtttccccaggtcttaacaagggatgctttattccttttcaatgaaattcttgattccaaagtggcaccccctaaccaaaacacttttttcaacatccttacttcatttaatcattgaagaattgttgatgaaggactcaggtattatggaattattaatgattaatattgattgagcccaaccattaaacatttcaccttttttttttatcttttttgaccaacccggaagttaacccattcttaagctttcataagggatttaacattt

SEQ ID NO: 37908 - DNA, 741 bp, Zea mays
  unsure (1)..(741): unsure at all n locations
  Clone ID: MRT4577_134577C.1
ccggcgataaccaccaacaccaccaccaacaccaacaccaacaccaacaccaacaccaacaccaccacccgcaccgatgcgaggttccccagaccagggttatcaacactgggttgaacctcctcaagcaccggtcaaaggtgagtttgagcattactccacttacgctcgagcttttaagcagtacctatctctttgcattgactattctcaattttgcaagggcaactttgcaaatccgaaacgcaaaaggaaagagaaactcactgagttcaagcgtaggggtaagccgaacaaacctttggccaaccattcgaaggctttgcctgacagtgggcttgaggagcaacaacccaccatgggaatcaacggaagcgcaattcctgacgaaaagttcggggaattaaaagacgagttgtgccaagaactcgtggacaatggcgcttttgaagacgtcgtggaagcagagatcgcagtccaccatgcccaagtcgaagtagaagcagagattccagaggaagaagtatttatacgacagccagatggaacctctgttgccaaaagtgatgtcactttgtttgatcctccgccggatgtccaagacaggatcgtcaaacgtcacctcgatgatgttgancagaatcctactatgggagccggctttggactagcaagaacgatgtcatgaccattctacttagcagtggcataggcgctggagcagccaaactcctctgggaa

SEQ ID NO: 37909 - DNA, 377 bp, Zea mays
  Clone ID: MRT4577_134578C.1
acaataacataatgtacataagcatacttagatttacaaaataccaaagtagtgattattacatgcctgggtagtatgaaagtgcccacttattacaatataggggaaggccacaacttcccaaaagagcaacaagaacataaacataaccaacagacctccaagggctagtctaacagaagtaaaaagtgtcatgcacctcccctttgagaggagagtcaggctcttttaccataatatcacaggtaggtacgtagcccacaggagcacctttaggatggcccttagatagacctttggatgaaggaaccgattcctcttccacttaaactttcacttcttctaggggttctacagggtaattacaaatacatgga

SEQ ID NO: 37910 - DNA, 493 bp, Zea mays
  unsure (1)..(493): unsure at all n locations
  Clone ID: MRT4577_134579C.1
atccgagaccgtagcgacgtctccttcattttcttttactcaatctctcatcgacgtagtgccgctgcgtcctacgaaaagccatgtggacacctataggaaaaacatccagaaagaaaagggccttgagccctcctagattgtggactgctgtgtccacagtttctttgatctggacaactctcatcaaagagctcaagaaacacctcaaggacctgcacatcaactgtggtatgcagacgaatgttaccagctagnaggaaaggtgctggcgtccactgtcctataccgccggccacatgacttccagaaaatccctgtgagactcatgaagcagctgcagaaaacattctgagatgaggatgcgctaaatgttgatacatcgcggattgacacgacaccctagaggggatctcatgttctgcaccctcgaaccaggagtctgactgctggtgactatgacatcctgtaagatggtgactaccctcatgac

SEQ ID NO: 37911 - DNA, 577 bp, Zea mays
  Clone ID: MRT4577_13457C.1
ccggccgggactcctcccatacgtctactcccatctcatccagcgctagtgctattgccctctactcgcctctcctcgcccgcatgtactcctctccctgttgctgttgcgtcggtggtaaggagactttggggccggctccgctctgctgatggaggagatgagccacacgcgctgctgatggaagagacgccgtaccgctgactggaggagccgccgctggcctctcccactcaccttaggtgcgggcgtaaggcgagtaggacgtcttacgtcgccgaggcgtcttaccgactaggcgacgcttaagcgtagccttgaggacgccttaacaactatggttctaacatccaaacatgcttacgaaataaataaaaaactgtgacatttccaatgtcattctaagtcaggtgcatttgaaaaagaatgaattctgtcaggcatagtaattacaatggctccatcttaaaagacaactagtggtttatatgaatgaggaagacaaattcttgcaggtggagcaaaaattctcaattagagaaagcaaggttcaaaacaaaaacacaaattttgaaat

SEQ ID NO: 37912 - DNA, 516 bp, Zea mays
  unsure (1)..(516): unsure at all n locations
  Clone ID: MRT4577_134580C.1
cgctgcagcagcccgatcaccagccgccggcccatggcagcgctgctgggcgcggcattgctgccgccgcggcaggtgcaacgcagcaccagcaccagcagcaggccggcgggagcagcggcgcggcacagcatgaagctggcggcggcggcgcggggaacccctacttcctggacgaggaggcgctgttcgagacgccgcagtacctgcgcaacatggccgcggggatgatgatgagccccccgaggttcggccgcaactcgtcggacgactcgccggaccacccgtcgtcgtcggatgccggcgacagcctctggaactaccgggacccgtagatcgaaccgggctgccggtaatggatcggaggtagtaacaccaataatggatgtggcgatgaaactaatgagctctactctactactactattggtgcctgcaggacgctagctgcaagctgctgctgctattgctacttctactgaacctggaagctgngagtgatatggggagataaaa

SEQ ID NO: 37913 - DNA, 755 bp, Zea mays
  Clone ID: MRT4577_134581C.1
gagcgcccagaatgcgccaccactataccgtccactgggcggtagtcctccatggacgagctgatggtggtctcccagtagaccgcgtcccctcccgcggccgactgaattcgggtcagatgtgaatcctcaatgtggacaagaagaccagtcctctggctgaagtacccgaacgtgacgtgcctgataatctctgcatggccctcgctgcgtgccttgagggtctcagggtccgtgctcagcttcaggatgaagcaatcctccccgttcaccttcctctcgccgatgcaccgcgcacgagcaaacatgcttgccgccgtcagcggatccaggccctgaagggcacggcgaagcgggcgaacagggcccttggcagaatgggcaccgagccatggtgtgtgccgccacacgagcttaccgttgcatcccgcgtgcaccttgctcccgcggacagccagctcgatgtaccacatctcaggggccatctgccacagcacgaagcggccaggctcgccgccgcgtccagcgctgcggttcttagtgagacggccggcggtctcgaactcggtggccaccatgcgtaccttgcccatggcgtaggtgctgcgcagggaggccaggagcttgtgccctccggaagccgcgaggtactgctgcaggatgtactgcgcggacgaggtttcgatgggagtgtccttgacgctgaggtgcgggagtggctcggcggcgcagacgcggaccggcgcgagcggcgc

SEQ ID NO: 37914 - DNA, 279 bp, Zea mays
  Clone ID: MRT4577_134582C.1
gggtggttttttttatttctttctggggtttttcttttttttctttttttttttctttctttcctttagggaaaagggtttttcttgggaccctaaacctttctgcccggggtaacccacccttgttttctcgaccccccttttcccttaaaatttttaaccaaaaccccgtctgggggccttcctcggcggggagggggacctttttgtttaaaatttttatactcccccctttcccccccccccccaagaggggggcctatcccccctgggggcccc

SEQ ID NO: 37915 - DNA, 294 bp, Zea mays
  Clone ID: MRT4577_134583C.1
ggatcccggtcgcccacgcgtccgcccatcatatcttaccttatcgtatccttatttaccttcaaaacttacatggtactgtacctattagacctcttaacttacttgttatacttacactccatgataaccattgtatcattttttttttaaccaatattatatatagacttttatcataaaaatgattttaaaatctatgctcacatatatgatcactttttatacacattttttatccttttctcaatactgtatcaaacacattatatactttgtaaacatcttctattt

SEQ ID NO: 37916 - DNA, 452 bp, Zea mays
  Clone ID: MRT4577_134584C.1
ggggaccaaagcacactagaatgggaaaataacttcttattttggggggcacatacatcagccaaaaaattcattatgggattacaactaaaaagcaatctaaagggggccccgccaaggaggggttggggggagaagggtggtgggtttggaaaagcaagggggacaaagggcagcaactggtgcagttgaaaaaggggtggggggttagccacaaactggtgggaaaacggaagcacttgttgttgggtaaaaaaggaagcggggcttggtgtaactagctggccaaaggggagaagtatttgctggtggaaataaacagagggggtcagggcggccaattggttaaatggaaaaaaagttgctgctgaaagaaggcaatacctagctggctgaatgggagaagttgttggtgctgcaaaaaagcagcagggttcaatataaacaggggg

SEQ ID NO: 37917 - DNA, 1131 bp, Zea mays
  Clone ID: MRT4577_134585C.1
ctaacacttagacaagtatattagtacacaaaaccaatgtactaagacttagaaacatacctttactcttgatttgcactttgttcatccatgagcatagattcacacttaagcacttgtgttggcaatcaatcaccaaaatacttagaaatggcccaagggcacatttccctttcacttacccatgatgaggcatgtgaccagttaaaaggtcctcggtcagcaggcctacattctctataatccttaatcaacctgggtagaatatcacttgttcctagcccaagtctcgatttaagtacttccaccgttaggattgtttgtgttccttaggatgaaaagagcattatagggaattttgcagtaagatcccaccactgctcccaataaaaatattcttgcaagcagaagccatccttcctcaggataaccccaaagatagacactaacgcaaaggacaacatctatccgcaagaattacctctaggcaaggctaagcatttttgtaaatcatttttgatacttcaccagaagtatttataacaggaatggatttcaaggtagccaatgcatcaaagggtttccaagcaactcctataaacctaatgcacatttcgctagacttaaagtgtgtaaaaatcatttaaaaacacaaggaaaggggttgcatgcaccggggctttcttagaataaacactacgttagtgtttgttaggtggcgaccacttggcgattagcttttgtgttgacactcgttcagattatccatcttccggttcgtccatcaacatcatcctgcggattagcccgcgcttggggtcgacttggctcgtcttccgcatcacgtgatcaattatcgtaccatatcgaccataactttgcgcagacagcaagattcttgcgtagacctttttccgagcacccggcaagcaccacacgagatttattgctttatccgaattctcgggatcgttcgatgacgcaagggatgtcgacgagttggagacttgtaaggtcgagcacgacaaggagttccgagggtcgacataagcagcacgaaattagaaatcaaatcatcagagtcgacgagcatgttgggggcacaacgtgggtcgacgacgaggtccatga

SEQ ID NO: 37918 - DNA, 158 bp, Zea mays
  Clone ID: MRT4577_134586C.1
ctgactcgttctggcatgcgtacaagagactaccgattcaataccgaaggcaagactagtagagcatggtttgaattgtgacgaccatggcggctaccaagaacgcgtgccagactcatgacgagctttacgtcatgatggtcaatgccaaggcacaa

SEQ ID NO: 37919 - DNA, 256 bp, Zea mays
  Clone ID: MRT4577_134587C.1
ttttagtgatttaccgatagagactaaatgagtgcatgtggtgctttcagttgtctgtagtcttatatcatactgtatatggtaatcatctttgctgttctaaaaagcaatagaatcgccacaacattattttaacaagcgtaataagattactgttgccactgatgaaaatggtgcccgctgataatttaaagaaactcaagaaaactactcattcaagttctatttctgaaaccttgtaacctatgctgaatga

SEQ ID NO: 37920 - DNA, 713 bp, Zea mays
  Clone ID: MRT4577_134588C.1
gtccccgccaccgcctccttttttttttgctgtacctctccaccacgccgtctcccgcgccggcccccgtgcctaagcccaccgatccggcgctgatgctccgcctatgcacgatcctataccagcagcaacacgaccccgacgacgcgctgcgccgccgcctctccgcgttgccgctgcccaccgcgcccgccgacattcgcgagctcttcctccaggcctcctcgcggttcccgctctcctggcgccccgtgcaccgcctcctctcgcacctttccaccctccaccgcggcgccggcgccggcgccggcgacggcgacagcgacagcgacagcggaggcggtgggttcccacactccccagccactgccgcccgcctcctagacgtcttagccaagtccgggaacatcgacctcctccactccacgctcttctcactgccccgcagcctcctctccgccgcggcactccgcgccgccgtgcgagggctcgctcccgcccgcgaggtcgggaaggtagccgcgctcgtgacgctcttccccgagtgccaccgcgctcgggtcctcacgttcgtcaccgacgtcgcgtgctcggagccgtgcaggctccctgacgtcgcggaaaaggcgatcaagcgcgccgagcaccggcacggcgtcgcgcgcacgggcaggtgctgcgacctgctggtcgttgcgtactgccgggcgggg

SEQ ID NO: 37921 - DNA, 462 bp, Zea mays
  Clone ID: MRT4577_134589C.1
cagaagtgcattctcattagtgcgaatttcgttgggtagactgtagagtaacttgagagcccgtttacaattgtcggcagaaaattaaatttcaagcaataaatgtctgtctgcctgagttacaactaaggttttggttgcaatggaatggatggacatggttgggaagcctaagagaaactccaaaaatatttgctatcaggtttaaaacctgagatctggtgttatatatgcatctgcagggcataccttgcggccttcaacttcaaaattgttatccttctggccagtttgtaaatctggtggctggttctaatttcactcccatgttttgtttccaggatttgagaaggacatgttcaagctgaagaacgagaagcaagcaatggagcaagaagcctatctttggtctgtctctgatatgtgatcccaactgctgctccttacgagaggaatacagtt

SEQ ID NO: 37922 - DNA, 616 bp, Zea mays
  Clone ID: MRT4577_13458C.1
cattgggtacctcgaggccggccggggactctcgacgccgccgtttccgctccgtacgctagtatcacgactgcgggggacctcaccatgggtccctaggaacgagaacggcccggcggcatcgtgctgaccggccaagacgggaggcggcgaagagaagaagaagaagtggagcaagggtaatgagaaggagaacgtcaacaacgctgtgctcttcgatctggacacctactataagctggtctccgaggtgcccacactacaagcagatcaccccatccgtcctatctgagtgcctcaaggacaatgtatccatgtgacggaaggacatcaagggtctgatggtaaaggggctcataaggatggtctctgttcattctatccacgagatatacaccagggcaactcaagactctgaggggtgttttgcgacttgcagacgtgatctagtccagacgactagatgtgggtattatatgaagactattttactcgtggttagaatcgatcctactgacgtgttgaatgcccaatatgtttgagactattgtactattttagtagcatgatttttttataacctttaagaccatgctgctattcaagtgatagtctt

SEQ ID NO: 37923 - DNA, 502 bp, Zea mays
  unsure (1)..(502): unsure at all n locations
  Clone ID: MRT4577_134590C.1
ggtttggggttttttaaaaattttttttttttttttggtttttttttttttttttttggtttttttttttttttttttccaacccattctcattgcattgcaagcctcacccaagcaaccgaatgggggcaaaacattccttttacagggggttgttgggccnccctaannncaaaacacaaatttaacggcaaaaattttggcccgatcaaaaaaaaaacccccaaagaatacaggggggggagacccccaaccaccccccggttaacaattaaaggggcctataacagaccctctcatgaccggccccaattttgcaccaattgaaagcaggcttctcccggtaagtacaaccccggccccggataataacctttgcgggaaaacaacccgcccttacccaatcttaaaagcccttgcctaaaaccaactgggaaaggaagcccccaaccaaagcatcacctgccccctgggggacaacaaacttccccttgggcaatag

SEQ ID NO: 37924 - DNA, 283 bp, Zea mays
  Clone ID: MRT4577_134591C.1
gtagcatcatgagtggacgagcgtacacttaagcgagatggtgtttgtgctgcttctttgccaactacaatgggtgttgatgctggactgctggtccagaattctctgaactgtctgttgaagtttggacaagctgcctcttactgggcatgtaatgtacttaaggatcttcccgcctacggtggtggtggggaccaattgcactgtgcctgcacgctggtgtgttcttagacagaaagattgtctgctgggtaggccttgtctacattgggtccctctgtgt

SEQ ID NO: 37925 - DNA, 438 bp, Zea mays
  unsure (1)..(438): unsure at all n locations
  Clone ID: MRT4577_134592C.1
aaacccgagccgccgccggcaagacacagagggggggaacggcgccacggcaagagagacggagaccggcgcaacacaggcagagaacaaccagcggcacacagcagcaccaacaccgccaacgccaacaaggagagcgaccnccgcgagcggaccgccaacccanccgaagcgccggacaagaacgggggggggagaancacngacaanagcaagagagacgcacagccagagcggagagccaccaggncccagacaaggccacgaacacgcacggcagcaaggacagnggcagcggaangaccaagaacgaccgcggcaacaaccnaggaaccagcgccaggggcgggaccaaagagaacagggaagcaggaggngacggngcggaagggcacaggaggggccagaacggcgggggaaacaacacagcacaaccag

SEQ ID NO: 37926 - DNA, 570 bp, Zea mays
  Clone ID: MRT4577_134593C.1
ggaccctcgaggctggccgggcccggcgtcgccggctgttgctcgccttagccccttctgcctcccttcttccgtcgcacaccctgaacgcccagggcgctagcgtgttcaatatggagctgcagaaggacattgacttactcaatccaccgcgagagcttgagaagctatagcagcatgaagaatgcgggtagtccaggccgccaactccttgttcatggatgtgaagtgccatggcatggctcagcatagccactgtgatcagccactcccagactgtggttgagtgcccaggctgccaaactgcgctgagccaacctaccggtgggaagggcatgctcaccgaggggtgctccttccgccgcagggcgactagggcctgcgttctcttaccgtgagacgagataaaggaggagttgtgcaactttctgaggatatgtcctcggggagggttctgctgattactatggctgataacgtggcctgaccatgcttgtgtgaacctgcacttctgctgagcgcagtgacagctatatatggagctgttcggctttggctgccggagtggca

SEQ ID NO: 37927 - DNA, 609 bp, Zea mays
  Clone ID: MRT4577_134594C.1
ataaaaaaaaaaaaaaaaaaaaaaaaaaaaaaaaaaaaaaaaaaaaaaaaaaaaaaaaaaaaaaaaaaaaaaaaaaaaaaaaaaaggtttgtcctttgggccggaaccaccttaggggggatttttggaaatttccttaacacggggggcggttggggcttgcttttagggggcccatttggccttttgggggggggtttaaaatttcatgggcgggggtttaaaaacgtcgggatggggaaaacctgggggttccccaatttaatcgctttggagaaaatccccttttggccggtgggggtaataccaaaagggcccgcccggttggcctttccaaacatttgcccaccctgattggcaaagggcccccccttgtaggggccctttaagcggggggggggggggggttacccccagggggcccgttacattggccagggccttagcccccgttcttttggtttttttcctttcttttttggccaggttggcgggttttcccggtaaggttttaaatggggggctccttttagggtcccaattaagggttttaggggccctcgccccaaaaaaattggtttggggggagggttcacgtagggggccttc

SEQ ID NO: 37928 - DNA, 405 bp, Zea mays
  Clone ID: MRT4577_134595C.1
gtcaaggtcaaacataaaacttccataaggtatatcaagccatgctgctgcaaaagagtcttgggtgcaacaaaaaggacacaacaggttcatttaaacgaactaagccaccaccacgtattcatgacacacaacaccacatgatgtttattgaaacgacaacctccatatagaggtcacaccaggaggcaccagatgacgcatatacccagatacagcactagtttaaataaaccatggattactgaccaccactgacgttgaacaccaaccggagagcagctctccttatggatgatgcagtctaatagaggtgcggtcatccttcagatgtttgtcaacgaagatcagacactgctggtctggggggatgccctatttgcactggatctttgccttcacctt

SEQ ID NO: 37929 - DNA, 193 bp, Zea mays
  Clone ID: MRT4577_134596C.1
gcttttcccatcattgtgcttcgctgcatttgcacattcctccaaagggaaaccgcatagccccaggttgttgccgtagattgatgggtcgaccagtgtccgcagctgattacctgccggtatccttccagacagacgattgttcgaaaggttcagagtgcttagagcttccagggctgcgaagcctggagga

SEQ ID NO: 37930 - DNA, 765 bp, Zea mays
  Clone ID: MRT4577_134597C.1
gccaggccggctcgaggcgggcgacgatccaattccaatcttagccggacccggaggcagcagcgaccagcgagcgacgccggccatgctctccgccgctgcgtccgccatacccaggctccgcttagcgtcgggcccgcggctgaggcggccgtcggctaggacgcactggccgcggccactctcgtcctccagccacgtaacgcccgtggcggctgcgggggctggggagctggagccgccggacctcacccgcttagccaacgccgcgcgcatctcgctctccccgcaggaggccgaggacttcgagcccaagattcgtcaggttgtggattggtttgggcaacttcaggcagtagaccttgagtccattgagccttcacttagagctggtacaacggctgatatttctttgagagaagataagcctgaaacattcgataacagagatgccataaaggaggccattccaagttatgatgatccatatatcaaagtgccaagagtgctgaacaaagaatgatctgtagcatgtatatcagaattgttagaatattaatactctacaatgcagcatggttaaacataatgataaaatttgcagaaagattgaacgagtcaccagcaagcttaattgattttgtgcatttcaatttgataatgctgtgattgaacagagcaatcagcaaccttgcattgggacaggataacaggaaagatttgggagatctgcttcaggggaaaaaaaaaaaaaaaaaaaaaaaa

SEQ ID NO: 37931 - DNA, 431 bp, Zea mays
  Clone ID: MRT4577_134598C.1
aaagcggaacgccggacgcacggcgcccgagttcccggatcgccgccaccacccagtcgtgcgtaaaacttatcggtttatggcgaggccgccgacagagaccgccgggggaggggaaggagatgaagggtggaggccgctccccaacgaaggcaccgccctgcaacacggctactacgggcatcccccgctcttcccgcgctgcaacctctgcgacacacccagactcccgatgcctcctcgttggcgccaaccgatcaggcaagaccacactcttgaagatgcttgcgccaaagcatatggatggaggaagagatgtggaccgagccctcaagggctccccttatcaatgatacacagctactgtgcaatggagacctatcctacttgggaggctcatgaacccggactataggttcaacgaggggatg

SEQ ID NO: 37932 - DNA, 224 bp, Zea mays
  Clone ID: MRT4577_134599C.1
ggtgcgtgcgcagacccgtgggccgacgcatccaccgcccccttctgctgggccacactagagcgttaacatcacgctcaaagaacagatcattaggtcctactgtgaaaagcacccggttagtgatagtctgaagattcttccacgtttttttgccctgcgtgttcttgatcaggaggcgactgagggtgaggaagccccttccattaggaatcaatgaggat

SEQ ID NO: 37933 - DNA, 337 bp, Zea mays
  unsure (1)..(337): unsure at all n locations
  Clone ID: MRT4577_13459C.1
cgcgagnnggagcatncagaaacacaccaagcgaagccaccgagcaacgacggaacagcgagggcgagcaaganaanagcccngcgagcgcaaanggcccanggagggagcgcaacaaaggcgagcacnagggcacaaggcncacaggcgcccagagccaacanaccacaggagcnccgaccagggacnacaaggggcgncgaacaccgagcagggcaagccnacaggcaacaacaagcgcnggcggcngagcgacaacaacaaccaangaaccaacggcaacaacaaggcggggcacaacnaaccanacaaaccancgcaacacaacagcgacaac

SEQ ID NO: 37934 - DNA, 502 bp, Zea mays
  Clone ID: MRT4577_1345C.1
cggttaattggtaggcacggtaatctcctcctcctctcggggtcggccccccggggggcgctatatacatgcgcacgcatcgcacatcctgcagcggcaccgacacgcgcgccgacgcaaagcaaagaaccagactacgtgcagcaaagaatccattcgccggccgaccgccatgtccgtcgcgggcgccgtgaccacagccgccgttccgtcccgagcgcccatgtcgtcggcgtccgtcgacgaggcgcgctgcgggggcggggccactgcggcagcgggggcgggtggctcgccgttgccggccccacctcacgagtgcgcggtgtgcctgtccgagctgccggctggagccgaagcggcggtaccggtacggcgacggacgctgccggcgtgcggccacgcgttccacgcggactgcatcggaaggtggctgccgctgcgccccgagtgccctctctgccgccgccccgtgctgctcgccggtggcggcggacaacgg

SEQ ID NO: 37935 - DNA, 298 bp, Zea mays
  Clone ID: MRT4577_134600C.1
cattattctttatttgggttttttccatgctgctgcagaagaggaatggggacaacacacagaggacacaacagggccattaaaccaacgaagcctcaaccacgattcatgacacacaaaccacatatgttgatttgacgacgacttgcatattgaggtacaccatagggggccagacgaggcaattacgcacgtgcagctgcatgttaaatgacccacggcttactgaccaccgtggaggcgtagcaccaggaggagagtgctctccttctggatgatgtagactgctagggcgcgg

SEQ ID NO: 37936 - DNA, 348 bp, Zea mays
  Clone ID: MRT4577_134601C.1
ctccactctacatttctttcctcccattcattagtcatcataatcatgccactctctacgcagagagcctctacctccgaggcaactccatgaacatcatttcccaatgtactaccactcacatccagtaccgccaccctcacttcattgacccccactatgtcctcatcattcacaattaacattgccctgttcttctactccgtcacaatacaacctcactctatccctatcttcacggacctcgaaagaccataccaacccggaccctaccttcattcctaaccttatcagctgaacatgtcacacctttgcaaactcaaacacaacaaactttccattcttttt

SEQ ID NO: 37937 - DNA, 318 bp, Zea mays
  Clone ID: MRT4577_134602C.1
tttatttttaggatgttatcttttttcttttggtcgtcaacaaaaacctgggggggcctattcccggaggatccaaggttgcaataatgctaatgattcgacacatttcttcgttccatgaaaaagccaccacttttctgatacggctggcggccccaaaactcaaaatcaaaaaagccttgtttagttttaaaattgccaacctcaatccacatccgggggaggacccgaggaacaatttttttcaacccaaagccccaaaaaaagggcccaacaacttggcaccaccctcgaaatgtacgacatgggcagaatcca

SEQ ID NO: 37938 - DNA, 396 bp, Zea mays
  Clone ID: MRT4577_134603C.1
gggcccccccgacaaaatcaccaccatatagcactaggcccacaaaagttacaccgagcattgggtcggtggtagagggacccttggggggaaaaaaattataccctgaaaactactggaacggggagtcgggcagtcccgccccccccgcagttaacagggcccgggacgggagcctggagactggggtcaaggacccgcaacgccgggcaggggaacacaccggtcccctcctttccgtccgggcggggtttttgggggggggaaccgttcttttcttccgggcccggggggcgccccgggatttccgggccgggccctgggggggcccccgctttccctttgggggggggtcttagggcttgggggcgtccggggcataggtgtttcctgggg

SEQ ID NO: 37939 - DNA, 312 bp, Zea mays
  Clone ID: MRT4577_134604C.1
aaatgtgatgcatggggcacacaatgcatactcttgtacgacatgccagtcaaaagaaaggccttccgcgttaacagactcacgttcgcgcatatgttggaaaatgactataccctcatttacacgtccaagagaaaaaacctgcaaaacaaaggaacactggtgtacatttaaaaagttaaatgcgagtgggacccaattgtctggtggcgagagcgctaacaaccattgaatgacggagcccttgttggcatagctcttgacggaggggaggagacgtgccactcctggctaagatattgggaatggggc

SEQ ID NO: 37940 - DNA, 520 bp, Zea mays
  Clone ID: MRT4577_134605C.1
cccacaccggcccatcccggttattctcacctcaacccggccgggaagcagccctcgtcttcccgtcgtggaaacaaaccacgaagaaccagcgtgaggcgacggcggcggcggcggctacatcagcggctacctacgaggctacgacacgaagatcagcgtggagaacatcaggctttacatctccaggacacttttgctattactatataaagttttaaacttagaagcctggccaaacttgatggtaggctgtaaccatgcctagaactgtgagccatgagtgatgtctgcattttgttggattgaaccttggtctacgagtgggacaaaatgactgcaagcaccaactctactttgttctttgtttttatctatttaaatcatgtgcaaactatgaccaacatattgtctgtttgctaggacatacagttatcttgttgaattgaaactttatgtagaactaaaccttattgtctaaaaaaaaaaaaaaaaaaggcccctattcatgtttagagcg

SEQ ID NO: 37941 - DNA, 264 bp, Zea mays
  Clone ID: MRT4577_134606C.1
gggaaaaaatggtggtttgaacaaattaaaattaaaatctggagatacacagaccgagcatgagggcatgaccacagtgaaatgaaatagttaacggggcggactgagctacattactgcacattttttttcttgtgagaacgtgaaccaaggtttacggggccacggcgcatggggccctgcaacctactggttcttattcgggcggggaaggcttcaatgcagattcttaccttttagcctacacgggagtgttatatcacg

SEQ ID NO: 37942 - DNA, 474 bp, Zea mays
  Clone ID: MRT4577_134607C.1
agcagtggtaacaacgcagagtacgcggggatgcgaatgttttttccctaccggggacttatgcgcatatgtttctgagatcaggtttgaattcactggcatatattttttaaatatttctaaatcaaactattttaagttttacgaaatttataaaaaataatatttataacacaaaagaattcatagaaacaaaaatagaagaatataaattacaagatatatattatattaatacaaaagaattcatagaaaccctatataaattacaagattaatcgagacgaggaagaacatctactcgttaggttttatgaagatctgacggtaacaaataaatagcgtatctgaaacaaaagtagaagaatataaattttacgacgatctaagaccgaaaacaaatatgagttctagaaaaaaaaaaaaaaaaaaaaaaaaaaaaaagtactctgcgttgttaccactgcttaagga

SEQ ID NO: 37943 - DNA, 318 bp, Zea mays
  Clone ID: MRT4577_134608C.1
ccgtctccgacctacgcgtccgaacaaaccaaacaaaaaaaaaaacaaaaaaaaaaacaaaaaataaaaaaaaataaaaaaaggagaaaataaaagaaaaaataaaaataaaatatatacaaatacaacctaaaattaaaaacccttcaatataacttccttgctccattcttaaattccctaacttctatcaatttccccattttatacatcaaccttctttaaaaaaaccttcctattccctaacccttttactttcataaaacttcccctttcccctcctttttatctttaaataaattccccttttaacaaatt

SEQ ID NO: 37944 - DNA, 335 bp, Zea mays
  Clone ID: MRT4577_134609C.1
gccggccgtttcgggatcccttttcttatagatccttttcgatatggacacaaagactcccgttaagctcgctagagttacaaaggttctcggccgtactggttctcgtggtggtgatactcaagtccgtgttgaattcatggatgacaccaaccgttctatcattcgtaacgtcaagggtcctgttcgtgaaaacgatattctctgtctcttggaatctgaacgtgaagctcgccgtcttcgttaaacaaatcagcatgaggatgtgttgcaaatgaatctaaataaatacacattttgcaacaactaaaaataaaattacactcggcccctaa

SEQ ID NO: 37945 - DNA, 332 bp, Zea mays
  Clone ID: MRT4577_13460C.1
ccaggaaaaggatggggtaaaatagtttgttgttattttctcgataccctgatgtttgatgccctaaaagcctatatggtctttggaatcgttttttaacacagttggttacaaggcccaactagttgacccattggggcccaacatatttaatattgggccttttgaaacgcttcctgttaaaacgtttggggccttcgttgttttcctccgtggtttccttttcgttgaccggctgaggggggctaacattcccccaaccttaaaagccagtttgcccccaagctggtgcaattggaaattgggcccggagggcataaaaattttcccat

SEQ ID NO: 37946 - DNA, 330 bp, Zea mays
  Clone ID: MRT4577_134610C.1
agcgagcgagatgaggtgcaactgcacgcatctatcgatgagcatcatcagcagcggcgatggcgggctccatgatctcctcgtcagctctggctgtggcgcctcagggcctgacgctcctcggctgccgcgcctcggtccttctccgtcgtctgctccaagaagaagatcaagaccgacaagccctacgggattgggggtggcctgaccgtcgacgtcgacgccaatgggagaaatggcaagggcaagggcgtgtaccatttcgtcgacaagtacgggtcgaacttctacggatacagcccaatctacaacgaagataactggtctccc

SEQ ID NO: 37947 - DNA, 273 bp, Zea mays
  Clone ID: MRT4577_134611C.1
acacacgcatccaaacacacgtccggttctagatcgcaaccggcgccctttctttttttttattacgaatatcaaaggtcatttttttcaagcatagatataaatcgcgttcacgtgacattgtatttagcacgcataatcaacgcttgaataactcctgcaaattcaacacaggttcaactaaacttgccttggctatggaaccacagcaatgtcaagaaactacactaagtggcctatttggattactggcgcaaacaacacgccgctcca

SEQ ID NO: 37948 - DNA, 1219 bp, Zea mays
  Clone ID: MRT4577_134612C.1
caaggctcgtcgccggccgcactgtaggggtaccttgagcctgttcaccgccgccgcctgccgcctcacatccacagcatccatggccgacacagctcgcctcttcatgctggtggcggtgtcttcgtcggcgctcgccgggcgctcgcacggcgcgtggtccgtttagcgggcggaccgggcggacgccgcgctgcacaagcggctggggcgcgggcgccgaggccgcgccgatcgtgcgccgatgctgcagaccggccaggctgaagcgagactgcgagagagagagagagttgtacaaggctcgtcgccggccgcactgtaggggtaccttgagcctgttcaccgccgtcgcctgccgcctcacatccacagcatccatggccgacacagctcgcctcttcatgctggtggcggtggccacggcggcgctcgccggccgctcagacggcgcgtggtgcgtgtgccggtcggacctggcggacagcgcgctgcagaagacgctggactacgcgtgcggcggcggcgccgactgcaagcccatcctgcagagcggcgcctgcttcgccccggacaccgtcaaggcccactgctcctacgccgccaacagcttctaccagcgcaacggccagaacccgcaggcctgcgtcttctccggcaccgccgcgctcagcaacgtcgacccgagcgccaatggctgcacgtaccctgcgaccccaagtgctgctgcgacgacgagcagcagcagcggttcggccggcgtgtacagccctccagcgatgggtccgtcggccctcaacgacaacagcgctgccgccggcgtcgtcctcccgatggctggcgctgggcggctgctgatcctggcctgctgctcgctcgtcgctctctactacctcggcgcgtgatgaactgtcgtgtgaggacgagacgccgctccccgctgccgcttgctgttgttggggtgtcttgttccttagcccttttcttttctcctctagtggcagtggcaggcagagagaaccttgtgatgatgggcgcactgcactgccttccaccggtggaggagagcttggcagtgtgaggcccctgtaaatcttaggttctagggagggagggatgctgtgttgacttggacatgtgtgctcattgtttcatcggtctttgtttagggttgatgcgctaaaaaaaaaaaaaaaaattagggttgatgcgctaaaaa

SEQ ID NO: 37949 - DNA, 390 bp, Zea mays
  Clone ID: MRT4577_134613C.1
atggtgtatggtttcattccccatgtcagctgagttgggatgcaaattaaacggtttcatattttttgacacctaaaaacaggttcataatttgagggtgtaaattaaactgcactttcaggtgacagggcagatggttttttgtttcaatttagaaaggtgcatggaagcttcaatattatagaagaatatgcattcttactgtttttttattacatcttgataacatatgctttcatttgaagcattcacctttgtaaatatttatcattggccatctctgttccttggtactaattctttactttgtcaactaacatactgtcatgcaatgccaggaaatggaggccacttattatgtcaaggtggaagaaatcaactgtgcatact

SEQ ID NO: 37950 - DNA, 319 bp, Zea mays
  Clone ID: MRT4577_134614C.1
gacggtggcgggcgggagtgacgggtccagggttgcggtgacggtgtcacccagggagagggaggcgtcggcgacggcgcatccgaggaagtcgaagcccggccatcgctcgtctctctccgcgtcagagcaggcaatcccaacgttaccgccgatcccgcaccggccttccagtccgtcacgaccttagcgacagtcatctactcgagaaaaatactggcatctagacccccaagttcatcttcacccacgcaaagccgtgcgccgaggaatacgatgaccagaaaaaggaagtggtctagcttaagccagaggtccg

SEQ ID NO: 37951 - DNA, 582 bp, Zea mays
  unsure (1)..(582): unsure at all n locations
  Clone ID: MRT4577_134615C.1
cttttaccaacatacatggnaaacattccattagnaatcagttgngatttttccccctcgtacagaattatgccaattttttaaggaaattgatgaaatgtacttgnngtcgggaaagtcaatatgcattgtataatgtaaaatcaggtctgaggactcaggtctggcggctgaaggtgtcttttctattccatgcttcacataaggttcagcttgttctcatattgctgagtaatatagaagaaaatacaaatgaatatattaactgaactcttcttggacttctgtttgtgttccttgtaaaatataggttataatatgtgagatatctaaccaagtacatttcactatttcagttcagtttatttctcccgttcgatcaatttgaagtagccagttgtttttttctttgcctttgacaccagttttctttgagtgcagttttatgagttttatgaactaatttccccctcaattccctctaatccccccgtgagttttttcccctggttgtgtcgcggttaggcgtaatggatgcctcttttgctgctcgcatgtgcttgttttttttcctgctttgct

SEQ ID NO: 37952 - DNA, 343 bp, Zea mays
  Clone ID: MRT4577_134616C.1
ctcaatctctccctcgaacgacgccgcggggcccgaaggcgtcgcatgtcggcccggcagaggagccccgcgctggcctccaggcacgcgacgccggctgccgcaaggcccgccgccagcctgggagtgaaagagtcaacacggccctcgtcttcagtgggattagaaaaaatagattgatttagttaattgactcttgctcatcttcagtggcacacgcaaagacaaccgacgaaaaatgaatcgaatgtgctccaccatgttttctgtcgtgtgaccaaaatggagcaatatgcatagctttttttgcaaaaaaaaaaataagttaaaacacttataaaaa

SEQ ID NO: 37953 - DNA, 270 bp, Zea mays
  Clone ID: MRT4577_134617C.1
gggaactaaaaaaataaatctctaatcttttattactgggaagtggcacatttcagtttgggaactttattattacagtataaagcttaaaaaaatctaaaagatggcccccccaatggggggctgctgcattaagggggggggattcgccaaagcaaggtgtttaaatggcagcaattggtgtggttgtaagaaggctacattgttggccacatccggggggtagaaggggagcatctcgttgttgtttcaagaaggcgtttttggttc

SEQ ID NO: 37954 - DNA, 2255 bp, Zea mays
  Clone ID: MRT4577_134618C.1
cattgggaacctcgaggccggcctcctccgcggggcccgccaagcgcgtgggccttctgctcggccgctacgagctgggccgcctgctcggccacggcaccttcgccaaggtctaccacgcccgccaagccgacaccggcgagaccgtcgccatcaaggtgctcgacaaggagaaggccctccgcaacggcctcgtcccgcacatcaagcgcgagatcgccatcctccgccgcgtgcgccaccccaatatcgtccgcctcttcgaggtcatggccaccaagtccaagatctacttcgtcatggagttcgtccgcggcggggagctcttcgcgcgcgtcgccaagggccgcctcaaggaggataccgcgcgaaggtacttccagcagcttatctccgccgtcggcttctgccacgcccggggcgtcttccaccgcgacctcaagcccgagaatctgctcgtcgacgagcgcggcgacctcaaggtctccgattttggcctctcggcggtggccgatcagttccaccccgacggcctcctccacaccttctgtggcacgccctcctacgtcgccccggaggtgctcgcgcgccgcggctatgacggcgccaaggcggacatatggtcgtgtggtgtcatcctgttcgtgctgatggctggctaccttccttttcatgaccagaacctcatggcgatgtaccgtaagatctacaggggggaattccggtgcccgaggtggttttccaaggatcttagctgtctaatgaatcagctccttgacacgaacccggagaccaggatcacggtggctcgccgggcgcacgctcatcttccccgctctgctccagtgctccatcgatcaggaattcagaactcacaaacacgcctgctccctcttcgataaatccaacctattatccaaaccgtctcccgtgtgatccgtcgccgtcgaggagtcgactcgcctatccacaggcaaaaagaagaaaaaggagagagtatctagctaggagcgtcgccggcgatgctctgctccggccgcatgctggcctgcaacggggtcttgcccggtcggctccggctgccgaggggcgacgcctaccacctgcgtccaccagcgctcgcgcggaggtggcgcgtcgtggcctccgctgcggcgtccggcggctcccctgacctcccatcgtcgtcgtcttcgccgcctaacccgccgtttggggccggggacgaccagaccgccgcgtcacctgggttttgcatcattgaagggcctgagacggtccaagattttgcaaagctagacttgcaggagattcaggataatattaggagccgacgaaacaagattttcttgcatatggaggagattcgaagattgagaatacagcaaagaataaaaaatgtggaactcggaatttcagatgaagagcgtgaccatgaactccctgattttccatcatttattccgttcttgcctcctctgagtgcagctaatctaaaggtctactatgccacatgtttcaccctcatagctgggataatggtgtttggtggttttcttgcaccaatcctggaacttaaacttggtgtagggggcacgtcttatgaagacttcatccgcagcgttcatctgccgatgcagttgagccaggtagatcccattgtggcatctttctcaggcggagcagttggagttatctctgccctaatggttgttgagataaacaatgtcaagcagcaggagcttaagcggtgcaaatactgtttaggaactggatacctggcatgtgcccgctgttcaagtacgggcgctcttgtgctcacagagcctgtttcaacattcagtgatggcgatcagcctttatccgcaccaaagacagagagatgcccgaattgctcaggctcgggaaaggtgatgtgtccaacatgcctctgcactgggatggcaatggcaagcgagcatgacccccggatcgacccgtttatttgaggtgcacctttagtccaggaactgctgcaacgtgtggaagatgcttttgtagataatagcatccacaaaagattcacagataggccgaatcgtgaattcgaatcgacgatgtacgacacgaataggacgaactgaagagtgcagagaggtgtatgttgtaaagtaataaaaaatatttagaccaaagaccgtttggccctgttttatagaaatcaagctatgtttgattgtcagctatgtttgattgtaaaaaaaaaaaaaaaaaaa

SEQ ID NO: 37955 - DNA, 1650 bp, Zea mays
  unsure (1)..(1650): unsure at all n locations
  Clone ID: MRT4577_134619C.1
gttttcctcctcctcccgatctctccttctttataaagacatcgccttcctttctcccttccgagtcgccacaaaaccgcggagagatagagacggatagctagaggcgtcggaagatactcgctgctctgccgctgccgcccccttcgcctttagttgatctcgccatggctgccaccgtcgccgtggacaacctcaaccccaaggttttaaaatgtgagtatgctgtgcgtggagagattgtcatccatgctcagcgcttgcagcaacagcttcaaactcaaccaggatctctaccttttgatgagatcctctattgtaacattgggaacccacaatctcttggtcagcaaccagttacattcttcagggaggttcttgcactttgtgatcatccagatctgttgaaaaaggaggaaatcaaaacattgttcagtgctgattctatttctcgagcaaagcagattcttgccttgatacctggaagagcaacaggagcatacagtcatagccagggtataaaaggacttcgtgatgcaattgcttctgggatcgcttcacgagatggattccctgctaatgctgatgacatttttcttacagatggagcaagccctggggtgcacctgatgatgcaattactgataaggaatgagaaagatggcattcttgtcccgattcctcagtaccctttgtactcggcttctatagctcttcatggcggatctcttgtcccatactatctcaatgaatcgacgggctggggtttggaaatctctgatgttaagaagcaactcgaagatgctcgctcaagaggcatcgacgttagggctttggtggttatcaatccaggaaatccaactggacaggtacttgctgaggaaaaccaatatgacatagtgaagttctgcaaaaatgagggtcttgttcttctggctgatgaggtataccaagagaacatctatgttgacaacaagaaattccactctttcaagaagatagtgagatccttgggatacggcgaggaggatctccccctagtatcatatcaatctgtttctaagggatattatggtgagtgtggtaaaagaggtggttacatggaaattactggcttcagtgctccagtaagagagcagatctacaaaatagcatcagtgaacctgtgttccaatatcaccggccagatccttgctagtcttgtcatgaacccaccaaaggccagtgatgaatcatatgcttcatacaaggcagaaaaagatggaatccttgcatcgttagctcgccgtgcgaaggcattggaggctgcattcagtaaacttgagggaattacttgcaacaaggctgaaggagcaatgtacctgttccctcaaatctgtctaccacagaaggcaattgaggccgctaaagctgctaacaaagcacctgatgcattctatgctcttcgtctccttgagtcgaccggaatcgtcgttgtcccctggatctggatttggccaggttcctggcacatggcacttcaggtgcacgatccttccgcanggaggagagnatcccggcgatcatctcccgncttcacggtgttccatgaggcgttcatggcagagtaccgtgactaaactggtgtaacatgtgngattgcatacaagc

SEQ ID NO: 37956 - DNA, 197 bp, Zea mays
  Clone ID: MRT4577_13461C.1
aggtaaaaaaaatttttttctttagatataattatatttttttcttaaaaattaaggtaaccaacggttttagcattcccctaaagggcagactaaaccctttttagaaccgaatcaaactgcctttttaatgacacggtatgtgcccttaggcctgcttaggtttgaaaacacaggggggcgtgcggttgcttttt

SEQ ID NO: 37957 - DNA, 364 bp, Zea mays
  Clone ID: MRT4577_134620C.1
ggcgtgcctattgagctcatgatggcgcttatgctgcggctcaaggtcttccagcccgtgctgctggccatgctcttcacgttcaacgacatcgacatggggatccacgtgcgaagccgcgtgcagacctcccagatctacgccatccgctacgccgtcggcaaggggctcgtcaactagtaccagaagtacttcgacaaggccgtcaacaaggacgtcaaggacgtcttcaccgacttcgaccgcacgcttgtcggcaccgacctcatgcgctacgagccgaactagtagcctggtcatggcgcccgtgccaggttccagaagtgctaccattgagcgctccgctgagcgctcttgtccgaca

SEQ ID NO: 37958 - DNA, 701 bp, Zea mays
  Clone ID: MRT4577_134621C.1
catgccggagaaagatatgtttctcagatttttcttctctatggattgccttgctcctggcgtgattttttttttctctacgattgatctcatcctttcgccgctcagcttcgaacaaatctcaccgccgttgccttgttctcatccgctcggctaccctgatgaaaatcccaccgcgatgtccatcttctgctctcaaccgaagtccctgttccccacgcatgcttcttcctcgccgtgcccttgggtccttccatggcaggcgtttgtatccctgggcacgcccctgctttcccatgccgtgctccagctcgtcccccatggcgctcgcccctgcgcgcgagctccgcgggctccctgctcggcgtcctgttctgcgcgcccaagctcctccatcccctatgcgccgcgacccccaagctgttacagacactgtccaggaatgtgaggagggagacagcacggcatcagaaattggtaatgtccatggaccgacagcaggccttgcgagcagcagcaaagttcccaggatgtcaagtcgcataaggaagcccaatgtccgtgtagcaggcccagaatggaggatgtaatgtgtggtgtgtgtggtgaggttgggaacttaagtcgcgctgcaggcgtggtgtaataatctgaagaacatttacctgaaagaaaaccctcgagccgtcagctcttcctcc

SEQ ID NO: 37959 - DNA, 1287 bp, Zea mays
  unsure (1)..(1287): unsure at all n locations
  Clone ID: MRT4577_134622C.1
tccgagtcgccacaaaaccgcggaaagagagagacagacagctagacgcgtcaggagatactcgcagctctgccgcccccttcgcctttagttgatctcgccatggctgccaccgtcgccgtggacaacctcaaccccaaggttttaaaatgcgagtatgctgtgcgtggagagattgtcatccatgctcagcgcttgcaggaacagctaaaaactcaaccagggtctctaccttttgatgagatcctctattgtaacattgggaacccacaatctcttggtcagcaaccagttacattcttcagggaggttcttgcactttgtgatcatccagacctgttgcaaaaagaggaaatcaaaacattgttcagttctgattctatttctcgagcaaagcagattcttgccatgatacctggaagagcaacaggagcatacagccatagccagggtataaaaggacttcgtgatgcaattgcttctgggatcgcttcacgagatggattccctgctaatgctgatgacatttttcttacagatggagcaagtcctggggttcacctgatgatgcaattactgataaggaatgagaaagatggcattcttgtcccgattcctcagtaccccttgtactccgcttccatagctcttcatggcggatctcttgtcccatactatctcaatgaatcgacaggctggggtttagaaatctctgatgttaagaagcaactcgaagatgctcggtcaggaggcatcgacgttaggggctttggtggttatcaatccaggaaatccaactggacaggtacttgctgaggaaaacaatatggacatagtgaagttctgcaaaaatgagggtcttgttcttctggctgacgaggtataccaagagaacatctacgctgacaacaagaaattccactctttcaagaagatagtgagatccttgggatacggcgaggaggatctccctctagtatcatatcaatctgtttctaagggatattatggtgagtgtggtaaaagaggtggttacatggagattactggcttcagtgctccagtaagagagcagatctacaaaatagcatcagtgaacctatgttccaatatcaccggccagatccttgctagtcttgtcatgaacccaccaaaggctagtgatgaatcatatgcttcatacaaggcagagaaagatggaatccttgcatcgttagctcgtcgtgcgaagggcattgnaggntgcattcagtaaacttgaggggattacttgcaacaaggctgaag

SEQ ID NO: 37960 - DNA, 499 bp, Zea mays
  unsure (1)..(499): unsure at all n locations
  Clone ID: MRT4577_134623C.1
gccggccaggtcggngaacccaaccaccacttgcagcctccaacttctccgcgactaccttcttctacgatatcattccgatcccctcttccgaccaatccctaatgtgccgcgacatgagatctggaacggaggagaaactcgcggggctctcaacgggaggcgacgaacaaaatcctcccacgacgactaactgcggatgacagccttacgtctccaacacagggaagaagagatcagcgaagacgaacaacctcgaaaaggagagggggatcaatgcagaagagaagaaaacaacgttcgcgatctctaccgataacctccaaaggaatttcctgctaaggacgatgacgtggataccactcgatactatctaaataggctcggagctcttgattcactgaagggcacaggcctaaacccctatccccataagttaccggaagggcattctggaccccacaaccattaaaaggacaagaactcgccccatcgggat

SEQ ID NO: 37961 - DNA, 172 bp, Zea mays
  unsure (1)..(172): unsure at all n locations
  Clone ID: MRT4577_134624C.1
tcgttatactagccctctgctcctctgaaaatgcaacttttactacctcttccacctacctcaccatcnncctcaaaaccctaaacccctccccctccttagccacagccatcaccttcgtctccttccccgccacacatcattcattcctcgttgcctcctccgactaccg

SEQ ID NO: 37962 - DNA, 448 bp, Zea mays
  Clone ID: MRT4577_134625C.1
gcgtacaccgagctactgcgctacctctacggcctcgagcgctggagcaacatgtacaagttccgcacgttcctcgacgaaggcgtgacggtgtcgatcggcatggacggcctcgcgtgccagtgccgctgccagcacaagccgctcgaacacatcgagtcgggccatacgcgccagctcgcgggcgagcccgatgcggcggtgttcccggacatcgccgagcgcctgagcattccgcagctgatcgccgcgtacacgatccatggcgcgtaccagctcgggatggagcacgagatcggctcgctgacgccgggcaagcgcgcggatctcgtcgtgctcgagaacgacctgttcgaagtcggccagtacgatatcggccgcatcgacgtcgcgctgacgatgatggacggcgacgtcacgcacgtcggcgacgatttcggcgcacgca

SEQ ID NO: 37963 - DNA, 668 bp, Zea mays
  Clone ID: MRT4577_134626C.1
gtttcccttcccctactctgatcctctctatcagcgccgcctgcctccaagtccctgaatccacgggcgactcgcttgctccccctgttttcctcggccgccggagcgcgtcgcctccgagcagcagcagcactccggcagtccctggttgttcctggtggttcttgcctcctcgtctgggtgggtgggtggtggaatagcgtcgtcttcgctggaacccacctgcctgctcttgctccgctcgcgcagtcgcgctggagctaaagctactgattggttcgtactgaccagccaagccaaagagggattctttggaggcaaccagaggtgtttggtttggtcaagctcccttcttttgtcttgcccatggaatgcttgctgtgaactgcttgtattcatgcttgagagaatttcagtgtagcatcttgtggtcttgtcctctctgattggaagagaaaacgtgctgtcttgtggcttgctatgtctgtctcggagaaggtggtgctatcatcatcagtttcttcgtcgtcagatttagatccgttgctgaagggtcttacggagaagaagttgagctttaggaggaacgtggtgtcattggcagccgagctcaaggatgtgaggagcaagcttgcttcccaggagcacctgtttgtaagggaatctca

SEQ ID NO: 37964 - DNA, 174 bp, Zea mays
  Clone ID: MRT4577_134627C.1
acggtctcgatcggggcctctatttaggcttgtctcatcactttgcagcaaatggggatctacaatgcagaggatgacgaaactgatccggccatagctctcattatgtgctgctaaggttttttgggaaattcctgccaaaaaaaagaggtttgtgggaaatttcttattgtt

SEQ ID NO: 37965 - DNA, 119 bp, Zea mays
  Clone ID: MRT4577_134628C.1
cagaacaatgactataagactcctccacgtcccctgatgcaccttattactaaccatagcggccacacaagaactaagaaagtatcacataaccattaacggacacaattgttttctac

SEQ ID NO: 37966 - DNA, 873 bp, Zea mays
  unsure (1)..(873): unsure at all n locations
  Clone ID: MRT4577_134629C.1
cagncgcccggccgattagtccaaactccgcgtatgtcgtcttccccttcgcttcgcatgactgaccctcccactattccatttcatcttccgaaccaagaaaccggccaccagagcgaaccccaagaaacgaccttgattagccaaagacagagcagcggcgcaagcgatccaggcgatgcagccagccgccatgaacagcttgttctcgagctcatggaagcgcggcgtcggagacggcggggatatcgagtccggcggcgtggagatgtctgcgctgctgccgggtgccgcggcgggggcgagcctcgacaggctcttcgaggacgtggagtccatcaaggacgagctccgcgacctggagcgcatccagcggtcgctccacgacgccaacgagggaggcaagtcgctgcacgccgcggcggccgtgcgcaacctccgcacgcgcatggacgcggacgtcgccgcggcgatcgagaaggccaaggtggtgaagcaccggctcgagtcgctgcaggtggctaggaaacaccacacgagcacccgcaagtggatctgcatcgccatcctcatcctcctcctcgtcatcctcgtcatcgtcctgcccatcgtgagctagaactagcgtgcgccgcctggcctgccagcgttcatgacgatcaggtcgccgtcctgtggatacacatacaatattcgtttctagctattcacaataatagtttcacggtaatttcatacacataataatgcaccacatctaattttttatgacatgttatagtatttaaaaggattgtgtttcatgtgagaaattagttttatggggatgaaacatgttnaatcgtttttaaaaaaaaaaaaaaaaggccccta

SEQ ID NO: 37967 - DNA, 868 bp, Zea mays
  unsure (1)..(868): unsure at all n locations
  Clone ID: MRT4577_13462C.1
cattgggtacctcgaggccggccgggtgtaggtacgcttctgatgaagcaatcatcagacaccctgaagaaactctcttttgaactgggtggaaacgcacccttcatcgtcttcgacgacgccgacctcgaatccgccgtaaccggcgccatcacatccaaattccgctcttcaggccagacatgtgtgtgcgccaacagaatctacgtccaatccggcatctacgacgaattctgcaccaagttcacagaaaaggtccagagtttcaaggtcggcggtggatacgaagagggcatcacacacggtcccctcatccacgaccgcgccgtatcaaaagtcgacgcacacgtccaagacgctgtcaagaacggcgccaaggtcctccatggcggccagaaactcccagatctcggtgcaaacttttaccagcccactgtcctccgtgacatgactaaggatatgcaacttgcaaaggacgagacttttggtcctgtagcgggtctcttccccttcaagactgaagccgacgtcgttaagcttgccaacgaggccgatgtgggtcttgctggatacttcttcagccgcgatattcagagagtgtacagagtcgccgaggcattggaggtgggcatggttggcgtcaacacaggtctcatttcagatgttgcttcaccttttggtggcgtcaaggagtctggatatggacgcgaaaggagncatatgggtattgacgagtatgttgttaccaagaccattactatgggtgggaatggccagccgctgcagggcgagtaagggatcttgaatacaatagtgctcatgtcgcagcaagatagaaagttaaatgcattctgaattttggtatctc

SEQ ID NO: 37968 - DNA, 340 bp, Zea mays
  Clone ID: MRT4577_134630C.1
tccttcatgctcattccaattgtttccataagttgaggagacgacgttcaagcccaacgggcccggggtcatatacgttagcgcgctgttgaactagaacatgaatccagtggcctcgtcagaccggaactgcgggatgatctaacccaacggcctgccagatactaccgctgagacgctgatgcgcgggaggatcaggacccgacggtgggctcaacccttaccacacatgcatgttcatacttatgtacagatccatggtgagcgcgaccttttttacagagagagggaagctgatactagtgctggatgcaactcgaatacttcgacactattgcta

SEQ ID NO: 37969 - DNA, 619 bp, Zea mays
  Clone ID: MRT4577_134631C.1
ttctgctacccctccctcacccgcatccactcccgcctccccggtgatgcccaggaaagtcctgcgtggtgcgatgacaacgctcttcgagaacaaccgcgagaagcggggccacatgtccgccggccacggccgcatcggcaagcacaggaagcacccgggatgtcgcgttaacgccggtggcatgcgacaccaccgtatcctcttcgacaagtaccatccgggctacttcgccaaggctggcatgcgttacttccataagctccgcaacaagttctactgccccgagagcacatcgagcgcctctgatcgatggtgcccgccgacgaggtggcggatgccggcggagacaaggcaccgcagatcgacgtcacgcagtgtcggctacttcaaggagctcgggaagggggtgctgccgcccaagtccattgtcgtgaaggtcaagctcatgtccaaggtcgccgagaataacatcaaggcagcaggcggcgccatcgtgctcaccgcctaggtttcagaccttgctcgcctcctggctttgaagtctatatctgaactgatagtggtttcctgtctcagcaatatgcgttacgaaaacctgtagattctgaacaggtgg

SEQ ID NO: 37970 - DNA, 920 bp, Zea mays
  unsure (1)..(920): unsure at all n locations
  Clone ID: MRT4577_134632C.1
cggatatattttttccttttgcacaacctttaatattgatcattgtkacaagtcacttcaaacctcatctagakacaagttaaagagtcckggtcactggaaacaacaaaatcattkaagccaanacckaktaactacatagtctatktaaacarcgkccsgcctcgarrcaatttacraccaaaaaaaaaaaatttgcsaracsgtctttsggcrgtgggttttttcaatttgaktttacsstgtcaattccrgaaggttctcacaccaaaatccctcttttscttastkcytgcccaataaatcacttccactcttccaasgtacaagctctacctascaatgccrtgagaaccccccctaatcckgagraccttaacaacggcctcgrttgttttttatgtttcaaaaccacarratttcagcaktttttaarakttattttcctcstccgaaaacccascatcyacaaarcctcttataaccckstcaaacttatcrgacttcaatagtttcttcttctcttccaaaatctttaagtaccttcgwkgtttagtcttccttgggacgacttcccagwasagagtccvcaaagagacacagtgacttckatgagmckcttctcsaaggktstktatctkctnsacaaagtgttcrgcctcggggactaacttgarcatatacagccaakccagtaaggtgggatttttctktagaccaaatttaaatcctkccttctstaaactcggsagccacttcagaggrggggctaatttggtattsttcrkrtattccggcaccacaccracgggtkaactckcatctgcttcctttccgaacttcctcctcatttgatcaaacakwgcasaracctcktttgwkatcacracacatccgtatgcttctatacatattttata

SEQ ID NO: 37971 - DNA, 276 bp, Zea mays
  Clone ID: MRT4577_134633C.1
gccgtggaagggcagggctgcatcacgccgctgagcctgaagcggatgctcgccaggctcggctcccaccaggacgttgccgagtgcacggccatgatctgcaggttcgacctcgacggcgacggcgtgctcagcttcgaggaattcagggtcatgatggatgcatagctaacggattgtgttgtgtgaatacgtgtgattatttacttgctgcttgtttttgcctgtcgtccgaattcaaacgtcaattaattactactagtttgtttctgtgtc

SEQ ID NO: 37972 - DNA, 366 bp, Zea mays
  Clone ID: MRT4577_134634C.1
cttgtttgatcaatacgcctctattgttcgcctgactggtacccttcttggagctgctatcggtatcattttcgttgtcagttctgtgttactaggatctttggctactggtgcagttgttgccatgactgttgttatgatagtcgtagacatcataggaaccatggccattgctggtgtttcgctcaacgcagtttcgcttgtcaacctcgtcatatgcgcgggcattggggtcgagttctgtgctcatattgcgcgtgctttcatgttcccgtcccgcaacatgctagagaagagtccgaagctgcgtggaaaagacgcacgggtctgggctgcactcatcaatgttggaggcagtgtcttcag

SEQ ID NO: 37973 - DNA, 386 bp, Zea mays
  unsure (1)..(386): unsure at all n locations
  Clone ID: MRT4577_134635C.1
actgtctctannannananaaagaagaccgtatgggcacggggcgacacaaaaggagggggggaacggaaccccaaaagacgagacaaaacaaacacaaaccgacaagaaaaaaaaaagaggcccgaaagaaaaggaaccaaccaaaacaagacacaccccgcgggggagggaaaacccgggggaaagagccacagccacagaaccaaaacagcctgaggaccggacccacaaattattcaaccaaaaacgaggcacagaccgcggccgacacaaccacacgacgggcacggagagcaacagacgaaacggcagacgagagacacacacacacacagggagacgccaggggaaaccgaaaaaaactgaagggccaaagccagaaaa

SEQ ID NO: 37974 - DNA, 297 bp, Zea mays
  Clone ID: MRT4577_134636C.1
ctacctggtaagcggctacgtccagcgctaccgctacttccgcaagcacggtcgcaagctcgggggaccccccaggacctcctcggccacccaaggagccagggcccccagacaagggtggcccaggcctgcccctgccccctctctaagactccttaccctgtccctgtgcctctgagattctggacatatttatggctccacttccccactatgcccccctacagtgggatgatggggaaggttgctgtgaggaagaggagagcccaccctagccctatccctacccgttgacct

SEQ ID NO: 37975 - DNA, 441 bp, Zea mays
  Clone ID: MRT4577_134637C.1
taggggccttttttttttttttttttcttttttttttttttttttttttttttttttttttttttttttttttttttttttttttttttttttggccccccaagggaaaaaaaaggggaaaaaatccacaaacctatcccccggtacgggggaaccggatcaacaaacaacccatccctggccccagaaccccctttggtaaacaggaaccacccaaaattttccccccccccgggggaacaaccaccgcgaaaaccccccccccccccgaagggggaacagttcccccgggggccccctggcccccctggtcccggggccggcccaaaaaacccggagggaggggaaacggggggccccacccggacccccggggtcctggaggggaccaaccgggcccccctgatttggcccgggaccctcctccccctggttttggcg

SEQ ID NO: 37976 - DNA, 387 bp, Zea mays
  Clone ID: MRT4577_134638C.1
caacaacccatcattggtggtgccctcttttagatttcttatgaggtatagttcagtgaataaagttttatgtctgaaaaaaaaaaaaaaaaaaaataaaaaataaaaaataaaatacaaaaaaataaataaatactaaaaaaaataaaaaaacatcaaaatcaagaagtgatggccatgaatatacaacgatgcaatcatagatcaactcttacagacatgcccatcgctaacattgaaatactaccgactgtctcgttctggacccaatactaacacgctgatcctgatcgcatcttccttcatattgtcagccagactgcaacatgggacttacactgatatgccttatcaatagcccaaattgacaaaagttagtgctatgta

SEQ ID NO: 37977 - DNA, 489 bp, Zea mays
  Clone ID: MRT4577_134639C.1
cacgcccacgcaagctcgcacctcggctcgagcaacgcgaacggtgcttactttgcgccgaaacccgaaccaaaagcaggagggaaacacgatggcggcgatgaggccgacgccgccaggactgggccccggggcggggttggaaatgcctcacatgacatcgcagagaggccgcatagcctgcacagagtgacgaacttcagcgggacgatcgcaaactcgctggagaatctgcacagcgatggcgacgggcagcagcacaccaccggcccgcagggcggccagccgaggaaccggccgaaaaccagcagcagcacctgaaacagacatagcggaaggaccgagaagagctcgagagaccgagagacagagagagacccagagtcgcgtcccctcaaggatcagcacgcgtacgtgcagataaacaggagccagtcggaaccgcacctgctttcattaatatatactccggatgcgacgcacatgtaa

SEQ ID NO: 37978 - DNA, 355 bp, Zea mays
  Clone ID: MRT4577_13463C.1
attcggctcgagccaccagagacaatctttggccatggagacgtgcttcagagcgtgggggctgtacgcccccgttggcggcaaggacaggctcctcgtcggcaacctgcaggagctgccgtcgaagcgggcgctcgcgccgctgtccggcggccgcgtcaccacgcgccggccgatgtacgttcgccagtccaagaacgcagtggacgaagttgtggtggctgacgagaagaactgggacgggtcggtgatggcttgcgagacgccgtagctggtggagttttgggccccgtggtgcgtgtcgtgcctgatcatcgcgccggtgatcgacgagctggtcaaggtctacgccggc

SEQ ID NO: 37979 - DNA, 408 bp, Zea mays
  Clone ID: MRT4577_134640C.1
aattcggcacgaggccgattcaacctcctaagccctaacacgtatggggtagtccgggacacagatccgcgcgcgcgcctgccagagagcacaaagcgtcttctataactgaaccgtccatggcttagccaaagctacctgatttcctacgacgcctgggagaacaaagaatactatatggtgatgctggagaggaataaatatccgaacgcggctgatggtggacgaggccaccaaggatgacaactacggcgtctttgtgtacccgggcaccatggaaaggctacagatattgcttggtgacacagacctggtaactggcaaaaaaataaaggacagtatcttggtatgcgctgcagacgagacatgggaggagccaaagtggcacatgaacaaggctcgaaggaa

SEQ ID NO: 37980 - DNA, 351 bp, Zea mays
  Clone ID: MRT4577_134641C.1
ggaatggaaccatttcattacattgcatttggttccccaatcaaacacaccccaagatcatccctgtactttgtacaccccatccatcaatacaatcaagcacgaaatagagttttacatccaccgagagtgcatgaacctgggtaaccttgcctacttgttttccacctatatcatccgactagctgtgacacccaatcgagtgatctgcctaggtcaatcaatgttttccctgcaccatactatctacaattattatgtgatgcaggtgacaaccaatttacatgtagtcccaatatccctcaaataattgtgcgttacatcccaaatcgcacggaagccatatatata

SEQ ID NO: 37981 - DNA, 459 bp, Zea mays
  Clone ID: MRT4577_134642C.1
atgttactgactgaaatgggattgcagtcacaggatttggtaaaaaaaagagggccacggcgcggcagaaacaaaagcgagccgagcccaaacacaggccaagccaacataaactaccaaaaccaaaaccaattgaacacggcaaaaggcaacaaaaaccccaacccgtacgaggccaggggtgccgaacctaaacacggccacccccaccaaaaaaaaaaggggggattccaacccataccaggaaacggaacccaaagacgcagcggggccgggccaaaaaaaaaaaaagacatgaagggcagcggtcccgaaaaaaaagacatggccccccgcgccaaaaaaagaacatgcggccagcacccaggcatcccaatccacttcacccagtccaagcgcccctgcaacaattttacccagcccatatagacctaaaccccaacccggacgcgaggcccg

SEQ ID NO: 37982 - DNA, 434 bp, Zea mays
  Clone ID: MRT4577_134643C.1
ccacccaccacctctccattaagaaagggggaggcaggtcggtgcctctgcgcagaagggctggctgagcattagaccatgacgtccggggcggcggtgcacgggaggtctggggcggacgccctcgtgggaagagcggttagaacaacaagcgacgagagcgcccgcgcttggggggggggggcaatacttcacgggcctccacagcgctctggcatctacaagctagcaaaggcactgcttacaacaactatgtgctcaaggcgctctatcccgaggctgcgtgggttgctcaggactacggttccacctaccgtaaggtttgcaggccgccaccatggatccagaacccctctacggtatctcaactgctgagcgcgccctgcttgcccttcctgagcctggtgccgcactaccacgcaaaccctgatgtc

SEQ ID NO: 37983 - DNA, 147 bp, Zea mays
  unsure (1)..(147): unsure at all n locations
  Clone ID: MRT4577_134644C.1
aattcccgaagcaagccagccgtcctccatcaatcaatntccaaccactacaaccacattaccattttctcatattttcatcagatnaaagtttttatcacttaaggcaaccaanaanctntttatattnttcacagtagccccctc

SEQ ID NO: 37984 - DNA, 348 bp, Zea mays
  Clone ID: MRT4577_134645C.1
gcagagatggcggagaaggtaccaaaagctggtctctggtacaataagttccttggcttccgggtgatcggaggagaaagaggtgtgaagttcgtgttcgacaagattgacccacagcgtccggagaaggaatactcgtttcgcgtaagtccgagatcacaattcatcgatagtgatcctcatgtcaaggacattgatgaattggcgaaggatttggatttgaacgaacatctattcgagtttgtaagaatggccagagagaaattccagtctcccttcatgaacgagacacttcctgtaagcccagatgcctctgccgcaccactcccgtctcccatggtggtgtca

SEQ ID NO: 37985 - DNA, 1998 bp, Zea mays
  Clone ID: MRT4577_134646C.1
ggtaccctccgaggctcggccgggctgtcttggttctatagagcgaagccaccactcctagagagacgagcagcgtatgtcgtcgtcgtccgacctcgagcagcaggtggccaccgccctccgccgtgtgacccccgtcgccgccgcgcctgctgtagaccgtggaggcgcgccggatctggcggcggcgattcagcgccgaatggcctcgcaacgcgccaggggtgccgacgcgttctacgcgaagttcgcgtcggcccggtcgctcgccgaccagaccttctcacgccgacgagtacagctgaagggactcaaggatcagctccgggacctccagtcgcagctcagggagtctcttacacttcagtcgtgcaaggaatggaaatacaggattgccacggagccgatgtcggaggccacagctacgaatgagcggctccgtagctgggttgcggatttcagggacaagaggaacaagggtgctgcaatcgtatttgagcaacttcaagctgtcgaatcacttgaggcaaacagtaatgaagatgcagagatggcggagaaggtaccaaaagctgttctctggtacaataagttccttggcttccgggtgatcggaggagaaagaggtgtgaagttcgtgttcgacaagattgacccacagcgtccggagaaggaatactcgtttcgcgtaagtccgagatcacaattcatcgatagtgatcctcatgtcaaggacattgatgaattggcgaaggatttggatttgaacgaacatctattcgagtttgtaagaatggccagagagaaattccagtctcccttcatgaacggtaaccagcaatttttgtattctttttacgataatgtgaccaagtatcatacttaattacttattataaacatcttctgcaaatataaacaatccgaatcttctttccctaaaatactggcaaggggcaataggtttaagcagagcagacttgcaagtaaacatgtgactttgcctcaaatacatcctttatatgtagatgcaggacaataggacatacaatgtatacactgtcaagtttcagttgaagacatacaatctatacactgtcaagtttcagttaaagaggctctatggtcttgttattatgtagttttggctgcgtggaagttccaaagcatatttttaatgttgtcgcaaaatgcaaataatatggtgcatgctttccaatctagaaaccagttctcattttttccttccttccggatatggagcgggcccttttatgaccaaagatttgtgtatggaagatgagattgtgttcttcttgttctcctctggaagctgtcggctaactcttgtcactgcgttcctcagagacacttcctgtaagcccagatgcctctgccgcaccactcccgtctcccatggtggtgtcagttaacagcagaagcggggaagctcacagtcaaacccaatctctaagcaagaacagtgcacggttacttcctgctaagagaggcgccacagccctgccaggagcttctcctggtgttttgcgtcgttccccacgtctcgagtcaatttctctctctctctcttgcattgtttgtgcagggaatgcggtgagctagttagtagccgtagcaggttccgacccctggatcttgaaccaagcgatcatcatcagctcatataaaccgtggtgattcagctgcccttgcttatgggtggtgcttttttctcccttctaatctaactggaacttatagaagtgtatggttggcaattggccgggtacagtgattaaccctaacctggcctgtaatatattgttatactctggtcattagatgatgagttcgtgagtcgtgtcctggtctgttgtatggtgtcaaatatatagcaggtgttgtttttgtgtgacacccggatttaagggtaaatccggacgtgaattaaatgtgtgctatgatcaagttttacacatatgatgatttatgatatag

SEQ ID NO: 37986 - DNA, 274 bp, Zea mays
  Clone ID: MRT4577_134647C.1
ttgttggcttctcctccaactcaggttcaagttcgagtacgtaaagtacacaggggttcagtttcgtaggtaagcggatcgagatgacggcgtctaaagatgagtaccgcagcttcatctacgtaatcgtctggtacacttgagaccattctattgataaatccttcaacatctacagataggttttagagacctaattaatcatctattgtgttatgcagaggtcaatctgcttaaggatagacaactactccacgaaaggctcgattcgtga

SEQ ID NO: 37987 - DNA, 962 bp, Zea mays
  Clone ID: MRT4577_134648C.1
ggtaccctcggtttcggccgggcttagcgccattgaggatgtcttaaaacagaaaaaagacagagcaaatttgcggcgtgtatctagcattgaagctcttcattcagcaactaaggcgcttccaccagactttgttaggttagatcaagacattttatcccctcgagccggaaagaaggagctgtacacataccagacacttgatttctgggaacagatcaaaaccccagggatgtctttgagatgctctgggttatatctctctcagtttcgccatacctctcctcatcttttagcctcaggagatggcaaaagaactgccactattgttggcgatgtctatatccatccatctgccaaggtgcatcctacttcaaagattggcccaaatgtctctatatcagcaaatgcacgtgttggagctggtgccaggcttatcaattgcataattctggatgatgttgaaattatggaaaatgctgttgttatatattcaatcgtagggtggaaatcatccattggaaaatggtcacgtgtacagggcgaaggtgatcacaatgccaaacttggcattactattcttggtgaagccgttgacgttgaagatgaagtagttgtagttaacagcatcgtgctcccaaataaaactctcaatgtcagtgtccaagaggagatcatcctataataaccatcgtttttttgtctaattccatataaggtctgagtaccaatcacatagtttaagtttattcgttctcaccatgtaatgtaaccttccattagattgagattattagtttgcatttatacctgtcttgcagcatgacactgcgcaatcttgacttgctatgctactttggttagcgattgtggtgatgtaaaaaatgtacaaacaggtgacaccattttttgtgagaatgactgaagacattacatcaaaaaaaaaaaaaaaaggtcggctt

SEQ ID NO: 37988 - DNA, 575 bp, Zea mays
  unsure (1)..(575): unsure at all n locations
  Clone ID: MRT4577_134649C.1
aaaaaaacattggatttcgattacccattgtcatttctagtcaaacgtggccaaccactaaatcagataacaatttgaatagtacagtacagtgagcacaagtggcaataggaggacaataatcacgctgaataagtaggccccacatcacagtccttctggcaactgcacatggttttatcattttatttttaaaattgttttttatggacattatctcgatcacgttcctgccacagaagctcatcaagcatcggacggcctgtagttgtagacgtgaaagcttgcatgtggggccacggcgtcgaggaagatcctggccgtcgcctcctgggccaccgacgcctgctccttctccacgagcgccgccgcgaccacgtccccggcggggccgcctccggctgccaccatcgcaatgatggccgcctggacgggacccagcgtcgggttgtaggccgcggactccaggcagccgccggcatagatcctcccgtcgccgtctgccaccgcgaaccccgacggacacttgctgtacggngcgtgcgccgcccgcgccgccgnctccgnggcctgcc

SEQ ID NO: 37989 - DNA, 1941 bp, Zea mays
  Clone ID: MRT4577_134650C.1
ccggccgggggctcagccaccggtttcagcgccagttcaaccccgcacccgcaccccggtgcggcacggatcccaccgggcgcagcgcacgacccacaaagtcagaaagccgctgcccggaaatcgcccgcctccgctccgctacgctctcaccacctcctccgacgtctgatcggcatcgccttcgcctccgctaaaatactcgcggtccacgctctcctccaaatcccatcgccacgccttcgcccgcgcgcgtctctccctcccccacactccgccaccagcgccgaagcagagcagccatggccggttacgagcagcgcgtcgtcgccgtcatcatggtcggcggccccaccaaagggacgcggttccggccgctgtcgctgaacgtgcccaagccgctcttccctatcgccggccagcccatggtgcaccaccccatctccgcctgcagccggatccccaacctggcacagatataccttatcgggttctacgacgagcgggaattcgcgctatatgtctcgtctatctccaacgagctcaggatccctgtcaggtacctgcgagaggataagcctcacgggtcagctggagggctctacatctttagagattacatcatggaagacagcccgtcacacatagttctgcttaactgcgacgtctgttctagcttcccccttccagacatgctggaggcccataaaaaatatggaggaatgggtactttactagtcaacaaggtatctgcagagtcagctaaccagtttggcgagttggtagctgatcctgaaacaaacgaactgctgcactatacggaaaagccagagacttttgtgagtgatctcataaattgtggagtatatatatttacccccaatatctttagcgccattgaggatgtcttaaaacagaaaaaagacagagcaaatttgcggcgtgtatctagctttgaagctcttcattcagcaaccaaggctcttccaccagactttgttcggttagatcaagacattttatcccctcgagcaggaaagaaagagctgtacacataccagacacttgatttctgggaacagataaaaaccccagggatgtctttgagatgctctggattatatctttctcggttccgccgtacctctcctcatcttttagcctcaggagatggcaaaagaactgccactattgtaggcgatgtgtatatccatccatctgccaaggtgcatcctacttcaaagattggccccaatgtttctatatcagcaaatgcgcgcgttggagctggtgccaggcttatcaattgcataattctagatggtgttgaaattatggaaaatgccgttgttatacattcaattgtggggtggaagtcatccattggaaaatggtcacgtgtacagggcgaaggtgatcaaaatgccaaacttggcattactattcttggtgaagccgttgatgttgaagatgaagtagtgatagttaacagcatcgtgctcccaaataaaactctcaatgtcagtgtccaagaggagatcatcctataatagccgtcattttttgttttatccctaataaggtctgagtaccaatcacatagtttaagtttattcattctcaccatgtaagcttctattagattgagattattgttttgggtttataccttgcagcatgccactgcacaatcttgacttgctgtgctactttgattagcgagtgtggtgtaaaatgtacgaacaactaacacccgagctgctagcttcagattaaagcaagctgttcaaactgccgcagctgtaatccatagagacaaaacactattgaagacttctagcccacaagtgaaattggaagtgtaatcaaatcctaatataattgtcataatcatattgttaaactgtataagtgaattgcctaccttttttctaacagctt

SEQ ID NO: 37990 - DNA, 265 bp, Zea mays
  Clone ID: MRT4577_134652C.1
ccggccgggaacctcatccccttccgaatttctctacctatccctggtcttataacaccttactggatgcaatcgagttcacgtacatcagttgtgcgcgcgagtacggtacgcacgcaccacttacctagatcgcataggccgtgcgttcgggagacgcctctatcaccctgaccgcgccagctagcgctcgaccatcctgggcacagcatcaaactgagagttctatccgtctatccgactaactccgctcccctgtcaagcg

SEQ ID NO: 37991 - DNA, 331 bp, Zea mays
  Clone ID: MRT4577_134653C.1
agctcgtgctctctgctctgcactatctactaccaaagaaagatgaaggacttggcggggctggggcacctgttcgtggtgtccttcctgttccacttcgcctccttcatggtgatcccggcggtcaccgacgtcaccatggaggccgcctgccccggccgcgacgagtgctccgtcgccatctacctcagcggcttccagaacgcagtcaccgggatgggggcgctcgtcgtcacccccatcgtcgggaacctgtcggacaggtacggccggaaggcgctcatgacgctgccggtcaccgtagccatcgcgccgctgtttatactggcat

SEQ ID NO: 37992 - DNA, 950 bp, Zea mays
  Clone ID: MRT4577_134654C.1
gaccctcgggcttgccgggattttgcatcgcacgacttggatccttgcgatatctatcaaaaaaatcctatacaaaagttcagtcttcagagtctccgcagatggagctctccgctggcgttgtgcaacgaacaaagctcatgtcataatcaccaatcgataatcggctgatgataccaaacaaggagtcactaattatcccaaggcgcccatcgtctttaaaatatccgagttgcgtgcgttgccatcctctcttgctcggtcgcctttcccggtctttggtgtggataaaccggctttcttgctgttctcgatccttcttcaattcgcggtagtttttccttttgtcgcttgctcttgttctctttccaagaccgaggaagacgagtcagatttggtgattgtgtagagcgaacaagtgattgttcttggagaagcataggccgcgtctctcttggctgctcttgtcttcttgagcaaggaggcggaggaaaggaaagacatggaagaggaatccgtcgcagcttcaaggtactactgccacatgtgctcgctgatcataaggcccgaactgggcatcgaggaggtgaagtgcccccactgccacaccggcttcgtggaggagatggcgggcgaccggcaaggcagcgacgacgcagccaccagaggccgtcctcccggcggcgaggcgagcgctaacgcctcggacgcggcgctggagcgcgaggtttcgctctgggcgcctgtgctcatggacttcatcgccgcctcgtccggccgccacggcctcgacggccacggaggggacctcgcggctttggcgcgaaggcagtaccgcaacatcgccctcctgcagctgctcaacgcgctccaggaaggcgacaccgatgccgggcgcgagcgggtcgtgctcatgagccccgcggacgcgcgcgccatgcttatgggac

SEQ ID NO: 37993 - DNA, 390 bp, Zea mays
  unsure (1)..(390): unsure at all n locations
  Clone ID: MRT4577_134655C.1
gcctctgttatccggtcgcgcctcgccgaaggggggagagggattttctcggagttcgagagcancgtgctccgcgacccgcccaagaccgcggtgcctggcggtaccgtccacccgctcactcgctagcgctcgtcttgctgccgagggcaatgagctcgcgccgtccttagctgacctcgagctccccgagcttgagaaccagttaccccttgcctctcacattgtctggatcattgttattcttgaacacaacctggagggggaaatgaattgacgcggaaagcttgcagacaatgctcaaatatgtgttctatgatacttcactgttagtagaagcattgacacatagtncttacaatattactggtattacagcttgcaatgaga

SEQ ID NO: 37994 - DNA, 720 bp, Zea mays
  unsure (1)..(720): unsure at all n locations
  Clone ID: MRT4577_134656C.1
ccgggtattaatccttttgcacttaataataatacttagataatttatggtcatcccttttgaccagatgatctctttaggtaccatgagtagctagatgcatcacctgatttgcatactataaactatacagaattatagacatcgccgcacaattaaagatgaccaaagattgtggcctcggagtttagctaaaaactaacttaattttcgccctgatatctgaaaactgtcccctaacctttgtttagtagccgttaggcttagaagctgatttttgacggtcacataccttccccttgtcccataaaagcatgagtagtccaatactgaaaaggcagtccaatggataccatctatttttaagtttttgttctctggttgtgaacataaacatgtgcacaagtagcaacagtgcttccactttttcatatttcaactctgtagaataaaatccatttacctaacagaagtatattaactgacactaggaatgataaaccatgctcctacagttagcaaaatcattatttgaccagttagcattctcatggttgcactaacattgagaataacttacactgtagcttagaattgttagataccgtgtgtgacaatatgtcaagttatcatctcagaacttcaaccagagtctttcacctgctttaactttgntatgacactttgccatgcctttaactttgattgatgaaaaatgct

SEQ ID NO: 37995 - DNA, 429 bp, Zea mays
  Clone ID: MRT4577_134657C.1
gtctttggtgtggataaaccggctttcttgctgttctcgatccttcttcaattcgcggtagtttttccttttgtcgcttgctcttgttctctttccaagaccgaggaagacgagtcagatttggtgattgtgtagagcgtacaagtgattgttcttggagaagcataggcctctcttggctggtaatgttctatccgttcatctacttgtacttgctctcgtttcaaaattgatcttgttgtaacgttctgcgacatggctatgtgttcttgtgcttgctgttagaaattgccaagaattatcagtttcgaattctcgtcttgggtgtagctcttgtcttcttgagcaaggaggcggaggaaaggaaagacatggaagaggaatccgacgcagcttcaaggtactactgccacatgtgctcgctgatca

SEQ ID NO: 37996 - DNA, 551 bp, Zea mays
  Clone ID: MRT4577_134658C.1
cgactttctcttcaggacccgcgcacgataacgactccgtgcagtgctgctacattccattgggctcgcgccgccgcactctgcattgggatattatgatgacgagatagaggggatcgataagactgccacagatgaatccataggcgaacactaccgtcatgaaatgcttacaggggtactatcgtgacggataagctcaccaaagaagcgcctgccaagcacagactatttactgttgagatatgggacactgacgacctgcaaaggttatagactctgacggttgcatcataccggggagcagatggctgacgtctagtctatgatggtatttttctgatataattagactgcctgcccaccagacaagaatagtgttataacttaagctaaacgatcacatcctgatcagttccattatagactaagatgtgtatacatagccgacgtaagaaggaggcaacagacgcgtgccttctgcataaaatgcagatgcctggagtgctgcctaagggaacattccgcactttgatacgtatggtatggac

SEQ ID NO: 37997 - DNA, 168 bp, Zea mays
  Clone ID: MRT4577_134659C.1
ctcgctggctcacgctctttatgctttcccgccggtgttacgaagccttgggttagctcttcgctgcctattccctctgctcatgcgccgagagagggaaggtgaggcggctcagagagccgacaagaaggccatgtccaggagctgcaggggcgagctgcaactgcg

SEQ ID NO: 37998 - DNA, 544 bp, Zea mays
  Clone ID: MRT4577_13465C.1
gctcgctcaccgcatctcctccccaccactcttccctcctcccgtctcctcgcccgcacgccctcagccaccgccggtaacttctccacacccagatcgcttcttgatccactccgatttcgattcaatagacattacccccagacggatcgacgccagattccacctcggtaacaaagacagcaatggggatctccaaagtgacgggcatcgccgcgacggcgctcctcgtctcgtccctcgccctgcggcaggccggcgtgagggccgccgccacggcccccatcctcgccaccagctgcgtcgcctacgtcgtcaccgtcgcgtcccacaccgccgtcaacgtgccgtggatcctgggcaagaccccgtcgggccggttccccctctggtcgtccgtactcttcggccccttcctgatgctggcacgcacgtacgccaaggtgaagaggttcctcaggaaggagaacgtgtacgacgagatcgcccaggggctctacctcgggggctggccgttcatggcaaagcacctgcctcccgggga

SEQ ID NO: 37999 - DNA, 144 bp, Zea mays
  Clone ID: MRT4577_134660C.1
gagaagctgggcgaatacatgcaagacccatctcacaaatgaactcggcgtgtgatatgatcttgatccgacagagagttcaataccctgcctatgtctgaatatacaacaatgagatgcctacgtagtaatgcataaatgcat

SEQ ID NO: 38000 - DNA, 256 bp, Zea mays
  Clone ID: MRT4577_134661C.1
atctaatttttattatttttttgtgatcccaaggtgaactgaacaacctgcaaaacaaggggagtcacaacctatcggttctggtttccttttagcagagttttgtatgcaagaggaaaccagctgttccgttacaaaatgctgaagctgctagttctgttaccgtgaggccaaatcccccttcctttatgagagacaaaattctgtgaaagaaaccctcttgttagctgttacaacctacccctgttcaaaaact

SEQ ID NO: 38001 - DNA, 891 bp, Zea mays
  unsure (1)..(891): unsure at all n locations
  Clone ID: MRT4577_134662C.1
cattgggtacctcgaggccggccgggaagatggccaaattgctgatgttgatgtaacaaccgaagcaccttctggaattcaaactcctgtggagatcaatctggacatctctgatgtcattcctgatactactgatggaaacacagaaacagataaactagttaaaacagaaggtgttatccatcctgaaaagaaagagagttttcctgaagatacatctaccgcagaacctacagaagaggtggccaatgtagaagatcagcaaagccagagagctgatgcaatggatgcagacgtggtggatgaagaggtgcctaaatctgaacatgctgatgagccagcaactgatgctcttgaagtgctgaatcaagattatgctgaagaaaccaatgacccagtgaatgaaaagactgaagaaacaggcaaccagagcaacatgccaccatctgaggagacaacaccagaatatgacacgacaacaagggagccacctgtaaatattcaagcacagaaccaggaatcattagaagaaagagaagctactgtagaagaaagtgaagttgctgaagcagttgatactgaagcaccagtgcaacaaagcagtgttgctcttgaggacgcagttccagaagatcaatataacttaattgctacaaataacacagtgcaggaagacacacaagaagctattggacaaacaaaagaaggtcaacaataccatgatctaggaccagaaaatgcaactgagaacacagaacctgcaagcatggccaacactccntgatgttgatgtaataaccgaagcaccttctggaattcaacttctanntgagatcatctggacatctccgatgccattcagatactaccgatggaaatacaaaacagatg

SEQ ID NO: 38002 - DNA, 199 bp, Zea mays
  Clone ID: MRT4577_134663C.1
gactagttctagatcgcgagcggcgcccttttttttttttttttttttttgtcgataggcgaggagcataacctcctgagtggggattgttcaaaaacaacgcttgtgggtaagaagcgccaatgttgccacctatgcatcgcgtcgggtatggctgctatttgtttgatattagatgggactagccgaattgctagct

SEQ ID NO: 38003 - DNA, 491 bp, Zea mays
  Clone ID: MRT4577_134664C.1
ctggaaccccccccaaaaccacgggggaaaaaaccaaaaggccctaacccccgggggggaaaaattcaagggggtggaacctttggggagaacccaaaaacgttacagccccataaggaaaaaatcaacaagggggccacatgggaaaaaaaaaaaaatggcaagcttggccgggttttaaaaaccagtttttccggggcccccccaaaaatcccatgggcccccttaaaagggacacaaaaaaccctcccaaaaaagcctttggaaaagacaccaaccctcccaagttttggaacgggatccatcccctaaaaatggcttggaaagccaaaccctcccgggataaaccccccgcatggaaaggaaaaacatcacggggacccttcccatcccccataaaaaggggggaggcaattatgaccccctggacccccgggggaaccacaccaccacaaaggggggggagggggccttccccacaccaagggggg

SEQ ID NO: 38004 - DNA, 383 bp, Zea mays
  unsure (1)..(383): unsure at all n locations
  Clone ID: MRT4577_134665C.1
gtgggtgtgtgttttttttttttttttttttttttttttttttgtttttttttttttnttttttttttttttttttggggcccggcaaggggcaactactaacaaggatcaacccccccattgggaaggaaaaaaacagggaaccgaacataggggggggggggggccacggagcaacccattgnacactgctggggacttgatcacttctaggtgattacagaaaaaccatgggaaaaaaggggcgcaaggcttcaataggggggtcccnaagatgaataggnagagaaaccaaatnaaaaaaggaacactcggcggggagggtggggctggggaagggacctaaaacaatcgggcccgttcaatccttcaggaaatcacaa

SEQ ID NO: 38005 - DNA, 303 bp, Zea mays
  Clone ID: MRT4577_134666C.1
cctccatgggttgtccgttccctaagctccaagccgcacacgagagagcatccatgggccggtgcctggcgcttggagtcctcctatggctcctgctctccggcatcggcgagttcgtgtctgacgtacgatttgtcgacgggcacaagatgattttggtttccattcccaagacgcgcgttgcgtcgcgttctccggtccatagacctctacaacctgtgatcgcccactgccataggaggtgccattaatgacctctcttgcccaaccagagaacgcgcacatgctactgtagatgattca

SEQ ID NO: 38006 - DNA, 216 bp, Zea mays
  Clone ID: MRT4577_134667C.1
ttttgtttttatcataagattttaagcagttagagagttgggggtttattatggactgcaaaaaccaaaaacaatgggctcaaccgacaaagattaggcttgttgcacgggcccaaactcatatcggcgaataaatagcatcaaaggggctcattgaacaggggagatagcatctgcgcgttcaccggaggaataccaggttttcaggtgacgggc

SEQ ID NO: 38007 - DNA, 347 bp, Zea mays
  unsure (1)..(347): unsure at all n locations
  Clone ID: MRT4577_134668C.1
aaaacccttcaatggacccaaccggggtcaacgggaattccccgccgccaaggggaaccgaaggcgaaggcgaaggggcaccagggcccgcccgttggccggttggcccggtgtccggggggctgttttattacaactggccggtccgggaagccacgccgggttcctttgcagaaaacgtcttcttggncttcttttgttggttttcaatcttgggcttctttttcggcaacttcaaaatttgtgttcggtgggacatccaaatattttaagccatttttgattaagctttcttttaatgggggctccacttggcttataacatttataaaggactggatcctttt

SEQ ID NO: 38008 - DNA, 243 bp, Zea mays
  Clone ID: MRT4577_134669C.1
attccctgtcgaccgcacgcgtacccccacgcttccgcctcttcatagagcgcgtctttttctacagatgacctctctatgtgccagtatctttcaatgcaatcatcctccatataagaatcttgctattgtctcttccataatcaaaccagaatatccttaaaaatctttacaaccaaaatttcactcatatttcaagactctaacattccatttttaccctacattcaaatttcaccattc

SEQ ID NO: 38009 - DNA, 813 bp, Zea mays
  Clone ID: MRT4577_13466C.1
aacccagactcccgcctctaaaccctagccgccggcgctgcctatattcccctccctccctcctccgcagtcctcttccatttgtctgggagaggcggccgagcgagcgagcgagcgcggaagcatcccccggcagattcgttcttctgggcaggtgcaacagtcatggatatcactcagattctgctagctgctcagtctccagatggcaaccttcgctcagcagcagaaggcaacatcaagcagttccaggagcagaatcttcccaacttcctcctatccttgtcagtggagttatcaaatgatgaaagaccaccagaatctagaagacttgctggtattatccttaagaattcactggacgcaaaggattctgcaaagaaggagctgctgattcagcaatgggtcagcttggatccgtcaatcaaattgcagattaaggagtcattgctgataacactaggatcttcggtgggtgatgcacggcagacatcatcacaagtcattgcaaagattgcatccattgagataccccgtcgggaatggcaagacctcattgccaaattattgagcaacatgacacagcctggggcctctgcgccactaaagcaagcaactctagaagcattggggtatgtgtgtgaggagattcctcctgagcacttggagcaggatcaagtgaacgctgttctgactgctgtggttcaggggatgaaccagacagagctaagctctgaagtccgtcttgcagcagttaaagctctgtataatgctcttgactttgctgagagcaactttgcaaatgagatggag

SEQ ID NO: 38010 - DNA, 296 bp, Zea mays
  Clone ID: MRT4577_134670C.1
cggacgcgtgggcaacacatccactacaacacatggttttatgtgttgtaagaaattagtgagcaacacttaatatgcgttgcaagcatcatcctttaagttactagagtggtggcaacatttaatatgtgttgcaagcaccattcgatgtttaaataggatgcaacaacacttaatatgtgttgctagtggaatttattgattaattaggatgtggcaacaagtaatgtgttgttagtaacatttaatattagaacacagattagttctaatatattttattagttcgttacgat

SEQ ID NO: 38011 - DNA, 345 bp, Zea mays
  Clone ID: MRT4577_134671C.1
tctgtctcgtgggtcaagatcgggatcaatgggttcggcaggatcggaaggctggtggccagggtggccctgcagagcgacgacgtctagctcgtcgccgtgtacgacccttttattatcaccgattacatgacctacatgttcaagttttacactgtgcacggacagtggtagttccattatgtcttggtttatgacttcattacccttctctttgttgagatagttgttgcttgtttttttttgtttttcctttcttgtaattccctttattttttcttttctttttttttatttttttttttcatttttctttattttgttctttatgtctttttatttatt

SEQ ID NO: 38012 - DNA, 321 bp, Zea mays
  Clone ID: MRT4577_134672C.1
aagaatcgcagctctggcacgtctctaatcagagaatcagacgctgctcaagcagacagtctgtatcacattctcgggacacaagatacatgactatctgcacgttatataatatatatttataccccctggcaaataaagaaaacaggcctatgagcactctgcttataccacctttgtaccacccatgttaaatgaatacaatcaataaggacatgtacatgttgcaaacttcgaaactgcctggaagaactactgtcccccgctccattatatttccagtgcgctactctgatgaaactatacccctcgagtggcggg

SEQ ID NO: 38013 - DNA, 604 bp, Zea mays
  Clone ID: MRT4577_134673C.1
gtacctcgaggccggccgggagtagatgcgaaaaggaggtgtggctgaccctttccgcagagagcggcgccgcgcgtggaggttaggaatctagtgcgcgtggggtttgcagcctccgcgtgccatgcttctgaggcgtcgacaggttgttccccgtgatgtgccggggtggtgttcggcgtggtgcttccgtgggcctgagcatccgaccggattggaggcggcgtgacctccactcgtctgcgtctacgatgaggcggtcggcgtcttgatctgcgctgagttggttggatatgcgatctgtctgctcggatctggggggctgttcgacttccggcgctcctccctgtatgctcggattgggacgagtgcgccttagcctctgctgcggcgtcgcctgcgcgctcacgtggccgtagctgaactgcggagtccgcacccacgtgagagggtggcacactgtggtggcgcagtggcttgctgtacttgacttgcgcggcctgatgctcgtcgccgaatctcgagttgtctgctgcgccttctgcaagggtgaatacctccccgcgttgccaccccaggtgttatcccctctatcgaaagccat

SEQ ID NO: 38014 - DNA, 346 bp, Zea mays
  Clone ID: MRT4577_134674C.1
tatcacgtacacactgcagccatcaagggcgattgaaggccgagcgcggctattcctcctccacgccgccgccgcgctggtggtcctgcttcagttgcatggcggcgccgtcatggttgcgtctgagccgccctacacctgcggtgccagagcgccgaccaacatgccgttctgtaacgcggggctgtccattgaccggtgcgtatacaaaccacttaatgaggaatgacgagaggcggagaaagatcttacaactcggggaccaatccctggacataccacggatcggctgtgcctgtcgtacaaagtggtggcccgaggcgctgcacggtaatcttcaaccagg

SEQ ID NO: 38015 - DNA, 313 bp, Zea mays
  Clone ID: MRT4577_134675C.1
gtagcttccttgcgcttgctccatctctctcccctcagcgcggccatctcctgctccctccatggcgcgccctccccctccatgagctcggcgcccagccccaactcccagccgagccccttcccctggtctccatagcacgcatgccctggagctcactgcgccagttgaactctcctgcatgctcgtctgctccctctgctcggtccctactgcgagctcgccggcgttgcccctgcttccatggctgaccgcgcggctcctctgtgtcgccgttctctgcgcccgggcatggagcttcctcatctgcgac

SEQ ID NO: 38016 - DNA, 867 bp, Zea mays
  Clone ID: MRT4577_134676C.1
gctctttgccgacgctggtctttatctctaaggacgattctcgtaccatctactgggctaatcctgatagcaaaagtttcgtggacacttcactcatcttctggtcaggttgcctttcgaatgtagggtctacgctgctgcaccggagggtggaccgttggatccggacttcgttgttgaggacttcattcagtatctcaaaggcgacggtgaatatccagtcgtgaacaaacgatgtttccaagtggaatcagctggggaaatgctggcagtctaccagtgtcttcatggcgtcgatgtcttcaagatcgacaccgggagcggtctgctcgatcgggtgaagaacctaggcagccgagctatctttgtgggagagcgcaggtgcctggccgtggatgctgacaagttcgcgtccgtggaagccaactgcatatactacgtcatggatgaaccgtggtacgacgtgtgcgtgtaccgcctcaaggacgaaacgggagtgagggctggtggagccatagattctttcaactccagcttcctctgcgacgaccctccattctcggacgttcagctcctctgctactacactttcgaggtctggaagatgtttccacagttgcagctgaattgctttttctcacagacttaggaggtatttgtttgtgaatataatatgtccagattaaataatccaataaattttatattaacacttcattcaaaatttattggattatttaatctaggcatattataatcctaaacaaacaacgtgaaatttatctctttgattagtaaaccttgctccaagctccatttttactagtgtggtgctgtgcttgattattatctggatatgggttgtgt

SEQ ID NO: 38017 - DNA, 508 bp, Zea mays
  unsure (1)..(508): unsure at all n locations
  Clone ID: MRT4577_134677C.1
gcttgggtcctctnttgcggccgccctgtgttttttttttttttttgcgngtagtgccctgcgcacgggcttctttttttgtgtgcgggtcagtgcgtctgttgcgcgttggtgggttcgtctctgttggactgacggaacacctggttgtttnggcgttnttggncttgctcgggggggggcgggaggaggtacgagatctcgcgctgcgagaatttcggggttgtggctcctctagctgccgcctggttgctctngctgcccacttcctggtcgggctcgggctggggctgggcgatgagctcagagactggctcggtgttctccggcgcccggtgggcggtgaccccgttcactcccatgaggggctgcgtgttgtccgcctccggcgcgttgttctttgtttctttggttcgcacggtgaggttggcttccttgttttttggcncggcggcggggtgcctgttgtttccgcggtcttttgtgcctttgccttgccggccaccgg

SEQ ID NO: 38018 - DNA, 615 bp, Zea mays
  Clone ID: MRT4577_134678C.1
gtgcggcgctcaaggcggccgtaccctaaaaccacctcagacatctgccgtctcccttgctccgcgcgatgaacaacaacatcgacgcctctactatctcggagtacccggtgccggatcggaacccggtcttcgccaaggtggctgcaagttctctgagctcgactacgtgcgcatctccaccatctccgacgtctccgacaccgatgaatacctctccacatatcgaacgggaatccgggtgccgagatgtgcacgattggcctcatcgaagtaatggaacacctgatggacgccaaccagaactccgccgtccgactaatgttattctttcccaacgacacccatgtctgagcgctacaagcacaagcttcaatgaagatccagctccattctatctcttttcacgaaagtatatgctgtgactttcccgattacgagtgaactccagcactttatatgtgcactctatggccctgcatatataaaatggtgatggagccgcacgcgtatgacgatcctatgacacaaatcacctcatcgttatataggtagcggacaatttactagccgactggccgaatttatgaatacagaaacgatttctgctccaaa

SEQ ID NO: 38019 - DNA, 424 bp, Zea mays
  Clone ID: MRT4577_134679C.1
atcattttgaatttgaatagggtcccttgttttgaataggaactttctttctagtgctcatctgcacaaatagacagaagttgtacttcctagtgctcatctgcacaaatagaaatgattggatcacgtgtcgtttagaaaagatggaataatcctgaaacacactagactgaatcatctatgtgttgcatgacgtggactgtgtcgttcttattattacgcactaacatagctgaactaattctcttgacctcgagttgcctgggtgcctcttcaaccttcatgttcagaatagcatttgttgtgagatatcatctgttatcttggtatatgtcttcaggtctgctctcttggagcagacaaacagctcagagtcactaagttgtttggttaaatgtctgcaggatttaatgggggggtaaat

SEQ ID NO: 38020 - DNA, 814 bp, Zea mays
  unsure (1)..(814): unsure at all n locations
  Clone ID: MRT4577_13467C.1
gtaaagtgtataaagnatcgagggatgttaaatcatgggttgatatgtgcaccatataattctcttgataaccacctcctggaccacatgctaggaattgcaagcagatgacatgtacttctattgcagcattttgctgtgacctgtgaaccaatccacagagttttgatcgttagcattcctgaagcttgggggggggggcattggacacattaatgtcatgtttaggctactgactgtaaaatttcgctgaattccagataatttgtgaactgaatggctggtcaaaattgctcaaacaaatcttccaaatcctagacatagtatggtttactctttctccagaggtgtttagcgtcttccaaataagattacatctttctactggtatttgcacttatttacgctccaactttgtgtgacttctaacaaagtaatgaaggtgcaatgtttacgctccaactttgtgtgacttctaacaaagtaatgagatcggtctaactggtgggtcccatgcagtcagtggacaacgtcccaggccgcgcgcgaatgtgaggctgcgaatggaccccacatgtcggcacggtcccatgtagtcgggcaggcagtgtggttactgagccgagtgcaggggaaacggcccagcctagtgatggatttagggcatgtttggttcgcggctaactgtgctacactntgtctaaggttagtcgtctgaattaaaagactaatcttagccagaaaagtttagcaaagtgtggcaagttaggtagtaaaccaaacagccccttactttttttctattttactttct

SEQ ID NO: 38021 - DNA, 179 bp, Zea mays
  Clone ID: MRT4577_134680C.1
gatgtgaaaagataagcgaggtcattagtcagagattggttggtttgccttgcaaaacagcaaaatggaattttagctcaaaaagtagatctaaaatcaacacagatgtacaactagattctcaagcgctaattggagttcacggtgagctgtttcaagaggatgacccatgcagaatc

SEQ ID NO: 38022 - DNA, 432 bp, Zea mays
  Clone ID: MRT4577_134681C.1
gttttgaatttgaatagggtctcttgttttgaataggatctctctttccgagaatcttctggtttttgtagacagaagttgtacttcctagtgctcatctgcacaaatagaaatgattggatcacgtgtcgtttagaaaagatggaataatactgaaacacaccagactgaatcatctatgtgttgcatgacgtggactgtgtcgttcttattattacgcactagcatagctgaactaattctcttgacctcgagttgcctgggtgcctcttcaaccttcatgttcagaatagcatttgttgtgggatatcatctcttatcttggtatatgtcttcagtttcagtctgctctcttggagcagacaaacagctcagagtcctatgttggttggttaaatgtctgcaggatttagtggtggggtatatgggagt

SEQ ID NO: 38023 - DNA, 141 bp, Zea mays
  Clone ID: MRT4577_134682C.1
tcgttctagtggaggtcgaaggagttcggggggatttctagcgggcgggccagctccaagcattcaaagtagcattacaaatccgcgtactcatgggcacaaattgttccgagccaaaatatccttatttgcacagtaacg

SEQ ID NO: 38024 - DNA, 218 bp, Zea mays
  Clone ID: MRT4577_134683C.1
gtttattatatcaatattcatacgaacttttattttaccgcttaccttcaaattattctggagaatcttgatccacacatggacatgccctatattgggtgcgtttaatagcctcacatccctcagccaaataacaacgtgaacatccttcctgattcccaccacgcttaggacgctaataaaatcatacttgcctacaaccattttgaaaacctttt

SEQ ID NO: 38025 - DNA, 204 bp, Zea mays
  Clone ID: MRT4577_134684C.1
ctccgcgctacttcacagactgctcatttcaggggggcgcggagcttcatatcagtccaatagcagatatggcaggattctgaaatcatcatggctcaaggctgctcgtacttgcaaacactactaggcagtttcgcagatcatagcacgagataggaaaataacaagtagttatttcgcacaacatgagatgaccttctgtaa

SEQ ID NO: 38026 - DNA, 722 bp, Zea mays
  Clone ID: MRT4577_134685C.1
tcggccgctggcaaccagggccctgacccctgctccctactgcttctcctctctgcttcctctctgcagtagagagcgcaggggcatgctcgacgcttcagcgcccagccctctgtaggagcagcgcactcctcttctgaagcccctcgcaaccaagtcttccccgcagccccccaacatcgacgcgccgtgggtgttcgacaaagtgcccgtggaaagtattgcgctgcgcagccgcattcgtgaccccgtcgaaacccgtgctagtggtcgacgccgcgcttcgcgccttgctcgttcgacgaaacgccgagccatgtgggtagcccatgcgcctagtcacgactcgttcatgttgattgatttatagtttataatacatatgctttggttgatgtcgggcagtgcatgtatatatatgtggatgtgtgtaatatgttttggctatacacattggtaggatcgtgtttgcgattggagaacaaaaggttatgtgatgtatgcgattggtagttgtctagttatgttttggtcgatgtggtgcatgtttaaaaattgtattggtatggattgaagtttgtggcgaaagaaaaagaagtagaaaagaactcggatgtttttatatcttgataggaaaaatatgcgatgtgttgtttgatgcgaaaaactcagttacaaaatgcggattatgttttagggaatactacgaaatatttttatgt

SEQ ID NO: 38027 - DNA, 223 bp, Zea mays
  unsure (1)..(223): unsure at all n locations
  Clone ID: MRT4577_134686C.1
tgggtgcctcaacggcttctgagaacgacatccgtttccgcattggcagaggtctggtgcatctgcgatgccnnttctttattagatttattaatcatattacatccatacgtacctgcatcagatggcaagtaagttggtcaactaattgattcctctcgtggtcattgtgagatttttatctcgtcatgcttttacgtgcattgtatcttttttatcattc

SEQ ID NO: 38028 - DNA, 626 bp, Zea mays
  Clone ID: MRT4577_134687C.1
aatccttaaggggccatgtcctaattgtggtactgaaaacctttccttctttgggactatactgtcagtctccagtggcggtacaacaaacaaagtgaaatgtgcaaattgcagtaccggcgtccgatatgactcaaaatctcgggtgatcacacttccagaagcatcaaatgcataaacataggtgactctacatttacgccagtaactataaatggatgctctttggtctatattccaaatgtgggagatatcacaccagctttgaagaacagggagctccagagcttgtgaattctatagaataaaggtggctgtcccacagtatagcaaactgcgaagcctgcaactactagagtttggtctgtagcaggctcagttgggaatgtgtagcagagcatgatccatggtgtggatgaattgcagagtactgtgctgtgtgtgtaggaaggaaaagctgccgcctgccgattgtgcagtcagtctagtacgttggtatgcgaccatctcaagtctgggctttgattttaagcaatgatttttggcaataaaaaaaaaaaaaaaaaaaaaaaaaaaaaaaaaaaaaaaaaaaaaaaaaaaaaaaaaaaaaaagaaaaaaaaaaaaa

SEQ ID NO: 38029 - DNA, 839 bp, Zea mays
  unsure (1)..(839): unsure at all n locations
  Clone ID: MRT4577_134688C.1
atttcctccattggcctaagtggcttgggttttgtttggacggccacaaggccccaccatgacagtagaactaatgacaggagagaatcttaaatcccctccctcccctccctgcctcaccagatttgatacatgccaacctgttgcttcttaacagaaccaaaaaggtttggaccttggcctagaagtagctagcaagagagatcttcttgggggagaaagagggagagtgccttaccttgttcagaagagaagaattcagaaacaggactccttgccagaggtgaggctgatacttcgtgtgggttggtgagagatggagaagaaacatatgaagatggccatcctgaggcaagagcagacattcagacaacaggttcacgagctgcatcgcgtatacgaggttcagaagcggctgatgaaggagatgcaggctgttaagatgagcccagctcaggcaagagaggatactcgaccagaaccgatgctggatacagatcgaccacaatggcacatcaactcaggcgagaagaccgctcgtttcaccgaggacttcaacctggagctgacactagcaactgggggtgatacaaggaagcaggagatgacatccaactccgagtctggagcaacggtgacatcgtcgacttctgctgaatcagagtcggggcagcgattccccaagtccaatgtagacctgaggtttcaacatgagagcaagaggcatgatgatcagctcacgcagtctccctggctctaccaatgtttaagtctncagatggcttaatggcttagctacgggtggcttacagaagcatatgcattattatatgtacatc

SEQ ID NO: 38030 - DNA, 484 bp, Zea mays
  Clone ID: MRT4577_134689C.1
aaaaaaaaaaaccaagccgggggggaacaaaacaataggtgggggggggaaaagaccgccgggaggggggggggaaaaaggggggaggcgaaactggtgacaacacccctggtcgccactggggggggggggggggtaaaaaaaagaaaaaaaccgcggggggagaaaaaaaaatctggtggagagcgcccaaatcaaccacgggggggctgcccccaacaagaggaaggccccaaataataaagaaaaccccccgggggaactccaagggggggggcattgtgctttttaacaaccaaaggagacccctcctggaacggggggggggccatctagaagggcttttttcccttggcaaccccaacaattgcaaataattcccccaacagcttttaaaaatggcacaatggccattgaggggggccaccggagggggcaatgggggggtcatcatgcccccccaagaaaaaaccatcaacaccaa

SEQ ID NO: 38031 - DNA, 702 bp, Zea mays
  Clone ID: MRT4577_13468C.1
aagactagatcatctaaccccattgaatgaaaaaatgaaattcgattttcaaggaaatttttgaataagagataaataaacaattgaattgaaaaaaaaaaaacttctttctattttggataatttctttttcaataggaccctctttttggagtgaacgatcgaatattcccctattccttcttattttaactgattgtattccatatggaataagaggagaacaaaagcattccacgacctgccaaggggctgttaaaaaaaaaagaaagctcttccttgaatttactttatttttattcctttttcgaactccaaccaaagtagattcgaagacaagtcacttcaattatccttttaagttctattctatcttctgtctttccctatttcatctcgtaaagttccgcgctcgcagtttggtcaagaaagttagacctaatccaacaaacaatacaaggattaattacgaattatgaaaggatagatttcacatatacttgtccttgtattgtgtcagtatgagaatatccttcctaaattatttatccaaacctattgatcattaacttagattttcccaagattttggctgctattccgaattactctattattccgaagccaatgaaaagtaagtagaacctacaaaaatggggttttctattgatgccttgaataacatatagcttacctatagac

SEQ ID NO: 38032 - DNA, 2006 bp, Zea mays
  Clone ID: MRT4577_134690C.1
cttcttcgcctcctcctccacacgtccaaagactgggtccttcccacttcctacccatcatatctccatccgcggttccgcccagctgctccacatctcaattctcaccacacacacgcacacacactatcgtccagcaagctcgctgttgcttgccacccaccgcctcagctcgatcgcaacgcgcttggcatggcgtccgaggtgtggctatcgccggcgtctcgcctcccatccctctccaacgcaccacctcgcttacgctccaagcctgccaccacaaccgcctctttgctctctccctgtccccgccctgcccgcgccctgcctgtgctgcgtgtccgtcgccgccgccgacttcgcgccaccgagcagcaaggccaggttcaggagcaagatgacgaggtggtggacaggaacatcctcccctactgcagcatcgacaggaagcagaagaagacgctgggagagatggagcaggagttcctgcaagccctccaggccttctactatgaccagaaggccatcatgtccaacgaggagttcgacaacctcaaggaggagctcatgtgggaggggagcagcgtcgtcatgctaaacgaagatgagcaaaagcttttggaagcttccttggcctatacctccggcaacccaatcatgtctgatgctgagttcgacgaactgaaacttaaattaaagacagacggcagtgtcattgtgaaggagggtcccaggtgcagtctaaggactcataaggtgtacagtgacttgaatgttgactacctaaagatgttcctcctaaatgttccagccaccaccgtagctctgggactgttctttttcattgatgaattgactggttttgagatcaatgtgttccagctgccagagcctttcggattcattttcacatggtttgctgctttgcccctaatattgttcttagcgcagtcattgactaaggctatagtccaggattttttaatccttaaggggccatgtcctaattgtggtactgaaaacctttccttctttgggactatactgtcagtctccagtggcggtacaacaaacaaagtgaaatgtgcaaattgcagtaccgagctggaatatgactcaaaatctcgggtgatcacacttccagaagcatcaaatgcataaacataggtgactctacatttacgccagtaactataaatggatgctctttggtctatattccaaatgtgggagacatcacaccagctttgaagtattgcccgtctccattgtgaacactctgcagcatatgtagcagataaatgagtgaaactatttgtactgcctgctctgcaaattagtatgaacacccctcaaaaagatttggcccacactctggtctctctgtttgcagctgggaacagggagctccagagcttgtgaattctatagaataaaggtggctgtccgcacagtatagcaaactgcgaagcctgcaactactagagtttggtctgtagcaggctcagttgggaatgtgtagcagagcatgatccatggtgtggatgaattgcagagtactgtgctgtgtgtgtaggaaggaaaagctgccgcctgccgattgtgcagtcagtccagtacgttggtatgcgaccatctcaagtctgggctttgattttaagcaatgatttttggcaatgaatgaacaagctatctactgtacactgtttttgtacaattatgtttgtaaggcccaagtctattgaacggccacggccaggctgactgatgacctcaagcccggcccacggcccaaactcaaaaggagtaaccttagtagcgcgatgcttagatattctgagcctgtaaggccccatacaaaactttgtgccaatgcccaggattatcatttcttcttaaaaaaagaaaaaaaaaaaaaaaaaaaaaaaaaaaaaaagggcggcggctcgcgcccaccgtccgaaaaaaatgccaattttattccattgatgtttaactggtgcttt

SEQ ID NO: 38033 - DNA, 292 bp, Zea mays
  Clone ID: MRT4577_134691C.1
aaaaaagaaggggctaaacatttttccctaaaaccaaacccctttttaatccaaaactggaatttgccggccattttttaaaccccaattttttaccccctaaaccacataatgccccttgaaacaatccatcggggaatgggaaacccatttggtaaattttaaaagcaaccagattccccttccccggaaaaaaaaaaaaaagggaaggttaattttttatctcccctccccccgcagggcttgacctccccaacccgaaaaccgggggttaaccaaaaataaccccaat

SEQ ID NO: 38034 - DNA, 1196 bp, Zea mays
  Clone ID: MRT4577_134692C.1
gctttttaggcgattgggcacctcgaggccggcggcggcccgtatccgcttgacgctccccactgcgcctaaaaatggccgcgtcccactgaaccaatcgtctgcacatcctcttgctgttgccgctcgctcgccgtgccgcaatggctacggccgtcgcctcccatacgttgctctcctccgccttcgctccgcgccactaccaccgccgcctgacccggaccgcgtccgtggggccgtgccgggccgccccggtgggactggccgtgcggtgcgagaagagcgacaagcagaagaggcagccgctcgccgcgctcgtgccccgcgagcagcgcttcatgttcgagggagacgagctctgcggccccgacatatggaatacaacctggtatcctaaggctgcagatcatgtaactaccgagaagacatggtatgttgttgatgcaacagacaaagatcctaggcaggctagcatccacccattgcagtacatatcaggggaaagaatgaacccacttacactcccagtgtagacatgggagcttttgttattgtggtcaatgcagataaggttgctgtttctggtaaaaagcggtcacaaaagctttataggaggcactccggaaggcctggagggatgaaagaagaaacttttgaccaacttcagaaaagaattccagagagaatcattgaacatgcggttcgtggcatgctccccaagggaaggctgggaagaagattatttacccacctcaaggtatacaaagggacagaacatccgcacgaggctcaaaaacctgtcccactcccgatcagggataaaagaatacaaaaaactggatagagaattcatcgactgaaaaggatgcagtggcgaattcctccccagaaggttttgccctttgtttggaatgctatcctcataaccatgcttctgatcgggggaggggggagtatcaatcctctttgtaattttgatgtttaccaatgcatgaaattcagtcaaatttctgtcaatgagtagtcatgtaatatggtacggtttaaatcaacctaaaatctttattttccagttgaagtttgtaattttgacctcgtatggtatgaagtggcagattgtttcattgttcggcctgccatctggatatacgaaattgatcgacagttttcataaccaaaaaaaaaaaaaagcggcc

SEQ ID NO: 38035 - DNA, 240 bp, Zea mays
  Clone ID: MRT4577_134693C.1
tcgatcctctccctcgccatcatcgtctacgtctccgacgctccccctcggtcccctccccaccttccgttctctcccttcttggatagggttagagactgagctaccccgcacgctgcgcgagccatggtcttctttacctgttcccaggtcggcgcgaccgcagcgggcggagcctcgcccttcctcggctaccggaggcggagcggcccctggggagccaccccgtcgagcttcctt

SEQ ID NO: 38036 - DNA, 283 bp, Zea mays
  Clone ID: MRT4577_134694C.1
aattcccgggttgacgagctcaaatacggcggccgccctttgtttttttttttggtacacttttttaggtggttcgggtaggccccccaaggaaaaacaggcatgggacgacacagcattgttaaagggactctgcatgaggcgacactataaaacattagacgaattggtcacattcaaaggcaacacctggacgaaaacgtatctctaaaggagctaccaaacgtgactggccaacgagacagcgggagggaaggcacacaatccatagagcgtgactatg

SEQ ID NO: 38037 - DNA, 316 bp, Zea mays
  Clone ID: MRT4577_134695C.1
cagctgtgtctgtgtcagctattgcttatggaactgatacctgtagttctattcaaaaaaaaaggaaaaaaaaaaaaaaaaaaaaaaaaaaaaaaaaaaaaaaaaaaaaaaaaaaaaaaaaaaaaaaaaaaaaaaaaaaacaaaaaaaaaaacaaaactaaaaaaacaaagcaaaacaatacaacaatcaccaaactgaaataaaaacaaaaaaagcccaaaccgaatcgccggggccaaccgtttgagcagccccaatggttaccccgtcctcgccctgcaacagctcataaaaaaggggccctaatataggtta

SEQ ID NO: 38038 - DNA, 1212 bp, Zea mays
  Clone ID: MRT4577_134696C.1
cattgggtacctcgcgggcggccgggatcacccaattgaaaggaagaagcgctccctacccaccgcggttgccccctttcggcctttccccttctcgatcgaactcgggtccttcggcgacgtgcggatttttcgtccctcccgatgcttcgcctgtatctgatccggggttcattgtgaagctgaggtgagtgtataggcataaagagagcatgaacactgttagtggtacaaagcgtgcaccaaggagacagtcgcaagatgggtctggtgataaactagtggtgatcgtggaagcaagttcccggggggtggggagccgtcgtggaccacatacccctattcctggcgccctaaactcacccattgatgtggaggccatcgaagatgaagttcaggcagtatctccttcgcgagtgcccctgccaaggaggaacaggagaaccaggagggaacctataacagtggttgacttggaggttgaagctagccgggaagggagcaaacgccagagggttgaaccagtaggacgtcacctctatccagattggggagcaaggtctagcttgcagtcaaatgccgtacaaaccagcaaagagcctgccaaggaggtccccgaggaaccatcttttacctgcccaatatgttggaataagatggaggagccttccacgacgacttgtggccatgtcttctgcgacacgtgcatcaagcaggccatcaaggttcagaagaaatgccctacttgcaggaaggggctgaaaatgaatagtgttcatcgtatttaccttccgaacggttctagttaagctgagcagctttacatatctgatggcttgtaactttgggggcaattagcttaacctctgttatccgatacatgctgactggctttgtcaaagaaacttctggtaacgtaaggctgtgcaatgtactgtgaggatcaggaattcttagcctgaacagcagatagatgtttcatcccagtctgtattatttatcggcatcaccaggagttcatcatgagaacttcctgactagggaagtcgatatcagcctcagttttactctcttattgcatccatggttcccagaatgtgttgttttgttaggatgtgaccatcggatggtgcatatgaccgtgtaaaacattattttgcaccgtattctgtattatttatatagtagagttttaaaatataaatgatgaga

SEQ ID NO: 38039 - DNA, 1434 bp, Zea mays
  Clone ID: MRT4577_134697C.1
gggtaccttcgaggcggccggggcgttcctcaccgacgcgtggcacgaagccgccctccctacccccgcctccacgcctccaacagaagaaccctaagctgccctcgctccgacgccgccacctcgtcgtccgaccgcatcgattcgatggcccgcatctccgccgtcgttgccgccgtgatcaccgccgccgttgtcgttgacgcgctgttcacagccgcctccgccaccgaggcgccggcccccgccccgatgtccggcgcgggcgccctctcagcgcagctctccgtcggctgcctcgcggcgctcctcgccgctttcctccgccactgagcggtggggccgccccgtctgcgtgcgcgtcttcagatctagtggtacagtggtagtgagagttgcagtctaatgttagtcgcaggtatcgtagcggtggtgttagtgttatgaagatgaggcatttggttttgttccacgtggtggatggatggataaatctggacgtggggagagaactttcgcttcggagtttggtcgcggttttgcccctcccttcttgaactcctccgctcgatcgaactcagttccgattcggcaggttcattgtgaagttgaggtgggtggtataagcatcgaagagagcatgagcactgccagtggtacaaggcgtgcaccaagaagacagtcgcaagatgggtctgctgataaagtagtggtgatcatcgaagcaacctccccggtggtggggagccgtcgtggaccaccgacccctgttcctggcgcccaaaactcacccattgatgtggaggccatcgaagatgaagttcaggcagtatctccctcgcgagtgcccccaccgaggagggacaggagaaccaggagggaacctataacagtggttgacttggaggttgacgctagccaggaagggagcaaacgccagagggttgtggcagtagatcacctctctcccgattggggagcaaggtctagcttgcagtcaaatggcgtacaaaccagcaaagagcctgccaaggaggtccccgaggaaccatcttttacctgcccaatatgttggaataagatggaggagccttccacgacgacttgtggccatgtcttctgcgacacgtgcatcaagcaggccatcaaggttcagaagaaatgccctacttgcaggaaggggctgaaaatgaatagtgttcatcgtatttaccttccgaacggttctagttaagctgagcagctttacatatctgatggcttgtaactttgggggcaattagcttaacctctgttatccgatacatgccgactggctttgtcaaagaaacttctggtaacgtaaggctgtgcaatgtactgtgaggatcaggaattcttagcctgaacagcagatagatgtttcatcccaaaaaaaaaaaaaaaaaagcggcc

SEQ ID NO: 38040 - DNA, 1841 bp, Zea mays
  Clone ID: MRT4577_134698C.1
cgaggccggccggggttcctcacgccgcctgcacgcctccaaccgaataaccctaagctgccctcgctccgacgccgccacctcgtcgtccgaccgtatcaattcgatggcccgcatctccgccgtcgttgccgccgtgatctccgccgccgttgtcggtgacgcgctgttcacagctcgcctccgccaccgatgcggcggcccccgccccgatggccggcgggggctgccctctcagcgcaggtctccgtcggctgcctctcgaccggtcctctggcgccttttcctccgccgactgtatcgaccgtgcgacgccccgctctgtcgtgctccgatcttacactatctagagccacagcgctaccgcgagctgcaggcgactgttacgcccaggaatccgaacgagggtgtgagcgtgatctacatgacgctgtaggcgttgaccacgtagcgggacgagtggatgacgctacccgtgtcgatagccgttgatctaccagtgccacaaggacgtgcattgggtcggtcgagcgggggccgggatattcacccaattgaaaggaagaagcgctccctacccaccgcggttgccccctttcggcctttccccttctcgatcgaactcgggtccttcggcgacgtgcggatttttcgtccctcccgatgcttcgcctgtatctgtccggggtgcgtggattgactaccggtgttgatttggcgaggcaatcggcggggagggagggggtattaatttcgatcgctgcgccgccgattcccccggtccttaggttcattgtgaagctgaggtgagtgtataggcataaagagagcatgaacactgttagtggtacaaagcgtgcaccaaggagacagtcgcaagatgggtctggtgataaactagtggtgatcgtggaagcaagttcccggggggtggggagccgtcgtggaccacatacccctattcctggcgccctaaactcacccattgatgtggaggccatcgaagatgaagttcaggcagtatctccttcgcgagtgcccctgccaaggaggaacaggagaaccaggagggaacctataacagtggttgacttggaggttgaagctagccgggaagggagcaaacgccagagggttgaaccagtaggacgtcacctctatcccgattggggagcaaggtctagcttgcagtcaaatggcgtacaaaccggcaaagagcctgctaaggaggttcccaaggaaccatcttttacctgcccaatatgttggaataagatggaggagccttccacaacgacttgtggccatatcttctgcgacacgtgcatcaaacaggccatcaaggttcagaagaaatgccctacttgcaggaaggggctgaaaatgaatagtgttcatcgtattttccttccgaacgcttctagttaaggtcgattggctttgtcaaaggaacttctggtaacatataaggctgtgcaatgtacagtgaggatcagaagttcttgggtgaacagcagatagatgtttcatcctagtctgtatcatttaacagcatcactaggagctcattatgaaaacttcctgactagggaagtggatatcagcctcagtattactggcctcttattgcatccgtggttcataatgttatttcgctgttgtatgtattaggttaataccgtggtggattagtgtaactgggatttgcttcattgtaaaatgataatggcgagttgaaacgtttagcatttttggatgcttttgtttgttacgtactctattccatttagccattccaatattctatgctaaaaaaaaaaaaaaaaaaaaaaacccaaacc

SEQ ID NO: 38041 - DNA, 351 bp, Zea mays
  Clone ID: MRT4577_134699C.1
cattgggtacctcgaggccggccggctttgttctgctattgtcactggaaaaggccattggagaacctcttggaccaccttgacaaccctgtggctaacaatgcttgggtctatgccactaagtttgccccaggatcttaaatgtatatgacttcttcttccctaatccctatgatcatatcccttgtgtttgcctttgtgatttatgtgtagattatatgatcataataattgttggattagtgtacttcttaaggactaaggttcaatttaaaaaaaaaaaaaaaaaaaaaaaaaaaaaaaaaaaaaaaaaagaaaaaaaaaaaaaaaaaagcggccccccaactccca

SEQ ID NO: 38042 - DNA, 616 bp, Zea mays
  unsure (1)..(616): unsure at all n locations
  Clone ID: MRT4577_13469C.1
tcngggctctatagtcgaactctatagatacatcgccctgacactccatccttgcacaaacgcaactacgagagagaaggacaaggaaaaaaacaggggacaagatcgagtgagaaagaggagatatggcgtccataataacaggagatttcgcggaggcctacgtacggaagaacgcctgcgaagaggagacgaggaaggcagaagcaagcaccgccggcggggtggcggcggcggcgacaccaggagacaagaaggccgacgctagtgcatcatccgagaagaaagtggccaaagaggctgcagctggtagcaacaagggagaaggaggcagtctcttcgggctgctgaagaagaaggttcaccccaaagtcggtggaagttcaggagcttattcttgacctcctgtatgcatctgcgcgtggctacaagcatgctgcatgcatgcaagaaatttcagaattttacccgtgtccatcttgaagtggtttcagttcagatttttggcctttttcgttactttccctttcatcctccttgaataagatgtacctgtttgtttgataaagaggtggaagtaaaatgtttaggggaaaggaaacgaagcagttctttt

SEQ ID NO: 38043 - DNA, 225 bp, Zea mays
  Clone ID: MRT4577_1346C.1
ctgacacataggctagatcacacatctgcttctagctgccaggctgtcgcgatgcatataagcctacctctagacgcttactcctgacgctgcgcgatactagtgtaataatgatatatatatctactgatgcttcaagcgtacgggtgatgtttaacggcatctacggctgctgctgctgagccacagtaccttactgtttctgagacttgtctctcccacact

SEQ ID NO: 38044 - DNA, 1586 bp, Zea mays
  Clone ID: MRT4577_134700C.1
gggtacctcgaggccggccgggcccgttcctcacgccgcctccacgcctccaacagaagaaccctaagctgccctcgctccgacgccgccacctcgtcgtccgaccgcatcgattcgatggcccgcatctccgccgtcgttgccgccgtgatcaccgccgccgttgtcgttgacgcgctgttcacagccgcctccgccaccgaggcaccggcccccgccccgatgtccggcgcgggcgccctctcagcgcagctctccgtcggctgcctcgcggcgctcctcgccgctttcctccgccactgagcggtggggccgccccgtctgcgtgcgcgtcttcagatctagtggtacagtggtagtgagagttgcagtctaatgttagtcgcaggtatcgtagcggtggtgatagtgttatgaagatgaggcatttggttttgttccacgtggtgggtggatggatgaatctgggcgtttggagagttttttctttttgatgctggatttgatttagtatgattggtgttagtttaaaaaaaaaaaaaaaaaagaactcctccgctcttatcgaactcagttccgattcggcaggttcattgtgaagttgaggtgggtggtataagcatcgaagagagcatgagcactgccagtggtacaaggcgtgcaccaagaagacagtcgcaagatgggtctgctgataaagtagtggtgatcatcgaagcaacctccccggtggtggggagccgtcgtggaccaccgacccctgttcctggcgcccaaaactcacccattgatgtggaggccatcgaagatgaagttcaggcagtatctccctcgcgagtgcccccaccgaggagggacaggagaaccaggagggaacctataacagtggttgacttggaggttgacgctagccaggaagggaacaaacgccagagggttgtggcagtagatcacctctctcccgattggggagcagggtccagcttgcagccaaatggcgtacaaaccggcaaagagcctgctaaggaggttcccaaggaaccatcttttacctgcccaatatgttggaataagatggaggagccttccacaacgacttgtggccatatcttctgcgacacgtgcatcaaacaggccatcaaggttcagaagaaatgccctacttgcaggaaggggctgaaaatgaatagtgttcatcgtattttccttccgaacgcttctagttaaggttacagccgattggctttgtcaaagaaacttctggtaacgtaaggctgtgcaatgtactgtgaggatcagaaattcttagcctgaacagcagatatatgttccatccagtctgtattatttatcggcatcaccaggagttcatcatgagaacttcctgactagggaagtcgatatcagccttagttttactctcttattgcatccatggttcccagaatgtgttgttttgttaggatgtgaccctcagatggtgtatatgacagtgcaaaacattattttgcaccgtattctgtatcatttatgtagtagagttttaaaatataaatggtgagtaaagccgctgaagatagccttat

SEQ ID NO: 38045 - DNA, 365 bp, Zea mays
  unsure (1)..(365): unsure at all n locations
  Clone ID: MRT4577_134701C.1
cgagaacagagtggattgccttttaatatgcgtggggaaaacaaacctacagaagtgaacagcaacactgggggatcacacnaaactacagaaccaaaggtgtctctacatcaagggacaaggcactgttcacacaatgtatgacgaagagggcgtcccccctagaacacctgtaagacaggccaggaggacacctggccgtgaaggtcacgacctaggagcctttggcccaaagtgatggcatcactcgaaaaagcccaacaaggtgtgccctagctcgcccaaggctaagtggagacatgatggcgtatagaagcgtaggggggaactgaaggcgggttaaaaccaacagaccaaacactggg

SEQ ID NO: 38046 - DNA, 352 bp, Zea mays
  Clone ID: MRT4577_134702C.1
ggggagcactacaaaatgtccctgaagttgcgtgaataccatctcagtttttacacccaacactttgtctcactcgaccacaaatcctgtgcacaattaaaataactacagttgatcactgagtggcctggcccaaaactgcctgtatggacaaacgcacggcggcctccggacatgcaacaaatgaagtcagttaggcgagctcagcactctgactgcgcatggctagaggatggggcccttggcctttgggataaacgagtcagtgctgacccaaaccagcgagaagatagctgcttggaggaagaaccagatcactacgatggtgggcgtacggctttgccttcgatga

SEQ ID NO: 38047 - DNA, 158 bp, Zea mays
  Clone ID: MRT4577_134703C.1
cgaagatgtcgacattcagactgagcgtgcctaggcgaagcagatgaccagctttcaaaacaagaagagggtcctgctggcagaaactggaaaggagaagatcgcgcggtactactagagcatcggtctgggcttcaagacaccgaagaaggctattg

SEQ ID NO: 38048 - DNA, 254 bp, Zea mays
  Clone ID: MRT4577_134704C.1
acacttatatatatattggtgcttaaagagaatagaagagaagagaagatcgacaagagattggccgtaatggacttctaggagctgcacatactggcctagcagatggtgaagcacgaggagccggagagcgcgagcaagatgcttggctgcatgcttgtagaggaaccggacatccaggcaatgctgcatctcgcctacggcaactgctcacaggtacaccccaagatcagctacgctaaggccaatctgga

SEQ ID NO: 38049 - DNA, 388 bp, Zea mays
  Clone ID: MRT4577_134705C.1
ccctcgttaagagcatcatcaagctgttcgttccactcgatggcctcacgagaggagcccatgatcggctgtctgctaccggccgacgccactcggctgtgacactacatattccagcgcctgtgtatgagcacgtcgtacgccatcaccaaggggttgagagagcaagggatccatggaccctcctacaagttcttcaaaggctgggacgagcagaccagaagcatgaaggaaaagaccgacggtctcgtgctggtcgtcagcgaacacaagtacctacacgcaatcgcgccgcactacctcaaatggagggctcagggcagacaaccatttctatataggtacggggctcaagccccaatctgcatatttgactacgaactatcaa

SEQ ID NO: 38050 - DNA, 286 bp, Zea mays
  Clone ID: MRT4577_134706C.1
aactactacattaccacagtcactaccaatatttaggcagattctcttaagctcttggagttatcgctaccaataccatcattatacaacactgatcacctgctataacttccattataccacaatacctctcaccagctacttcaacaatgcttcaaacacctatctttccaaccctacaaactacaccaagcacttgaacagaccttttaacatcatcaaactaaccaattcaaccaccaatactcgtatcacataaccttacttaccatcatatcacatcaca

SEQ ID NO: 38051 - DNA, 211 bp, Zea mays
  Clone ID: MRT4577_134707C.1
atgcactcaagacagcctctttctcctgcaagtttcactagctcagttggagcaaccacaataaaccttatcagcccaactcggtctttggattgcgatgccagatttaggcaggcaggtactgatattaaaacgtcaacagagctattgaaagttctcaatcgaatatggagcttggaagaacagcatgcagctgatgtgtcagcaatga

SEQ ID NO: 38052 - DNA, 367 bp, Zea mays
  Clone ID: MRT4577_134708C.1
agcaggtgccgcctccggctccgcggcggcaggctcggcctcaggctcagcggcgacaggctcgggctccgccggagcagctggctcctccaccaccttggtctcctcggcgggggcagcctcctctggcacggccggctcagcctcggcgggggcgggggcagcctcctcgggcacgacggccggcgccggggtctccaccaccggcgcttcctcggtcgccaccacggtcggggtctggacctcggcggtggccattggtgacgatgagaaggctgatgacgactacacgaaggattggctagctggctagctagagctagagctaagactgatcgagctgaaagagtgagcgatcagctgagag

SEQ ID NO: 38053 - DNA, 268 bp, Zea mays
  unsure (1)..(268): unsure at all n locations
  Clone ID: MRT4577_134709C.1
tggtgaatgatcaagttggaagcttttagtctatctttgntnananaaaatnatnnnntggtagcggttttttatttttttttcttaaattaaaaaaaaaaaaaaaattaaacaaaaaaaaaaaaaaggggccgcccttttaaaaaatccaaacttacgacccccgccattcaacataatatcttttttttattgtcacctaaatttaattcacttcccccctttttacaacctttttacttgtaaaaacccttcttttacccaactt

SEQ ID NO: 38054 - DNA, 1510 bp, Zea mays
  Clone ID: MRT4577_13470C.1
ggtagcggcgcggacggcggtggggtgtgcggcgaggagagaggagagaagctgaaggtttgccggggccgcacgtgcttgtcatccccttccccgcgcaaggccacgcgctgccgctcatcgacttcgtcgccctcctggcggagcgcgggctccatgtgactacgggccaaaggcgtgttaagcttagacctgtgtctcgggggggggggcggtaaattaaccgcgctgccgctcatcgacttcgtcgccctcctggcggcgcgcggcctccgcctcaccgtggtcacgaccccggcaaaccttcagcttctctcctctctcctcgccgcacaccccaccgccgtccgcgccgctaccttcccgttcccctcccacccatccctgcccccggggctcgagaataccaagggttgcagcccggtgcagttccccgccttcgtccacgccttggccgagctgcgtgggcccatcctcgcgtgggttaaagcgcagcccgatcccgtcggtgaggcagaacttcatgtggaacctgcacgacagctgggggttcgtgttcaactcgttcagagcgctggaggggaggtacctggagcagcctctcgaggacctgggcttcaagcgcgcctgggcagtgggccccgtggctccggaggcggacgccgcggttgcccgcggcgggcaggcaaccgtcgagctcgccgatctcagcgcgtggctggacgcgttcccggaaggttcggttgtatacgtgtgcttcgggagccaggccgtgctgagccccgccgtggcggcggcgctggccgaggcgcttgagcgcagcgccgtgccgttcatgtgggccgtgggcgacgccgtggtcccggacgggttcgaggcgcgcgccgcggcgtcggggcgcggctcggtggtgcgcgggtgggcgccgcaggtggcgctgctgcggcatccggcggtggggtggttcgtgacgcactgcggctggaactcgactttggaggcggtggccgcgggggtgcccatgctggcgtggcccctgacgggcgaccagttctttgacgctcggctgctcgtggacgaggcccgcgtcgcggtccgcgcatgcaagggcggcctcggctttgtccccgacgcaggtgagctggcgtccgtgttggccgacgccaccggggagaagggccacgacgtgaggacccgcgccaaggcactcgcggcagaggccgcccgcgccatgaagcctggcgggacatcgtacgcggatctagagctgttggtgcaggaaattcggaatcggaagcttagctagctccctctccaggaatacatcagctcgattcccatgcgatctaacttgatcgcactgaaagatgatgcaagatgatacaatactgaaagatgatacaagactttaagttatgtaattttagttgttttgtatgaattgtataattttatctatttaattgtgtatttggatgtatttattcaataaaataacatattttatgtc

SEQ ID NO: 38055 - DNA, 252 bp, Zea mays
  Clone ID: MRT4577_134710C.1
agcagtggtaacaacgcagagtacgcgggcactgaatcaatacatattaattttttagttagcgataaaaaaatcttgctatgacactcctctcaaaatcactccgtattcttctcgttctttttatttcaaaggtttgctgtttttttactagtagaaacatgaacggtgatttggatacaaaaaacttgtgatgacaatttcattgtttttgacacaaattgttgatagaaaaaatgtacatttttcagc

SEQ ID NO: 38056 - DNA, 316 bp, Zea mays
  unsure (1)..(316): unsure at all n locations
  Clone ID: MRT4577_134711C.1
gcggaaccgaaggagcgggggtgagctgaggccgcactcggctgaacggtgccccgcgggttaccctcgcgccgctggctgcgggcgcggcctctgggtgatggtgctaagacccgcgccctacaatatggtatcctacgcgcgtgtagacaatacagctgatccccgcggcggagggctganggggacttgacggtggggcgacggactgatcttggtcagacaactctggtctaaaaaaaaaaggctactcacttgtcttatgggtatggcctgcgatatgcaagtgtctgggaagatcgtcatcccaatcacg

SEQ ID NO: 38057 - DNA, 527 bp, Zea mays
  Clone ID: MRT4577_134712C.1
agcgtccgcccacacgtaacaatacaagaaaaatgtggcgggggggctggctggcgaactctatggcgaaccctcgcgtgttcttcgacatgaccgtcgggggcgccctcgcggaccgagatcgagatggagctggaccccaacaaggtgcccaagaccggggagaacttccccgcgctgtgcgcgggggggagagggcgtgaacaagttccagtagacgctctactactagggctgcaccttccaccgggtcatgcgccagttcatgtactagggcggcgacttcacccccggcaacgagaccatctgcgagtacatctaccgcgagaagatccccgaccagaagttcatgcgcaagcacaccgtctccatggtgctctccatggccaacaccaggcccaacaacaactgcttctagatcttcatctgcactggggtgacccgttggctcgacggctagcacgctggtcttcgggcaggtcgacgagggcatggacatcgacaaggtgatcacgaaggtgggctcc

SEQ ID NO: 38058 - DNA, 385 bp, Zea mays
  Clone ID: MRT4577_134713C.1
ggcctctcctactcttctataagggggggggggacgcccccgccccttggtcaaatcccatcgcgccatctcagatattcatggcaccgagagagctccgtcgctgaagtagtgcggtcaggtgggcgccaccgcagtcgatcccttcctaagccaccgacccagccgctgccactggtttgaggggaagagaagggcacgtagaaggtatacggggaaattacgggcgcaaaatcgtgcgggccaattgcgatccctcgccggaggcttgtcaccgccgtagtctcacctcgcaccgggtggcgcataactaccaccgcgggttcaggtaagggttccttcacccaattcgtgatcccctccgcttgatatgggcttatctggg

SEQ ID NO: 38059 - DNA, 287 bp, Zea mays
  Clone ID: MRT4577_134714C.1
ccagaatgttactttaattctttgccaaaagagttagaagtaaaaagagatcggatggtacgtttacttgaaagtgttggcctaaaacccatagttcctgatggaggatacttcatcatcgctgatgtgtctttgctagatccagacctctctgatatgaagaataatgagccttatgactataagtttgtgaaatggatgactaaacataagaaactatcagccatccccgtttcagcattctgtccctcagagactaaatcacagtttgagaagtttgtgcgttt

SEQ ID NO: 38060 - DNA, 1908 bp, Zea mays
  Clone ID: MRT4577_134715C.1
ggggttcgaatccccttctgagcgggctggcggctcccccgggagcgagcctactgaaggaaagttttattgttgaacttcttatccaatatttatcttttgtttggaaaaaccaaacccacaatctttaagtctccctttctcttttgggagcagagcttcaaaatcaatcaatcttttccatgatcgagtttcttcattatgtgtaccagacagcgacggataatgctaagtttttttctatattactgagtataagtgtcgttgcctctatctacctactataaatactccgcaattatgtgcggattctaaaattagtggaggaaaataatagaaaagagggtaaactgttggggctctgcgtggtacatgagtttacctactcatggagaagaggagtcaccctaagacccattcattttggctcgaaagagcaaaagtgcggagtaaaagaaaaagaatcggaaggagaagtgtgataagctttgaatgggatggatagtcaagaaaaaaggcacctaatctttaccgtctccactgagatttcagaccagaaaggagtagactctagtttcaattgcgtatagaaagagattcgtcttgtaagagcgagcaggttgaagcgcttaggctacttcagctatatgcttaacacatgcaaatctaacgaagtgctcctccacgcgcgggaggctggtagacccgtcaaatccaagcaaaggccaccccggccggcgacgacttccccttccaacaccctcctcccccgtccctccctccccgcaccctgatcccccggcatccatccatggcgacgaacagcgcggtgattgtgctcctcctcgtcgctgctgccgtactcgcctgcgcgggcggtgcgcgcgggttctacctcccgggcgtcgcccccgccggtttcctcaagaaggacccgctcgccgtgaaggtgaaccagctgagctctatcaagacgcagctgccctactcctactactccctccccttctgcaggccgggcacaatcgtcgatagcgccgagaaccttggcgaggtgctccgcggcgaccgcatcgagaattcactctacgtgttcgagatgatggagcctaggctgtgccagatcgtgtgcaagattgctccgacccaagatgaagcgaaggatctgaaggagaaaattgaggatgagtaccgcataaacatgatccttgacaaccttcctttggtcgtcccaattaagagattggatcaagaagcacctactgtgtaccagcaaggcgtgcatatcggcatcaagggacagtactcagggagcaaggaagagaagcatttcattcacaaccacttcacatttctggtgaagtatcacaaggatgacacaggtcttgccaggattgttgcctttgaggttaaaccatacagtattaagcatgaatttgatggcgactggaaggggaatgctacactccttaaaacctgtgacccacactcaagacgccttgtcgtagactctgattcacctcaagaagtagatgccaacaaagagatcattttcacctatgatattaactttgaggttagtttcaactatttttcatcttgaactttttgtctatgaccaaccttaatgcactatgacagaagtctccactgtaaacctacagatagatggtatgttttttccttgagaatttcagatgcattttttagtccgcttcctctctgggatggttgccatgatcatgctccgaactctttaccgcgacatctccaagatcggaaggagaagtgtgagtccatttcctgctggtgcttctgggacccctcaattcacaaataaaacggacgcatctagtggagatacaaactcctgtcaagatgatcaaagttcattacatggagggtcat

SEQ ID NO: 38061 - DNA, 547 bp, Zea mays
  Clone ID: MRT4577_134716C.1
tgtatataaaaaaaaaaaaaaaaaaaaaacaaaaaaaaaaaaaaaaaaaaaaaaaaaaaaaaaaaaaaaaaaaaaaaaaaaaaaaaaaaaaaaaaaaaaaaaaaaaaaaaaaaaaaaaaaaaaaaaaaaaaaaaaaaaaaaggggggggccgttttaaggtttccagttttcttcccccgggctggcgggggtaaactttttttttcgggtccctaaaatcaaatcccggggccgttttttaacaggggggggaggggaaaacccgggggggtccccaatttattcgcttgggggaacccccccttttccccattgggaaaattttcaaaaaaggccccccctgtggccctttcccaaagttggcccactttgaggggggtgggggtgccccctttttggggccatttaatggggggggggggggggtttcccccctcgtttacctttcttttttctggggcccaacccccgggcggttccgttttttgcctttcttttttggcgcggttcttgggtttcccccgaaaggttttaaagggggggccc

SEQ ID NO: 38062 - DNA, 587 bp, Zea mays
  unsure (1)..(587): unsure at all n locations
  Clone ID: MRT4577_134717C.1
aattcggcacgaggcaatcaaagctcgtgggccagaacatctcctgctccacgaccacgaccatggataaggcctacgtggccgtgctctccttcgccttcctcttcgtgatccactacctcgtgggacgtgctggccgcaagggcaatggcaagggcaagggaacgcagcggttgcctcccagccctccggccgtcccgttcctcggccacctccacctcgtcaagacgccgttccacgaggcgctggccggcctcgccgcgcgccacgggccggtgttctccatgcgcatggggtcccgccgcgcgctggtcgtgtcctcgcccgagtgcgccaaggagtgcttcacggagcacgacgtggtgttcgccaaccggccgaggttcgccacgcaggacctcgtgtccttcgggggcgccgcgctcgccgcggccagctacgggccctactggcgcaacctccggcgcgtggccaccgtgcagctcctctccgcgcaccgcgtcgcctgcatgtcccgccgtcgtcgccgnccgaggtgcgcgccatggcgcgccgcatgggccgcgccggccgcnggcggcgcccgg

SEQ ID NO: 38063 - DNA, 237 bp, Zea mays
  Clone ID: MRT4577_134718C.1
ctcccatacactgagcgaccactaagtttatcacttggaagcactttatcctcagaactataccgctatccaatgctagttaagcgtgggtggagactattatgactcttgccaggccgcctgggagagacaccgcaggctttatctgactgaggggagattgcgactgccttcttgttttgctcgacgggaacggggtacttatcagccggactgttccagtggtacaccatgtgg

SEQ ID NO: 38064 - DNA, 790 bp, Zea mays
  unsure (1)..(790): unsure at all n locations
  Clone ID: MRT4577_134719C.1
cgaacggtgagatgcgggtagaactgcacacgacgaggatcacgaggatgctggaggacgtcgtcgccgtcgcgcttgacattagggcctccgatgcttgacgttagggcctctcgcttgaagagggcgggcgggtctaaagtgttagagaaaattatgttgtcaacatcaacctcctagaagggccagaatgcaggcagagcctcaactcgtcactgcatcagcacgtcagcgggtgtcacagtggcagtgtcgatggaatggctctgcagtgcatgtgcttctgtaatttccgcaagaagcagtcaactgctccctgatatggcgctgggacattgtagtgatccccacacgtttgtggaaactcgacaacctgccagagcgtcagatatttcgttgagaagagaactcctccagtttggctttcctctggttcagtctctgctttcaaccaaatttgataccactcgttgaagtcaacagctgggatgtggacatgtgaaaccacatctgtggaactttcagtgtgtgatgactgggtcactggtggaataccgtgttttctgagctggtcgctttcagttcgcggccaaagtcgatagctcaactatcttttgagtttagctcccaggttctttggcttcatttcaacaagcccgatcttcttctgacctctaaggtaaacctgcgaggaaaccattcccaaagagcatggcactctggaacggcataggtcaggtggcaagcatcgcacagttagccggggtcgatgcctatgggctctctncca

SEQ ID NO: 38065 - DNA, 194 bp, Zea mays
  Clone ID: MRT4577_13471C.1
gaaaatcgcccgctcctgttctgcatcggataagctccttctgtgattgcaggctcacgcttcaccggtctgactgcactctcagagatagtacagtggcctttgtcagcacctgtgaagatgtcaatcgtctctgaatgatcaggacggtcctactcgcctagaacaggtacttgcactacgtgacgctcacc

SEQ ID NO: 38066 - DNA, 966 bp, Zea mays
  Clone ID: MRT4577_134720C.1
tcggccgggaacaccccgcctgccccttgcccgacggcgtcagccccaacctcccgcccgtgccgcgtggtgtagtcatcccctgttacagctgcctcgccccctctcccacaacaaatccattctcctcccactcgacgcccgaacggtgagatgcgggtagaactgcacacgacgaggatcacgaggatgctggaggacgtcgtcgccgtcgcgcttgacattagggcctccgatgcttgacgttagggcctctcgcttgaagaggcacacaaacataactcatgttttttattttgccctacattatatactgcttctctgcgggggcgttatttacagtctgtggcctgtttgctatgttgtgcctgcgaaagggcgggcgggtcgaaggtgtttgagaaaattatgttgtcaacatcaacctcctagaagggccagaatgcaggcagagcctcaactcgtcactgcatcagcacgtcagcaggtgtcacagtgtcagtttcgatggaatggttctgcaacgcatgtgcttctgtaattttcgcaagaagcagtcaactgctccctgatatggcgctaggacattgtagtgaaccccgcacatttgtggagctcgacaacctgccagagcgctagatgtttcgttgagaagatagctcctctagtttggctttcctctcgttcagtcactgctttaaaccaaatttgataccactcgttgaagtcaacaactgggatgtggacatgtgaaaccacacctgtggaactttcagcgtgtgatgactgggtcactggtggaataccgtgttttctgagctgctcgctttcagttcgcgaccatagtcctgtgtttttttccttcaatttcttgatgtaattattgcctaaaatttctataccttattcatcgtactggagatgctacttcatatggagctggtatgtagaatgattatcgcgagt

SEQ ID NO: 38067 - DNA, 468 bp, Zea mays
  Clone ID: MRT4577_134721C.1
gtgacgccggcgctgctgcacttcttgccgccccgttgcgaggagcagcacgtgtactctgggtcatcgtcgctgtcctcgtcgtcgtcgtctgtagtgttcgacgcggcgccgcccgtgggcctgcggctggacctcaacctggcgctgccgccggccgagatggtgatgtgattgctgccgtccaggaggctaatcgattgctcagttaattagtcaccattagtagctaatcgatcaaggcagccgtcaggcagaggtgtaaataggatgcagatttgctcggttttcgttgactgtgatggcatggtttgtttcttcgctgcgagtcacgcaacaatgcaaaagcaaaatgaaaagagagagggagagggataattatgccccagcggctctcattttattccctggattaaaaaaaaaaaaaaaaaaaaaaaaaaaaaaaaaaaaaaaaaaaaaagggccgga

SEQ ID NO: 38068 - DNA, 280 bp, Zea mays
  Clone ID: MRT4577_134722C.1
acgaagacgcgtactatgccatccatcatgttcaaaatattcagcccaaatttcctcgcatgggtgccatgaagtgctgccacagtgaacttaatgccctcatgctctcacaactatatgcgttcactaattctcacagcccacttactacatcttgctctatgaacctgacaactcaaacattcaaacctacaggatccacaacaggatcatacctaacattctgctctacaacaagcctattgctcctaacctcatacaccttccgaatacagacacc

SEQ ID NO: 38069 - DNA, 671 bp, Zea mays
  Clone ID: MRT4577_134723C.1
gtttctcttcccccttctattcctcgtgcagttccgacccctacgagcggacccacgtacgatcccgcttgcccgcttccgatccccgcgacgccccgacaaaattccataaccgtgacgcctcctctcccacttgtgcaccgagtgtaccgatttccctttcctggatctgaagttcaccgcgtgtagagcagataccgctcggacgcaaggattaatctcgcgagccatgagcttacgggcagaggaaagacccacacgtcagacacaataatcccgcggtgtatcgtcatcgacgacagacttgagatgctgctcctgctcacacgacctaagatataactgttgcaactttcgaacatgcctagaagaaaaatcattaactgcccacccatgggatgtactgactggcgaaagcgatcctacaaagtacttactgatgaaaagaggcaaggactatcttgtgaaacattaattatgcacaaagtgacagagagctcatatcgttccatgatgatcagaatattgagcattgctcgaagcgaaatcatgaagggaactgaaaactgactgcctcgaaggatcacattattaagctatatgatatcagatccatgaaagagctgcaatccttccgtaatcacaccaaggacggcactgacattggcgag

SEQ ID NO: 38070 - DNA, 494 bp, Zea mays
  Clone ID: MRT4577_134724C.1
gtcgctgtcgtcgtcttcgtcgtcgtcgtctgtggtgttcgacgcgccgccgcccgtgggcctgcggctggacctcaacctggcgctgccgccggtcgagatggtgatgtgattgctgccgtccaggaggctaatcgattgctcagttaattagtcaccattagtagctaatcgatcaaggtagccgtcaggcagaggtgtaaataggatgcagatttgctcggttttcgttgactgttgtggcatggtttgcttcttcgctgcgactctgcgagtcacgcaacaatgcaaaagcaaaatgaaaaaaaagagagagagagagagggataattatgccccagcggctctcattttattccttcgattcacttctgagctctcgttttattttttacttgacccacttctgaaacctctcaagttctgagagctgaaccgtaatgtgtgagacattgttcgtttgtgtcggattggtagattagaactattcctaa

SEQ ID NO: 38071 - DNA, 573 bp, Zea mays
  Clone ID: MRT4577_134725C.1
aattcggcacgaggcaccatcacatatcaacggctaccccctgccgccgtgtttcctctccagacccgcgctcccctcggtggtgtgcaacagagagcctcggctactgcaagcggtgacctagcaaaggacgagcgcgaacagcagcgaggcattgagaggccactatttctaggggctctaattgatatctgaccgaccagggtctggaactaccaatggggaaaaacacgcaccgtagtggtcctcacgtgcttggggactatgacatacgttattcgcaggcgagcagacacatcacatctggagaatagtacagctgctataaagatcataccgattgaactgactgggaccaggaaagagtacgatgcaaatgcaaaagctaacactattgtgaaaggaattgtattagtccatacatctgaggatgttcccagagagaaaacacacagccatgatatctttcagaatagtacgagacaacacatagctgactaaacgcctggactgctatccatgaaaccaatgacttgaagaaccaccatgcatcaatcggatcattacatctca

SEQ ID NO: 38072 - DNA, 244 bp, Zea mays
  Clone ID: MRT4577_134726C.1
gtgtgttttgtttttttttggacattatgtacatgagtgttttgtgttcttttatctcgcgacgaaatatgttttatacaatgatgaaaggcagctaatcttgcttgtctaagcacgcatatttaatacatgtgttattatcttgcgactcaacataaaccggttttttgagagggggggggggtgggcctctaccaaggctgcaaaaaaatttggtataaaaaatccaaggcgggcgcatcgt

SEQ ID NO: 38073 - DNA, 547 bp, Zea mays
  Clone ID: MRT4577_134727C.1
ataaagtggagtttaaatatagatataagtatggataagctggatatagtctcacgcgcatgacatacacatatgacatatgtgcagtatcttttttctgcaacatgttccaaaagaaaaggaaatcataaagaccgagttacagcagtcaatttgtcacccttttacaaactagttaagtatacacgaggaccaactcagaaacatatgccagaagcttttaagacctacattgtgcagtacagtattattttatgaacactcgtgttcacaatgaacaggggaagagctgcagtatcctatcaatgtaaatcatcttggtccaaagtatccaatgactgaaaaaaatacctcaggaagcaaaagtccgttccagaaatatgttctcataaatccttcggctcaagatactcagacaggctaggtgaagaatggatgagccctgtactcgaatatgacaatgcatactcttctatgttctctaacctgtaaagataattgaccatgatacctccactttgttgaatgcccttctctgattggtcag

SEQ ID NO: 38074 - DNA, 1229 bp, Zea mays
  unsure (1)..(1229): unsure at all n locations
  Clone ID: MRT4577_134728C.1
ccccaccgggggaagcgaggaatgctgggctctcttcttgtcgagaccagaccaccgtatagaagatcctccctcgccgccccaccccaccccacccatggcctccgccgccagcactgccgccggggccccgctgcgcctcctctcatcctcttccaaccgtatctccaagcccttccttccccgcccccaccgcctcaccctctcctcccccatctccttccagcgcctcacagcccggtccgcggcctccccttccccatccaccgccacctcgtccccgtccggctctgtcgacccggcgcaactgccccccgcgctacgcgacatcgtcggcctcttccagtccgtcccggacgcgcgcacccggtacaagcagctccttgcctatgccgcgcgcctgccgcccatggacccggcgctcaagaccgacgccaaccgcgtccggggttgcgtctcacaggtctgggtccacgccgagcccgacgagggcgacgccggccgccgcagcgtcaggttccacgccgactccgacgcgcagctcaccaagggcctcgccgcgctgctcgtgctagggctctctggcgcgcccgccgcggatgtggccagggtgcccgttgacttcatcgagctgctcgggatcaggcagagcctctctccctccaggaacagcggcctgctcaacatgctcagcctcatgaagcgcaaggcacttgagatcgccggtggtgactcaacgtcaagtcagcaatctgtccaagaggttaccagaccgcgtctagtgaacgggaaagagcctgaatttgcagctttcgaggtgcaagaaaaggaaaaggaaaggccacaggatgcagagaggcgcgacgaggatgaacaattgggtcaacttctaccacttgatgcagaagtgaatggtgctgcgggcggtgggaggaaggagaggataagggagagtttggagagggcactttctccggtagagttggagattgaagacatatcacacctccacaagggccatgctggcgtggctgggaccaatggggagacacatttcaatgtgagggtggtgtccaaggagtttgaggggaagagcttgctcaagaggcacagggctgtctatgatctcctgcaggaggagctcaagaccgggttgcacgccctgtcaatcgatgcanagactccatctgaagttaggtactagcttgccatgaaatatatatattctt

SEQ ID NO: 38075 - DNA, 461 bp, Zea mays
  Clone ID: MRT4577_134729C.1
ccctagaggatctccaacacacacgacatatgtagcactgaagcctcgcatatgtcaactcacccacagggcgactcatagaccagaacggggcccagccaaccgagagctcagtaccccaccatgcagactaacgccaggtggatacacgacactctcagcatgtatgcactcgcatggcggaccggccttgcagaaattgctccgatcgaggctaatcatacccatgacgaggcatgaggacagataaagggtcctacatcagaaagactactttcagaacagtccttaatctacacaaactggcgacctttactgatgagcgggtgggctgatagtaaaaaaagcctgaaaagcgggtacctgtcagagggaccctaccgacatgatgaaggcatcaaggactatgataccttgatcatctcaccccctttttgatttgaaaaacatgagtgatacat

SEQ ID NO: 38076 - DNA, 1980 bp, Zea mays
  Clone ID: MRT4577_13472C.1
attgggtacctcgaggccggccgggatttcttcggtctctccactggcccaccgtccggaacccatcccccgcccgctccgccacagtccacacaggccccagccatggaggcggccccaacccccgagccggggccgcacgtgcttgtcatccccttccccgcgcaaggccacgcgctgccgctcatcgacttcgtcgccctcctggcggcgcgcggcctccgcctcaccgtggtcacgaccccggcaaaccttcagcttctctcctctctcctcgccgcacaccccaccgccgtccgcgccgctaccttcccgttcccctcccacccgtccctgcccccggggctcgagaatactaagggttgcagcccggtgcagttccccgccttcgtccacgccttggccgagctgcgtgggcccatcctcgcgtgggttaaagcgcagcccgatcccgtcgtcgccgtggtcgccgacttcttctgcggatgggctcagccgctggcccgcgagataggcgccgctgggatcgtgttctcgccgtccggcgtcctcggcaccgccgtcccgcactcgaccttccgccgcctggtgaggcgccccgcggagtgcgatggcgacgacgagttcagcgtctcgttcccggcgattcccggcgagccgtcttaccagtggagagagctcttgatgatgtacaggaactacatggcaggcgctctggacgagcaggtcggcgcgtcggtgaggcagaacttcatgtggaacctgcacgacagctgggggttcgtgttcaactcgttcagagcgctggaggggaggtacctggagcagcctctcgaggacctgggcttcaagcgcgcctgggcagtgggccccgtggctccggaggcggacgccgcggttgcccgcggcgggcaggcaaccgtcgagctcgccgatctcagcgcgtggctggacgcgttcccggaaggttcggttgtatacgtgtgcttcgggagccaggccgtgctgagccccgccgtggcggcggcgctggccgaggcgcttgagcgcagcgccgtgccgttcatgtgggccgtgggcgacgccgtggtcccggacgggttcgaggcgcgcgccgcggcgtcggggcgcggctcggtggtgcgcgggtgggcgccgcaggtggcgctgctgcggcatccggcggtggggtggttcgtgacgcactgcggctggaactcgactttggaggcggtggccgcgggggtgcccatgctggcgtggcccctgacgggcgaccagttctttgacgctcggctgctcgtggacgaggcccgcgtcgcggtccgcgcatgcaagggcggcctcggctttgtccccgacgcaggtgagctggcgtccgtgttggccgacgccaccggggagaagggccacgacgtgaggacccgcgccaaggcactcgcggcagaggccgcccgcgccatgaagcctggcgggacatcgtacgcggatctagagctgttggtgcaggaaattcggaatcggaagcttagctagctccctctccaggaatacatcagctcgattcccatgcgatctaacttgatcgcactgaaagatgatgcaagatgatacaagactgaaagatgatacaagactttaagttatgtaattttagttgttttgtatgaattgtataattttatccgttcaattatgtatttggatgtatttattcaagaaaataacatattttatgccaaaaaaaaaaaaaaaaaagcggccccctctagatcaaagcagatacttccatgcattcggactcatttgttaccgcccccctccctgtggcttcagcttgaacctatttaagtgccttcccatgtgtgcacgggaataattggtttccgtttggcactcagttgtgctgtgtttttgcagctttgcatgaactgaagcccagctaaggccccgtatgaaaacacaacccccgcccgcccg

SEQ ID NO: 38077 - DNA, 731 bp, Zea mays
  Clone ID: MRT4577_134730C.1
cctatagggcgattgggatcctcgaggccggccgggaccacaccacaacaagcacagagacaccaagcgttgaactcgcctaagcagctaccaaccaaccctagaaagctagacaccgtacccatggctcgcgctagcgtcgtctttgtcattgctgctctcctcttcgtcgccatggtcgtagcaccgatggccgaggcaaagtctgccgatgcccctgtggctgacgcgccggccgatggacctagcgggccggctgctgcacctggcccccagggtgtcgaaggcctgtcaggcaatgaggatgacgatgatgactccaccaactgaggccacacatgtcggcccggttaaatttggaacaagacatggaagaaaaatgagagcaatgtctttaaaaccatgaatccataataatgtgtggtcatccatggatacatccttgctctccctctttttctttctgtttgattttcaatgtgttatcatgttgttagttaactgtatcgactcatggtatcaaggtctaaaaaattatcgccaaaaaaaaaaaaaaaaaatttgcggccaaaaaaaaaaaataaaaaaaaaaaaaaaaaaaaaaaaaaaataattttaaaagaaaaaaaaattaataaaaaaaaaataaaaaaaaaataaatattttatggggcggcctgtttaaaggttccaagtttacttccccgtaatttcaaggttttttttttttt

SEQ ID NO: 38078 - DNA, 497 bp, Zea mays
  Clone ID: MRT4577_134731C.1
aattcggcacgaggcatcactccgcccgagtcccgtgatcccgtcccgtctcatctcctcctcacatcacagccgaggaagcttccaaggacaaaaacaaaaaatgcggcccaccacgtcctgccatcgcttccccctgctgctcgtcttgctcctcttcctcctcgccggcgagggccgctcccagcccgccgccggcggcggccccagtgaccgcgacacgctgctcgccgtcaagaaggcctggggcagccccccgcagctcaagtcctgggaccccgccgccgcccccgaccactgcaactggaccggcgtcacgtgcgccaccggcggcgttggggtcgtcaccgagcttatcctgtccaggcagaaactcacgggctccgtcccggcaccggtgtgcgcgctcgcgagcctcacccacctcgacctctcctacaacaacctcacgggcgccttccccggcgccgcgctgtacgcgtgcgcgaggctcacct

SEQ ID NO: 38079 - DNA, 648 bp, Zea mays
  Clone ID: MRT4577_134732C.1
gcgattgggttcatcgaggccggccgggcccacaccagaacaagcacagagacaccaagcgttgaactcgcctaagcagctatcaaccaaccctagaaagctagacaccgtacccatggctcgcgctagcgtcgtctttgtcattgccgctctcctcttcgtcgccatggtcgtagcaccgatggccgaggcaaagtccgccgatgcccctgtggctgacgcgccagccgatggacctagcgggccggctgctgcgcctggcccccagggtgtcgaaggcctgtcaggcaatgaggatgacgatgatgactccaccaattgaggccacacacgtcggcccggttaaatttggaacaagacatggaagaaaaatgagagcaatgtctttaaaaccatgataatgtgtggtcatccactcatccatggatacatccttgctctccctctttttctttctgtttgattttcaatgtgttatcatgttgttagttaactgtatcgactcatggtatcaagatctaaaaaattatcgttcttgtgttcttgagccactgagattttgagacaacgaaggattcatcagtcacaacgttggttacaaaaaaaaaaaaaaaaaaggggcggccaaaaaaaaaaaaaaaagcggcc

SEQ ID NO: 38080 - DNA, 734 bp, Zea mays
  unsure (1)..(734): unsure at all n locations
  Clone ID: MRT4577_134733C.1
actcctatgggcgattgggccgctcgaggccggccagaccacaccagaacaagcacagagacaccaagcgttgaactcgcctaagcagctatcaaccaaccctagaaagctagacaccgtacccatggctcgcgctagcgtcgtctttgtcattgccgctctcctcttcgtcgccatggtcgtagcaccgatggccgaggcaaagtccgccgatgcccctgtggctgacgcgccagccgatggacctagcgggccggctgctgcacctggcccccagggtgtcgaaggcctgtcaggcaatgaggatgacgatgatgactccaccaattgaggccacacacgtcggcccggttaaatttggaacaagacatggaagaaaaatgagagcaatgtctttaaaaccatgataatgtgtggtcatccactcatccatggatacatccttgctctccctctttttctttctgtttgattttcaatgtgttatcatgttgttagttaactgtatcgactcatggtatcaagatctaaaaaattatcgttcttgtgttcaaaaaaaaaaaaaaaaaaaaggggcggccgccaaaaaaannaannnnnaanaaaaaaaaaaaggaaaaaaaaaaaaaaaaaggggccccttttttttttttttttttccccaaaaaaaaaccaaaattccattttccaaagggggccagaaaaaaatggggttggcttttttgggggaacct

SEQ ID NO: 38081 - DNA, 622 bp, Zea mays
  Clone ID: MRT4577_134734C.1
ccgccggccaccacaccacaacaagcacagagacaccaagcgttgaactcgcctaagcagctaccaaccaaccctagaaagctagacaccgtacccatggctcgcgctagcgtcgtctttgtcattgctgctctcctcttcgtcgccatggtcgtagcaccgatggccgaggcaaagtctgccgatgcccctgtggctgacgcgccggccgatggacctagcgggccggctgctgcacctggcccccagggtgtcgaaggcctgtcaggcaatgaggatgacgatgatgactccaccaactgaggccacacatgtcggcccggttaaatttggaacaagacatggaagaaaaatgagagcaatgtctttaaaaccatgaatccataataatgtgtggtcatccatggatacatccttgctctccctctttttctttctgtttgattttcaatgtgttatcatgttgttagttaactgtatcgactcatggtatcaaggtctaaaaaattatcgtcgttcttgtgttcttgagccactgagattttgagacagtgaacgattcatcaatcacaacgttggttttagtcttcgctacaaaaaaaaaaaaaaaaaatttgcggcc

SEQ ID NO: 38082 - DNA, 412 bp, Zea mays
  Clone ID: MRT4577_134735C.1
tattatttccttttgtttcatttaatcatggccggaaactgtggccggttaaccaagtatcaaaaacagtacctaacctgcaaaaaggactgattcacgaaaacactaaaaaaaatcctacaccctgaggactgattacatgggcgaaagaacaccccttttttatcgcgcaaacgcagcatgaaaagaaaaatagagtaatgttcagcactcatttcaacaggggaacaacaaaaacgaacacatcgtgcggataacactatctaccaggacgatcttgtctagataggtcttgaaccactgaagatgatcgatggggaacctcgggatcctaagcacccttgcaacgagctaaatgtgcacctgcaagaagaagaggatctggttacaactgaactccatgggcttttag

SEQ ID NO: 38083 - DNA, 284 bp, Zea mays
  Clone ID: MRT4577_134736C.1
tgccgcagaaatcataattcggtgttccattgcagcatactgggtagcatacaatattattacagcaacagagttccacctgaccaatacaactctggtactgcaaatctcttgcaacaaccaccctacgcacgatgctcataactcggtgtacaattccagactaaaaaaccctaacattacccaacccaatctacatgcatcacatcaagctttcgccagctatcgaagacctaacactcccacaccgacacctcgacccaacatcaccgcacctcgaatta

SEQ ID NO: 38084 - DNA, 181 bp, Zea mays
  Clone ID: MRT4577_134737C.1
cggctcgagctcacacacggatcgttactgacctcacagatccacacgacatacgagtgtgcgtaagaggtattcgccgttacctatcactagcgagtggcaatggcggaaagagctctctgacggtgaagttacggacttgctgtccgattgctttagcttggccaatgcactctgtgca

SEQ ID NO: 38085 - DNA, 413 bp, Zea mays
  Clone ID: MRT4577_134738C.1
taataatagacaagctcactatgcaatattcatgttccaagttgttgttgtacttgttctgggttattttgggaatacttggaaggacactcaggggcttaagcaatggtatcttatgtatcctatggaggtagagggcccatggtatgatttcttgattatcccgttacgctttgagctgttgtgctccataatgattccaatctccataaaggttactcttgatttggctaaaggttcgtatgcaaagtttattgactgggatgagcaaatgttcgattgggaaacgaatacacccgctcattcagctaacacagctattagcgaggacctcggacagattgaatatattttgagtgacaaaactgggacactcacagagaataaaatgatcttcaaacaatgctgcataa

SEQ ID NO: 38086 - DNA, 429 bp, Zea mays
  Clone ID: MRT4577_134739C.1
taggggccttttttttttttttttttgggcgctgaaaacgtctcgcattattaccacaccgcaataacaacagcaccgtagagaaaagcacgagacctcccaccacagaaacctaaagaggaaacacaatgatcgaacacatgcgggctatgcctacacagcaagaagcttgccaaagaggccagcggtgtcttccacgccgggaactgcctgcgcgttggactcctccacgctaaacgcaaagcgctcctcaaggcccatcacaatctcaagcgcgacccgcgaatcccacaccaagtgcagagaataccgattcgccactaacttcaaggtggggcacgaagagcaaggtgctaccccacaccttcgcaaaccttgcccgcgggatccttcatgtccccccaggaaaaagaacccatacgcccctgg

SEQ ID NO: 38087 - DNA, 113 bp, Zea mays
  Clone ID: MRT4577_13473C.1
gaaacagcagtagcgttagcttcacgatttggttgccgtcgtagcatcgccttcatcgggaggggtcttttccaaccgtgccgatactacatacaaagagatgatcattcaag

SEQ ID NO: 38088 - DNA, 249 bp, Zea mays
  Clone ID: MRT4577_134740C.1
gcagatacaacgcgacacgccgatgcaacttggatcgatcttgtctgccttctcgtcgtatacatactagaatccatccaagcctatgcgtacttagaacacaagaacgctgtgctgtgcttgcagattcacatgtatgtacactagccacggacgacgccagaacagatatggataccggcatcttccatattccatccaacgaagacaaagcggggggccccgaactaatggccttctcggccgagg

SEQ ID NO: 38089 - DNA, 553 bp, Zea mays
  Clone ID: MRT4577_134741C.1
ggcaaaaaaaaaatataaactccacgggtgggggccagaaacccccccacacccgcataaacaaaggataaaaccatatatccgggggggggaaaaaggcgtcaaaaaaaaagggcagttaagggggaaaagtcgaaaacgccggttggggatccaaaggggtgggccgcaccggaagttgccgggggttgggggaaaaaccgaaacttgttgccaaacccacggaactgttggagtgtttgggcaaaggcctggaacttggggatgtcggaataactgacactggggggggcgtacttaagggacccctgaaagggggcagccataatctcggaaagggggcccacctggttttcctccagggcctaagggtggtccttcctgggcctttcccggtgaagggccttctgaaggttccccctgagggcatacttgcacccacgctggaaaatttcggggaaatttgctccgttaaaaccctgggggtccttggcaaaagcatgcaagtaaacgtccttagccacaggaaacttcctgaggcaggctttaaaaa

SEQ ID NO: 38090 - DNA, 169 bp, Zea mays
  Clone ID: MRT4577_134742C.1
aatcttattaggatatgtaggataaatctcaagaatcctacaggacgaatgattgcatctcatcatgtaatcaggggcggcgaggattacccatccttgtgtagctgagcgcacctgcaatacagctgcaaaagcgaacacagacaggtaaattggtctttcaggcctt

SEQ ID NO: 38091 - DNA, 505 bp, Zea mays
  Clone ID: MRT4577_134743C.1
gatcacttcgtcgcggcgaggagggagggggtcgccgttagcgcgcggcacttggatgagaagggcagcggtggaggaggatgcggaaggcgtacagggactccatcaaggtgctcgaagctgacatccagcacgccaacaccctttcactagcacgggcccatgtccttctcgtttctccgtctgcctccgtgatcgagcgggtgcttgggggtttcggcggggctgcgtcgcgccgtcgccgactcctcggcctgctgccggggttgcgcaatgcggcggccagggagggtgatagattgaccgaccgagcgccggttcgcccccctccatcgggatccgttgtggtggttgccctatccgttcacgcacgagtggcgaagcggcagtagatcatgtgggaatcccatgtgtttaggatgtttaaacaaaccctgattcccatgtgttttagcgttctaaattatatataattttctgcttaaggagaaaagggtacgagatg

SEQ ID NO: 38092 - DNA, 458 bp, Zea mays
  Clone ID: MRT4577_134744C.1
aaaaaaaaacgggaacatttcctgcagaacaaaaacaaaaacgtatgtttacggaccacccatacaagtatgtatatgccctccctaacttgccggggacaaagttggaagcgaaggcccaggctttgttgttaacagggtcagcgagggggtcggggaggttttaaaggggacccttgccggggacaagggcctgcacaaaaaacccaaacatggaaaacatggggagggggccgtttttgatctccttgaccttgagctccggaaacccctccgggtcgtcgggaaccccaagcgggtcaaagctgccgccggggaacagggggtcaaccacctccccgagggggccaccggggatggggaacccctggagggggccaataagcaccacctggcacccccaaagggccagaatgctttgcgcgtggaaaaggctcgggttgccaaggaattaaacc

SEQ ID NO: 38093 - DNA, 773 bp, Zea mays
  unsure (1)..(773): unsure at all n locations
  Clone ID: MRT4577_134745C.1
gttcgtctcctanacctgcacgctgcactgcaactgcaagcaagcgttaagatttgagttgagacacataaacgccggatgcccaccgtagcaaagcactagcagcagcagacaccacgtcactcggagacaggcaggtgggccttccctgcagtccagataagccaaacggcagccctcgtttagcttacggccgtgatctgatcactccagaggtggacggcgattactgctcctaaactcggcaacaactgggcgggcactgccctctccgggccacctaaccgactgggactcactgacgtgtggggtcatcggatgcgtcttggcttggggaaagaggaaaggatgttggccacgggattcttgacggacgggcggattcgatgtggatgcgcgcgtccaccggcctgcattttttttgcattttgaccctttctcggaaaaaaatcacgtttagaccctaaaaaattttttaatgtcatttttgtaccctttgctcggcgccataggctatggcgccgaggtaacacagctcggcgccataagctatgacgccgaggtacgtgctgcgctggcataactcggacgtcgtggcgccgacttggcaccaagctcggcgccatagattttggcgccgagctcaattataaccacaaaactcgtctagcttagttgatagatagtaagactcataacctgtggttgtgggttcgatccccatgatagatgtgtagtatttttgtctttatcactgatttgtttttttttct

SEQ ID NO: 38094 - DNA, 157 bp, Zea mays
  Clone ID: MRT4577_134746C.1
gggtacccctccgagccgccgcgaccctgtactgtcgtctcggctcacccttgtgttccctgcccctccttctcctttccccttggcattcggctccctacttctgccgcatattggatcggcaatccatcagcccctcatggcacgctcctatcta

SEQ ID NO: 38095 - DNA, 490 bp, Zea mays
  Clone ID: MRT4577_134747C.1
gcaaaattacaaatttctcttacattcttgtgggaggctatcgaagagcagatgctaaggccttggttgatagggttgctgatgatgcagtctccacaactaggacggtaggattaggccttaaactttgatgtgtctttcctcctaaatttgatgcatgtaaaccttattctcagtaaaactttagaatagcgaaaaaaatctaggagatgaagtaatggtgtaactctaaataatattagaggctttattttctgctgatttgacagaaatttaaatgttgtttttcctatatgtttctagatcattgccagttgaacaactctttttttgttttttaatttctgctaccgtaactagcagagtataaaagaacgcttacacagtgaaaacctgcattctacttacacagtgaaggaaagaaaacatattacaacctatgatcgtatggtcataccattttgttcatgctgatacaattattgctttg

SEQ ID NO: 38096 - DNA, 312 bp, Zea mays
  unsure (1)..(312): unsure at all n locations
  Clone ID: MRT4577_134748C.1
agcaggggtaacaacgcagagtacgcgggatactagaaaagcacagaagtagagttcattaaaaaattctcaattggtataatgttatttgttgatatgataaatcatctgttggtcttcaaaaaaaaaaaaaaaaaaaaataaaaaaaaaatttttttttataattttnnatggggggggggggttttgagnttaggaaaatgggaattntttgggaaattggatttgtgaaatttggttttaantttttggaaantgggnggggaaagggttaaaaatttaattatggtggnggtggggaaattgggtgt

SEQ ID NO: 38097 - DNA, 478 bp, Zea mays
  Clone ID: MRT4577_134749C.1
cggacgcgtgggtgccttagtactgtgatctgtgacagaggcatatgagttcaacattgcttccccgggcctaattctcaagctcccggtatgctgagcggagcatgagatcgattgaagaggtaacaaatgattggtttctcgtcggagagagaatagcacaaagttgcagcagaggtggctgcaggaggaggcgcaacatcatctaggtcctccatttaatcatttgacccccagtgagttgttgtaaaagggtagggtagcttctgtacaggttctaatcttattggagatgataatgtttcggatgaggcggcgcctgttgtccaatttgtaacattatagtagaggagggaagtatacaggcgaaaaggcagtgaataattgtgccttttttgccccctgagaggacgcactccgtttcgaaatgtacaagtggccgattggcgatagggtttccggttgagcgacctcggtc

SEQ ID NO: 38098 - DNA, 265 bp, Zea mays
  Clone ID: MRT4577_13474C.1
ccgggcgggacggccgacgcttgagacgctccccgccgcctgtcaggccgccaccgcgcgtgacttcgcctcatcctctccgaagatggacttgcaggccggggtgctcgccgggggcacctccgagaaactgtggcccctggtttgcaaggacgttgccaaggcgtggttgccgggcgacagtgggcccgtactgtgttacgcgctgagacctcgttgggggcggggacctgggagacctcattgtttgcgtgaggggcagaag

SEQ ID NO: 38099 - DNA, 349 bp, Zea mays
  Clone ID: MRT4577_134750C.1
cgaatcaaacaatatttggttttttcatcacaccggggggcgtttacaaacataacctacaattgacaactcaccactgaaccaaacctaccatttatcctacccttatcccttaaccccctctaaaacctggagaagctttcagagtatatacacattcagtcaaaaactacactcggtgcccttgccatagcaaccgtaattaatcactaccatgccgataaacagggccatcttataatacacccttattcatcgaccgcctgctttccaccccttgccttccttttcacatgcccaaccagacgctgtcttttaccttgttgagccaccgcctgtacctttacaa

SEQ ID NO: 38100 - DNA, 572 bp, Zea mays
  Clone ID: MRT4577_134751C.1
cacacattatactccagaaatactgtgtgaacaggtatcttcggatccaagtcggcatcacagtagaccagagtaatacgaaggttgatacagcgccgaaggtgtgagcaggaaagcttcggcgcgacaacaaaaagtgaaaccgacttaaagatgaaaaggctatttagacctcgacagattactatagaattatcaatatgtgaacaggtaccgaatgaatttttgtatcattggagcagctgcgaataatatgaagcttgatacagagccgaaggtgttgagcaggaaagcttcggcgtaacagcagagagtggaaccgacttaaagatgaaaaggctattcagacctcaatagattactatagagttattgtcagatgtaaagggcatgaatgtaattttgtaagggctgtgtcccgtgtctataaataggtgaacagtatccccgtactgttcacgctgacttggcattcgctttttgcgtcacgcttgtacaatcatttccttccgattgaaggtacacttgttgtacaaaaaaaaaaaaaaaaaataaaaaaaaaaaaatataaa

SEQ ID NO: 38101 - DNA, 1631 bp, Zea mays
  Clone ID: MRT4577_134752C.1
cattgggtagctcgcggccggccggaatctccgctaaccttcttaattttctgaagcttgggcgggatctcggctcgcctccgtccatctctatggcgccacggggccaccacctggcggaggtggccctcctcgcctctgcttcggcggacctcgcagccgcaggcgccggcgagagggaggggtggttggacgaccccgccatcctcccctcgctcgggccccgcgcgcgatccctcgccgtggctagcgcggcgcactccgtgctcgtgatcgtcgcggtggcgggaggtggaggcggcggggtcacggtggagcctgcgctggggcccgacgagggccgaatctccgccgttgagtgggtcccgttcgccggggaggacgatgcagagggggaggagggggtgtccgtggtgatcggcacggacgctgggtggctactgttctactcgctcgcaggcgatctattgcacaagcagagtatatatcctgcaaagatactgaaactcaactttcgtgagaggaaggagaacgcttgggaagattcaggctcagatgaactttctgtagtgtttcctggtgttatcgcgcgctttgatggtgctgaccttcagaacgttcttaaaaaagcatttcaagatgtaaaatcacgcctgtggaaagataagtttgaagagcaagatgctgaggatgaggaaacttttggacgaataccctttcagatttggaatgtaaacaagttcagttcatgcgctgatgctgcaattggtcgtgtcatgccacctcccttgttagctgttcagtcaagtcagcgccactactgtgccatcacagttggagaggatgctgtagtttcagcatataggttatcagaagatagaaccaggtcaattgttggagcaattttgtcaagaggtgtagctgcaacattttcgacaatatcatctttgtccaaaatactatggcggagtgagccgtcaccacctaaaaagtcacggccaaagccccaatcctttgcaaaaacatcacccctcacctgcttgaaagactccccaaggaaaggagaacggcttacactctctccgagtggtacgctggctgctataactgattcacttgggcggatactactgctggacacccatgcgcttgtggctgtacggttatggaagggctatcgtgatgcttcatgtctatttgtggaaatgcttctgaacaaagacaaggcttcgtcagggtcgatgcacatagagtatacgaagagtgactattgtttgtgtttagcaatccatgccccgcgaaaaggcataatagaggtttggaagatgcgcaccgggtcacgcctcctaaccatcccatgccccaaaggaagcaggatcttacaaccctcagcgaggctctctacgtcgtcgttctcaccttcgtattccccgctggaggtttacctgttcaatggagactctgggcaattgtcagttttgaataggcacatcggatgaatcatttgttcctttgttgtgttattaaattgttactgccaagtgttgtagagaattacttgtttcagtgtttacagttttgttaatcaagaaaaaaaagtgcgtgggtcaggattaaaaaaaaaaaaaaaa

SEQ ID NO: 38102 - DNA, 782 bp, Zea mays
  Clone ID: MRT4577_134753C.1
ccggccgggggcttcatcgacggggtaactagccaccgcaaagcctctatcaggcggcacttagctgaaggatagatttgagcacaacacacccgccggccgattcgtggaacacctcgccgctgttggctgttgatgccatggcggcgcggtcgctgtggcagctggaggacgcgatcatcgcgaggctccgcacctgcgccactttccgggacctcctccgagcgcacggcctcgccgtgcggttgtgcctctcgcagagcagctacgttgccacccagatcgtgcacatctgcaacgcccacggccgcgccgcgcacgccgcgcgggttttcgcccagatccccgccccgaacctccacctccacaacgccatgatcaaggcctacgcgcagaaccacctccaccgcgacgcggtcgaggtctacgtccgcatgcttaggtgcctcccgcacccttcgactgctggcttctccgtcggcgaccggttcacgtacccgttcctcctcaaggcctgcggcgcgctcgctgcttctcggctcggcaggcaggtgcacgcgcacgtggcaaggtccgggtgcgagtcacacgctgtcgtacagaactccctgatcgagatgtacacgcgctgcggggatctgtcgaccgcacgcaaggcgttcgatggaatgcgggagaaggacgtggtctcctggaacacgctcatctccgcgcacgcgagaatggggcagatgaggagggcacgggaattgttctattcgatgcccgacaagaccgtggtt

SEQ ID NO: 38103 - DNA, 320 bp, Zea mays
  Clone ID: MRT4577_134754C.1
gaagcgcggaacctcgagagcggccgcccacatcacagcttttttgtttacccaccgagcgaaagccccaaggggggggataaaatgaaagggaccaccccacacaaaaacaatggaccaaaagggcacaagaaaaacgccagaaggaaaaagacacgaaacgcaccaacggccagacaacaacgacaaccgagcacaacaggataaagaagaaaacaaacaccggatcgcccgaggacaaacacaaaaacggccaccgggaaaaaacccaaagcacacaggcagcgcggaacgcaaacaagaagggagcacccccaacg

SEQ ID NO: 38104 - DNA, 404 bp, Zea mays
  Clone ID: MRT4577_134755C.1
tacacacacgtctgggacgatgcagagggggaggagggggtgtccgtggtgatcggcacggacgctgggtggctactgttctactcgctcgcaggcgatctattgcacaagcagagtatatatcctgcaaagatactgaaactcaactttcgtgagaggaaggagaacgcttgggaagattcaggctcagatgaactttctgtagtgtttcctggtgttatcgcgcgctttgatggtgctgaccttcaggctttctgtgcatgttcaaggataagaactgaattcttggttgctcacagaacgttcttaaaaaagcatttcaagatgtaaaatcacgcctgtggaaagataagtttgaagagcaagatgctgaggatgaggaaacttttggacgaatacccttt

SEQ ID NO: 38105 - DNA, 213 bp, Zea mays
  Clone ID: MRT4577_134756C.1
gctcgaattccgttgctgtcggaagcttgggcgggatctcggctcgcctccgtccatctctatggcgccacggggccaccacctggcggatggtggccctcctcgcctctgcttcggcggacctcgcagctgcaggcgccggcgagagggatggggtggttggacgaccccgccatcctcccctcgctcgggccccgcgcgcgatccctcgcc

SEQ ID NO: 38106 - DNA, 353 bp, Zea mays
  Clone ID: MRT4577_134757C.1
caccttacgtggtgcctgtggctgtgtacgctgtttaatccatccgacccatcgatcatgcaaaaactaatccaaatttgtccccatcgatcccaactttcagtcgatcttactcgtttggctgttgtactcccaaagcctgcgccttacaacgagatttctcccttactttctccaataaccctagccttctccgtcgtcggcgacgaattcggcgttttgagtttctgttgtcagcgtcaccatgttcatgttcaataggatctttgggaagcccaaggagcatgccaactgctatgccttgggcactctggacaagtaaaatgagactcttgatttgctggagaagaaag

SEQ ID NO: 38107 - DNA, 215 bp, Zea mays
  Clone ID: MRT4577_134758C.1
cagcatcattctgcataacaagatatgttgaatagacattatttcaattttctggtgatcctctactatctatcactacatacaactttcatttgctgacatcaaaataatatctcctttcatcactccacttatattcacctttatttccatccactttttacctgccacacaaaatactcaaatttttaaactacctttcatcttctcccaac

SEQ ID NO: 38108 - DNA, 868 bp, Zea mays
  Clone ID: MRT4577_134759C.1
ccctagaggggacgtcgctgccattccgagcattgcgatggctaccatctttgcaggcaggagctggggacggagggacttcacgagggttgtgcgtgcaagggctgctcgtgcagcaacaatcgcaggcgggcacttcagctccataccagctggtggctgtagagccttggcgacaaggggcagaacgccactcattgcccggtaagaacgggcaagtgggcactgcccattttctagccattcatcgctcattgcctcgtgggatggtgggttgcctcctttttgtttcatggaattctgatctggcttgtcgggcttcttgtgtgactggtctagattgttgggcttcttgttctgctttttgcccttgccattaaagaagttaaacccaaatggtccaaatgctgatagacttatggtagcggctctagcagccaatggattaaagggcagagcaggttcaggcttgacatcagtgctctcactgcggttctcatcaggcacatatgatcttcctgaaaggggaactatcccatcctgtccatggaaaagcttgaatgccgactcaaagcctggtccatcctcaaagatcggacctttgccccctcgggcagctacaggcaaagcagaagaaaatgaaaaggttgtagctccattgatgttcctcaggaacgggcatctctcaacaccgggatgaccagaaaagttctccgatgatgctgagtcacagaacaggctgctgaagagcatttccatcctcgccgagtcgctggagagctgctcgcctgcctgcttctgcttggctccgtccgtgcgggggggagagagggagaggagtcgtgtggggggagaggaggggggaagc

SEQ ID NO: 38109 - DNA, 685 bp, Zea mays
  Clone ID: MRT4577_13475C.1
gatttataccaattgagtggtcgacactaactctggtggaggcgcgctaggacaatatgaatacacatggcaagcaaggagatggtgctaatatccctcgtgcaagcaaatccaagaattcacaattcaaaatgaaaactttccgcactttgtctgtatataatagtagaccttatttgatctataatgttatagagttgaattacatggaacaactacatgataatgtacctgtaatctaagcacagcatagatcctagtggcaaggcgaggtattacgaagaatctacctaccgaatcaacaacaacaccaacatggagctatatcaaccaagaatggggaataccacaatattttactgacatcactcagccaaacttctaggttgaaatcatatgattcatttctgcagcaatatcattgaatctcagcctaataatcatttcaaattgaagtagatgccttcagcatgcacattcatatacagtatatgattcaaaatattcaagctagacctgacaccaccttatccataaggttcgctaggatttttgggtgttatatagatgaatgattctgatcaatgcacttttgctctagaatagattttgctgcattaggtttgaacttgtactactcagataatttatacaagacatgctgcttactctgaacgaatgatcc

SEQ ID NO: 38110 - DNA, 369 bp, Zea mays
  Clone ID: MRT4577_134760C.1
gagcacagcccagggagacggcacccgccaagccgcccaggaacgaccgcacgaagggcgcccagcccagcacggggggggggcacagggccagaacagccgccgccgacagggcgcccgccgaggcgcaggcgcaggcgggccgccgcgccgagcacgggccggcggccacaggcaccgagggcggcgacaagccgcaggcggcgcacgccgagaccgacaagaccaacaagagcggagccccgccgccgcccgccgggggacaccccgggacccagcaacccgaccaggcgagggacaacgagcgcccccagaaggagaggacccacccgaagcccccgccgacggcgcacgccccgccgagggcga

SEQ ID NO: 38111 - DNA, 1645 bp, Zea mays
  Clone ID: MRT4577_134761C.1
ataccgcgctgtgcccaccacacgactcctctccctctctctcccccaccgcacggacggagacaagcacgcaggcgagcagctctccggcgactcggcgaggatggaaatgctcttcagcagcctgttctgtgactcagcatcatcggagaacttttctggccatccgggtgttgaaaaatgcccattcctgaggaacatcaatggagctacaaccttttcattttcttctgctttgcctgtagctgcccaaggaggcaagggtcccatctttgaggatggaccagggtttgagtcggcattcaagcttttccatggacaggatgggatagttcccctttctggaagatcatatgtgcctgatgagaaccgcagtgagagcactgatgtcaagcctgaacctgctctgccctttaatccattggctgctagagccgctaccataagtctatcagcatttggaccattcgggtttaacttctttaatggcaagggcaaaaagcagaacaagaagcccaacaatctcgaccagtcacagaagaagcctaacaagccagatcagtcttccatgaaacaaaaaggaggcaacccaccatcacatgaggcattcagcgatgagtggttggaaaatggacagtgcccacttgcgcggtcttaccgggcaatgagtggtgttttgcccctcgtcgccaaggctttacagccaccagctggtatgaagctgaagtgcccacctgctgtggttgctgtccgagctgcccttgcgcgaactgcgcttgtgaaatccctccgaccacaacccttgccctcaaagatggtagccattgcactactggggatggcagcaaacatccctcttggggtgtggcgggagcacaccaagaagttctctcctcagtggtttgcagctgtccatgccgctgttccgttcattgcaatgctgaggaagtctgttgtgatgcccaggactgcgatggcattcaccatagcagcctccattgttggccagacaattgggtcaaggggctgagcgcatccgtctaaggaatcaggcggcaaatggtactggtgattcttcaacgcacactgctatgtatccaaacaagaatgggcattgcagcgacactgaaggcaaggcatgggaccctcttgcgacgaagataacaggctcaactgctaggggttctcctgcaccaaccccaagcgtgtgcttctgattgtgttaagcatgtgattcacgcacacctgtgaagagattatacatgaaccagtttatcttatagtgccatgtaattgccttgtgtgtcccagaaaactgagctgcccgtgtgcgataagtagaataagaggtgctaccccactgtttgctgtgttgctatggtcgagaatcgagattgatgtattgatgctgctgcatttctttctttttgttaatgtgtggtggcgtttctcgcttctgtaaagcagctgaagctgtcacatcatttgatcagttgaagctgtatgttaccatgtgtgtgccaaaaaaaaaaaaaaaaaaaagaacaaaaaacaaaaaaaagtcaaaaaaaaaaaaaaaaaagcggccccatttaatgtttggagttatgaaatgagggacatgtctcgcccctttaacccaacc

SEQ ID NO: 38112 - DNA, 184 bp, Zea mays
  Clone ID: MRT4577_134762C.1
ttagtactaccgacatcccacaactacccgactaccacattctactggcaggccacagcaccgcggcgggtccacacaactgcacaacagtaggcgtgcacgacggcggtctatccagaccccacggcgtgcatcgtgccattaacactcggatactgcgcatttttagaaattcgcggtccta

SEQ ID NO: 38113 - DNA, 337 bp, Zea mays
  Clone ID: MRT4577_134763C.1
aaataacaacaaagccggttaattaatttcgccgacgataaggacttcttttttttacttcacaaacaaaacaaatccgggcaaactggaagggcgatccatccacccaaacggtcgcgctaataaaatgaaggattgggatttaattcgccgcctaaacgtttccactaagttttaaggggtttttggtttgcatttttggatgacagaatagcctggtaacctttcgttccatccttgccaccagaattagctggcctttgggtccggggaaaatgtaaaaccatcttaccgttgttagaggatggaagggggggccaaccagggaagccttttt

SEQ ID NO: 38114 - DNA, 250 bp, Zea mays
  Clone ID: MRT4577_134764C.1
tgccaagtcttagggcatcacaaacagcccatttgatggagggagcagggacatagcacatttttgtctgtctttgtgaggctgctttgctaactctctgaggagaggaagcctctcgggctttccgtcggctggggctagtgccagagaatcccttctcgtggccagcaggttcctgggaggccggcacaaggcaccgctcgccactcatgacaccttggtgcagagtgacctcctgcccagtcaccac

SEQ ID NO: 38115 - DNA, 361 bp, Zea mays
  Clone ID: MRT4577_134765C.1
gagaccgcgggcgaaagaggaaagataatacatatgtgtactcttgtcttccacgcttccgaacctgtcgtctgctgggtgcctgcctccaaaaaagagtttgttatggcttctaagctcatccttaaggagctgaaggacccggacaaataccccgagacatcattctgtgcaacagcctgtgacgaggacatgtctcattaggacgaaacaattatgggaccacatcacatctcctatgctggcggtgtgttgttaccgtacattcatttcgcggcagatgacccgctgaaacctgcaaaggtttgtttcaagacaaaggtgttggatgctaatattaacagctagggttgtatatgcc

SEQ ID NO: 38116 - DNA, 265 bp, Zea mays
  Clone ID: MRT4577_134766C.1
tgctgtaatacatcatgcctcgtttaaacctgcactgcaccgtcacctcgtcgtcctacggcagctcctccgctcgtctctgcactggcattttctgatttagactagcgattcaaaccttctgttttgactcagattgtgcgttctttaaactaggccctgagaatgtggcagttctttcgcctctgagtggtccatttactgctgcattgcccaccaccctggacatccgtgcatcacagcatgtgcattagcttcttatctc

SEQ ID NO: 38117 - DNA, 491 bp, Zea mays
  Clone ID: MRT4577_134767C.1
atgtcgggtcattgggaggtcttctttgtgatgggtgattgggtcctcaggcaagctggccttatgttctatgggccgttccggatgctggagaaaattggagaggtctcttatcgcttggagctgccccctcgttctcagattcttaatgtcttccatgtgcttttcttgaagaagtttgtgggtaatcctccaacagcagtacctcttttgcctcccatcaagcacggccgggttctgccagtacctctcaaggtgcttcgttccagactgaatcgaggagattgggatatcctggtacactggatgggtcatcctgcagctgaagccacttgggggcgagtttcagtctttgctgaggagtatcactcttttcatttcgaggacaagctgtttcatagggagggaggaagtgttatatatgcttttgtgggctggacctatcagaggcagcccaagaagaagcagccggtcccattagggcttgttcg

SEQ ID NO: 38118 - DNA, 1108 bp, Zea mays
  Clone ID: MRT4577_134768C.1
ttaggccagatgtgattatattcaaaggtttctccttgagcatccaaccaggcaagtcgacagcccttgttgggcaaagtggttctggtaagtcgactatcataggtcttatagagaggttctacgacccacttaggggggtagtgaagatcgatggcaaagacatcaaaacatacaatctcagagccctgcgtcgacatattggattagtcagccaggaaccaacactatttgcaggtacaataagagaaaatattgtgtatggtacagaaacagcaaccgaagcagaaattgagaatgctgcaaggtctgcgaatgcacatgacttcattagcaacctcaaggatggatatgacacatggtgtggtgagaggggtgtgcagctctcaggaggccaaaaacaacgcattgcaattgcccgtgccatcctgaagaaccctgcaatcctgctactggatgaagctacaagtgcactggacagccagtcagagaaggtggtacaagaggcattggaccgagtgatggttggcaggacaagcattgtggtggcacacaggctcagcacaatccagaactgtgaccagatcactgtgcttgaaaaaggaattgttgtggagaagggcacacatgcatcccttatggctaagggtccctctggaacatactttggattggtcagtttgcaacaaggaggcaaccagcactgagtttttttgcatgagaacacagcagtacttacaaatttgttgctccaatcaaatgatgtattactttggatcaatctgcaaaagatatctagcctattccaactagcttgggactgtaagctttgttgttgttgatgatgaaaacgcgagatggcccagcaggcgattgaaatttctgtgacagtggggtgtttttcttccctttgttctattagcactgtagcacacataagtctgacgagcatatagtttcttgatataactgttggacatgtattgtagttgtgcaacggccaggaaatctctgataatatgtacattaggtattatttcatcttattctctactgacttttgtactcgaaattattacattagcttttattttatctaattcttttg

SEQ ID NO: 38119 - DNA, 109 bp, Zea mays
  Clone ID: MRT4577_134769C.1
gtgtgatgagggtatctgaaaaaggcgagggttctattcgaagcttgaggagaatttcatgctcgtgcgtttgaatttaggacttttcttgcctagttgtttggttttg

SEQ ID NO: 38120 - DNA, 467 bp, Zea mays
  Clone ID: MRT4577_13476C.1
cttggcttggaacctttgggcttggttatgtggttgtggttgtgcgcgtgtttgtgcgggctgttaatgggcgggtcaatttcgggtaaaatacggtcgcgaacgcgagaattacgcggctgctgacgtgggtataggccgtgacggccgcggtgccgcttcctccggcgagtggtgtacggcgtggcttctttaaagcttttttcggtaagaatactatggttattcacggtaaggatcggccagatgtcaaagtgatacggcacggtaagttgatgggcgttggctttgatgataacggcggtggtcgtgggcataaggatgcgaataagttttttcctaacagtacgggtgtgcgtggtaatacttttactcctaaggacggctcgggccgcgggcttcgtcctgagactaagcgtgacaagtccgcggagcgtcttggtaagtttgcggcggcgtatactatg

SEQ ID NO: 38121 - DNA, 296 bp, Zea mays
  Clone ID: MRT4577_134770C.1
gggtgaaaattcttcattttcattggacaaatgaaataatgccacctggtcagttcttctttaacacaaacttttaaccggggggaacaaaattcacaagaacaacaccggcacattggaaacacttatttaccaacccggaaattttccccaagggtacacaccaacacctggtccgattccacaacccccggacccagtacctttttccgggggccccggtggcattgaaacttggccccgttgcccggttcaaccagaacgcccccccctaacccgggtaccccccctttgcc

SEQ ID NO: 38122 - DNA, 299 bp, Zea mays
  Clone ID: MRT4577_134771C.1
aaaaaaaaaaaaaaaaaaaaaaaaaaaaaaaagcttgtacctaaggacgaaaccaccctaagggcaaaattctgaaaatataacataaaaaatggttgtcccttggagcctgccctctttaggggccaaattctgcctatatccattacatttggcggtcactgggactttcttttaaagggcccaaattggcaaaaagcgggggttatccaaattaattggcttggatttaaaaccttttggcctggaaaaaccttgggcgaacaaaacttaatcggtttgccttacaaacaattttt

SEQ ID NO: 38123 - DNA, 248 bp, Zea mays
  Clone ID: MRT4577_134772C.1
gttgttgtaaatcgctaacctacggggaacatttgtggagattaacctctgagatagagttgggtttcaagcgctatgagattgctgtacatgtttgtcattgattagggatgcatatccataactcgctgaggtgttggttgcatgctggaatgtttacttgtgcataatgagtcgagaatcataaaaaatcgttccagtagcatatgcaacagagaaatttagaccaaggcagtcccttcaacatt

SEQ ID NO: 38124 - DNA, 144 bp, Zea mays
  Clone ID: MRT4577_134773C.1
taacatgctcatctaaagaggcatacagtactcaacactacaccatcaagggcggggtcgatgttctccatccttctgctccttgcttctatctgcaatcttcactcatcacaaccatttgtcctcaatgccaacaaactccta

SEQ ID NO: 38125 - DNA, 399 bp, Zea mays
  Clone ID: MRT4577_134774C.1
cggggggagcacaaaaaaggggggaatgagtttaaaaggggtatgcatattacagggacaagtaaaccaaacgcattagcagtaacaccctaaggccggggggggctttttttgaggtaacaaaaaaaaggggacattttgaccacagtatacataatgattaggggggattcccttttttaccactttggaacctacaaataaaccatggatttccatgtcccccttggctgtaaaaaactgcccatgcggggcaaaatggcctgaattttgttgaggagctgttgctgttttgggggctgaattaaccaattcctttttgagggcactggcagaaccattttgggggggtcgcaaggcctcgacgacattttaacacacagtttaaaactgtcgaag

SEQ ID NO: 38126 - DNA, 357 bp, Zea mays
  Clone ID: MRT4577_134775C.1
tacgtaagctcggaattcggctcgagacatatgacacccacaggtgctcgaccccacggccgctgacaccaggggggcgtttgaactaagcagaggtgtctatcaccacgggccccaaggctgccctctacctcctgcccatacaccagatgaggccaaatacgctcaaccacacctggatcctgactgtgactgcgccaaaagggggccatgatgagcatagcaattacctcaaccgatccatcaccagggcactgatcgctatgagcacttggtcatgccactctaatatgccatccagctcccgaccaaaatgaaccccaacaccttacactaggcaactctgatcactacagt

SEQ ID NO: 38127 - DNA, 208 bp, Zea mays
  Clone ID: MRT4577_134776C.1
aaaaccgcctacgccattccgctgtccggaaacacagcccccacgcaaggagcgaggaggaccagcagcggtcaagagcagaggccaccgaaccaggacgagcaacggagcgaccgcgcacccatggaggcgagctgagggagcgtcgatccagcagcctctggggggcggaggctccatcccctgcgggcccttcccccgctccgac

SEQ ID NO: 38128 - DNA, 196 bp, Zea mays
  Clone ID: MRT4577_134777C.1
ggcaagggaaataacatcataatttcactcataataagcaggttcaagtttactttcacgggcagaaaaaattttattaaaacatccaccaactttcgggcacacaataagttacaaaaaaaagctttgcaagggggatcacaaagtggcagcaaaacacaaacctaataatctatattgaccactttttggtaac

SEQ ID NO: 38129 - DNA, 257 bp, Zea mays
  Clone ID: MRT4577_134778C.1
gtccaaaatataatcagatacctgaaaaattctcactcatatataaacaaccaaaggcaatccaataacaaaagaaaaaaagggtaaaggtgcaaactgttagccctcctgtcctgccacacctcaggaacaaaaatgtatgtaccacctccctagcgcgtgctgaatataccatgccatgcatgcagtctataaaactttaaccccatgatgtacggcgaacacaagaacttgagccacaacccgccgtatataaa

SEQ ID NO: 38130 - DNA, 323 bp, Zea mays
  Clone ID: MRT4577_134779C.1
tgcacgcgtacgtaagctcggaattcggctcgaggaagaatgatctaattgagcatgtgtggaacaagcatgggaacatgtgaggcaaggtatcaattatgaactcagatggtaccaaatgtttgtttgtattctagtccactaataatttttgttgcttactttgcagatatgttgttcgccaggtgactcaactcaaggttctgcattagtagttgaattatgtactgtgaccaaaacaaccttttgtaacagagctatcaagtgcactatatttgaattatgtactgtggcaatctgctgtgagcaaatcaggcttttgt

SEQ ID NO: 38131 - DNA, 177 bp, Zea mays
  Clone ID: MRT4577_13477C.1
tttcaaaactacgggcacaagaaccaaaaacaaaaagttcaaaccggagattttcgggcagtgaaaaccaagaatctttctacctttgggggggcaaaagtttaaccacccccacagaaagactctttatttcttcacggttggtatgacacccctcccttttttcaccccgcgaca

SEQ ID NO: 38132 - DNA, 639 bp, Zea mays
  Clone ID: MRT4577_134780C.1
aactccagtccagccgccgctaataaaatccgcggcggcgccgcgccggggagtccacctgcgccttctccccctccttcacccaagcggcggaggagccctgccgtctcaagcccgtccgcgccccgcctctccctctccggttggagcgccgccttgctttatgacgggttcttcttcatcttggtctgttccgccagcctctggggaatgttctttacaaaatggcgaacgttatgagataaccaaggccttattgaagtgcaaaatggcagaaggaagctcagtgagccaacacctggtcaagctagttggttacatgtggaggttggaagctttgggctctgcgatccccgcttggctttgtactgatcttatccttctgtctctcccgccaagctttaatggctttatcatgaattacatgatgtacaagatggacaagagcgtgaatgaattgctcgggatgctcaagaacgcggagttttggatacagaaagacaccaatcatgtgacgaagaagaccactagtttcaagaagaagggcaaagtcaaaaatggcaagggcgtcagtaagaccgacaccaagggaaagcctaaacgcgggcctactaaagagacagagtgcttcttctgcaa

SEQ ID NO: 38133 - DNA, 619 bp, Zea mays
  Clone ID: MRT4577_134781C.1
gccgctccgctccgctccgctcgtgctctgctcctgctctctctctctctcggcgtcgattgggcgaccgccgccgcctcccccaggtcttcgctgggcccgtcgccggcgacgagcacccaccagggcaagttttacttgataatgtggacatcaagacgttgcaattaaagcgacttagagaccagatcggattggtgaatcaggaacctactctttttgcaactacaattcttgagaatattctttttggcaaacctgaggcgacaaaggcagaggttgggtctacgactacttccgcaggcgctgaaccgcgctggtggcaaggctggaaacaagggtgctgaagctgctcttacttcccacaactgtcacggcgtgtgctggggcagtggggctgtcgccaaggacatgcagcttgtgaagcagtgctggagccgtccccatcgccgagcagctcgtgagggtaattcaagcacgctaatgcagtctggtcctacaatagcgatccttgggcttcacctacatctgcacctaccgaacatcagacctctccagctaccttgccgacgcatgaactgagatacgagctacactttgtctcatccctcgtcgctag

SEQ ID NO: 38134 - DNA, 264 bp, Zea mays
  Clone ID: MRT4577_134782C.1
ttttcttgtttcacagagtgaaaacttatcggggtggcgtctgccattgccggtggcaggcatggtctgggcctaattccacccgttgagcactatcatcctccttgaaacctacagatctgtggcctccaaggccctcgttaataggcaacaagccggtcatatggacaccgtcgcgcccctgcaactgatagcctgcgccggcgacgccgtcaataagctgctgttcgaaccagcaggcgcaggacctatctgtgaattgcc

SEQ ID NO: 38135 - DNA, 203 bp, Zea mays
  Clone ID: MRT4577_134783C.1
tcggtccggattcccgggtcgactccacgcgtccgcccacacatacgaacacaagttcagttttatcataatagaactataattcttctagggaactacaatctgttctattccttctaattactcaaatgaactctactacatattgtcatcaatttccactcacattgacccagctatattcactttaatattatcaaaaa

SEQ ID NO: 38136 - DNA, 335 bp, Zea mays
  Clone ID: MRT4577_134784C.1
attcggctcgaggggtcctcgatgtttgttactgacgctgatgctcgcgaggctcccggggctccacataagtggtgttctattgccccaaaggactactccgttggctgtatggatgaaatggaggaccccgctagagctaactaacatttgatcctgccaagcagaaaggagggcaatggaaggttggaccataacccacaggcattgacaggagacaatccatcttggcaaatgtccttgacaaatgaaccttctactgagggcatgaagcccgaattgattgagcagagtgatactccagatggagtccaacctaagcaacggaggatata

SEQ ID NO: 38137 - DNA, 261 bp, Zea mays
  Clone ID: MRT4577_134785C.1
cggctcgaggttttctccatcggcaacttaacggcagcgcgtcgtcttcatatatatctatcttgtttcttcgatcgctagctagcttcgtcgtcgcagccggcccagactgtgcagtgcgctctagctagcagtggaggcagacagagagcccagagccctcaggcgtgcgtacgtcgccgtccaccttgcgtgcattggcatgccaggcggactgggctgcctgcgcgggcatctcgtgcctttgaccgtgacgccgtc

SEQ ID NO: 38138 - DNA, 357 bp, Zea mays
  Clone ID: MRT4577_134786C.1
cgcaaacgtatctccaaacgacgacgtgtaccgcgcgatccccaagcctatatcgccggggaacaagagcaccctggtctggaatctggtcgcaaaggacggtgcctcgtttttccttgaccatataacagacattcaccgcttaatatagaactggaccgctcgctatatgcgcgctgtggagcgagtaccatattccacaacggtaatctggaattgatcgacaatcactacggctacagaaatgtgcccttgaccgaggctatagtccggaaggctcatgggtaggagaacatggacatgtttgtcagctcctttgacactagctgtcacgccgtctttatgaaccgactttgc

SEQ ID NO: 38139 - DNA, 1587 bp, Zea mays
  Clone ID: MRT4577_134787C.1
gtgccgtaccgaatcgccgggtcgacccaggcgacccgtagaagtggaattgttgctcttgatagagcagaagcagtaattgagataactgaatgggttgaagtgccaaagaagatattgactctagagagtaacatcaccaatctgaattcttcttctgaagtaggagcagctaatagcacaacagatagtaaggaaaatctgagttctggcagtaatactaattcgagcactcccattgatgagagtaatgctcaagaaattattacagagaaggtgctaaataaaagtgcttttagggttgctcaagaaattattacaaaaaagactctaaagaaaagaacttttagggttccattgaaggttgtggaaaaaacaactggtgctggaacaattctttcgaaggagttgtattctgaagcaaaaaataggttagaggcactcgataagaaggatgcagaacggaggaaaactgctgaacttaagaataacctagagtcatacatatattctatgaaggagaagctggaagaaagcgcagatattttgactgtctcaactgaacaggagagggaatcctttgctgagaaacttagtgaggtgcaggattggttatatatggacggtgaagatgctcaagctaatgaattcaaagagcgtcttgaccaacttaaagccattggtgacccaattcttttcagattgagtgaattaaaaacccgaccaacggcctgtgaaaatgctcgattgtatcttgatgagctgcaaaagattgtgaagaactgggagacaaacaaaccatggctcccccaaaagagagtagatgaggttgtgagtcaagcagagaaagtgaaagcttggctgaaggagaaggaaaacctgcagaaaaatacccctgtctatagctcaccagttttcacatctgaacaagtttatgagaaagttctggacttacaagataaggtctcaagtgtcaacagaattccaaaaccaaaacccaaggtcgagaagaaaacagcagaggaagagcctgctagcaaggggaaaaccacatcttcggaatctgcacccaacgagggtgagtacaccgaaacgtctcaggaacctaaggctcgagaaggggatcattcagcatcagccaacagtagtgatttagatcctgaatctcatgacgagttgtgagtagcagaatccatagaaacaggtaggaaagaattacgcatatagtacacaagaaggcagtttgaggataaattttggttgctcaaatttctccaaaattttatttgacgaccgaaagacgaggctatgtaggtgtcgaggaacactagatgctgtagggccaaaaatattttatcggtagtttctgattgctgtatagcagcctcatcgttgtgtaagttactcgcctcgaaggcgtagttcaggatctagaatcgctttgttatactgaactcatttcattttttaatgaagaatgctatataggattttacgtcagtaaggtattgttgtactgagctgatttgattttttaaataaataatttcatagattttacgtcaaaaaataaaaagaaaaattttt

SEQ ID NO: 38140 - DNA, 306 bp, Zea mays
  Clone ID: MRT4577_134788C.1
ggggactgaaaacaggctttgttttctttggcaaaaagaccagttgcccaaccccgtttccggtagcaagttcaagattaacccccatcgtttccttattaagtcccagctccccggtttttttcaccccattttattttccatgcatgaggggcccttttaacccgggcagtactgaattaattacttacaaaagcctgccggttttttagctttggggttcgttgttgatccaactcaatgctcaccggggggatggtaaatcggaattggtttttgctgccccaacactggggggggaggggg

SEQ ID NO: 38141 - DNA, 420 bp, Zea mays
  Clone ID: MRT4577_134789C.1
aattcccggtccgacccacgcgtcagaaaaaaaaaaaaaaaaaaaaaaaaaaaaaaaaaaaaaaaaaaaagaaaaaaaaaaaaaaaaaaaaaaaaaaaaaaaagaaaaaacaaaaaagaaaaaaaaaaagaaaacaagaaaaaaaaaaaaaaaaaaataaaaagaaaaaggggggggcccccctgggggttcaatcttttgatcgccgattttcgcagggaaaggccctccaaaagggcccccaaatttacttgcaggggcgatctttttaaaccatcttacagggaaaacccctggatttcccaatcttcccccctttacaaaaatccccctttacctgtaggggagttacacaaacagggccactgcaattcaccttgccaaaaatttacccgccacatggggcaactgggtcccccc

SEQ ID NO: 38142 - DNA, 295 bp, Zea mays
  Clone ID: MRT4577_13478C.1
tcgttttttttttgtcggccgacatggatcaccgagaacatagtttcaggattgcgcggacggacctgcgtgttgcttgtttggtgctgaccacacctggaattacacgttccatttaatgtttatgcgggtgttactaaatatgggagacggagtagcgccaacccatcaatccaatcggatcaaacagtggctacatgattctacactgtagtgactaggccaggttttgtgactggttcacaacccaggctatcggactaacgtgagcatcgttgccttatagcccatatat

SEQ ID NO: 38143 - DNA, 1599 bp, Zea mays
  Clone ID: MRT4577_134790C.1
gtccaaatgctggcaatcaacaacgtttcaagcagcaactatgcttcctgtttcgcaaatatcgcgcagcattcaaactccgaagacgcacacggtcctttatatcccgtcggtgctgttaattcttcgcgtaccggagaaacaggctacatcgattctccaacctccctccacatggatagcgtcgaaggccaaacaacggtgagggactcaagatctgtacagcaagcagatgtcaccatggccaccaaggagcagacccttccctccacctctggcacaaccgattcttcgagcggcagcgcctcaagtcagcctgctttcaaggggaacccaggacgtgccctcaaagttagcagcagcgatgcactgacggtgaaagctacctgtaacggcgacaccgtgcggttcaagttcctgccggcaatgggctggtaccacctgctggaagaggtagcgaagaggtttaagctggcgacaggagcgttccagctcaaatacaaggacgacgaggacgagtgggtgatcctggcgaacgacgccgacctccaggagtgcgtggacgtcctggactcgatcggctcgcgcagcgtgaagctgcaggtgcgcgacctcccctgcctcgtcagcagctcgggcagcagcagctgctgcttgcaggtggaaggaagcgcctagctcatgacggcaggacggaagcctgggtcatggcacgttgactgttgtagtaggttttagccttctgctgtcgccgtaatggatccatgtctacgctcaatacaaaatggcgagtgcagaaaaggagaagtgtaatactcgtcgcacggctgaaacaatgccgtgaaggccttgccataatctgttgtttgttcacaaaagtcgtggcaataatctgttgccatgaatatgggaggttttaagacgcgacaccaagtttctgagcttgctgtgttccgaattttcagattctaattctctccggatcccgtcggtctgtatgatcggcgatttgcggctatgatatagcctgcagcgtttacagaaccatgtggacgtgatgcagtttggagtcggtttcgagaaatcttttctccgatatcctacgactacgagtgacagcctgacgttttggctttgagtgcggggagtggaggttggtttccagtcgtgtcgcggcgcctgggcgtgccgttgaaggcgtggtgcagctcgtgagtctggacgggatagctactatttgtattcagactgatcagaagccgtccaacttggaagaattacagttcgcagaaagtttccgcggtagggaacggctgcactgccaattcgcgtgaaactggggaactttgtactatggtggaggacctggaggtagtttaatcgtggtagagaactcgacggctcgaggagctggagtggcttacagtgtaattcttgtttgttgtccccctggccatggcgcttgtgcagcttactctgtctccagtagatcgtacacatggtcgtgtaaaacattgttaaacattatagaagatgctatggtcttaaataatatggtatttataaagtgaaatttgaaatagaaaaaaaaaacacccc

SEQ ID NO: 38144 - DNA, 220 bp, Zea mays
  unsure (1)..(220): unsure at all n locations
  Clone ID: MRT4577_134791C.1
ccccacgctaacggcgcatctacgcccccagccgctggtgcctcgccgctccgagcccgccctactgctgatctgtgacatgggcgaagtctcctctatccatccctctctatctatatatgtaataatgcagtaagacgacacacattatcatgtgtggtctgacccataatatatgcctcataataaagttttggtttctaacnngggcngccnacct

SEQ ID NO: 38145 - DNA, 480 bp, Zea mays
  Clone ID: MRT4577_134792C.1
tttgggctgctttatgtgcttgtttatgtgcttgtttatgtgcttgggactcctcttggtattcctcgagtaaaataccacaaaggacgaccctatctaaataatcgacgccgtaattgtcgaagtcctcagctagggcagctttaagaagaaaaggtacaagcccgacagcggcgacggtatcctacgtaagtgccgcagccgcaagaagcttaaacgttcgaaatcccatcgcgagcgccccgtcgtcggagctcaccgcctcgagttccgcctgcgcactggtcgcacgaataattagagctacatggaaatcgcctcactcatgtggtaatagaccgaactctgtaacttaccagtacccgtcttcaaagcaacctacatactcgagttcggctcggaatcaagggatcctcttaacaaaatcttcgtcctagtctgctataaaaggggacgtaaccgtaagaagctgctacgctc

SEQ ID NO: 38146 - DNA, 870 bp, Zea mays
  Clone ID: MRT4577_134793C.1
cattggacggctcgaggcgcggccgggagaaagaaagactagccccgtccggccggggaaacctagaaccctcttcccccgcgatggccgcagggagcggcggcggctcgcggcgcgcgcgtccgaacgtgctagtgacggggacgccggggacggggaagacgacaacgtgctcgctccttgccgacgccgcaggcctccgccacgtcaacatcggcgacctcgtccgcgagaagagcctccacgacggctgggacgccgacctcgagtgccatgtcatcaacgaggacctggtgtgcgacgagcttgaggacatgatggaagaaggtggtatactagtagattaccacggatgtgatttctttccagaacgttggtttgacctcgtagttgtgctccagactgacaactcaattctgcatgatcgcctgacgggcagaggttacatgggttccaagctcgccaacaacatagagtgcgaaatcttccaagtgctcctcgaggaggcgagggagagctacagagaggacatcgtgatgccattgcgaagtgacaacgtggaggatattagtaagaacgtaggtgcattgacagactgggtaaacaattggagacctagttagacctgtcaaaagaaatgttgccttatgtgttgtatttggatatgtattgggtggaccagctgccatgtttgtaatgtacggggtgttttggttaaagaaacgaagtcgttcatcctcgtcttattcttttcttttaatggagtgaattacttaaatcattaccacaacattacttaagataatgtttgctacatgcacaaggaatgcgatgatgctataaaaattcatgaggcagtgtggtctgcgg

SEQ ID NO: 38147 - DNA, 446 bp, Zea mays
  Clone ID: MRT4577_134794C.1
aatgataaggggccaaggaccaggtttttttgacactgacaattacagcttgcacgcgacacaatacagcaggattcagcaccacacgcggtactgtactgcaaacccaattgggttcatcatttttcaggaaggattgaacgaggtcatggtggcccctccaggttccggaaacacaacggagcaccgaccccaaaggccaggtagagaaaagactacatggcatacctttggggccaggccctcgcggggggctcgtacttgtgccggaccggcttgaacatgtgagctatgtcggggaccaaagggtactacgggttctgatcaaggagaagggaacagatggacagctacaccttggagatggggagagccggactccactggttcttcaagatgcctaggcaaaagctcccgctgctgttgatgtttggatggaacacctt

SEQ ID NO: 38148 - DNA, 831 bp, Zea mays
  unsure (1)..(831): unsure at all n locations
  Clone ID: MRT4577_134795C.1
ccggccgggacgggttcataaagacggggaaganaccacgttctcgctccttgccgacgccgcaggcctccgccacgtcaacatcggcgacctcgtccgcgacaagagcctccacgacggctgggacgccgacctcgagtgccatgtcatcaacgaggacctgccgtactgcaggcagtggcggaggacaaaataataataaggtgtgcgacgagcttgaggacatgatggaagaaggtggtatactagtagattaccacggatgtgatttctttccagaacgttggtttgacctcgtagttgtgctccagactgacaactcaattctgcatgatcgcctgacgggtcgaggttacatgggttccaagctcgccaacaatatagagtgcgaaatcttccaagtgctcctcgaggaggcgagggagagctacagagaggacatcgtgatgccattgcgaagtgacaacgtggaggatattagtaagaacgtaggtgcattgacagactgggtaaacaattggagacctagttagacctgtcaaaagaaatgttgccttatgtgttgtatttggatatgtattgggtggaccagctgccatgtttgtaatgtacggggtgttttggttaaagaaacgaaagtcgttcatcctaaaaaaaaaaaaaaaaaaaaaaaaaaaaaaaaaaaaaaaaaaaaaaaaaaaaaaaaaaaaaaaagaaaaaaaataaaaaaaaaaaaaaaataaaaaaaaaaaaaaataaaaaagggggggcctgttttaaaggatccaagtttacttccgcgggcttgcaaggtaatagtttttttttagg

SEQ ID NO: 38149 - DNA, 354 bp, Zea mays
  Clone ID: MRT4577_134796C.1
taccgagtctccaggcactccaaggcatcggccctctggttctcgcgcatcgtcaacgtcgacgctgccgcaggcagctatagctagagctgccatagactcggggaacagtccgcagcaagtacagagcattacatacacacatttctcgagctcgatgtagtgttgtgtcttacggtgagtgcacgcgggtatgtatgtatgtatatatgtaatctcaggatgtgctagtctgtcgttgatccgacgctggctgagacgtattctgcaagaacaagaacaaccacaagctcagcaccagataagcttttaatccatgcgactaatgaaggctgtattgtgttcagatgcata

SEQ ID NO: 38150 - DNA, 337 bp, Zea mays
  Clone ID: MRT4577_134797C.1
atggcataatagaaccgttgatgaacctattaactgcaaaagataccaagattattctggttatcctggatgccatttcaaatatctttcaggctgctgagaaactaggtgaaactgagaaacttagtataatgattgaagaatgtggaggcttagacaaaattgaagctctacaaaaccatgaaaatgagtctgtgtataaggcttcgttaagcttaattgagaagtatttctctgtagaggaagaggaagatcagaacgttgtaccagaaactacctctgaaggctacactttccaagttcaggatggggctcctgggacctttaactcttagat

SEQ ID NO: 38151 - DNA, 358 bp, Zea mays
  Clone ID: MRT4577_134798C.1
aaaaaaaaaaaaaaaaaaaaaaaaaaaaaaaaaaaaaaaaaagaaaaaaaataaaagggaaaaagggataaaaaacaaataaataaaaaaaaaataattataatttattaaaaaactaaaaaaaataaaaaaaaacgggggggccctttttgggtgactaggtaatctcctggggttttccaacttaatagcttttttttgcttccccttttatgaattttgtgggcctagttttaaaacctggggggatggaaattccttggggttccgcatcttaattggttaatggaacaccccctttttccccgctttataattagagaatggggcggttacgtgcaccttttccaatatattt

SEQ ID NO: 38152 - DNA, 153 bp, Zea mays
  unsure (1)..(153): unsure at all n locations
  Clone ID: MRT4577_134799C.1
ggggtgggtggcttttttccttttttcactggctcccgggggctttcctcntccctcctgggggcgtttaccggggtgtcctgtggaattccttctttctcggcgtccgtgctccatgggaccttgtttctcccgtgtccttatctcggaatg

SEQ ID NO: 38153 - DNA, 1481 bp, Zea mays
  Clone ID: MRT4577_13479C.1
gaggcacaataaatggcgtcaaagccacgggccttcgcgaaggtcttcctccccgcgctcccgccgccgcccctcctcactgcccccgtcttctcgcggtagccggccgacgaatcggggtgccggcgcggcggcgatgtcggctgcggcggctgcgccagcgcaggctccaaggaagtgggagggactagtggacgaggtgctcgagagggaggtgctggcagcgtgcctggaccaggcccccgagcgccgccgcatccgcgaggctttcaaggacgttcagctcagcatcgaccattgcctcttcaagggacaatatagtggcatcagaacaaaggagtcatgtgagcataactctaggggtgtggagattttctcaaaatgctggtttccggagaatcgtcgaatgagagcaattgtttgtctttgccatggttatggagacacatgtaccttttttcttgatggagttgcgaggaagattgcttcagctggatatggagtatttgcactggactaccctggctttggtctttcagaaggacttcatggatatattccaagttttgatacacttgttgatgatgtagctgaacacttctctaaggtcaaaggaaatcctgaatatagaggcctaccgagctttctgtttggccaatctatgggtggagcagttgcattgaaggttcacttcaagcaaccaaatgaatggaatggtgcaatactggtggcaccgatgtgcaagatagcagacgatgtggttccaccttggcccattcagcaagttctaatttttatggccaaacttctgccaaaagaaaagcttgttcctcaaaaggatttagctgagttggcattcaaagagaagaagaaacaagagcagtgttctttcaatgtgattgcctacaaggataaaccacgtttgcgaacagctctggagatgctgagaacgacacaagagatagaaaggcgtctagaagaggtttctttgcccttgatcattttgcacggtgaggctgatatggttactgacccggcggttagtaaggctctgtatgagaaagccaagagccaagacaagaagctgtgcctctacaaaggtgcgtatcacgctatcttggaaggtgaaccggaccagacaatattccaagttctcgatgatatcatatcctggctcgatcagcattccacaaaagaaggtatatcgttgtgaatcaggcagcgctgttcgccaggattgggtgaattcctttggcaatgctgtatcgcttccggttggggatcccagattcaacggtggggattccatttttgatatgaccctgtaaaattcttagttcagattattgatgtctccgtcatgtacctgaacgatgtagacgtacatatatgtaactgattaatgtgtatcaattgaccacgaattatttgggaaaacctcagttgcaaaacgccttttatttaatcacaatttctatcct

SEQ ID NO: 38154 - DNA, 434 bp, Zea mays
  Clone ID: MRT4577_1347C.1
gggtttgcaccacactcttcacaccacttgaacggcccaaccatcctaacaccaacatcggacgtcacacacccaacactcgtgggcggctcatcatcacgaacgcgctcttgcacaactctttacaactcatcatacccgcaaacttgcactactactaggcccgtccaacgttaggcagtcaacaattttcttattctacaactttttctctttagagaaggggttcgttgttctgagtagctttttattaacgaagaaccagtaggtaattatccccgacccatagtagtttagttttttcgtaaagggggttaagttcgaggataaggacatggttatcgtttttattctagagaccaagaactttggcgttgaggtaactgaccttgaggacaccctcgagtacgcaacaagatacctattctacaact

SEQ ID NO: 38155 - DNA, 343 bp, Zea mays
  Clone ID: MRT4577_134800C.1
gtaggtagccgtctggcgtccgacgcagatagctggccttgctgaggagcaccctggaggtgggcggtgaccctgctttgatcaccttgactgctgtggctggctggcgacatgcagtggtggtggcgatggatgcgatcttgcttgctgctgcttgagtgctttcatctgtttctgttatgatgaacaggtaactctgcctttttttcccttctatgctgcaagcctgtaattaatataagaatgcatggcactgcattgttgtcaaaaaaaaaaagactgaaattacaaatcgagtgcgccaaaagaacaggaaacaaaagatccatgcaaaggataaatg

SEQ ID NO: 38156 - DNA, 294 bp, Zea mays
  Clone ID: MRT4577_134801C.1
gttctagatcgcgggcggcccgccctttatttggtggggttttttttttgaggggtggttatttttatttttatcttttttttttttttttttttttaatgctatacaaatttttgagaggagcaacaacacaatcataaaggtggccatcgaccaaaagcaaaaaagcaaccccaagcaggccctaggccgtgcgaggccaactgcaataaaagcacacgccgcctatggcatattcggggtaaaaagaatataaaaggatgtaccaacaacttgataacaaaaaaaacaaaa

SEQ ID NO: 38157 - DNA, 1400 bp, Zea mays
  Clone ID: MRT4577_134802C.1
gggacctcgagccggccccctttgcttcgcacgacgaccaggacacagtgctccctccccaaagacaaacaggcgagcagcaaacacacacgctcgaaccgagacaagccaatctaataatggggagggctccgtgctgcgagaagatggggctgaagaaggggccatggacgcccgaggaggacaaggtcctggtcgcccacatccagagcttcggccacagcaactggcgcgcgctgcccaagcaagccgggctgctgcggtgcggcaagagctgccggctccggtggatcaactacctgcgcccggacatcaagcgcggcaacttcagcaaggaggaggaggacgccatcatcagcctccacgagcagctcggcaacaggtggtccgccatcgccgccaggctgcccgggcggacggacaacgagatcaagaacgtctggcacacgcacctcaagaagcgcctggatcccaccaagcaggagcagcagcagcagcacgggacgacgccggcggctggcgccggcaagaagcacaggcccgcagcggcggcgaagcgcgggggcggcggagccaggaaggcgacggccaacgccgacgccgtcgtcgtcccggccccggccccggccaccgctgcgccggcgtctcccgaacggtcggcggcctcgtcgtcggtgaccgagtcgtccatgacggagcaggagcaggagcacggcaacacggggagctcgcccgcgttccccaaggaggagagcctcaccacctcctcctcggacgccgaggagttccagttcgacgacagcttctggtccgagacgctgtcgatgccgctggacagcctcgacgacgtcgtccccatggagccctccgacgacgcgttcggcgacgtcgacgtcgacgtggccgccgcctcctcctcgtccgtcggcgccgacggcgacctggactactggctcagagtgttcatggagtccggcgacgcgcacccagaactgccgcagatttagaccgctcgcgcgagaattttcggctcctaattgattcatcgttcttttgtctctatctctctctctctgcacgtcttgcatcggaggggacggacaaggacagcagcagctgattaacagagaaggaaatcaggcagaaacaacgcgacacgccgttgcaacttggatcgatcttgtttgccttcttgttgtatagatactagaatccatccaagcctatgcgttctgagaacagaagcacgctgtgctgtgcatgcagattcccatgtatgtacagtagccacggccgccgccagaacagaaatggatccggcctcttccaaattccattcgtttgagagaaaaaaaaaaaaaaaaatgcggccggcctctaaaaaaaaaaaaaaaccaact

SEQ ID NO: 38158 - DNA, 835 bp, Zea mays
  Clone ID: MRT4577_134803C.1
gggaaggtcagtttcgaaatctgtacagaatctggacagattccaagactagacttgagaaaatcataactcccaaactactagacctttggtcatgaaattttacacaagtaagatgaagaagttggctacaatctttttatatacaacacctctaccaaaaacatggtgtaattcattgaactagcggcataaccaaaactggtcgcgtagtcccaaacaacaagcaatatatttattcaggttctatactcttttaagattaagcgttcatcgaaggactaataactttaggttcttcattacgagacacttagagccaacataagggtagaagcaatatgcttactttttaaatcattttaagcctgatctcacatcatgcaagcaagaatcaatttaagtatactatgcctgcccatatatccatccaataactcagacaatctgtatctccacctagacttcacacgacgtaactatttcatacttacgcaaacacgccaagaccagaaaatatggcttcacaacaatacgtactggcctattcaaatatccctcgctatctgtctctttcagcccacgctccacatatacaataacaagataactatcacaaccactacatctattccctcccaccatacaacataattaacatggattgcgaaagagctcaccataactaaaccaaagtcccaaagaaatatccctaaatacaaaattgacaatcaacagcacaaatgctcattctgtctctacctctttcactataaaagcaatgataacaaagaaatattgtaaaatcatctaaacttcatgacctacaactttt

SEQ ID NO: 38159 - DNA, 362 bp, Zea mays
  Clone ID: MRT4577_134804C.1
ctcgctctttgttactatccgggagatgggccttgcggggacgcattttgtgcacaagagactggtgccagaccaacatcacatcaatggtgtgactagcgaatggtgtgaaaacctaccactcttgaatgaacgtctcaaacagactggacttgacaagatcgatgccctcatgcaatatctcgatggataaccagatgtcggaagccggacttagattgacaactagctcaaacctacccagcgagagacatgacaacaaaatgaataagagcttcattgacccaatcatggtactccatctgaattggactgatttgatcactttgagcatcgaaagtaacatcgacgcaaagctccca

SEQ ID NO: 38160 - DNA, 299 bp, Zea mays
  Clone ID: MRT4577_134805C.1
ctgaggcgtacacggaacccgagctggtgttgctggaggccctcctcggcatccagggccgcggccgcgccgtcgctccgcgccagctccaggaagtggagagcgctgtgcaggctctcgagacccagggaggcattcctgatccgacaagttcaagtttaatcgaaggtagctggcggctcatcttcactacgagaccagggacagcatcgcccattcagaggacatttgttggagttgactctttccgtatcttccaggaagtttatcttcgaacagatgatccaagggtggtcaat

SEQ ID NO: 38161 - DNA, 858 bp, Zea mays
  Clone ID: MRT4577_134806C.1
gaaaaatgtgctgttatcagagggcgccattatatcttccagaatatcttgtttgtggccaaggtgcattgaatcattcgcagtatcaccagaaggctgcgagagaggaatttgctcttggcgtgctccatttcgctgcacagttaccacatgtcctgcttctgtttgcgtgaattcttctttgtggcctagatgactggtatcagttttagtatcaacagcaggccgtgagagaggaatttgctcttggcgtgctccgtttcgctgcacagttaccacatgtcctgcctctgtttgcgtggatcctgtcacgactttagatgatgcatggaattgactgaaggactcctttacttcatacgttgcagctgtggtttgggatccagttggtgatggtttgtttgattgttctgctttacctattgtgttatcactatgcaatggtgtgttctcttcaactgaagttatattgtcagtcctctgcgaatcacttactagaggttcctccaatgaatctgcattatttaatggctttggactatctattgtccggaaacaagaaagaagccaacttccacaattttcaacagacgcagaagaatgctgaggttgaacttgttggtctacattcctcctttcaaatatgcggaatatattaaacccgcaacctgttgggatgaagaaagtgaagcacgacaagcatctaaatacttccggcgagtcttgattgattgtttggcttggagcattggcgggaggctctacaagctgtggtctttttggtggttccttgcgtgtttcttgccttactgttctctttctctttttaaggatgacccttcgagttatgcacgatat

SEQ ID NO: 38162 - DNA, 170 bp, Zea mays
  Clone ID: MRT4577_134807C.1
aaatattatttaacactgttatatgcatacacaaatatggccggtgatacaatctctggctggtggcctaatcggagaggggatgttacgtggccgacgctgtgaagcccatattgtaactgtgcaagcctacgccgttcaagcctatggtggaagcacgtaggaagagt

SEQ ID NO: 38163 - DNA, 524 bp, Zea mays
  Clone ID: MRT4577_134808C.1
ccacatgcagacctatggtttcttctgtgggaacctaattcaatgagtgggaagaggggtagccgggacgactgggagaaccttgggcaccatttatgttcttcgcattacatgcccgtttcacgcagcatgctggccaactaacaggagccgaacggatcgtccttcacaatagtctcgcagtgtgtatggaaactgggacgcgccctcgtcacggtgccttacaagcggcaggggtagagtttacactcactgtgaccagaccgcttgacatactgctatggcgctgtcgtttcggtgtgttaacttacttttttggctttcatggctagtgttcacgaggagctctcaataaaggggctgcgttgaggaagccgatactgctgtatacagcaccctgactccaaagtacgggtctaagctgatagaacacatgcatggtccgtgtggattactctacagaggttagcactctgaccatagagaacgcgcacgtaatagaagactcgtgtgtccatgatgga

SEQ ID NO: 38164 - DNA, 538 bp, Zea mays
  Clone ID: MRT4577_134809C.1
ggcaaaaacccggggtttaatttgaacaggaaacgggacatttgccggctccatttgaacaaacacaaggccgaaattacggggccctcggtaacccatcttttagcttccatctaggctagcttgggggggacctcccccagcgcatttttggttgctgggaagtatttttcggcccccggggggctcttgatctttggggcatgggcaaaaacgtcgatggggctgaaaaacttgccggggagctccttgaggctctgcttctcctccttgggcttggaagccaagacggtcttgaggtcctagcccaggtaggaggcccggaggcggagggcgttctggacgtacggccacccctttttgtccataaacggcttgagggtgatgatgtcctgcgccgacatttttacccttgccaccgccttccccggggggaggggttgcaggtaaaacccctccttcaagggggagggcgaagcccctcccctggtcagagttcaaagtcccggggagtccaccggggggcggggggggggct

SEQ ID NO: 38165 - DNA, 380 bp, Zea mays
  Clone ID: MRT4577_13480C.1
acgcgtcaacacacgcgtccgaatcctcgtgcacaactttcttcttctagccctttgcgcatatcttgctgtttttggtttactgaacatgcaaaataccatcgacgaattttccctatcaggcgatctttccacactaaaagttgcagcagaggattggtcagacacgtatatcggggactttactagagagggcgtcaaggacagctttcgacacttatttttgttacacaactcgccaggccatgaccagtttttgactaacgacacctcaatatctggctcatctatagaacctcactaagtgcctgagtggtttccttttcacgatacttcttcggatatcactgtcagttcggtcaatttcaccagctcccgtg

SEQ ID NO: 38166 - DNA, 486 bp, Zea mays
  Clone ID: MRT4577_134810C.1
gtacccgggcccccccctcgagttttttttttttttttttttttttttttttttttttttttttttttttaaaaaacaaaggggggtgccaagcaaaattaactttcctagttacggggccttcgagttaaacctctgccaaatagaaagttttaagcacccaaaattataggggcccttttttaacggaggaatacttcgttgccgttcatgggggggggagaaaatgaaaacttgagggggtgcgcacagtttatattaccaagagttcctccgggcaaaaccaccagctaccccggcaactggaacctataagtagatcagcgtttttttttgcttgcctttgagctgctcttcgacggggtcgggacaagggagataacccgtccaccaaaagaaacaccggcccccggggccccgtatttcatcacaggccttttacgccttgaaaactttttttttggggggttttcagcgaaaatatcc

SEQ ID NO: 38167 - DNA, 190 bp, Zea mays
  Clone ID: MRT4577_134811C.1
gccaaaaggctagagaaaaaaatccgccttctcctcccagacgcagggcaggctcagactcccctctcccctcctcggcatgcttcaccgccggcgatatatctctctcacaatggaggagaacatgaaagccatcgactacaggaggcagctcctgatcgccaacttcaccgagttgcagctcgccacc

SEQ ID NO: 38168 - DNA, 276 bp, Zea mays
  Clone ID: MRT4577_134812C.1
atgactccagggtgccctccccgggcgagtcggatgagagcaaggaggaggtctgttaggaatcagaggatcagaagtacgaggacatcggaggcagcagcaccagcaagggcagcaacatcggaggcgacgacatcatcaagggcagcaatagtggcgaccgtgacagcaacaaccaagggcagcaacagtagtggtggtggcgatggcaagggcaacaacagcaagggaggcagcggcggccacaacgctggtggcaaggcgccactggcctag

SEQ ID NO: 38169 - DNA, 857 bp, Zea mays
  unsure (1)..(857): unsure at all n locations
  Clone ID: MRT4577_134813C.1
tatatatatatatatatacacttggagaatcgggggcccggtgctgaacggcgtgttgctagactgaaagtgaaaggtttggattttgaagcgattttggatggctgggctacctgaacgaacggacaaggatttcaggggaagcgtgcgtagcattcttgaaggcgtcgcccccacctcgcattcccaagtgatttcacggtggacccaggaacaaccttaaaaatcaatagctaaaaatcctaattcttttttaaaagaaacttgccgattgagtatattagagcatctccaataattatataaatttagcaccctaaattatagatttaaaaagttgctaaatcactttaaggagtagaaaaatgataattatggaaatttagcgctctaaattatagatttaagaagttgctaaatcactttaagaagtagaaaaatgtgtgtgctccaacagttctttatttattggttgctgatttttaaaattatctacgtcaacaaaaaaagtgagcatgctttctatttttaattgagctagcacatcaacaaccttccataatattttggaaggtcgaagttatcgatggaagtagggatggcaacgggcacattttacccacgtgcccgcgggtaaaaaccctatagagtgcgggtttccggtgtgaagtttgtacctgtgggtacgagtacgggttttgattctcaaccccgacgggttttttctcgtgggtatgaaaatgttgtacccgtgcccgcaacccacatacccgcatatgtgtctgtgtagaactgtanactgtagagcacatgcatctcaatttagtgccaccctgaaagctttgagctagcgaagc

SEQ ID NO: 38170 - DNA, 561 bp, Zea mays
  Clone ID: MRT4577_134814C.1
cttatcctcttcccttcagtggcttgggttttgtattatcctttcctttcttctctaatctaatatatcggagcgacaagtcttttgccccttccattcaaaaaaaactatctaccaaactcaagacttggattccaagggcaagagtgaacgtggtacaacgttaccactatatcataaactcatgaggctgtctacctggcaactgccatcctcatgcagatgagacggagagaagatgagaaaagtacaagatcccagaagcaagcagcaggatggggccatcccccccccccactgggccccacgggccgaaagccaccggcgaaaatgtccagaaggccacgtggggcatgggtccccggagtccacttccgcgcgatctcgaggccgggccgcaccggcaatcgctctccggccacctccctgcttcctcaggtccggtctcccatagtccaatgcatgcatgcacgagcatcccctcagaacgctggcagtgagtgtcttgctcgcacatcagcttggccagtcagtgcgagaacacagcagcaacaacaacaa

SEQ ID NO: 38171 - DNA, 468 bp, Zea mays
  Clone ID: MRT4577_134815C.1
gtgggggggggtgttttttttttttttttttttttttttttttttttgggggaagggcgcgctcatataagccacccttgctgggcaaaaaacggcccatgaaagccactacagggtggcaaacttaagaaatatggccttcaacaacacgcataggggggcgacggggagcccctaccccatataaactttaacaaaagctaacatatttcttacacaaaagtggacctaacggagaaccatacataaaacttactgcgcaaaagcacaaacgataaacaatctaaatgcaaaagaacctgaccggccaagagtttggacacaaaataaccgcaaagactgccaaaggagatctaatccccaaaccaatcaccaatatcggggacccattgaaaaaccttcaatcagactccactgcaaaattggcaaagaaaaggccaacaaacccagttttgtaacaagctggcc

SEQ ID NO: 38172 - DNA, 211 bp, Zea mays
  Clone ID: MRT4577_134816C.1
ggggcgagggccaacaagaagaaaagggcccgaagaaggaccagggcccggcggccgcggcgaagccggccaaggccggggggggggaggagaagaagaagaagtgcagcaagggaaagctaaaggagaaggcaaacaacgcgggggtgcacgaccaggctacctacgacaagcggctctcgaaggggcccaagaacaagcaaataacccc

SEQ ID NO: 38173 - DNA, 586 bp, Zea mays
  unsure (1)..(586): unsure at all n locations
  Clone ID: MRT4577_134817C.1
ttttgtagagatgaanttananataaggtaatnttatgtanaagaaagagntanaatatttataaattgtatananaaanataaagttgaaataataatagtagtgatgaatgatttagtagatgaattgagagatggaggaaaaatgaataawtaatgaaaataaatgaggatgatatggttgaggtaggatggaantggtggaaattgttgattgtttttgtaagaangaaanagtgagaggaggaggtggagaaggtaatattatatgtttgattgtggatganttnggttggagaaagaatattatttatatagattaaagagattgtgagngtgtagntttagaagttntttgggaggtagttagagtggagtttgatgagtatgaaagagatgtagakttgagagatgaggaaaagagtgtggaaggagttgtatgtggttgakagtgatgtggagatngtgtaggatatgaagttgggatattgattttggtagggntnttaagtaggtagagtkngtgntgatattgaanttgataaggntggntgtaaagtaaatgttgtgaggtatagtgtgaant

SEQ ID NO: 38174 - DNA, 274 bp, Zea mays
  unsure (1)..(274): unsure at all n locations
  Clone ID: MRT4577_134818C.1
cggggncgaagagganccngaagggggggaaggaccagcagaaggacccgcccaccccctgcagcgcaggaccagatggagaggacacgtaccaaaggcaagcgaccatcatggggccttcggacagcccatacgcaggaggggcattcttggtgaacatacactgcccaccggatgacccaggcaagccaccaaaggtgacgcgccgcaccaagggaagccacccgaacaacaacagcaacggcagcatttgccttgacatgacaaaagaaca

SEQ ID NO: 38175 - DNA, 107 bp, Zea mays
  Clone ID: MRT4577_134819C.1
tgttgtgttgactcacaacctcaggaacagacaccatagtgcacctaactgatgctgagaaggctactgttagtggcctgtagggataggtgaaccctaataatgtt

SEQ ID NO: 38176 - DNA, 532 bp, Zea mays
  Clone ID: MRT4577_13481C.1
gtcgacccagcccggaaatcctctgttagaagcctccgagctttctgtttggccaatctatgggtggagcagttgcattgaaggttcacttcaagcaaccaaatgaatggaatggtgcaatactggtggcaccgatgtgcaaggtagttttgtctttgtggattgttatatatacaagttaatgccttcccacttattcacaaactcattccaatagatagcagacgatgtggttccaccttggcccattcagcaagttctaatttttatggccaaacttctgccaaaagaaaagcttgttcctcaaaaggatttagctgagttggcattcaaagagaagaagaaacaagagcagtgttctttcaatgtgattgcctacaaggataaaccacgtttgcgaacagctctggagatgctgagaacgacacaagagatagaaaggcgtctagaagaggtttctttgcccttgatcattttgcacggtgaggctgatatggttactgacccggctgttagtaaggctctgtatgag

SEQ ID NO: 38177 - DNA, 319 bp, Zea mays
  Clone ID: MRT4577_134820C.1
gcacattatctttctggatctgtagctgagcctgagcctaaacgttctcatagacgttttttacaaacaatggatgctctacaaccttccctccgataacattcccatacccgccaccatggcaattaaaactgaagacccctaagatccaacgccttacaatcaagaaaatccatcaacacaaggggatttattggcttgatttttccttagaaaatctttaaatctttatgctctacaatctacaaatgcctctatagattgaaattctattcttaaggtttaagaactttatggtggatggttcattgttcttttt

SEQ ID NO: 38178 - DNA, 195 bp, Zea mays
  Clone ID: MRT4577_134821C.1
attcccggccgaccgcacctacctttggtatagcttgacatgccatcagtttcacagtgccgtaagttccctagaggtaaagtagatttttaacagcatggtgccattttgccagcctatgcacaaaacctcacttggtctttgtaatgtggtaatgccatgtatcactatcctagtctgatggagttttggttg

SEQ ID NO: 38179 - DNA, 478 bp, Zea mays
  Clone ID: MRT4577_134822C.1
ttgttttattttttttttttttttttttttttttttttttttttattttctttcttttttttgaattttttttttattttttgtggggaaaaaacatacattaaaaaggggggagcttactctgccggggcccttttttttttttgggggaactggattggcaactcccggggtaagtggggtgatttttcccccttttccggggggggatggaaattgtgttgttaaactcttatccaaaatggttaaagtgacccccccttgcttgcttttgaaacccaatttttgtttttggccggggacaatcttttttaatgccccaaactcgtttgaaaccttccccaccgtgttttgagatagtttatcctgcccattctgagggcagcttcggccggtatttgtgccccccgggttcaattgggggtttttggggaaacccccccccctaaagggcttgtgggggaacccccggactttt

SEQ ID NO: 38180 - DNA, 291 bp, Zea mays
  Clone ID: MRT4577_134823C.1
atttcctttgaatccgctctcctcccttcttctacctctatccgtcaagagagactcccgtcgcggtcagtgctctcggttttttccttgcggataacgatacaatggctcccatcacgcaagagaccgtcgacggtctcaaggacatcattaacaagctcgagtcgcgcgttgccgatcttgagggccgccttgttcatggcagcccggcttccagctcgaaatcaatggctgagcaattccgtattgtcttgatgggtcctcctggtgctggcaagggaactcaggctc

SEQ ID NO: 38181 - DNA, 312 bp, Zea mays
  Clone ID: MRT4577_134824C.1
cagcaatgacctcgaccccgctccggaacctcgcaccgtttccttgtctccgcagctccaccagggtcgtcaccgcgcatcagcccactacgcactcaagaggatgaacgctgccattgccggcgaggggtcctggtccgctcccgtccggttgcaacccgaggctgattccgccgtacgcgcgcaagttggcccgcgccgggtaaacgtcagtcgcgcgccgtatctacttagccctctctgctccgctcccgtctgctactgtagctggtgctccggctcatgcttctgctcggctccatggattgcggc

SEQ ID NO: 38182 - DNA, 813 bp, Zea mays
  Clone ID: MRT4577_134825C.1
acaggccaccaccattccttccttgttccttccccagctccgcaggctgctcatcgccctccctccgcgcccccgatccagatccagatccaggggcttgtcatggcatccaaacgtatcctcaaggaattaaaggacttgcaaaaggaccctccaacatcatgcagtgcaggtatgagctcgagttaccaattgacttgcgagtgatgccacatggtttgtctctgaggattgatgcattttgttacacttatgaatactaattgaactgttatagggtagaagctcataatagaaaatctttattgtgctatagaattttgtcacgaacttatatacgctcgtactttgcgtgattttttatcgtattatacgagtgattttttctgtcatagatctctgtactttgcgtgaacctaaataaactggaagtatttgctggtttggttctctcaggaattcattttggaatgtttcgttggaaaataaattatgaatatctacactgcatttagtcagctgggaatgctatttgttgttatcacaaattatctatgcatacaagtttattgccattcttgctactgtggactggttgttgatgtctcatgttgtaataggctaatagctgatgttaatgtttgattttcaaaaagaagcatacagaacagggcatcttactttcattatttgattagaaatctaatttgatgagtagtaagcaatgatcttatgtttgctcccttttttgcttttcttgtcacacttaagtggtcatggattatagctttctatttgcttaggtctgctggg

SEQ ID NO: 38183 - DNA, 365 bp, Zea mays
  Clone ID: MRT4577_134826C.1
gggaatgccattatccttttttttttttttcggtgtaccataacaattgactagtacacaatttaaccaataaatccttgcagacaaagaagcggggaaaaaaaaaagaaattaagaatattgtattatttgtttggtgggaactgaataaatgcattttcagaagacaaaagtgcaaagttataaaagttggagggaggaaagtcatgggttctaaaagaggagttgatggtaacaagaaagttattagattttcgaggggccatggttacgaggggagggttttttgttaacaggattttaggaaggcaaacttttttgaagaaaattttgatagaggttcctttttattgaaaggttggtag

SEQ ID NO: 38184 - DNA, 312 bp, Zea mays
  Clone ID: MRT4577_134827C.1
attaattgtctttttgtctgtatgcttcccaaaaaaaacggccacaaaaaaaaagggcacaagagggacagggggcgccgccaacaaccgaagcaaaaagaaccccaggaagaacagaacccgaacaaaaacaaccccacccaggaacaaacaacgcacagggggccaaaggaccaaaaaaaacgagggacccggcgcgacaacccgccgaagacccgggggccgacaacaaaccaaacactcgttacctcttggaccgggcaagagcaacaattggaaaggccccggacgaagcaggggtgaacccaggcc

SEQ ID NO: 38185 - DNA, 743 bp, Zea mays
  unsure (1)..(743): unsure at all n locations
  Clone ID: MRT4577_134828C.1
agcaaacgatattgagcttcttgaacaattagtgtgtcactggttcaaaattttcaattcagaattacaatgaccattgcatcagattccaccaatgccagagttctatcttcccatggtgcttttctgagccacagatgggtgctcgagttgtgcacgcccgtgacaacatgccatcatgtggggttccagttacttatctttaaacactcaaccatcaacgatgttttttaaagcggtaagacgatacaaggcgttggaccatcgcctaggtacggtaggcgggcaaggcggctaggcgttggacctccgcctggacgtctaagcgacgccttaagaacagtgcactcaacaagtcaacaatatccttggcacgaaacccaaatgtctccatgcaccttacataggccttcttttgcataccactgccatcaacataaaatatctccagggcagagcaaaagcacagcgccactaagcctcaagacgattcatggtggcgctttcccaaatttctaaacttgtccttcagatctaccgttgatctctcctcaaagacaccagggtaagctaatttgatatctttccagttgcctatgccatacttgcccaccccttccagcaaggtttctatctctatcttactccatttctttctgatcttatatgcacatgtaggaaaaggatatggttttctctcaaatggatctaacttgcgcttncgcactggctgatcatcatca

SEQ ID NO: 38186 - DNA, 798 bp, Zea mays
  Clone ID: MRT4577_134829C.1
cctcgaggccggccgggagtggtgctataaatgtgggtggcgagaaacgacgaggtcttggtgcgtgacccaatccgatcaatataatcagagtcagtgtgactgtgagcagagctagcagtatagggcgagcttcagccatggagaagagaagcagtggtagtgccagccttgtcctcggcctcctgctggccgcctccctgtcgtaccagtgccacggcgcgcgcgacgtccccgcggagaagcccctccggccacagaacgtgttcgggttcggcggcttctacccgggccccaccgtcaactgggtgttcccgggccccaacggcgtcaccccgcagattggcttcggcgggatgccgggctctagcgccttgccgggcggcggtggcgtggtcggcatccacggtggtgctggtgctggtgccggtgccggtgccgtggcgaagaagccgtgagaggaggtggccgtgtgtctgtacgagcttgtgagagtgttgtcagtacgtggcataagcgaagtctgtgtcttgtttttgctgcggctggctgtcgacttcactctcgtacgtgtcttgtgtccctttctatcctatgtagtatttgtgggcgaaggacttctttctcatcatgtggtagccggctgctagtgtacatctcgatccccttttcttttcggcgtgtgtttattcagttctcctgtattgtatccccctatgttagcatggatgctgattagtacgtgtccttcagtaattcgctataatcaaaaaaaaacggtacatcattgttgcgctt

SEQ ID NO: 38187 - DNA, 559 bp, Zea mays
  Clone ID: MRT4577_13482C.1
gccttcgcgaaggtcttcctccccgcgctcccgccgccgcccctcctcactgcccccgtcttctcgcgccggccgacgaatcggggtgccggcgcggcggcgatgtcggctgcggcggctgcgccagcgcaggctccaaggaagtgggagggactagtggacgaggtgctcgagagggaggtgctgggagcgtgcctggaccaggcccccgagcgccgccgcatccgcgaggctttcaaggacgttcagctcagcatcgaccattgcctcttcaagggacaatatagtggcatcagaacaaaggagtcatgtgagcataactctaggggtgtggagattttctcaaaatgctggtttccggagaatcgtcgaatgagagcaattgtttgtctttgccatggttatggagacacatgtacctttcttcttgatggttagcttttcctctttgatgccacttatcctaaggagttgcgaggaagattgcttcagctggatatggagtatttgcactggactaccctggctttggtctttcaaaaggacttcatggatatat

SEQ ID NO: 38188 - DNA, 173 bp, Zea mays
  Clone ID: MRT4577_134830C.1
attgatccattagaagggcttcaacgatgaattaatcagggaacagtggatactgtcttgggggcacataatatgcttttaaatataaacaaaaataggcaaacgtacggctgaggaaggggtccatactaaatttgcgatctattaaaaaaaaaaagatatttagttgattg

SEQ ID NO: 38189 - DNA, 318 bp, Zea mays
  Clone ID: MRT4577_134831C.1
cccccctcccactccgggcagcagccagcatccagcaggcatggggatacccgtggtgggtggcgtcgcggcggcctactcgtgctcctcctccctcgccgcgccaccgagggccgccgccgccgcggcgagggcgccgagccgcgcgcacgtcgcggcggccgggatgtcctccagggcgtcctccttcgtcggtttctgctgatgcgacctttctgcggtggccgctattgttgcttgtctgtccattaagactggcttccatgaaatttgataggttctggtgttccaaaccgaaggatgaatcattgtttgtcc

SEQ ID NO: 38190 - DNA, 458 bp, Zea mays
  Clone ID: MRT4577_134832C.1
ctccggcaagcctgagaacgcgagcgagtgaacaccaatcgtatggtcccgagtcctgacccctaccgatcctcgcctgctgcaacatggcgacctccgcggagctctccaccgccgccaatcccacccagctctacgggtaccgcgcttcgctggaaaagacgcagaaggaggttgtactgagaatgcctcgtgagtgcgtacagcggagcattgcgtggcaggtggcaaacagcatcacggccgaccgcgtccccgacatggagaagtgcaaggtgatgaacctcctcctcctcgaagccatctcgttgcccaccgtcaaggtgatcgttcaccgtacggtgccttcttcgtccctgacgactccggtaactgcggaggggtaacctacgcaaaggacatattgggaaacgacatcgcgttggaggcgtggctcaacacgcacggacccaacgacc

SEQ ID NO: 38191 - DNA, 258 bp, Zea mays
  Clone ID: MRT4577_134833C.1
gtgagacatgccgaaacagttgcgttagtgtagaacgatgtaggacttgacgctgaccactgtagggtgctcgggaacattgagcagcagtcccctgacattgctcagggtgtgcacggccatttgaccatctgccccggagacattgaggctggtgaccatgggcaccatgtttgggtatgctgagtgaccaaacccctgagctgatgccccttgaccatgaccttagaaaaaatgcttggtgctcgtctcacagat

SEQ ID NO: 38192 - DNA, 377 bp, Zea mays
  Clone ID: MRT4577_134834C.1
gtggttggtgtgtgtgttcaaaaaattcgtttgggggcttttttttttccacaggtcccctaccactttcctagttccagatccctctgcaacaactttgccgttaaaactgtggttttttatttccatactaccaacactaattatggctgcggggggggcatcttatttctaaccaatctaactgtgtgatccggtcgttatatctacgcatcaagcgccctagcgtacttaaagacacacatcttttcaacttcttgccggggttgacctgcctgagaacatcagcattgacatccgtggagatgctttccttctgctgccagaagatctcgatattttgggccctttcttactttacatgctacactttcgca

SEQ ID NO: 38193 - DNA, 614 bp, Zea mays
  Clone ID: MRT4577_134835C.1
ctttcttctcaaaccaacctagccattctccacagtctgtcatctggcgagtcctggcctctcctatctccgccagtatggcacccaaggcgtatatgaagcctgcggccaacaagcccgctggaggaggagcccccgacaaactaagcgctttaatgctccggcggggtaacagcccatggccgagaagtgccttccggcgggcaagtccaacgagggcgtgcagggcaagacggggaaaaagcaagcgaagaagtccgcggagacctacaagatctacatgttcaacgtgctgaagcaggtgcaccccgtcatcggcatctcgtccaaggtccatgtccatcatgaactccttcatctactacatcttcgagaagctcgcggccgagtccgccaagctggcgcgctacaacaagaagcccaccatcacctcccacgagatccatacctcggtgcgcctcatcctccccgaggagctcgccatgcacgctcgtctacgaggcactaacgccgttacgaatttcacctcgctctgaagatccttctaatggtcatgtgggcgttaacggtaggcgcggctgaacttatgtgatactgctagcgatggatgatga

SEQ ID NO: 38194 - DNA, 299 bp, Zea mays
  Clone ID: MRT4577_134836C.1
gttagttgggtcactttatttattttattgacaagcaccgcagaacgtaagcccggctggacacacatacaatggaaatcgacagacaggggtcaatcaaaacgacacgattaaacactggaaagcgcaggaatcctgtgctcgctaggagaccgatcaagtctggagcagctgggggcgatgcccggcatgcgcagaatcaatcattggggaagagccagttcctgacaacaggaaatgcgtctttgaacaagtccccagtcgacgagggaagaccccacgccgttgatgccgggaac

SEQ ID NO: 38195 - DNA, 228 bp, Zea mays
  Clone ID: MRT4577_134837C.1
atcataattccgcgttcttttcatagattgcagacgcggggaggatattcctcatggctgttacaatgaactcgctctgtcagaataagcaccttacgcagctaaaatacactgttgacctgaacatgctcacatactgggatgctgatactgaatttataagggtatgacaatataattaagttactccttatagatgctcgaactaatgtaaagattttacattct

SEQ ID NO: 38196 - DNA, 1530 bp, Zea mays
  Clone ID: MRT4577_134838C.1
ccggccggggtcttcctcctcatgtcgtcgcctcctcctatccctctatatcttctattctaagccacctcgatcggaccctagatagatgcaagaaaagaaaagagaagagcctctgtggatagtggtgggtgctggatcactgggcggagcagcttctcatatcggatcgatcgattaattaatacatactataaacatacaatcaattacatatacggcaagagaagaggaacgccgggccgtttcacttgtcttcttcctccgatccctcccggcggccggccgggctcgggcgtttttccccttttgtttcccatggaggacgccaagatggggaacggcgccaccatccgcgcggtgctcgccatcctccagtggtggggattcaacgtcaccgtcatcatcatcaacaagtggatcttccagaaactggagttcaagttccccctgacggtgtcgtgcgtccacttcatatgttcctccatcggagcctacatcgcgatcaaagtcctgagaacgaagccgctgatcgaggtggcctcggaggaccggtggaggaggatattccccatgtcgttggtgttctgcgtcaacatcgtgctggggaacgtgagcctgaggtacataccagtgtcattcatgcagacgatcaagtcgttcactccggcaacgacagtggttcttcagtggctggtttggaggaaatactttgagtggcgcatctgggcgtccttggtgcccatcgttggaggaatccttgtcacctccgtgacggagctgagcttcaacacggctggcttctgcgccgcgctggtggggtgcctggccacgtccaccaagaccatcctggcagagtcgctgctccacggctacaagttcgacagcatcaacacggtgtactacatggctccgctggccacgctgatcctgtcggtgccggccgtggcgctggagggcggcgccgtgctggggtggctgcggacgcacgagtccgtgggaccggcgctggcggtcgtcgtcacctccggggtgctggccttctgcctcaacttctccatcttctacgtcatccactccacgacggcagtcaccttcaacgtggccggcaacctcaaggtggccgtggcggtgctggcgtcctggatggtgttccggaaccccatctccgccatgaacgcactcggctgcggcgtcacgctcgtcggatgcaccttctacggctacgtcaggcaccgactctcgcagaaccaggcgcccagagcccgcttggagatgcagatgctgccgctcaccgtcgacaagcaaggcgacaagatataaaaagtcttttggaataaaccatctgattctttctgatccacctagcctaaccgccgatcgagaatgcatccaccatcagatatgacaggaaattattttttgttgccagccagattttgataatgagtcagttcagttgttgcttaaagagaaatgtcatcaggtctataaagtcttttggaatgataaaaacccccccccccacgc

SEQ ID NO: 38197 - DNA, 238 bp, Zea mays
  Clone ID: MRT4577_134839C.1
atcaaaggtgaagagtgagattaaaacattgagacattagagggcctggattacatgataacaagcttttgtgcaaggaagatacagagtttcattacattccaagcaatttacgaaagctttactattaactttatcttaactgtgataacaatggcaggctaatgcacctcatctttatgtttcaacaaaggtctgacagtcattaagagatcctcaggagctttaccaactcatg

SEQ ID NO: 38198 - DNA, 398 bp, Zea mays
  Clone ID: MRT4577_13483C.1
atcaagccgcaaaaatcaacatgggaaatcctgaagagtgggttgagatcctcaagcagtgcaagtacctgcctgagcaggacctcaaggagctgtgcgagatggtgaaggagctccttctcgaggagtccaacgtccagcctgttgcggctcccgtcaccatctgcggtgacatccacggtcagttctacgacttgctggagctcttcaggattggtggtgagatccccctgaccaactacattttcatgggcgacttcgtcgatcgtggctactacagtctcgagactttcaccctcctgcttgccctgaaggcgaggtggcccgacaagatcacgctcctcaggggtaaccacgagagcaggcagatcacccaggtgtacggcttctacgatgag

SEQ ID NO: 38199 - DNA, 808 bp, Zea mays
  unsure (1)..(808): unsure at all n locations
  Clone ID: MRT4577_134840C.1
cctcgaggccggccgggggcgcatctgggcgtccttggtgcccatcgttggaggaatccttgtcacctccgtgacggagctgagcttcaacacggctggcttctgcgccgcgctggtggggtgcctggccacgtccaccaagaccatcctggcagagtcgctgctccacggctacaagttcgacagcatcaacacggtgtactacatggctccgctggccacgctgatcctgtcggtgccggccgtggcgctggagggcggcgccgtgctggggtggctgcggacgcacgagtccgtgggaccggcgctggcggtcgtcgtcacctccggggtgctggccttctgcctcaacttctccatcttctacgtcatccactccacgacggcagtcaccttcaacgtggccggcaacctcaaggtggccgtggcggtgctggcgtcctggatggtgttccggaaccccatctccgccatgaacgcactcggctgcggcgtcacgctcgtcggatgcaccttctacggctacgtcaggcaccgactctcgcagaaccaggcgcccagagcccgcttggagatgctgccgctcaccgccgtcgacaagcaaggcgacaagatataaaaagtcttttcgaataaaccatctgattctttctgatccacctagcctaaccgccgatcgagaatgcatccaccaccagagatgacaggaaattattttttgttggcagccagattttgataatgagtcagttcagttgttgcttaaagagaaatgtcatgaggttaaaaaaaaaaaaaaaaagcggnc

SEQ ID NO: 38200 - DNA, 862 bp, Zea mays
  unsure (1)..(862): unsure at all n locations
  Clone ID: MRT4577_134841C.1
ttgggtacctcgaggccggccgggctcgggtgtttttccccttttgtttcccatggaggacgccaagatggggaacggcgccaccatccgcgcggtgctcgccatcctccagtggtggggattcaacgtcaccgtcatcatcatcaacaagtggatcttccaggtcccgtccctcgcgcttgctcttgtttaaatcctggtcttctttttttgtttcaattcaatttccagagatggccatgtatgtagttatatatatattcattcaaggggatttaggggtggatccgtcaggacaaccaagagatttcgtctctttttagttcttgccttcatccaatcgttcgataggtgcagattaatcgcccccatgatgttgtcgtctttttcttcagtgatttggtaggaacataaaggaatcatcctttttttttgtccgactgaaaagaaaattacttacttgaaccggtggtggttcgtagattggatttccagatttaattgtaatcatggtaagaagagcctgttcttatcctgtgacgctgactctgtgtggggttgtcagaaactggagttcaagttccccctgacggtgtcgtgcgtccacttcatatgttcctccatcggagcctacatcgcgatcaaagtcctgagaacgaagccgctgatcgaggtggcctcggaggaccggtggaggaggatattccccatgtcgttggtgttctgcgtcaacatcgtgctgnggaacgtgagcctgaggtacataccagtgtcattcatgcagacgatcaagtcgttcactccggcaacgacagtggttcttcagtggnctggtttggaggaatactttgagtggcgcatc

SEQ ID NO: 38201 - DNA, 213 bp, Zea mays
  Clone ID: MRT4577_134842C.1
cccaaaaaaaaaaaactttttgaaaggggaccgggggcttaattttacctggcccctttagaaaaaatccttttaacttggcccaaaggtcaaacattttgggcaaatacccttttgggttgggaaagggggaaaaaacaaggtgtttcttaaacagaaaaacggccccccaatggtggggcttaaccgtttacaggggaaaccgcccccccc

SEQ ID NO: 38202 - DNA, 265 bp, Zea mays
  Clone ID: MRT4577_134843C.1
gttacttcctgcgccccggcaaccgggtcggcgacgacatggacgggccggtgcccgccggcgcctgaccgcgcaaacagcgggacccgaaagacgacgacaaaaatggaatagcacatcgacgaggactatcgagatgagatacacacgaagagatcaaccgaccgcacgcgtcgcagactggcgggaactaaacgcacacaaagatgttaacctggatgacacaaaagaaaacctgaaaggtcgggagaccaaacatgtagcg

SEQ ID NO: 38203 - DNA, 257 bp, Zea mays
  Clone ID: MRT4577_134844C.1
tcttcgataccaaacgtataggatcgaacaggcggaggtattctacatagacagcgactcagagaccgatgctatgtccacggagaatatggaccgcttcggctaacatgatgctcatagagaccgtctaaggacacggacgtatgtctttcatgagcgaatgcctaccttagtctagagctgattggggtcacgtgcacaagacgagaacctgaaatggtaaatgctggaaacgaacgtaaatgtattgtaaaagt

SEQ ID NO: 38204 - DNA, 545 bp, Zea mays
  Clone ID: MRT4577_134845C.1
cggtcgcgtgggcggtcgcgtgggcggacgcgtggtgaaaaaaaaaaaaaaaaaaaaaaaaaaaaaaaaaaaaaaaaaaaaaaaaaaaaaaaaaaaaaaaaaaaaaaaaaaaaaaaaaaaaaaaaaaaaaaaaaaaaaaaaaaaaaaaaaaaaaaaaaaaaaaaaaaaaaaaaaaaaaaaaaggggggggcgttttttgggaatcaattttttttgcccgttctttggaaatttttattttttttttggggcccctaaatttaatttattgggccggttttttaaaacttgggattgggaaaaacctttgtttttcccaatttttttctttttgaaaaaattccctttttcccattttggtttataaggaaagaggcccgaccgtttcccttttccaaaattttggccacttttattggaaatgggcaccccctttttacgggttttttaagcccttgtgttgttggttttttccccccattgttgcccgtttatttttgaaagcggctttaggcccggttttttgggtttttttcctttttttt

SEQ ID NO: 38205 - DNA, 149 bp, Zea mays
  Clone ID: MRT4577_134846C.1
taaatccgtagtttttataaagacggttacactgatacctgatgacaagatgaggcaggaagtttgttatgctgcagaataagagcagcatgaaaaaaaatgaatacagctatcgttgttagtgtaaaaaaaaaaaaaaaagggggggg

SEQ ID NO: 38206 - DNA, 373 bp, Zea mays
  Clone ID: MRT4577_134847C.1
cctacaagatttccgcatagctaatatgtagtcgcggacaaagaaacgaccggagcggagtagcacaactgctgaaatcggcatctcatggcaggtccaccgacgggcatggacgacagctcgccgcacggagcactgccggatgtatccctcaccacgacgcccaaggtgaagatgctgccccccaccctgcgctacacgtcgcagacatgcaaatacatagcccgccatcactcctgcttgctcctgcaattatagtgatcgtctatgctacatcatatttacccctgttgctagaggccattccgagaagccaccactcttacatgcatgcgccgcactacgacgacactgcctctcgagaggttctgtt

SEQ ID NO: 38207 - DNA, 392 bp, Zea mays
  Clone ID: MRT4577_134848C.1
gaccaggcgtccggcccaaagctttaggtttgggggatgggttttatatctattttcctgaaagggcccatggggggcgggacctgttccatgcaaataaaattttcccccaccatccattgtggccggccattgcggtcactggaggagctttagaggaaccagttgttgtcgttgtggggattttccaagccaggttccaaaattcctccttgccccccttttaaaaacggtcctaaggccccgttgggtttaattagtctcggttgggttcacagggcctaaaagtgttaaaacttaattaaattcctcataagaatcctaaaatgtcctttaccatctttccgccttacctttttttccactgcatttgaattaaataaggggcaaaa

SEQ ID NO: 38208 - DNA, 305 bp, Zea mays
  Clone ID: MRT4577_134849C.1
ccaacggtgagcaacctaacgcactgcgaacgcccgagagggccccgcaaaacgcccgacggacccaaccagcggcccggaggcaccaaaaagcctcaacctataaacgcccgacggggcgtctccaggaacgggccactccagcgtcgcaaagccccccgggcccagccccaacggtctcgaccacctgaaacgtagtgaccaatcgccgcccccgtaggcaggaacccaactggtgctgccggccaacctcccaacgagccccaacgtgccgcccgggagaaagccaccccccgggcacgccc

SEQ ID NO: 38209 - DNA, 168 bp, Zea mays
  unsure (1)..(168): unsure at all n locations
  Clone ID: MRT4577_13484C.1
cgtcactcctttggataatagcacatgaatcncaatgaccaattgtgtcatcttttgagcttcataatgtaccagttcaacattttttttagtttctgacaagtttgtggtcgcccanaggaaaagtatggccaatgtacacttttaactgacgcatagatttatttt

SEQ ID NO: 38210 - DNA, 340 bp, Zea mays
  unsure (1)..(340): unsure at all n locations
  Clone ID: MRT4577_134850C.1
gttttgtgtttttaatttttttttttttttttttttgttttttttttttttttttttttttttttttataaaaaaaaaaatatataataaaacaattagaaaatacccattaataggacnactcttncaaaccacctcttttttttaccgggttatgtttaggaanancaancacccaaaaaacaaaaaaaaaaatcaaactaacctttacctataccaaaatttaattaaaattaaancaaatataaaactaatacttattaaattaataaaaaatntcctctctttaaaaatncctcacatcacacanaccacaaaaaataaggggcaaaacctctaa

SEQ ID NO: 38211 - DNA, 287 bp, Zea mays
  unsure (1)..(287): unsure at all n locations
  Clone ID: MRT4577_134851C.1
agaccaacaagcaacanagaaaagaggaaaccaggggcaacaanagagcaacaaaggagaccaagagagggacccaccaaagcaccggcacaaacacggagaagcaaacgcgacaagaaagaccacaaggcaaacaagcagccaaaagcagagccaaaagacccccaaaccaaacaacaaaaaaagcgggaggaggagaaaacccaacccaagaaccacaaaggcgcgaacaagcaaggggaacaagcaacagaccaaagagggccgcggggggacaacaaacgaca

SEQ ID NO: 38212 - DNA, 803 bp, Zea mays
  Clone ID: MRT4577_134852C.1
ttgggtacctcgaggccggccgggatgatccttcaggcagttaaagggatatgatgagtggtaaaagctcggtttttttttccgagaggggtgcctgccccaaataagcctgttacgacaacatggcgctcacaatttgtaccatctgatcccgaggaaatgaggctgcaaccaaaatattagctcggcaacttgtcaggctgaggcaacaaatcctcaatttgcaaggcacacgggcacagattcgtggagtagctactcacacacaggcaatgtatgctggcacttcaatctctgctggaatgaaaggtgcaagcaaagctatgtcagcaatgaacaagcaaatggaaccggcgaaacagataaaggtcatgaaagaattccagaaacaatcaacacagttggacatgacgcttgagatgatgtctgatgctattgatgaaacacttgacaaagatgaggcggaggaggaaacagaagagcttacaaaccaggtccttgacgagattggcgtcgatgtggcttctcagctctcttcggctcctaaagggcgcatcggagctactaacaagaaagtcgataacggtcaagcacgtcctgcaaggaacgtggcggctcctgctctagaaccctcctctgctgaagttgaggatctggagaggcgactggcatctctgcgccgtatctgagtctgagctgttgaagaaagaacttgtttgtaatatgtgtagggaaaacagcgagctgcacatgatacggttgaacctacctaatgttttatttaatttggaagttgactgcac

SEQ ID NO: 38213 - DNA, 1147 bp, Zea mays
  unsure (1)..(1147): unsure at all n locations
  Clone ID: MRT4577_134853C.1
cgggttcgacccacgccgtccgttgtttgggctcggcttcgcgcggncgccgtgcctgctgccatggttcccctcgaggccggccggggacaagtgaaaatacccgttgggctcggctcgcgcggcgccgtcctctcccactctctacgcacgaacacagcacgcgccgcaccccgctctctctctcctgcgttcccatctgccatctgcggcggcggggagtgagcacattgaggacggtctactcctcgttcgcgtgcggttcgtcccgagcgatccggcaaccatgaacatcttcaagaagaaggtcgaccccaaagaggctctcaggaccagcaaacgtgaaatggcggtcgccacgcggggagttgagagagagattggttccctgcaaatggaggagaaaaggctggttgcagagataaagaagactgccaagactggaaatgaggctgcaaccaaaatattagctcggcaacttgtcaggctgaggcaacaaatcctcaatttgcaaggcacacgggcacagattcgtggagtagctactcacacacaggcaatgtatgctggcacttcaatctctgctggaatgaaaggtgcaagcaaagctatgtcagcaatgaacaagcaaatggaaccggcaaaacagataaaggtcatgaaagaattccagaaacaatcaacacagttggacatgacgcttgagatgatgtctgatgctattgatgaaacacttgacaaagatgaggcggaggaggaaacagaagagcttacaaaccaggtccttgacgagattggcgtcgatgtggcttctcagctctcttcggctcctaaagggcgcatcggagctactaacaagaaagtcgataacggtcaagcacgtcctgcaaggaacgtggcggctcctgctctagaaccctcctctgctgaagttgaggatctggagaggcgactggcatctctgcgccgtatctgagtctgagctgttgaagaaagaacttgtttgtaatactagcagttattcatctatatatgtaaagttggtttatatgtgtagggaaaacagcgagctgcacatgatacggttgaacctacctaatgttttatttaatttggaagttgactgcacacgggccctagtcgctag

SEQ ID NO: 38214 - DNA, 536 bp, Zea mays
  unsure (1)..(536): unsure at all n locations
  Clone ID: MRT4577_134854C.1
gatcaagtgnacagctgagcttgcacatgcagcgagcttcattgaaaagctgcctgacgcatatgagacaatggtaggtcagcatggttctcagctttctggggggcaaaagcaaaggattgccatcgcaagagcaatcctcaaaaatcccaaaattcttcttttggacgaagccacagggggtttagatgtagagtctgaaagggttttttaagaagcactaaataggataatggtagggagaactacactcattgttgctcaccgcttgagcaccatcaggagcgcagactgcatagcagtagttcatcaagggaaagtagttgaacgaggtgtccatgacaagctaattaaggaccctgatggagcttattctcagcttattaggttacaacaggcacatgctacagaaaggcatgaggttccagatactgacgtgtcaggttcaatctttaaaaggagaagnttacctttggaacaancaacaggcanagattcttccangaaccaaagacatcattccttnacaaaaacca

SEQ ID NO: 38215 - DNA, 396 bp, Zea mays
  Clone ID: MRT4577_134855C.1
aaaggcacaaaactcccggggggggaatttataaacaggggggcccgaaaatttttggaaaaaaaaaaaccccccctacaaaaaataacaaaccctcgggccctttttttaccacccggggaaaacctttttaaacttggacagggccctgcttaaaaaccccaacccccgggggacacttaacaccaaaagctcaaatttttaaaaaaaccgggccccaaaaaaaaaacccccccctgggaccaaaaaaaagggtcgccggacttttttcccccccgggggccctatgaccccccaggaatttttgggcccaccccccccttggacatttctaagaaccggtccctgttgggggggaccccgccctttttccccccattttaaagggcccccccc

SEQ ID NO: 38216 - DNA, 2375 bp, Zea mays
  Clone ID: MRT4577_134856C.1
ggcggcgggcggcggagcgggcccgcgacgccgctgctgaaatgggacgtgggcggccggcgtggtgagggcacgaaagctgccgccgacgaagcgggggacgccgcgcgggcgcgggagaccaaggcgagggaggtgtcagtgcggaggctcgcggccggggtctggcggctgcgcccgccggaggccgtggccggcgccggcgccggcggcgagaacagggtccgtgtgggtgtcgagcatatcccaaggcatctacaagtccagcttctgaagcagaacacttcaggtcatcaccagagtttgaagaatgaggtttcaagccccatttctgttctggagcggaagagtggagagctccacaaggtacagcttcacgctacctctgccatgcttcctgtcgctaccatggagaaggcaacgaaatgggagcctggggacataaaggggatggagtcacatgatgcgtatctgatagccagccagctaaatcttcttgatgaacagcaagacacagtgtatgttgctggcctccagatggagctccagcaagcacgtgataggataagtgagctggaaaccgagcggcggtcggctaggaagaagcttgatcacttgttcaagaaacttgcagaggagaaagcagcttggagaaacagagagcatgaaaaggtgcgtgctatcctcgaagatatgaaggcagaccttgaccatgagaagaaaaacaggaggcggctggagatgatcaacttgaaactcgtcaatgagctgaaggaggccaagatgtcagcaaagcagctgttacaagattatgagacagagaggaaggcgcgtgagctcaccgaggaggtatgcaacgagctagcaagagaggtgggggaagacaaagctgagattgaggccttgaaacgggactccctgaggttgcgagaggagctagacgaggaacggaagatgctccagagggctgaggcggtggcgtgaagaacgggtgcagatgaagctcgtcgatgcaaaacttactcttgacgccaaatcacacagctgagcagactgcaacaggatgttgaggcgtttattgccgcatgcagtactgcaaatggagacataacagtagtagaggaagcagagaacataattcaggcaatcaagtcagtcagagcccaaggcgctgaattcagatatgagccaccggcggcatcggaagacatattttccatctttgaagagctgcgtccaagtgaggagcctgtcattaaggagattgagccatgctacacgaatagctctgccaaatgtgaatcggaaattcaacaggttagcccaatgaccgatatattcctcgaaacgaaagccaaagtttactcaaacaaaagccctaaagatgaaagcgacgccgaagatggcagcagctgggagacaataagccatgaagacatgcggggttcgagcggttcgcctgatggaagcgaaccttcagtcagcaataagataagcatttcttggaacagcagaaatggtttcgagtacagggagaacgagaagctggaagatgacttagctgatgcctacctggcaagcatgaaccaacccaagaagaaagaatcggccatttcaaagctctggaagtcgtcccgcccaaagaacagtgaggtatgcaagaaagatgcagtcgttgaaacggtgaatgcaagaccgtctaatgcacggcactcagtggggacttattccactgttgaaagtggcatccaagaaactggactcagtccaccgagcgtcgagcagtggagctcgccggactcgatgaatatccaattcaaccggggcttcaagggctgtatagagtacccacggacgtcccagaagcacagtttgaaggcaaagctcatggaggcacggatggagagccagaagatccagctccgccaggtcctcaagcagaagatctagtgcaggccagaaccagaggacgaaatattgtaaacctagattttaatccaaggaacaatgtcaaggagtacctagatgcttcatttttttcccctgttttaaagtaacctgtaatgcatgtccaacaagggctaaaaagaaaaaaaaggacagggatgcccttggtgggctgtccggactccggagcctttgctgcttctgaatctaacttaagttttggtgtaaaggccggatctggtaggctatggtgagatctagcatgatgtataatacagacccaaccaagcagcaacgtttagcccccaaaaaaaaaaaaaaccaaaccaaaaaaaaaaaaaaaaaaaaaaaaaaaaaaaaggacgacgggcgcacgctatacaggactcaagcacgcgtgcagcgtgcgtcatagctcatagatagtg

SEQ ID NO: 38217 - DNA, 242 bp, Zea mays
  Clone ID: MRT4577_134857C.1
gccgcctgtctgcctgttctttctacactcttgcaatcgactagactacggcgaatcgtgagtgcataggattcctttgcttgtaacttcccggtgaccaacataaatcccattttcctgcttaacctatactatcataccctccaatcggagctcgaccacactatttaccactatggtaggttctagcgcatttacatgaagtaacgctttgcttttgtttactatgaggatgaacttga

SEQ ID NO: 38218 - DNA, 307 bp, Zea mays
  Clone ID: MRT4577_134858C.1
tctgggactctttgtcggacgcgtgtgcgtactcgtggactgcggcggaggatccaccggggcagggtcatgcgccgaggtcgtgtgcgctgcttacctaaacacgatgtgccacgacgagctccgagcctgtggcggaggggcgtgcctgagcgcatgcgacgcgttctagcggtcctagtactgctgcagcggagccttcaagtacacagcgtagtgccgttcgacggcctactggcaggtgttgaagactgcgagccctaacacttacaactacgcattatacgattccaccttcacattcacc

SEQ ID NO: 38219 - DNA, 823 bp, Zea mays
  unsure (1)..(823): unsure at all n locations
  Clone ID: MRT4577_134859C.1
cactcctaagggcgattgggatcctcgaggccggccgggaaccacaagacgcagagtatatgtaccgtcgtcactttgctacaatggccgaatcagcagctaagcgcgtcaagacctcgggcaacggccccctcattggtactcacagcggccacttccacgctgatgaggccctcgccgtccacatgctccgtcgacttcctacataccgcgacgccgacctcgtccgtacccgcgaccctgctgtcctagctacctgccacaccgtcgtcgatgtcggtggagagtatgatgctgagaagcgccgcttcgaccaccaccagcgaggcttcaacaccaccttccctggccgcccaacaaagctttctagtgcaggtctggtcttcctgcactttggccgtgccatcgttgctgagcgcctcggactgtctgaggattcccccgatgtcgatttgatctacaagaagctgtacgagaactttgttgaggcccttgatgcccacgacaacggtatctctgtctacgaccccgctgccattgccgctgctggcattgagaagcgtttcagcgagggtgccttcggtctcgggtgccgnntgtcggacgtctgaaccccaagtggaacgacccaactccctccgaccctgctgaggctcaggctgctgaggatgccaagttcaacgaggccagcagccgcatttggtcaggagttcgaccgcgatctcgacaactatgncgcttcgtggctacctgcccgcaccattgtccaggaggcattcaacaagcgcaaacaatacgatgagcagggccgcatcctaattct

SEQ ID NO: 38220 - DNA, 302 bp, Zea mays
  Clone ID: MRT4577_13485C.1
cggacgcgtgggcgaccgaccagagtaccggacggacacacagcgagggggaggaggaggaagaaggaagcaagagggaggaccgagcaggcctagggtagtcccgtccggtcccctgcctggcgtcggtagggggcgatctatatatctgtcgatgggctactggtgggaccgcgtcgtgctgccggtgcggcgggcctggctcggcgtcgcgtcccgcttcggggttcgccagaccgggcttgggaagctgcggcaggaagtgagcacgtgcgagtacgaagacgtgcacgtgatggggg

SEQ ID NO: 38221 - DNA, 225 bp, Zea mays
  Clone ID: MRT4577_134860C.1
catttagcatcatgctgcatgtatatccttacttaactatgcagcaacatcctccattacaatgtacattgtcacttatcatgtggcacttaaatccctcacacattacttcatcctatttgctgactctcccttcattgctatcaaccattcataacttaattatcatctcatttacttctctctccttttactgtttactctttcaaatctacatgctttact

SEQ ID NO: 38222 - DNA, 198 bp, Zea mays
  Clone ID: MRT4577_134861C.1
acaacacttaccttcttattcaaaacctacccttccaaatcctattcctccagatcggacaggacttttaaaccgacctccccttccagtcctcctccctcccctgctacaatatgtttgataaataacattcactatattttcaaatctctccgcaaatcataacccaaacattttttagatcaacactctattcca

SEQ ID NO: 38223 - DNA, 408 bp, Zea mays
  Clone ID: MRT4577_134862C.1
gtccatggatattcgaactaggcaaggattactcaacgctatggttggcaaagttggaaaacggatggacaatcttttgattccattggaactattatgctgcatatccagaactgaattttctgacatgaaagcataccttcgttggcagaagagacagttaaacatgctggaggaaggcctcataaaccatccagttgttggatttggggagttaggtcgaaaagtcaatgagataaggagcctttttagaaagattgaagaatccgagtccttgccaccatctgctgcagaggttcaacggacagaatgcttaagatcactgagagaagttgccacttctctatctgaaaggcctgcccggggtgatcttactggtgaggtttgtcactgggctgatggatacca

SEQ ID NO: 38224 - DNA, 154 bp, Zea mays
  Clone ID: MRT4577_134863C.1
gcgggctcttatacgactactatgaggaaagctggcgcgctcacgcagagctctcgatcctgtatagcgggcgcgatccacgcgtccgttttgggtcatcagaccatgagctttatctacaacagagcgcagaacaacccgatcgacaccatga

SEQ ID NO: 38225 - DNA, 931 bp, Zea mays
  Clone ID: MRT4577_134864C.1
gtcaaaggaaagaaaagctcgatatataacagaattggagcggaaggttcaaactcttcagacagaggctactactctttcagcacagctgacactattccagagagacacaactggactttcagcagaaaatgctgagctcaagataaggttgcaggccatggagcagcaggctcagctgcgtgacgctctaaatgatgcactgaggcaagaagtggagaggcttaagatagcaacgggcgagatgtcgaagtccaataacgagcatttcaatatgggaatgcagcacgtctcctacagcccttcattcttccagctctcggagcaacacacaatgcagcagcatggaaacattcagctgccgcatcatttccaacagcctccgctgactgtcccgagccaccagatgctatcccaccccaactccctctcgaacatggtgcagcaagactcgcttgggcggctccaggggctggacattgggaaaggatccatggctgtgaagtcggaggctgaggtcgtggtgaagtcagagggcagctctatatctgcgggtgaaagcaacaccaccttctagctatacaatacgtctgccttccaagaagcctttgtttggtttagagttcttcttttgttcatagtctgacatccttgaactgcttcctccttccctgtagtttttttattccattcgttatatctagttaccattgatcggttgtgtcgatcgttgttgtcgtggtggctgattttatagggacattggtgtgttggttttgagtttgttatgtgtgtggtatggttggttgtttcgagctagtgactgagagggcaccgagtgattttttggcagattttcttttcaccacctgtcttagttttgttatagaacaaccatgatttctccttctgggaatgtgtacattgcgtg

SEQ ID NO: 38226 - DNA, 284 bp, Zea mays
  Clone ID: MRT4577_134865C.1
cttaaaccaccttctacaagtttgggccccggggccattttgctttttaaagtttaaatccaaaattggttttccctttcccaaaccccaggaaaggtattttcccgttcccccctttttcccccaaccataaagcctaaaaaacaatttttcccccttcgccccaaaaaaaggtctcatcccccattttagaggccaaacccatccaaaactttttttttaataacaacctcctttttccccccaaccttttttttttccttttcctttttgggggcggcaaa

SEQ ID NO: 38227 - DNA, 1581 bp, Zea mays
  Clone ID: MRT4577_134866C.1
cccacgcgtccgtgaccgtgctgcagattgtctgtttgcacggtcaaaggaaagaaaatctagatatataacagaactggagcggaaggttcaaactcttcagacagaggctactactctttcagcgcagctcacactattccagagagacacaactggactttcggcagaaaatgctgagctgaagataaggttgcaggccatggagcagcaggctcaactgcgggatgctctaaacgatgcgctgaagcaagaagtggagaggctcaagatagcgacgggcgagatgccgaagtccaacgaacaattcaacatggggatgcagcacgtctcgtacagcggcccttctttcttccatctcccggagcagcacgtagacattcagctgccgcaccatttccagcagcctccgcggaacgtccagatgctgtcccaccccaactccctctcggatatggcgcagcaagactcgcttgggcggctccgggggctggacattggaaaagggtccatggctatgaagccagaggcagaggtcgtggtgaagtcagagggcagctctgtatctgcaggtgaaagcaacaccaccttctagctatacaatacatctgccttccaagaagcctccgtttggtttagagttcttttgttcatagtctgacatcctccttccttgagctgcttcgtccttctcagtaggcctattttttttattccattggttatatctactagttaacattggtcggttgccaatcgttgttgtcgtggtggctgatttctatagggacattgatgtgttggtttcgagtttgttgttgttgttgtgtgtgtggttggttgtttcgagctaggggctgaaagggcaccgagtgtttttttctccacctgttttagttttgttatagatttgacaacaatcgttatgatttctccttctggaaaggtgtacattgtgttgctatgctaatttgtagtgatatttttgatgcttccaactaacagaaaaaaaaaaaaaaaagcggccgagcaacacaccaatgcagcagcatggaaacattcagctgccgcatcatttccaacagcctccgctgactgtcccgagccaccagatgctatcccaccccaactccctctcgaacatggtgcagcaagactcgcttgggcggctccaggggctggacattgggaaaggatccatggctgtgaagtcggaggctgaggtcgtggtgaagtcggagggcagctctatatctgcgggtgaaagcaacaccaccttctagctatacaatacgtctgccttccaagaagcctttgtttggtttagagttcttcttttgttcatagtctgacatccttgaactgcttcctccttccctatagtttttttattccattcgttatatctagttaccattgatcggttgtgtcgatcgttgttgtcgtggtggctgattttatagggacattggtgtgttggttttgagtttgttatgtgtgtggtatggttggttgtttcgagctagtgactgagagggcaccgagtgattttttggcaaaaaaaaaaaaaaaaaagcggcc

SEQ ID NO: 38228 - DNA, 634 bp, Zea mays
  Clone ID: MRT4577_134867C.1
agatcttccttcctctctcctccgctgccttctgcgtctccatttccacctctgtcccttgctggtgctgtctcacctcctccatgcgaagaagacaactcccacattgtctattcgcgtgattgctgcattctgtctcctgcacagtcgaccaccacaggacacctgatctaccaacttggagagattgacaagcgtgtgatctacatgcttcagaacgtacgctgctgaacatagactctagcgagccttcaagtccccatggctggtccaccagctcaagggtgagcgtgacagaggcatcaccattgatatcgctactgcggaaactgtgagacctgcccagaacatattgctgcgactctctcgatgcatcctgcgacgacgtgcacttcatacacagaacatgatctctcgcacctcccactctgactgagctgtacttattttgactcctcactgcagaattcgaaggtgatatctccccagatggacatagcccggaacttgctctccttcgattcacgcttggtactgaaccgatgactctgctcgctgcaacaagatggatgctaccgctccactttactcgatggatcgttatcatgagattgtgtaccaaaacgctttctac

SEQ ID NO: 38229 - DNA, 471 bp, Zea mays
  Clone ID: MRT4577_134868C.1
cggacgcgtaggaactgttcgtagtttcttcatcttttaagctaaagatgatgaccgtagagatggagcatcatttcagctgtgcagatataatattccatagaattaccatatcttaaatagcaataatgttatggggaatttcattccccaagttatcatgcaacttcaagttctgcaatttagagtccattagcagttcctccccagattcattcattggagtcttccccttcctcatggatcgatcttcttttcctgtcattgttaaatgtggtttcctcagtgttctacataaagatttgtgatgaactcagccttaaatttaaactaaatgcgtacttttttgtctggcttgagttttattatatagagacagtaaataaatggaaaataatttatgaattttaatatgtgcttttatatgcaattggtttaatcttgctcagatgaagtctaccattttttaaa

SEQ ID NO: 38230 - DNA, 610 bp, Zea mays
  Clone ID: MRT4577_134869C.1
ccggccggggcgccgccccagcaaatctcacgcacagaaatccaaagccccaaaggcccagactcaccacctcccaatggagaacggggacgaaatcctcgcctcccccacggtcgccgacgagacggacgcgctcaacggcggcgtcacgtcaggtaggagcaggtccccatcatccaccccgcaaagtcctacgttacgctcgccgacgacaaccccgctcctaacggcgtggtcttgaaagaggaggagggaggagcccactccaccgcgtagtcctacgcaggtgtcgtggtcctggccgagatcgaggacctccgcgtcggcatgttcgacctggaggagaagctctctgaggtccgacgggagaactagtctttcgacgaggagacctaccgcagcgaggtgatctgttggcaggcctctagaggaggacaccatcgccgagatcgctgcctcctctgacgagaaggaggtcgcctcgctctcggcgtgggctgaacgcctcgctgttggtctccagatcgagaagggcctgctgtagctgcacaagctgagtcacgagaatgtgtgcacgtaggagaatgtggtgtgtctgtagatactcaag

SEQ ID NO: 38231 - DNA, 332 bp, Zea mays
  Clone ID: MRT4577_13486C.1
atctttaataatagctttatatttaatatgttgttcggggggtttttttaacaggatgagccggctttcacccaatggggcagaaggtaaaggccaccagaagcaggacccgcggcgcaaaaaacggcccaccgaactggcgcagaagacaaccccggacagacacaaatctcaccacaaaaagggggaaaaggggcccagggcgctacagaaccacaaaggcacaaaaagggaaaaacaggaaaaaagggaaacggcgagcagcggaggggagcaaaaacgaaaaacccgggaaaacgcgggaaaggggtaagatgctaaacccacacgcg

SEQ ID NO: 38232 - DNA, 333 bp, Zea mays
  Clone ID: MRT4577_134870C.1
gtcacctttttttttttttttttttttttttttttttttttttttttttttttggggcccgatgatttattttattccactctcgactgggaagggacacccaatcaaacatacaaaacaacaacaagagctagcttattgggggggctgcctgcttgtaacaagggggacggaccgaggaacatggaaggatcccttggctgtgcccctgtggcgcgcggccctgggggaattggatgaatctctaatggatcttgcaaccccaattttcggggaggaaatcgcgggacctgtacttgatggcccccttgtccgtggacacggggacccaat

SEQ ID NO: 38233 - DNA, 1808 bp, Zea mays
  Clone ID: MRT4577_134871C.1
cctcgaggccggccgggaaaaaaagaacagctcgccgcggctccgaatggcaacttccccgaaccccgcgacgattcaccgagccggcgcccagtgacccttccagaagcttccagaaggtcaccgccatggccgcgcccttcttttccactcctttccagccctacgtctaccagagccagcaaggatctgtgacggcgtttcagatatccggtggagatgtgcaggtcctgcaggtgatgctgaagtctcaggagaagctgactgcaaaaccaggtgcaatgtgctacatgtctgggaatatgcagatggacaacaattacttgcctgaaaatgatggaggcgtgtggcagtggatttttgggaaacgtgtaagcagcaccattttctttaattctggatctgatgatggatatgtcgggattgctgcaccatttcctgggaggatactgccggttagtattttgcttctcttctacgttttaatttttctcttagcatcgtcttttcttgtgcaatgtggaataaatcactgttgtcgctactcctcttatgctaacggattctagatttgggccgggcttagctgtttatttttggattgctctacatctttgaaattgtgatctgctatatgtcaggtgagggtttgttaatccttttgttgaactttaaccatccacttgaatacattttttttcattagattagacaccaacctaacctaactgtatgatcgtatacatatcattacaatgtgctacctcttgccagatttatgtcaagcatgcatgtatgctgctgtggaatgtgctcggtattagaggtgttggcattacaattgtgcactgatatagtactagaattgtacttagtcttattttagttgcttgtgtctgttacaggtagatctaacaaactttagtggagaacttctttgccaggcagatgcttttctatgttcggtcaatgatgtctccgtctctagtacagttgagccaaggccacggaatattgagattggtgcagagatgatccttaaacaaaaacttaggggccaggggatggcttttcttgttggtggtggatcagtcatgcagaaaatccttgctcctagagaggtgattactgttgatgctgcttgtattgtggctatgtcggccaccattaacttccagttgaagagccctaaccagcttagaagagcagtttttgggggtgataaccagctaacagcatctctcacgggaccaggtgttgttttcattcaaagtctgccattccatcgactctcacagagaatcgccagtagatcagtggcaggcccaagcttgagggacaacccaaagttcttcatccagattgtcatgttcttcttcctggcctatgttatgattgtatcatccataattctgacagatgtttaggcgattcagtgagcttttggtgtattcctagacaagttatcgaagagttaaagctacctccccaatgttaatgtagatgtaagagaacgaatttcacaagctgttgttagaaaccttagccgaaggttcttcatttttttttctctaacagtttggagggggcggcgggtttcttggttagcgtgtaaagaggaagacagcaaaatcaagttgcacagcgtatggtgaatatacagtaattttcctcctctaaactggtgcgatgcattttgaataattgaatcagtgatttggcttgagcagttgtgtgctcttttcatcagtcatgtactcatgttgtgtgacgtatcatctcgagggggggcccggtacccaattcgc

SEQ ID NO: 38234 - DNA, 242 bp, Zea mays
  Clone ID: MRT4577_134872C.1
tcgttcacgccttctgcaactgggaggaaaaaggacttctatactacaatttgttgatgtcattttgcatatgcatatcatggagaacgaatcttttcatgcatcatgtgaagggatactgagatgtagggtgagtagcaatggaatacaaggctggtgtgaatggaggacaatgaccatgtgttgaggtggtggtggtgcacactggtcaaacatcagaaggcctaaatccagagacaaag

SEQ ID NO: 38235 - DNA, 771 bp, Zea mays
  unsure (1)..(771): unsure at all n locations
  Clone ID: MRT4577_134873C.1
cgctgttcttttaataggctagagtgcttctcattatcttaaaatcaactcattctttgacaccattctatttacagaagaatttaagtagcatacacaacagcccggcaagtatacaagtgtgcaaccgaaaaaataaatacaaaaaatatgctgcaacctctaaattgcagtaagatctatgttctttctatggcaagaaaagcaaactcatcccagttcttaaaagaataaataaatgtgtgaacggtatgcctatacgttatacagacctggtcaacttgtcaactgagtttgggatctccagttaggcactaaccagacaacaagccaacgaaggttgagctagcagcccatattcccattgacctaactgaaggttgggatctctggcttgagatcaatattcagaatttctggattagaaaatccatgtcagaagtagagctctggtttgagatcgtcattctgaatttctggtgagaaaaaaaccatgtcagaggtggatctcaggctcaggtctcgactcaatgttgatgttgtcagccagggcggcatgctgtgaactgcagagtgcaaaccatgggtacatagctgcaacagatgaccttctgtgtgcttcacctcctccaggaataggatccaacagatctccgagactggtccagcaaaacctcaaactccctcaaaacttgccatgtagcatcgcctgcttccatcggacgattgaaaaccagagccctccgttcactgggatcccacaaatnctnc

SEQ ID NO: 38236 - DNA, 573 bp, Zea mays
  Clone ID: MRT4577_134874C.1
atggacggtccggccttcgaggccgaacgatccagagtggcgcagagaccacctaattcttctgagggaggcataatagaggaatttagggatctcaacaaattaggacaggggtttacattggccgatcctttggaggagatcgacataggagatggtaaaactctaaggccgacttttgtaaacaagaccctgaagactgattctagagatgaaatgatcgatgtattgaaagaatattctgattgctttgcttggaattacactgagatgccaggattaagccgagagatagtagagcatcggctgcctattaagtccgatttcagacctttcaagcagaaagctagaacatttcatccagacctactcccacgaataaaggacgaaattcaccagctgatagaagctaattttgttagaccttgcagatacgccgagtgggtctccaatattgtgccggtggagaagaaagaatcagatataatcagattttcatggtcgaagaagaagcgtctgaaacgacctttatatgtccaggcttcattggtttatttgaataggttgtcatga

SEQ ID NO: 38237 - DNA, 383 bp, Zea mays
  Clone ID: MRT4577_134875C.1
ggcgccttttttttttttttttttgaccatgacttttagtgttggaacaacttaaaggagggaaaacagcgttccatattactctactcactgtgtgggttgccgacggacctaccgaaggaagctgcgccgtactgtgtgtggtgaccgccttgttagctcgggaccctttaccgtcgtggttccaggcactgcctgcagccacaacatgcgaaacaccagctcactgctcaggtcccgcgtaggcctgccacatcccggtgagctcatggcttgcgcctgccccgctctaagggcgcggtgacctgggtcgtaccggtcgcccccggcagacagaacgatctacttgcagacgtttcaatcagcggccgaagctcacgcgc

SEQ ID NO: 38238 - DNA, 514 bp, Zea mays
  Clone ID: MRT4577_134876C.1
aacacacacaagggtcgggtggactaatcttgattgcacgcgtacggaaaccatggaaggccagagcatccaatgtgagccggctgaacacctcacctaacaagagtctgatctaataaaatcttcgcccctggaccgctagcgggcgtggacaaccacaccataactaacacaccaccctgatgaaggatagaagcacggacactaacctgcgacgccggcactcaccacatctctcgcgcacgtagtccttacaacaccaacacgtaaagccccgcttgcgagcactctctgccggagcccacaccgaagcaccggcaacccgcgcacgtgtacatccatgcacagaacctcgttcagcgcgaacttgtagggcgacactaacgcatgaacacccaatcgacggaatgctgccgacgaaccagaagtagccacttaacaggaataacccgaccagcaacacggatacgagggacatgcccgcgaagtgcctctgatcgaacgaactcacgaa

SEQ ID NO: 38239 - DNA, 300 bp, Zea mays
  Clone ID: MRT4577_134877C.1
gacggcgcatgcacgcgcacgcaagctctgatctctctatagagggcgccctcttttttttttttttattaatatctacctgatctcattattgctttgcacaatggtaatcacagaccggggattctgacaccttgacacaaacttcttcctttgttttttttcttgtagggggttgttctgacaagggttgactcctgcccaccccctgccgatcaaggtgaaacctttggacagaataatccaggatgtggccccaggtacaaaaactaacgtttcattgctactgggtactacaca

SEQ ID NO: 38240 - DNA, 363 bp, Zea mays
  unsure (1)..(363): unsure at all n locations
  Clone ID: MRT4577_134878C.1
gtgcatgcgacgctcatagttctcttctatagtcgcccaccttataattcaacttcactcgcgcccgctcgttttacaaacccgtcgtgacttgggnnaaaaccctgtgtcgttaccccaacttcccctcgcctcctgcagcacaaatcccccttttcgcgcaggctgggcgnntaatagcgaaaaaggggcccgcaccggatccgcccttttcccaaccagtntngcgcagcctngaatggtctgaatgggggacgcgccccctgtagcggcgccatttaagnncgcggcgggctcgtggtngnngttacgcgccagcngnntgaccgtcttacatcttgcnctnagcgcccttttagcgcc

SEQ ID NO: 38241 - DNA, 390 bp, Zea mays
  Clone ID: MRT4577_134879C.1
aacccacggggggctttggtttggaaccaacctagcaggaaaaaaacccaattggggggtccgggggcattggttggaaaaaaaagtttttttacggggggccattaaaaaggctttttatgggcattctaaggtccaaggacaatttatcaggccagggggtatttaacaggaaattccggaaggacaaaaaaaaactaacccccttttaaaaaattggggggggggtaggtcatctttgaaccaaaaggcgacaaaaaaaaaagaacgaagggggtttttgaaagaagcaaccaaacaaaatgggccccctatttgggggaggccctcgaggcaacccaaaaacagggggggctcccattgcataaacgggggggaccccgggcctac

SEQ ID NO: 38242 - DNA, 349 bp, Zea mays
  Clone ID: MRT4577_134880C.1
gaggaagcaaggatacattagggtacggggtattacacaaaaaaagaaaggggggccaaaggacaaacaagccaacgccaacactaaagggggaaaaattatttgccagctttttccaaaaaaaaaaaaaccccgagggccttaaaaaaggatccaacggcatgggctcaaaaccatggccatccaagaaaaccggaaggacacccaccctttttatttatgaaattatcaccccaagccacccaatggccccccccacaaacaaatatatatggatggaaaaaaaaatggaaaggccaggggcaatctcacggaaacactttgaagggaacacgagctccaaaatctt

SEQ ID NO: 38243 - DNA, 800 bp, Zea mays
  unsure (1)..(800): unsure at all n locations
  Clone ID: MRT4577_134881C.1
gccggccgggttggaagacagcagccaagttggagggagacccaaggcagacggcaacgaggcagtcgcaaaggaaaggagggagctttgctgggctggagtggagtggctcaccgcctgagtgcctgaccgactgagccaggggggcattcgggcgtcccaccccgcgcgggggagagagagagagagaggagaaaaagcggcgcctcatcacggtcgcccgcctgctcggcctcttcttctccctctccttcctgtctctgcgtcgcgttgcggttgtgcgcacctggtcgttctcggtttcctccccagccggtcctctcgggctccgttttccttccgggccgctcttggcgccttgctctccggcctcttccttgccggccacgcccttcctgcgcattgcttctctgatccccgccgggccgctcctgagcgcggccgcttcgcgttcccttgattgactccactcgctgacttgtatgcgtccgtctcggcggcggcggttggtgctgtgagcgactcgcggcgggacgagggattccgtcgcgctcaggcgccctcaggagccggcggcatatggtgcatggagggggtgaggaggacagctccgggctcccgtggtgcagcgtccgccgccgccgccgcanaagaatacgggtgggtgcgctgcccccagtgcgacaaacttttgccgggagctgcccattactccgtctacgtcctgcngcgggttgcggcgccacgctccaagcaaagaagagctcaggatctgatacttcttcagatagtctgatact

SEQ ID NO: 38244 - DNA, 515 bp, Zea mays
  unsure (1)..(515): unsure at all n locations
  Clone ID: MRT4577_134882C.1
ggggggggggggtggttnaggaatggaaagttttaaaaaaattttntggaggattaaaaggagatgttnaaaattngtttnatactgataacgtanttagagagagtaanggacacttgttgaaataggtggnnnaagaaatnntgaaggtattttgggtttagagaagtnatntgnggatatttgtgacgattacacgcgaactgatgaaaatttttgtttgatactaataagggagttagacaaggaatgnagagtggtagaaataantgggggaaaacatggtgaagatattttgggtttagagaagtgtatntggagatatttgtgacggattagatgtaaagtgattaaaaaatgtttgatggtaataaggnaattgagacaagggggggaaatacatgttgtaaatttaatatttggttntaagagaagtagatttaaaggatagttgagacatgggagttattggagaaatttggtggtttttggatttagatgaaatttgttggaag

SEQ ID NO: 38245 - DNA, 504 bp, Zea mays
  Clone ID: MRT4577_134883C.1
agtacaaaactcataacgcatgtgtgcgctcacatttgctgttccataaaaaaggtaaggcctaatagcctcacggctggaacgaatgcgatcctacttgatgaccaggccaacattgccatcatatgatcacttgctcacgccacagctgcacggatgtcaaccagacgggacattttaagcttccacgacgcaaccaccatgcatgcgcaccgccacacagatagatcattgattcttggcgtgcgtcttggccaccttgggtacagtggggtccttgcttatacacacctcttgctgactgcgacagccaccgcctgtctcatgtgactggcagtggatcgaccactaggaggatactgacaaaagggctacaccaccatgggcttagagggaaccatcttcactcataccagcatgaccgatactgacaaacttgggctccttctgcagctgcttggcggatcgggtatcaatcttggtaacgagctcagcacacttgac

SEQ ID NO: 38246 - DNA, 289 bp, Zea mays
  Clone ID: MRT4577_134884C.1
gcaaatcttcgtgaagacacttactttcattaccatcacccttgaggtataatcctcgcacacgattcataacgtcaatggcatgatccacaacaaggagagcattacaccaaaccaacagttgctgatctttatccacaatcatctgcaagatggtaataccttgactaactacaacatacataaagagagcacatctacatctacttctactcctcagagatatgtatcacatgttctgtgaatacatactacttcaacaccatcaccatcgatgtaatatcatacc

SEQ ID NO: 38247 - DNA, 394 bp, Zea mays
  Clone ID: MRT4577_134885C.1
cctactgccacacattttccacacacagacgagcggttcccacagccaagtgtgtgtactagaaaccagttatctcgggcgcaagcaggcagccatcatgtcggacgagaagcaccaccacttctccagccaccacaagacggacgaggagcagcccgccggggagcaagggtactccgagaccgaggtggccaccgccaccggtgagggcgagcacgagaggtacaagaaggaggataaggcgcacaagcacaagcagcacctcggggagggcggtgccatcgacgtcggcgccttcgcactctacgagaagtactttttttctaaggaccccgagcaccctcacaggaccaaggatcacggaggaggtcgctgccgcggcgtacgccatccc

SEQ ID NO: 38248 - DNA, 376 bp, Zea mays
  Clone ID: MRT4577_134886C.1
ggcccaaaacaacataaaaggcccccgcccggggggccggtggggggggggaatttttttttttgggggccgttcctaggggaccccgcccgggacccaagctgggggaaaccaggggcaaaggggttcccggggggaaatggttaccccctcacatttccccccaaaatacgggccggaagcaaaagggggaaacccgggggggcccaaggggggggccaacccccattaatggggggggccccccggcccgttttccaggggggaaaccgggggggcccgttgttttaaggaaccgccccccccccggggagggggggtttgcgtatggggcccttttccgcttcctggttcattgacccggtgggcctggggc

SEQ ID NO: 38249 - DNA, 527 bp, Zea mays
  Clone ID: MRT4577_134887C.1
tcgagcggccgcccgggcaggtaaaaaaaaaaaaaaaaaaaaaaaaaaaaaaaaaaaaaaaaaaaaaaaaaaaaaaaaaaaaaaaaaaaaaaaaaaaaaaaaaaaaaaaaaaaaaaaaaaaaaaaaatttaaaattaaaaattaatcaatttttatcaaaaattttcaaattatgccttatatttgtggcttttaaattcaacttttttgagggtttattttatttttttatgagaaaacttttacaatttcttgaacttaatttaaatgacccctatcctattaaaaccatttggttaaaaaacaaattggcctttattaaaataccttttaaaggaaaaaactttttttatttaaaattaactccctttgccctttccaatttttccccccctttttttgggaaaataaacaccttatggggtggctttttaaaccggctagatccttatattttcaattggttccccttctttttggcaaatttctttggctttttttttaaaatttttaacctggtttttttt

SEQ ID NO: 38250 - DNA, 490 bp, Zea mays
  unsure (1)..(490): unsure at all n locations
  Clone ID: MRT4577_134888C.1
ttttttttttttttnnnnnnnnnaaagcgcacttccactgctgtgactgggatcaagaatcggttgatgcacattgagaaacaagcaatctattcaactctggaagctgttttcatttatactcgtagacctctaagtactcgtagtaccaattgaatcacatcccgattggcacttcaggtctcagtgctttttacttgctgctgcatcttcccgttccatgtttgcaacaaattctcggatgaaagcctcttcgtcttttgaagagctgttgatggctggagcagggatttgggacttgtcggttttagagccgcctcgcatagccagagcgactccggtgccaaacaccgctaaggttcctaccgccaggtgctcgttgagaactcgctttccaagaatgacgtaggacatattgagtagaaggatgaagagatgccgctgattggtgatggcttggtttgagctcggtgtcccaaggtgtgtgtgt

SEQ ID NO: 38251 - DNA, 330 bp, Zea mays
  Clone ID: MRT4577_134889C.1
ggaaatcaaaatttctagtttggggattggtcaaatttggctctgaaatctccttggggaaaacattttagagacccttctggttaagatttcaatcaccccatgtcacgtgcgaataaatgagcgaaggaaaacagaagtggaaattccatgcccctgggctttgctcaaatttgctttaaataaacaaggtagccaacaacaaccgttcacctaatttccagacggggaataacaatcaattgtgctaggaaatagcaagattttattcattttgcaagtttgttctttcaccgagagaattgaggtctcttaaagggtcaaaccacc

SEQ ID NO: 38252 - DNA, 1146 bp, Zea mays
  Clone ID: MRT4577_13488C.1
cattgggacctcgagcgggccgggcgaggccggccggcagcagcacctgcccggtcagaatcattgattgatgtgtttgttggattagtcaagatctctcactgattcgcagcatccccctctgtttctccatgatctgttccttctcctggctgttctccagttgacttgctccatcgcctctccacgactagaggagggaggaggggagctctgatcgattcacccaagatgtctgaggtggtggcgatggcggggcaggcctacatgaagcagctgcaggcccacccgctgcgcaccaaggctatcacctccggcgtcctggccggctgcagcgacgccgtcgctcagaagatctccggtgtttccaagctccaactcaggaggctcctcctcatcgcgctatatggatttgcatacgcgggaccgtttggacatttcctccacaagctcatggataggtttttcaagggaaagaaaggaaaagaaactacagccaagaaggtcttagtagagcagctgaccgcatctccatggaacaacatgatgtttatgatgtattttggtctggtggttgaagggagaccatttggacaagtaaagaacaaggtgaagaaggattatgcatctgtccaactcacagcttggaggttctggccaattgtaagttggatcaactatgagtacatgccactccagctccgagttcttttccacagctttgtcgcctcctgctgggcggtgtttttgaacctcaaggcagcaagatcgatcgcaaatactaagaaggcatagaggcagctatctataccaggagcggaagtcatgatttgagttgaaaaccagtatatattctagacttccgttgtaacacctgaattcttttccagcaggagaggaaccgagtcgtattgtttgccatgaaaagtttgctccttttcatttccatagctgctgttctctcttcatttcgaaaaaaaatgttgtttgctcgcctcgtcgaagtgatcacgtgtacttctagttctagtggaacttagtttgtgcagaaagaatatgtactcgctaacttgtatctaaagcatatatgtttttcacatcgaataactggattgcattcagacaaaaaaaaaaaagaaaaaaaaa

SEQ ID NO: 38253 - DNA, 415 bp, Zea mays
  Clone ID: MRT4577_134890C.1
gaaggaccgagtgctcatgccccagtatcttcagggtctgacagaatcagcggtgtgttatcaacagatgcatctgaacctgatcatttgtctgagtgcataccatcacaggatacatccatgatttcacagcttgacagcaggaaagctcatctgagtgctctgcaacaggaaagggttgagaaagtaaaccaaggtccggaagatatctctgcaaatattgggccagtggaaaaggaacatgttcatggggatctgactttgcaatctgctagtgccgtactctctattagctgcaatggttctaatcaaggaactaaatctgaaaccaatcttcaaccatggactgctacagatgataggatggcttttggagagcagaatgcggaaaagtctcacttagaactcattggta

SEQ ID NO: 38254 - DNA, 333 bp, Zea mays
  Clone ID: MRT4577_134891C.1
ccgggtcgatcacgcgtccgcttgaattaaaaaaaaaaaaaaaaaaggaaaagaggagaaaaaaaaaaaaaaaaaaaaaagaagggaggaaaaaaaaaaaaaaaaaaaaaaaaaaaaaaaaaaaaaaaaaaaaaaaaaaaaaaaaaaaagaaaacaaaaaaaaaaaaaaaagagggggcgttttacaacgaactcactacccaaagcaagtaaggtaccaaactaaaaagcctgggaaaaaatccccaaaaaaaaaaagggcggaacagcgaaaaagcccggaccgatggaaaaaaccaacagttacccaaactaaaaggctaatgggacacc

SEQ ID NO: 38255 - DNA, 385 bp, Zea mays
  Clone ID: MRT4577_134892C.1
gcaacgcgttggctctataactcacacacactcgcgagcgaatgcaacgaagaagaggaggaggatgatgcatggacaagtgcaggttggtgacccacgagcactcgtcaaggtactatgggtgcatgatgaaactccgactacgatgacagcttcctgagggccctggcatgccggcaagctgtacagcttaaacaggtcgatcgtgacgacacgtacctggtactgaatcaggggtgccatctgtccgaagtacaacgtactcgacacacagggactgatcaagaccactgtcagaagaatcatcgagtggctcaaatgcaaggtttacgacgacctctactgtggactatcaactgatctgattaacgcgagactactgaat

SEQ ID NO: 38256 - DNA, 480 bp, Zea mays
  Clone ID: MRT4577_134893C.1
cccacgcgtccgcggacgcgtggataaagcactctgcaatattttagtacagaaatgttccagggctggtgagacatcagttcttacttgcattcttcagtacatgaaggagcatttcattgtccttcgccgacctatttttttggaagcactacaagctctaaaagctagtggtgatagtgatgaacttcttcgggaagtaaaccctcacctttcatatgaaggcattgagaatgatccaatattgtctgatcaaggctatcttactgacaggagtattattctctaccttatgtctgcaaacaaatggtctgctatagaacaaatggttaatcaaatggccccaaagaatgtgaaaatggagacccatatcctgtctgatgttattgaggccagctgtgccgaccgtaaaccgtcttgtgggctcgcagttatgcgttatgggttaggagtaggctgtgaacttggtaggtctgcata

SEQ ID NO: 38257 - DNA, 3258 bp, Zea mays
  Clone ID: MRT4577_134894C.1
atggtggcgaggtcggatgtgggcggcggtgggagcagcaatgcgagtggggtggtggagatcgacgaggacctgcacagcaggcagctcgctgtgtacggaagggagacaatgcggcagctctttgcctcgaacgtgctcatctccggccttaacgggctaggggccgagatcgcaaagaatcttgctctagctggtgttaaatctgttaccctacatgatactggaaatgtggaaatgtgggacctatcaggcaatttctttctatctgaggatgacatcgggaagaacagggctgttgcttgtgttgcaaagcttcaagaacttaacaatgctgttctcatatataccctaacagaagaattgaccactgagcaccttccaaagttcaaagtggttgttttcactgacattagtttggacaaggcatttgagttcgatgattattgtcgtaatcagcagcctccaatttcctttatcaagacagaagtccgtggactttttggtagtgtgttttgtgactttgggcctgaattcagtgttcttgatgtcgacggtgaagatgcacgtactggcataattgcatccatctccatcaccactgacaatcgtacaatggtgtcctgtgttgatgatgagcgccttgattttcaggatggtgatcttgttgttttctcagaggtccagggtatgacagaactgaatgatggcaagccaaggacagtaatgtgcgcaggaccattttccttttgcatcgaggatacaagtaactttggcacttatacaaaaggtggaattgttacacaggtgaaagaacggaagatcttgaagtttaagagtttgagagattcgattagagaacctgggaatttccctctaagtgattgttcaaagtttactcgccctcctctgcttcattttgcatttatagctttggataaatttaggaaagagtttggacgcttccctggtgttgcttgtggtctggatgcccaaaggtttgtggagttcactgcttctatcaatgaagccacaattgattacaagatagaagatgagcttgatgagaatttgttgcggctttttgctagtggttctaaagctgtcctgaacccaatggctactatgtttggtggaattgtcggtcaagaagctgtgaaggcatgttctgggaaatttcatccactgtaccggttcttctactttgattcatccgaatctctgccaactcaccaattggaccctaaagacctgaagccattgaatagtcggaatgatgctcagggtggtgtttttggttctaagctccagaaacagctgcgggatggatgtcgtcgttgcttgtgaggtggtcctcgggaaagatgtttcctacacctcttatctccatttatttccggtaggttgcgctgtggaaaaagttcaatgggaaaaaagggggtcccgtaaaaaagaaatttgggtagattcataagttctgtcaataatattctctctcttgcaacatcaaatcggtagcgaagtgctcccagctggagttgcttgtggtgggtctccgttgcggttgtgaaccagtgcttggggtccatgctgttgcagtccaactatttataggtgtgcaatgttatgtggataatttttataattgatacttttgatgtttagataaagatgaagatactaattttcacatggatttaatagctgggcttgcaaacatgcgcgcaaggaattacagcattcctgaggttgacaagttgaaggctaagttcatcgccggaaggatcatcccagccatcgcaacttcaacagccatggccacaggtctagtgtgcctggagctgtacaaggtcattgctggggagcaccccatggaggactaccgcaacacattcgccaacctagctatacctctgctgtctatggcggagccggttggggccaagctgatgaagcatcaagatatgaggtggaccgtatgggaccggtggactatcaggggcaacctgactgtggcggaactgctgcagtggttcagtgacaagggcctcagcgcctacagcatgtcctgcggcacctgtctgctgtacaacagcatgttcgcgaggcacaaggagaggctgcagaggaaggtggttgatgtcgccagggaggtggccaaggtggaggttcctgaataccggaggcacatagatgtggtggtagcatgcgaggatgacgatgggaatgacattgacattcctctagtctcggtgtacttccgatagtctccctctatctgcacatacaaagtcaagtctattatgtcgtccaagagaacacattcggtcatctggaacgataaacagacgatggactgcattcaatcaaattcccatgccaagggctaatttgggaaaataaaataaagacaaaaaagctggtcttgcaaatatgcgtgccaggaactatggcatccaagaggttgacaagctgaaggcaaaaattattgcaggaaggatcatcccagccattgcaacttcaactgccatggcgacaggactagtgtgccttgagctttacaaagttctggccagagggcacccaattgaagactaccgcaatacatttgctaacctggccctaccgatgctcaccacatctgaacctcttccccccactgtgatcaagcatggagatatgacgtggaccgtatgggatcggtggtctatcgagggagacatcacagttgcagagctcctgaagtggttaagcgacaagggcctgagtgcgtacagtgtctcctgcggcacatcgttgctctacaacataatgttcacaaggcacaaggatcgactgagcaagaagatcagagacgtagccaaggaggtggcaaaggtggacattccagaatacaggaagcatctggatgtcgtcgttgcttgtgaggatgacaacgggaaagatgtcgacatccctcttatctccatttatttccggtaggttgcactgtggaaagagttgaatgggaaaaaagagggtcccgtgaaaaagagatttgggtagattcataagttctgtcaataatattctctctcttgtaactagaaatcggtagcgaagtgatcacagctggagttgcttgtggtgcgtctccttacggttgtgtacgagtgcttggggtcctgctgttgcatgccaactatttgcaggtgtgcaatgtgatgtggatatttttgatgaatgattcttcggagcttcagaatatatttacgcagc

SEQ ID NO: 38258 - DNA, 218 bp, Zea mays
  unsure (1)..(218): unsure at all n locations
  Clone ID: MRT4577_134895C.1
cgcgcccgngnacggnacgccgacactggagcttttgtagctcatcaagatcagctgctacgggggggggccgtgcgacccggacgcccgccactaactcgcgggcgacgcggaagaaacccaccgggggggcacgtgcatccaggaggccatgccggaccacataaacgccacgggaggtccggaaggtcaacagaccgtgcatgtggaacatgacc

SEQ ID NO: 38259 - DNA, 279 bp, Zea mays
  Clone ID: MRT4577_134896C.1
caaaaagataatatatgatgggcaaagtacacgcacgaaagttagaaaagttcaccgaggacaatatggcaagcttacacatccaagccgcctcagatgatgaaaaaccaccgtacagcgtaaaaactaaaaagagactgtgtactaccacatatcatttagtaaaattcatgactaggaggaccaaaattttattagttttacacacttgccatattcagcctggtgcccttattctgctggctcaccagtaggctgttaaagctttttttgaaggag

SEQ ID NO: 38260 - DNA, 621 bp, Zea mays
  Clone ID: MRT4577_134897C.1
tttttttttttttttttttttttttttttttttttttttttttttttttttttttttttttttttttttttttttttaaaaaaagggccaggatcttttaaaatttttcccccaaaaacttccccccaaattttctcccaattaaaagggggtttgccagggggggccccctttaaaaatcagacgacgggcaaacaaaatagggaaaaccccccctttaaaaaaccggggaaaaccaacccttgaaaaaaaaattaaacccttcccttgttacaggggggaccataacccggtatttgggggggcaaaaccggtggccaaaaaacaccccttccccggccaaaaaaaggggcccttgacttaaaataaaacccggtaatgacaaggggaagtctcctgcctgccccaacttaaaaaaagggggaaattttttttaccccacaagggtgtggtttgggggaccctgatccctttttaggcccccaattgggttttaaaacagccccccccccaaaaaaaaaaggggtctttaaacattaaaaaataaaacccccttaaaaaaacaggcttttgacggggctttaacgtaaaaaagggctcccgggggttgcgttttatttt

SEQ ID NO: 38261 - DNA, 827 bp, Zea mays
  Clone ID: MRT4577_134898C.1
cctcttccccccatccgccgccgccgcgcctcctcctcgcccaaggtaggagcttgtgaaagttctctaaggctgagaagatggttctgaagaccgagctctgccgttttagcggccagaagatttacccagggaagggtatcaggttcattcgttcggattcgcaggttttcctctttgccaactcaaaatgcaagcgctacttccacaaccgcctgaagcctgcaaagctttgctggacagcaatgtacaggaagcagcacaagaaggacatccatgctgaggctgccaagaagaggcgccgcaccaccaagaagccgtactcacggtcgattgttggtgccactctggaagttatccagaagaagagggctgagaagcctgaagtccgtgatgctgcccgagaagccgctctccgtgagatcaaggagcggatcaagaagaccaaggatgagaagaaggccaagaaggcagaggtgaccaagtcccagaagtcacaggggggcaagggcgccgtgcagaagggttccaagggcccaaagattggcggtggcggcgggaagcgttgaaagtgcgttgaaagtcgattacgccatagacatagagttgtgctgcctagccttgtttcctatcctactatcatagacctttgtcaagttattaccccgccctcttgaatttgcaccttatctctgaggctgaatggtgttaacgttttggattgtcttgatgagtttatttataaaaaaaattcagggctcctcctccactcaagagatctgagccgaaaaatggctcctcttcctcctctgcttctgtcctgcatc

SEQ ID NO: 38262 - DNA, 451 bp, Zea mays
  Clone ID: MRT4577_134899C.1
ccggccggggactcgctttgtcgtcgtcgtcgtctataatcctttcaagcgaccctcggcggttcggcaccgggctcttgccgccgcctatccaggatcctccggtccggcggagcgaaaagtcccgccggaaagagacgtgcgccagcgccgcgcggctagcttcatcgttacgccgcacagagatgcatgcatgggcgattgccggccgggccctgcaaattattggaggattattggacacactgctcctcacttgagagctcacaatcaatcaatcaaagccaggagagtttgatgatgcttatagtgtgttggtaggaaacgattgtataataagtggatcatacacatggaacgagtgaaagacatataaatttttttaaatgtttctatttaataccttattaataatcgctctatgaaaaaaaaaaaaaaaaaatttgcggcc

SEQ ID NO: 38263 - DNA, 188 bp, Zea mays
  Clone ID: MRT4577_13489C.1
ggggtccatcgcacaggggaaaacacaaaatccattttttctacccttcttctcttattttcaagtacatcttgaccgcctacgtgttaaagccggacacctatgcgtttggccttgcacatgcttcaccacctaatcatacagtgtcgctgtcacgtcacaaactgcacgattactcaacggtggac

SEQ ID NO: 38264 - DNA, 521 bp, Zea mays
  Clone ID: MRT4577_1348C.1
cccacgcgtccggctggtgtcctatcagatgcctatgagaccgtggaagagctcagaggtatacctacgacactggaaagctggcagcctgtgtatcagagaagaaaattcgagctctcttatcccaaactacctggccatctaaaggattgcttaagatattttagtatgtttccaaaaggttacgagatcagtgcagaacgcttagtttgggcgtggatagctcaaggtttcgtaaaggagactcagggacagaatgatttggagaaagtcggaaagaagtaccttattgaccttataagcagaaagatgatcgaagcagtggaggttcatgctgatggtatggccctctcatgccgtgcgtacgatttgttgcatggcttgatcgtttcattgtcaacagaagaaaaattcgttgaaattctaaatgactcgcagtcgcatgagagagcttcgaatccgaatacagaagttcaccggctgtccatccaaatccagagaaataatatgctacaccccct

SEQ ID NO: 38265 - DNA, 734 bp, Zea mays
  Clone ID: MRT4577_134900C.1
gtcgcggacacgcacgccaacgcctcatccacctgtgctgtgacctcatatttgtcctccgttccttcgtctcatgatctctgcgcctctgcggctgtcggcgccgagggctgccgtcgggggatcgttcctgctcggcaagtccaagtccaagcccagcaggatccgctgcgccgcgggggtggggaggggcgccgccgccgccacactgtacgagatcctgggcctgcgcgccggcgcgacgggccgggagatcaaggccgcgtaccggcgcctggcgcgggagcggcacccggacgtggcgaccgcgcccggggccgctgccgagttcgtccgcctgcacgacgcctatgccacgctctccgacccggacagccgcgcgcgctacgaccgcagcgccgtagccgcggtggccgtggcgcagcgcccctggaggagcggcgtcggcgtctatggccggcccctccgcacatgggagacggaccagtgctgatagcagttgttgtttatatagactagttagacggacctcctgcggtcctgccgctagccatacggccatggcggctcaccttggttttttttttctgtaccggtggccatccatgtaccctgatttcgttctcctcctacttgcacttgtacgcgtgcgatcttgagaagccattgcgaacaaatcgaccagcttataggtgattaatgattaaattgtctctgatcctttctatatatcc

SEQ ID NO: 38266 - DNA, 310 bp, Zea mays
  Clone ID: MRT4577_134901C.1
gaatatcaagggggtcggggagtaacataaaggcgttttggaaaaaactcgcaccactcaccacttaacctataccaagatgttttttatgggcatgagctcctaacaacatttttggcatattataatatggatgaacaggtatcccagtacaaatttgatgtgttgaactcattccgtgggccaaacttcctaaccgatccttgaaccttggtgcaagacgcaatgccgcaactccggaactactcattgacggtcttttgggtcagggggtcctcaattagagggtctttcgacacaaaaccctctc

SEQ ID NO: 38267 - DNA, 253 bp, Zea mays
  Clone ID: MRT4577_134902C.1
aaaaaaaaggggaattaaagcattacagtttgttgaaaaccctttttaaaacccaaaagccccaaaacctggggtataaaccccttgggaggggggctttatatccttgccgataaaaaaaaaactgggcttttcaaaatgttctaagcccccaatttaaaaaattttttccttgggaaaaacctgggcaaaaaaacccccccccctttgctcccaaataaagccgaagtttaaccccttccccttgggcagg

SEQ ID NO: 38268 - DNA, 617 bp, Zea mays
  Clone ID: MRT4577_134903C.1
actcgatttccctgcctttctctctcggtgtgcagacctgctacaaccgatcttcttcctcccccatccgagctccatctaggacaacagcttctccgccctcacgccagtagcagggatctcctccctctcccatccatgggcgcgcaccccctccctgcgagctctctgcttggctcccctgctcccatggtgtccaacgccttcctctgtcctaggcgcagggcgccactgcggcctctccgaactccccatggcgtcgagcttctccgtcgcgcccctgtgacgtgcccagcacgtccgcatccatccctgtgtaggcgcccctttcccccagcgggattcctcctcttctccccaagacgcctggtcttctccccacctccgcccaggcaacaggagatcgactccatgcttgcccctagccgaactctcctacagaagctccccacaacgccttcttctgcaaacgcagcaagcagcagacaccctcctcctccctggtcgggctcccatggcgatgttgccccctttggtgtacctgcggcagttccaaaccagtcgtcggtgctccctgcttcaaccctgcacgacgctcactccctggctctcatcct

SEQ ID NO: 38269 - DNA, 331 bp, Zea mays
  Clone ID: MRT4577_134904C.1
gtaccactccaggccggccgggaacctcaccgcaaagcggggctaagcgctgagagatctcggagacatatcgagagctagagtcccaactagtctaggccgctgctgttggcggagagaactattctgcgcggccctggcgagcagcgagggaccggcgactgggatcgaactggcaccacctactcgggcataagcgatacgaagcgcgaccgctggaagatatctcctacgctcaggtgatccgaacctcgccgttactatgatacctgcaccgattccgaccttatgaaaggggagggtttcgtcatccatgacgctgtgagcatca

SEQ ID NO: 38270 - DNA, 129 bp, Zea mays
  Clone ID: MRT4577_134905C.1
cccacgcgtccgcggacgcattgacggccgcgtactacgcatataacttcactcaccgggtcgtgcttacataaccgcgagggacaacaagatccatattcaagctacacagaacgtctccacagctca

SEQ ID NO: 38271 - DNA, 132 bp, Zea mays
  Clone ID: MRT4577_134906C.1
gattgacgacgaatcgtagatccgatcgacgaaccagaagcacaacgacgaagctctcatcgaaccggttgcggcggtgtcccgagtcgcctcggaagataaacaaatggggataaattcctcgcaaaagtt

SEQ ID NO: 38272 - DNA, 204 bp, Zea mays
  Clone ID: MRT4577_134907C.1
tctttagcagtggtaacaacgcagagtacttttttttttttttttttttttttttgttttttttttttttttttttttttttatctctgaacggactttccaaattatacaattaaacttcatgatccgcccttcctcgcaggattcaggggcaaatttactttcacagaacactcgggggggggaccctgcgtttttctaccg

SEQ ID NO: 38273 - DNA, 319 bp, Zea mays
  unsure (1)..(319): unsure at all n locations
  Clone ID: MRT4577_134908C.1
tttatatattaacaaannggttctttgtgggaggactcccggcgtttctctctgccgcgattgcacaactgatgctatctatgtaccacggtgaacacacttaaatttatagatatgtctcatatcataggagggggagaaaaaggcggtgaggaacatagcataaaaagaaaggtctacatgtgacgtggagccgggtgccggagccggaacggatagatttaacttatggattgatataggcaggagaaacatcctttggaacgtttgtctggtttttcacccttcagacgagtcacgctgctcacggcaagcaagg

SEQ ID NO: 38274 - DNA, 275 bp, Zea mays
  Clone ID: MRT4577_134909C.1
ttgctgcaactgacgatgaccagcaccggcgcatcgtccgcggcgcggcggaagatgatcgacttggcgatctgcgccacctcgcaccccagccccgccgcggcttccgccgaggtcttgccggtctgcggcaggaccaacaccggcttgtcgtggcccagatcggccagcaggccggcgacgcgctgggcggactcgggaagatcggctggcgtggctacggacatccggcgactccgttcacgacctgtgagatcaggttaccacttgatcag

SEQ ID NO: 38275 - DNA, 660 bp, Zea mays
  Clone ID: MRT4577_13490C.1
tttggtctgatttatgtgcttggctcagcctcagactgtgagtggttgcctgttcctcggcacgcttccttgcgccttcgatcgcggacgctctggacgccgattcgattgctagaactgagaagggggttcttcacgaggacactaagaaagtcaccaaggtcgtccttgagggcttatctaagggcactacgggccacgcggaagaggactcggccctcattgatccttccggcgatagtaggctgagtactcctgatgttaaggttgggactgtctcgaatgattatcctactaagtctgctctgcggcatgataatgagcggggtcatagtaattgtgctgctgattcgacttgttatacgcctaagatttagcaggtcagcagagagacagaccctcgttctttcactgcgggctgcttttaacggttcccggctgtagattactcccgtcgtccgctcacgtcgagaacaaacgcgaatggcgttttcggatgtcggacttacgtcggccccggatatgtcgctcccccgcgcccaatccactcgtcgttgcttcgcaatgaacctgtaagccccagcctccccgcgtcccgccaaagaacaaataacgaggccctagccccggcggttttaaaaaaaaaaaaaaagggtggtt

SEQ ID NO: 38276 - DNA, 553 bp, Zea mays
  Clone ID: MRT4577_134910C.1
gctacgtgtctcaggaagatgttgacatggccatccgtgtcttgcttgactcttttatttcgactcagaaattcggtgtgcagaaagcactccaaaagaatttccggaagtacatgacattcaagaaggactacaacgagctgctcctgctgctcctgcgcacactggtcaaggacgccgtgcacttcgaagaaatcatggcaggatcagcctcacgccttactcacgtcgaggtcaaattggaggacctgaggaacaaggcccaagaatacgagatctacgatctgaagcccttcttctccagcgcgtgcttcagggacaacggcttcgttctggatgaggggcgtgggatcattaggcatccactggcggagtaactgatcatcaggcattagggatgaagagtgatgtgggatgaagagtgatgatcagatctgacctcatttgttataggcatacaattgacacttggctggtcgccttctggatttagtatctgttgtgtcttgtttgagagtttcgtactagaggcacttgctaaaaattcgccgtg

SEQ ID NO: 38277 - DNA, 488 bp, Zea mays
  unsure (1)..(488): unsure at all n locations
  Clone ID: MRT4577_134911C.1
cgccgtcattcggctcgaggaagtatatatgagaatacagacttgggccggcgacatggttgaagctcgtagttttgaattgttggcataatgatttgccaatggattcattgagcgagatggcacagcaaggtgagtttctgattggactcctcaatgaactagcatgttgggctttggcacctggagcagagtcattcttcaggtcccttctgttaggaaggatttggatgcgctccttgtttgagtgctccaaatctgaaaaccaagcaggtaagaaaatgtaaaggcattggtccaatcagtaattccaagcatatttagggcacatgcatttaggagtccaagtgtccaacattgctagatcaataagaaataaataaggttggttgattcagtttttttcccaatcatcaatctttattcgtgctgcatccaggcacgccggcccacgtcngactctcacatgcatgcgccccgcatatgct

SEQ ID NO: 38278 - DNA, 2403 bp, Zea mays
  Clone ID: MRT4577_134912C.1
cccttgtgtccacagacgcgtccgcaaaggatgacattcaagaaggactacaacgagctgatcctgctgctcctggaaacactgttctaggacgacgtccgcttcgaagcatgcttgaaggcatccgagatacaacgaagtcatacttcggaatgatctgattgactgagctcacaagggagaggagattgaggtcactgggatatacacaaataattttgacctgtctttgaatacaaagaagggcttccctgtttttgccacagtggttgagagcaaactatgatggcaaaaaaacagtcttctcctgctcgttacacagggacaacggcttccttctggatgatgggcgtgttgtcatcaggcatccactgacggaagaacagattatcaaatcaattgcaccatcccatttacgggcatgatgatatcaagactgccattgcacttgctatgtttggtggaccagagaagaatgtgaagggaaaacatcgccgctggtccgacatcaatgtcctcctcctgggtgatccaggcactgcaaaatcacagtttctcaagtatgtggagaaaacaggacacagagcagtatatacaactggaaaaggagcctctgctgttggtcttactgctgcagttcacaaagatccagtaacacgagaatggacacttgagggaggtgcactagttcttgctgataggggcatttgcctcattgacgagtttgacaagatgaatgatcaagatagggtaagtattcatgaagctatggagcaacaaagtatcagtatatcaaaagcaggaatcgtcacatctcttcaagctagatgcagtgttattgctgcggcaaacccagtagggggaaggtatgattcatcaaagacattcactcagaacgtcgaattgacggatcccattatttcacgtttcgacgtcctctgtgtggttaaggatgttgtcgatccatttacagatgaaatgctcgcaaggtttgttgtagatagtcacgccagatcccagcccaagggggctaaccttgaagacagggtttcaactgatgtggatgatgatccactggctgctgcaaggcaagctgacccagatgtcctttcccaagacatgctgaagaaatacataacctatgctaagctgaatgtgtttcccaaaatacatgatgccgatctagacaagattagccatgtttatgctgaactccgccgtgaatcctctcatggccaaggggttcctattgcagtaaggcatatagagtcaatcatccggatgtcggaggcacatgcaaggatgcatctgaggagctacgtgtctcaggaagatgttgacatggccatccgtgtcttgcttgactcttttatttcgactcagaagttcggtgtgcagaaagcacttcaaaagaatttccggaagtacatgacattcaagaaggactacaacgagctgctcctgctgctcctgcgcacactggtcaaggacgccgtgcacttcgaagaaatcatggcaggatcagcctcacgtcttactcacgtcgaggtcaaattggaggacctgaggaacaaggcccaagaatacgagatctacgatctgaagccgttcttctccagcgcgtgcttcagggacaacggcttccttctggatgaagggcgtgggatcatcaggcatccactggcggagtaacaactgagaactgatcttcctcatgtctagaaccggcctttgtctgttacggccctgagatgaagagtgatgatatctgacctcatttgttataggcatacaattgacacttggctggtcgccttttggatttagtatctgttgtgtcttgtttgagagtttcgtactatatgcacttgctgccatttaggggtgactgtatggtgtgtgaaatcattcgttaaataaaatgatcggtgtggctgcaacccccaaatagttagaaaaagaaccaaaaccgaactgcagccaaaagaccctgagggttattgaagatgatgaaggcatcagttgccatgccttagaagaagagtatgctaaacttttccatcaacccttgtctgacgaacatgtggctgccttagctgccctctttggctgttctgttcagttgcaacttattgtagatagaattgtagatcaactctccggatggaaatcatatttgatgacaagggctggcacaagagtgcaagaacattatgtgcttaatgggatgcttatgtatctttctatagttattaatatcccctcttgggctatcaagactattgataaaaatcagaataagttttctttagggcttggtattcatccccatactcatgggttgagggggattaagatgtaaattaaaccaatttacatctcatgccttgttcggttattctt

SEQ ID NO: 38279 - DNA, 570 bp, Zea mays
  Clone ID: MRT4577_134913C.1
aacgagtacaatagaccatcgggacagtcatatgttcctgtatctcttcggtgacactgccaaagttttgtttgtgatttaaaaaaaaaaaaaaaaaaaaaaaaaaaaaaaaaaaaaaaaaaaaaaaaaaaaaaaaaaaaaaaaaaaaaaaaaaaaaaaaaaaaaaaaaaaaaaaaaaaaaaaaaaaaaaaccctcccggggcggccccgaaaaggggaaatttgggaaaatttccaaaaaattgggggccgttggagcttgtttaaaaaggcccaaatggccccaattgggagttttttaaaatttaattgccctttttttaaaaactttaaaacggaaaaaacctgggttaccccaaattaaacccctttaaaaaaaatccccttttcccaatttgggttaaaaccaaaaagccccaaacagaccccctttccaaaattttccaaaccttaaatggcaaagaaacccccctttaccccccctataaaccccggggggggggggggtaaccccaagtaaacccataacattttaaaaccctttaacccccgttttttacgttattttcc

SEQ ID NO: 38280 - DNA, 329 bp, Zea mays
  Clone ID: MRT4577_134914C.1
tttttggggtttttttatttttttttggtttttttttctggtttcaaacttgcattatggattccgaggtgtcagatctgaccaaagggtcaggcatcacccaaaaaatgaaccgtgaaaaatcgcacatgtctaaaaacaacacacgtttcaagaaccaaccatatttggatgcccttctcgctgattagggcaaacgattctagccatgggccaagaacacaaatactcactggacaggcctatcttcattgtactacggaaagaccgcttcaactactatatagcgtacccagtgagaggaaagatgaccacaatggggtaggaga

SEQ ID NO: 38281 - DNA, 591 bp, Zea mays
  Clone ID: MRT4577_134915C.1
tcgaggccggccgggatctcgtgctctactccgctaccactgcatgggtgttagagatcgtgtattcctgatagtgatgaccctctgccccagccaccgagtctgctctgaccatagaatcgcctgccagtgccgaccatgctcacgcttctctagcccaccatagacagatcattcttgggagctgctggactatatgaagcttgtgccataatcgtgtctgaattcccagaagaagaataacattgaattcaattactggattctgaagaggatgatgctccagcgactgtgcatcatgtgatgctgagtcctctaacctggtgtttaatagagggatctacaactccgtgctctgcaactgatgtcgtacgttcgcgctgctcatgagggcgataggaggccgtgtgatccacctccttataagtctaagtagcccttctatacttcttattgacaatgtcctctcaagctagcacttgtttcagacttataccttcgtgatcactccgatgacataatgcaagagttttgtaacttgtcacatctgcgaagaagatctgctactgcaaaaatattccgcgtgggcga

SEQ ID NO: 38282 - DNA, 118 bp, Zea mays
  Clone ID: MRT4577_134916C.1
atacaacccaaatccagtagctgaggccttttttccagctactgttgtcccctcgtgtcatcatagcgaccagctagcacaatggactcttacccaacgcgttctcctgttctacccc

SEQ ID NO: 38283 - DNA, 197 bp, Zea mays
  Clone ID: MRT4577_134917C.1
ttaccatttaaaattatcacaaaccttctgaacactaccaataacttttcctatattacatgtatacatactctgcataccctttttacaacaccaccatcacataatatttttactcctattctacctaatatacttactaccaccttactttacttttattaactttttacttatatactaacatcaacaactta

SEQ ID NO: 38284 - DNA, 465 bp, Zea mays
  Clone ID: MRT4577_134918C.1
ggggggaaccaataagttatataaaaaaattcccaaaccttggaatgattggtttatttcggggcctggctaccccccaccaatacatttcaggggaacattacaacccatgccttgccgggagagggataccctaggggctaggcaaagctgcttgaaatgcaaatgtactaactaggtggcggccccggaggcgaaaaaccgggagccctcctcgtacgggccctcaaaataaagggcggcctcaaaccaacgcgggtacctgaccaaatccccggccacaaaatgcatgtaatcctcccccgggacaacgccgggggggataaccttcacctccccggacacaatgtacacaagctggtcgacctgccaatcccacgggatccgggaccggccacccgtgcgccacaaagaccacgttttcatgacccgaaaggcctccattcgtgcccgcgccaccttgcc

SEQ ID NO: 38285 - DNA, 581 bp, Zea mays
  Clone ID: MRT4577_134919C.1
ggaagcccggaaaagggacccctcccccaaaggggtttgggtttacacaactagggggggcccttttttacccctaaaaaaggggtttgtggcctaaaaaaggaataatccggagccaaaatttggtgagcaaaaacaaaaattcccattacgggcattacctgaacttttgccgccggttaaactcccggtggaaaaccttttttttaggggcgggggaaaactttacgttttttgaaaacccagcttgggggcttaagaccccccctgaaacaccccccccctggttttttccaacagggccatatcctgggggaaagggttttaaggccatactccttgggccatccggtcccgggattcctgaaggggcaaattcttggtgccccacattttttgggaaaattgaaggaccctgaaacattttttgcccccctgggaaaaaccaaaaagggaaattggcctgattttccccaagcccataaccggggggaccgggtttttttggaagggttgggaaactcaaaaaccccccctggtcataacttggattccaaaaaacaccaagggcctggtttttc

SEQ ID NO: 38286 - DNA, 1440 bp, Zea mays
  Clone ID: MRT4577_13491C.1
cggcctccccagccggccggccccccaccttagcccttgtcccggttccctcctccaccattcaaatctcctggcttcgtttcagttcgatttgaagcggggcggcagaggaggcagggggatcgggtccggggacgacatttggcggcatcaaccacacagcacaggcacagcgcagcaccatgacgatggagggggcggtttccgacaacaccaagggcctggcgctcgccgtcgcctccagcgccttcatcggcgccagcttcatcctcaagaagatcggcctcctgcgagcagccaagtgcggcgaccgcgcaggtggcggaggacacacttacctctccgagcctctatggtgggcgggaatgaccacaatgctgcttggggaggtcgcaaacttcattgcttacatatttgcgccggctgtactcgtgactccacttggggcgttaagcataatcgtaagttcagtgttggcgcactttgtgctcaaggagcggcttgagaagctcggggtccttggctgtgtgtcgtgcatagtaggttcagttgttgttgtcatgcatgctcctgaagagcatatgcctaactctgtcaaggaaatctggaacctagctactcaaccagggtttctagcatatgtggtgacagcattgttacttgtgggagcgctagtactcttctttgaacctcgatacggtcagactaacatcctgatatatctgggtatctgctcttcaatgggatcgctaacggtcgttagcatcaaagccattggtgttgccataaagcttacgttggatggggtgaatcaggctgcttatccatacacatggctttttcttatggttgcaattgtttgtggggtttctcaaataaattacctgaacaaggcattggatacctttaatctggctattgtctctcctatatattatgtaatgtttactacccttacaatagtggcaagtggaattatgtttaaggactgggctggtcaaagcttaagtagtattgcttctgaatcatgcggcctgataaccatcctttctgggacaattttgttgcacacagcagaggagggagccaacaattctgcagctttgttgccttggcctttggataaagggtctatatcatggtgtatcaacttaagcagtgacaatcttctaaagaatgtcgaagaggactacttcacagctctgcaaagttcacctgccccagtataatgaagaaactgataaatatctaaaagggaacatgcaaatcaaggtgtaaatcttaacagtgccagaaatctggcagttttgggatagaacttctccattgtttgttcaaggcaagcagaattatcgcctgcatgttgtattttgtataaatgttcatcctttaactaaaactcagaagtgaagattgatatatctacccaaagagttaaaa

SEQ ID NO: 38287 - DNA, 172 bp, Zea mays
  Clone ID: MRT4577_134920C.1
gatactgaatcataagcacaggtgttgttgaggttgaactaggactgcttgttgttactgtcctagttcaacctcaacgtctcctggcttatgattcgtatcagacaagcagtccttctgcatatacttactgtatagttttattttaaagctattggcccatgaagcctct

SEQ ID NO: 38288 - DNA, 600 bp, Zea mays
  Clone ID: MRT4577_134921C.1
ccgactccgacggcagggtggtgatcagttcgctggaccgctgaagcggccgggcccaaggccaacctgcccaagatgagaactccgacagccacaaggagaccatcaacagctagcgaactgcaacgaggatcagaacagagggacctcttttcagagcttctggtgacggttctgttatagtgtatacgttaattaacggtgtatatatgtcatcttcctgtaaatctccgtgtgagtgagctgctggcctgctgctgattttgtaagctaaagctactactactccgtactacgctcggcatcagctcgtgcatgtcaccgtactcgtgtacatgtcgtgaagggggaggcgggcaacacaacacaaggagcaacagtagtgttgaagagagtactgatactcctactccgtagtacttatgtggctatgtacactaatcctgttggctgttgctgtacgagtgactagacgcagcctcccctgcttcctagtagtctgtagcacagggtactcctccgtatggtttctgctgctgtgtataatgtaaaatgtataataatcctactacgcgcgcaacaataatgcgtggttttggc

SEQ ID NO: 38289 - DNA, 386 bp, Zea mays
  Clone ID: MRT4577_134922C.1
gcgtccgacggctgcggaagacgacagaagggggaggaatcctgaaaccttgcttggattaaattttatggtggcacatggcagggtagttgtcggcttgagaatggataaaagcatatctgacaaggatcagggagctcttgtagaaggttttgatttttgtttgccagaggttttgattcatgggtggttcttctgagtttgagacagagttgtactttggacagatatataaaatactgatcttcactccttccttccaaggtcagttaagtcattcctgttaaatttaatgtggtgtatcattggtatgcatacatataaggattcatcacataataaataattgattctttattggatattgagctacccagtggcatttt

SEQ ID NO: 38290 - DNA, 185 bp, Zea mays
  Clone ID: MRT4577_134923C.1
catatgtgctcgggcacaccaatccgaaggcccagccggcaatattcctgcgagacgtgtcccagatatagcgactttgcacagatcgtgtgccatgatcatgtcgtcgtcgctcgacgacttcgacgacgccttccatcatactctactagtagtacgcgatgtgtcagtgtaccatcttccgc

SEQ ID NO: 38291 - DNA, 650 bp, Zea mays
  Clone ID: MRT4577_134924C.1
tcgtactagcgtcacctaccttacgaggactaatggccatcttgaacatcgtggatggcggcgaccatccaatccgttaatgcgcgccagatctttgacagacgcctctaccttacagtccaggtcatcgtgttttgctcagatggaacctttggctgggcagctgctcccattggagcatcaattgttgtgtatcaagctctcgagttcagggatggtcgctctgactattaggagaagggtgtctacacagatgaggaacaatgtgaattctgttattggacctactctgattggcaaggaccctacagtacagactgagattgataacttcatggatcaacaccattatgggaccaaaaatgagtggggatagagcaagctaaagcttggtgctaatgcgattctgactgagtcattacttaacttgcaaagctggccctaacatcaagtagattcctttataccacatcattgccaacctacctgcgcaacaagcagttagagatgcctgtccctgcattgaatgtcatcaacggtggttaccatgctggaaacaagattgctatgctaggaatttatgatccttgctactggagctgcctaattctaagaggctatgaacattggtgttgaaacttatcaccacc

SEQ ID NO: 38292 - DNA, 677 bp, Zea mays
  Clone ID: MRT4577_134925C.1
gctccaagttcattacaccatcacctccagtgctggaccagccgctaacaaactataactaggatgcataccgtctacagttgaagctgtttctttatgaagtaaagcagcagcagttgctttctgggatccggagttatctgaagctatattcaacaataaccattagcaaacttgcccaatatatggaagtggatgaagcaacgctaaggtcaatcttgatgacatacaagcacaaaatgcatgcggttgacagtgacggaaagatagtatcgagtgcagactttgacttttacattgttgaggatgttattcatgtcgtggagtccaaacctactaagcgtcatggcgattactttttgagacaaattttgaagttcgaggaaatgatcggtggactggataaagtacagcttgactgaacctggtagcaaatatggagagaaatgccactgctttctttttgctaatataggaatagatgtttatgatggatgtcattagcaagttatgtttgtgccttctgtagcccatgcaaaaacccgtcatttttttctctcttttcactggattcgactttgaagcccgttgaggcaattagcagagtcgtgatgttaattttggtcgcccagttgcctgaatagtgatctcatatcctatctgggagtggcatgcag

SEQ ID NO: 38293 - DNA, 629 bp, Zea mays
  Clone ID: MRT4577_134926C.1
ttgggtacctcgaggccggccgggaacgctcgtctgtctcactctactgctgggccgtctcctctctctcctctctgctgcgccgccctatccagtgtgattctatcctagattctaaggttcggtcggctctcctcgcgatggacaagggcagcgtcgtcgcgaccccggcccctgtcgccgccgacgtcaataacgacatgagcttcgagattcccaagcggaacgccgactctctctggaactgacacattcgcgaagaactactgcgacatctgcctgatgcgcatcatggacctttgcatacattgccattgaatgcaatggagcgccaccagatactagcgctccggcacttgttcaatatgcaaccatgcattacctatctccactggatcaggcgcctgcttagagacccgttacgtgtggcctcttgactacaacgagaggaagctgcagaagaatggtcactagatagaatgctttccgagtgtaattgcttcatgcatctcgtcactatagaggatggagaactgaataaattctggcgaacatgctatgggtctgatactgattctgaacatgtgcctttactgtgagctgctaggcaaaactctggccatgccata

SEQ ID NO: 38294 - DNA, 342 bp, Zea mays
  Clone ID: MRT4577_134927C.1
ctttgagtgagtaagtggtacttgatcctgtgagtggccttgtcggactagatccgagggactggcggtttattcctatttaagtgtggtctagcctttaaggcgggacttaggcacttaagtcagaataattcaggcggtttcgccacaaaagctagtgagccgaagctagtgctgaagcgttgaagaagactttagaagctccttttgttaaaatctatagtaacacttttggaaattctttgtgcaagaaagtgtattatttgacaaagaattgtaattgaatgtgaacatattgttgtaaatatttgtaaatgctttaaaaaaaaaaaaaaagggcgg

SEQ ID NO: 38295 - DNA, 361 bp, Zea mays
  Clone ID: MRT4577_134928C.1
gcccacggacagcatcacccgccgtttcgccgtcgcgtgcggcgtgctcagccagcacgtcaggaacggcggcgcgccgttcctgacgaagcatgcgcaggccggagccggagccggagccggacccgccgcagcccaggagatgatcgccggctcgccgcagcagctgaccatcctctacggcgggagggtggtggtgctgctggacgcctgcccgcccgagaaggcggccgagctgatccgcctcgccgccgcggccgcgcagcaggggccgcagccgccgccggagcaggcgcttgtggacatgcccatcgccaggaaggcctcgctgcggcgcttcctcgccaagcgcaaggacagg

SEQ ID NO: 38296 - DNA, 840 bp, Zea mays
  Clone ID: MRT4577_134929C.1
attgggacctcgagccggcgggaagcttgcccaacaacgcggaggaagaagggaactcgccgcctagggttccgccgccgcctactcttccgccgatcaaggagcgggaatcattgcgcgatgccgcagtcggtgctggtggaacgcgcgacgagcgagtcgctcatcggccctgactggtctctcaaccttgagatctgcgacatcctcaaccacgacccctcgcaagccaaagatgtagtgaagactatcaagaaacggattgcacacaagaactcaaaggtccagcttcttgcattaacgttgctggagaccttgattaaaaattgtggtgattttgttcatatgcaagttgctgagaaggatatgcttcatgaaatggtgaagatagttaagaagaagcctgactatcacgtcaaagagaagatattaattctgatagacacttggcaagaagcttttggtggtgcccgtgcaagatatccccagtattacgcagcatatcaagagatgctgcgtgctggagctgtatttcctcaaaggccggagagtactgtgccaatctatactcctccacagacacagcctctacggaactatccgcctcctgcattgcgtaacactgattatcgacatgatgtgcctgaatcctcttctgcaccagaagtgcctgcattaagcttgacagaaattcagaatgcacgtgggggtcatggatgttcctttcagagatgttaaatgctatcgatcctggtaacagagagggtctaaggcaggaggtcattgtggaccttgtggaccaatgtcgttctacaagcaaagagtggtgcagcttgtcac

SEQ ID NO: 38297 - DNA, 378 bp, Zea mays
  Clone ID: MRT4577_13492C.1
gaaaaaacaaaacccaaaaccaacgggaaaaaaaacaaattttttgttttacaattaccccaaaatttttttgggcctttcaaccccaaaaaaagccttccccttttttaaaaaacaaaattcctttaatttcccccctcccggggaacagttcctcctaaaaacaattaacgtgctaaccccaatttttttgggcccccacattcactttttcacccaaaacaagccctccctgcccttgggggagggaatccccccctcccactggacggacttggccattctttccaactcatttattgggtccccttgaccccaattccgagcttacctacccttgcatgcgacagaataacttttttattggggcccctaaat

SEQ ID NO: 38298 - DNA, 365 bp, Zea mays
  Clone ID: MRT4577_134930C.1
ctattcccctttgagtttaaaaaagaattagaatttgaaaataaaaggggaatagaaaagaaaagaaaagaaaagaaaaagagaacttgatgggctcggaaatacgtttttggcccattaacctttcccccgtcgtggcccagctggtggctttccgcgctgacatatggggcccaatggccagccactgcccgctctcatggctgtcatcccggtggctctggcgtgtgggaccgcttgtacggtcgcgctcggaccctctggttttcctctctggttggtggacccatgctgtcaggattgtcttccccgtgggccgcgcgtgaaacaggaacccgaagtcaccgtaggctattacccccgga

SEQ ID NO: 38299 - DNA, 2108 bp, Zea mays
  Clone ID: MRT4577_134931C.1
agaaaatccgcaattttattgtcgtcctcgcccgctttctctgaccgaccggaaaggcgctgcccaaacaacgcggaggaagaagggaactcgccgcctagggttccgccgccgcctactcttccgccgatcaaggagcgggaatcattgcgcgatgccgcagtcggtgctggtggaacgcgcgacgagcgagtcgctcatcggccctgactggtctctcaaccttgagatctgcgacatcctcaaccacgacccctcgcaagccaaagatgtagtgaagactatcaagaaacggattgcacacaagaactcaaaggtccagcttcttgcattaacgttgctggagaccttgattaaaaattgtggtgattttgttcatatgcaagttgctgagaaggatatgcttcatgaaatggtgaagatagctaagaagaagcctgactatcacgtcaaagagaagatattaattctgatagacacttggcaagaagcttttggtggtgcccgtgcaagatatccccagtattacgcagcatatcaagagatgctgcgtgctggagctgtatttcctcaaaggccggagagtactgtgccaatctatactcctccacagacacagcctctacggaactatccgcctcctgcattgcgtaacactgattatcgacatgatgtgcctgaatcctcttctgcaccagaagtgcctgcattaagcttgacagaaattcagaatgcacgtggggtcatggatgttctttcagagatgttaaatgctatcgatcctggtaacagagaggattgtatgttgacatgttccagattgttcaactggaccatacagttccagaagttctagtcatccctggatttctaaatagtactcaacatgcagggtctaaggcaggaggtcattgtggaccttgtggaccaatgtcgttcatacaagcaaagagtggtgcagcttgtcaactcaacatcgtttagacatgttttctgatagcaatgctatcaataacaccagccagaaccctaccatactttctatatctaactcaaatcctaatacatcagtacaagcctatcctgttccacagcaacctgttccaccacaccatccttcaccatatgctaatggcttaaattcagatacaatgacaccctttgatcaaggctctaagttaacctcagcaagttcatggaatgaacagattgcccatggaatgattccaccacagcagtttgcccatggtcaaggtgaacaaagcaacgaccttccactaccaccctgggaagctctgcctgcagaaactgagcaattagaagctgaccatcctggtgggttgtcagctctgccacaatttggagttagtcaaccccagccagtccaaattacacattctgggcagcaagtgttaccatcgcaattaatgccaactggacaaccgggagggcagttccagcctagatttggggctcaacaaccatatgctacagaaaatacgcagtatggaggaatgtatccgccagtgcaaggcaaccaaccaacgggtatttatccccagcaaatggctggagatgtctaccagcaacagatgtttggtggccagatgataggttatggctatggtccgcagcctggaggctactacgtgccgaacgccgcatatgcatatgccggtgcaaatgatctttctcagaggatgaatggcctctcgatgcaaggcaacagtctgtatggcacacccgcgtcgtcttccctccagcagcgtaacaggccaagcagacctgaagattcgctctttagtgatcttgttagcatcgccaaaacaaagccttgtaaaactgcttccaacaaggctggtaacttgtaaacatgagtttctgctcatagtatataaaattcttgaaatttttttcctattggaaagtagtgggcgagatttgtatatcctgatattgataaagatgtttacatcttttcaagaaattatattttgtttacaagtattctgtaccattaatgtcttatgtatatacataggagcaaaaaaaaaaaaagactccagtatgctgattcctctttgaaattttggcatacgacttcagcc

SEQ ID NO: 38300 - DNA, 452 bp, Zea mays
  Clone ID: MRT4577_134932C.1
ctcactagtcggcggcccgccctttttttttttttttttaacactttattaacaactccattactaacacctctgggaggggattactaaaacacaacaggaccaacctaaaacatttaagaatcacaaatcaatactcttaaacactatataacttctttagctcccacggacaccacatcattacatgcccttttccctcttaaaaaactcaaaactaaaattaacgggaaagaaaaaggaaacacaacaagtgtaataacacacaaacaaccctcagcaataacccttcttgcttccattatccaaaccataaaccaacacactgacatggacaccaatccaactcacctgaactctctttcagtgcctccaaggctagcacgttggctcatgtgcgttctctcggctggactttatagcgagctgagcacgcatgtactgcacaccat

SEQ ID NO: 38301 - DNA, 299 bp, Zea mays
  Clone ID: MRT4577_134933C.1
gtgcatgccacgttatactttttttatagggttaacaaaatgcaattaactgggcgatagtttacaacggggggaaagggaaaacccttgagaaacccaaataaatagccttgcagaacattaacactttaaagcatgtggtgtaataatggaagaggctaactacacaataattctttccaacattatgtgccaccctttaaaggcgaataaaacgcgccctgaagtggattattaaatgcggcaactgtgggggatacgcgcattgtgaattgtacaccttgggaggcttctatttc

SEQ ID NO: 38302 - DNA, 290 bp, Zea mays
  Clone ID: MRT4577_134934C.1
aattcggcacgaggcactcacacagcaaatacccacagtccacagcaagaaccgaagatgttcggaaacatcggaaagatcccgatcatgggcgacctgacgggcagcaacaagaatgcgcaccttaagggcaacctggtgctcatgcgcaagaccgtgctcggtttggacgaaaccagcatcgacggctgcctaatggacggactaagagagttactaggacggggcgatacctgccaacatgggagttgcaccgggttggaccccaacggctggaaccagtttaaggt

SEQ ID NO: 38303 - DNA, 462 bp, Zea mays
  unsure (1)..(462): unsure at all n locations
  Clone ID: MRT4577_134935C.1
ggggggccacctatgaaagagggggtgctgggcaactcaaccagcggtgctgtcctgagtgagatcgtccggaccaactaaacctgccgtctgaacacagacacctgtttttctggtgtttgggngagcacccgaaggtgggggggggggggcttgccttgccgaagagggaggactggaagactgggggcgggacgccccccctgcntctgactgaataaggggcaacatgggggtggaagagatcctgagggtgttcaatgaggccgagtgggaaccatccctgcgctggaaggcaatgccgacggggttcgccgaggactcccccttccgtcttggctcctccatcggtgacgcccccgtgatccccgcggtgtgggcggttccctgggaaattcaatgggagctgactgatcttgggtcgcggggcttggttttggcttccttgggctggttggggtg

SEQ ID NO: 38304 - DNA, 259 bp, Zea mays
  Clone ID: MRT4577_134936C.1
gtgataggacttgggggctttatgtttttgcccagctcggcaataaaacattttcagaatttggggcccccagggcccttccagggacaaagggggcggcggttatttcataacctgaaacgaaatgggtttatttttttaactttaaaaagtgccgtcccaaacttgactatggggactcttttttatcaaccgaaaccaattacttcctacaatgtcccagtttacgtgaccctaggtaaactttgaattggaaaac

SEQ ID NO: 38305 - DNA, 122 bp, Zea mays
  unsure (1)..(122): unsure at all n locations
  Clone ID: MRT4577_134937C.1
acccacacgtccgnagtcttagaatatgcctttttaatattttaagctctattcacagacatatggaaacatgatgctatacaggaaaacttnnnnaatatgtaatggccctcttgtttgtt

SEQ ID NO: 38306 - DNA, 472 bp, Zea mays
  Clone ID: MRT4577_134938C.1
ggccgcttttttttttttttttttcttttggtttttttttttttttttttttttttttttttttttttttttttttttttttttttttttttttttttttttttaaaaaacacaccctttgtgggttaaaaaaaatttgcggaaaaaaattgccctttttttgaaaacacctttttgccgttggggggggggggccccaaaatttttttttccccgcaggggctttttttgtaaaacaacttgaaaaagggtggggaagaaaaaaaaaaagcgtgggccccggataaaaaaacggccggcccagaaaagcgcaaaaaaaaaagggggggtttccccggggcccaaaaatgggccacggggggctttccccgggaaaatttccttttacccaagtgcccccaggggccgggggaactttgaaaggccccttggggagatttcttttgttggggcttttcccccccacccaaat

SEQ ID NO: 38307 - DNA, 671 bp, Zea mays
  Clone ID: MRT4577_134939C.1
cttagcagtggtaacaacgcagagtactttttttttttttttttttttttttttttaggagatgtgtcggtacaactaaggtttgtaggaatgggtgtcgagttagcgtggtgcactattcaagagtctgactgtcagatgatgtatggcatctcggtggacatagagggcaagcgatcatcgctctccccattcttgtttgatcagaatgttgtgtgtgttgcacttgtgctctgcaagatgtggggagcagagctcaaggtggggcaaatgcctagcatctaggacgaatcccttgtacctccatcgtcaggatctacattttcgatgccataattttggtccatcctttatatttaatgcttcatttgccatagctttgtgatgtccaccaagtttgttcaaatttatctttggcgaagttatgcaggatgttggcagctcttgatattgtttgtaaacggatgatctttacttaatatacaaatgaaaagaaaatccaaaaatatagaattttcaattgtcacataaagcaagttattgtctttactataccaccaccaggtattcaaccacgtaatcattgtgcactaacatttaattgaataatttgtgattcgtacatgggtctgtaagggctaccccgcgtactctgcgttgttaccactgct

SEQ ID NO: 38308 - DNA, 762 bp, Zea mays
  unsure (1)..(762): unsure at all n locations
  Clone ID: MRT4577_13493C.1
ataaagcttacgttggatggggtgaatcaggctgcttatccatacacatggcnnnnncttatggttgcaattgtttgtggggtttctcaaataaattacctgaacaaggcattggatacctttaatctggctattgtctctcctatatattatgtaatgtttactacccttacaatagtggcaagtggaattatgtttaaggactgggctggtcaaagcttaagtagtattgcttctgaattatgcggcctgataaccatcctttctgggacaattttgttgcacacagcagaggagggagccaacaattctgcagctttgttgccttggcctttggataaagggtctatatcatggtgtatcaacttaagcagtgacaatcttctaaagaatgtcgaagaggactacttcacagctctgcaaagttcacctgccccagtataatgaagaaactgataaatatctaaaagggaacatgcaaatcaaggtgtaaatcttaacagtgccagaaatctggcagttttgggtgaggagattctacctgccatttttcggtttgtacataggagcctgtaacatttgtggttttttttatatgggccaggatagaacttctccattgtttgttcaaggcaagcagaattatcgcctgcatgttgtattttgtataaatgttcatcctttaactaaaactcagaagtgaagattgatatatctagctgctgtgttctacgttctaaaaaaaaaaaaaaaaaagcggcc

SEQ ID NO: 38309 - DNA, 782 bp, Zea mays
  Clone ID: MRT4577_134940C.1
tctcctccgtcccatccccgcgccgccactctcttcctcgggatcctcccagatcctcatcgtccaaccccacacagccaagcctccaccttctcctcgatttcccccatccgccactcctctgctcgatctcccctgtcacccaatccatcgatcccctccaaccagagccctctcatggcctcccgctcgaggaccctgcggcctcaagcctcccgtgcccgagctccttctcctcttcgagccgaggctccatgcagcctcgcgtcccgcagctcgcccgtcctcggagctccctgccgcggtgctccccttctccgtcgtcgcccacctccaacctcgacgccgccaccacgtcctgaccgcgccgcgcccgaggccctgccttctcctcgtccgcatcgaccgaagccagcagatgagccccgtcgcaccctcttcttcccccgttttcctcctctctgtacctcgtctctctctcgttctctatgtaccaggatccatgccgcctcgatccccttcggcagcagcctcgccgccagcctcctgccatcgcccagatccgcagccgtcccgccggagttcctcgcgccctgctggcctgcttcgtcctctgcaccgcgcctgccccctgcctcgaactgctgcttctgttttcttcagaaaacgagagcagcgctgcatcgagcgcctgctcgatccatccgctcgcccgcgttgacccgtcgcccgccagcgtggacaagccccagatccagcgcccctgtgggcctcccttcctg

SEQ ID NO: 38310 - DNA, 1984 bp, Zea mays
  Clone ID: MRT4577_134941C.1
ccgggtggtgtcccgcctctcgcggtcccgccccgttttctccaaggcagccgctagaaataccaccacgcggacgcgttcgcacgagccgcatcgcatccatactccactgcatctgccatcttggggaactctttggcctctggaaccggcctgcccagccgctcgatcgacgttcggcgaggacgctgctccggtactccggttggttggaccggaggcgcggcgatgggggcgctgtcgcggccggaggaggtgctggcgctggtgaaattgcgggtggcagcggggcagatcaagcgtcagatcccgcccgaggaacactgggccttcgcctactccatgctccagaaggtctcccgcagcttcgccctcgtcatccagcagctcgggcccgaactccgcaatgccgtgtgcatcttctacctcgtgctccgtgccctcgacaccgttgaggatgacactagcatcccgaccgaggtgaaggtgcccatcctccaggaattttatcggcacgtctacaaccgcgactggcattattcatgtggaacaaatcactacaaagtgctgatggataagtttcacctcgtatccactgccttcctggagcttggtcaaggctatcaaaaggcaatcgaagaaatcactaggcgaatgggagcaggaatggcaaaatttatatgcaaggaggttgaaactgttgatgactatgacgagtattgtcactatgtagctgggctagttggctatggactttccaggctcttttatgctgctgggacggaagatctggctctagattcattgtcaaattcaatgggcctatttttacagaaaactaacataattagggactatttggaggacataaatgagataccaaagtcccgcatgttctggcctcgagagatatggagtaaatatgcagataaacttgaggacttcaaatatgaggagaactccaaaaaagcagtacaatgcttgaacaatatggtgactgatgcactgattcatgctgaagagtgccttcagtacatgtcagccttgaaggatcatgccattttccgtttttgtgcaataccccagataatggcaattggaacatgtgctctttgctacaataacgtgcatgtctttagaggagttgtgaagatgagacgtggtctcacggcacgaataattgacgagacaaactcaatgacagatgtctatactgctttctatgagttttcttcattgatagagtcaaagattgatgacagtgatccaaatgctgctctaacacagagacgtgtggattcaataaagcaaacttgcaaatcatctggtttggtaaatcaaagggggtaccatttggagaagtcaccttacaggcctatgctgatcatgattgtcctcctgctggtagctattcttttcggggtaatgttctagctggccctttttttttttccacgatggagacttgagagaaactatgccaatcagatcctttttgtactgtgtagtctccaaaggctgcagcaaattcggaagtactgaccgtagatcgatacggcagcatgctactgtttccatgactccgttgctgctctcaattcgtttgttcattttactttctcgcgctttgtgttgtttgaagctgttttaaggcagaaaatactatcgtgacatgtatgatgtatcctacgaacatgtgtctcagtttagttagcaatggctgcacctctgttcttaaggcgtcgcctaggcgtccgggcgatgggcgatggtctaacgcctaagcgctttgcccgcctacctcacctaggcgttcagaaggtgctccaacgtcttggaccgccttaccgctttaaaaactatgggctgcactgtagttattctatgtgttgtcttgttttcatatctgatatgtttgtgtttatcataactgtgtactctcccatggcgctaattatattcaatattatatgtatgtttagct

SEQ ID NO: 38311 - DNA, 333 bp, Zea mays
  Clone ID: MRT4577_134942C.1
tcttcctgaccaatctaatctaaaacctccccttttattttcctttaacatagacacatactcgggacgagttacttaacactcagagcagaactcacaactcaaagcattccatgtacatacaaaacctactataaattacaatatacattaacatacttcacaatcacattctcaatcctaatgaagcaaactaataacaaatcacacacaatgatctattaccacaacaactcaaacctacttccacaccttcactcttttgatcaccacttttacactctactacactaattactctaacattctccacacatactcattaatcacttc

SEQ ID NO: 38312 - DNA, 411 bp, Zea mays
  Clone ID: MRT4577_134943C.1
cctcagcatcaacacctttgcgtccaatgtactacaactgcatgctaagtaatgctacttttgcccttcgggctagtgatccaacaccccgtcaccatcacaaatacgccataaaccccatgcaatagataaaaggacaaagccttgccaggctgtcatgaagagagcggaatgccccaaggtgggtatcgaacaatcgaaaaggactggagtttttatgccggaaaacgctatgcatgaaaaataggacgaagattgcaagcagagacttgctagacgagattgtctgactctcctcatgtttacaagaggacggcgaagccgaagaagacgctgccgaagacggcggcaagaccaaaaccggcgttaggcatgaagatggagccagcaccccctttggcggatgagccg

SEQ ID NO: 38313 - DNA, 516 bp, Zea mays
  Clone ID: MRT4577_134944C.1
gcaatacctagacattatatgtatatccgaatcgattatccccggcaaaaaaaaaaaaaaaaaaaaaaaaaaaaaaaaaaaaaaaaaaaaaaaaaaaaaaaaaaaaaaaaaaaaaaaaaaaaaaaaaaaaaaaaaaaaaaaaaaaaaaaaaaaaaaaaaagtttgtccctccccggggggccgttaaaaaggggaaattttggaaaaatccacaaaactgggggccgttgaaaaatccatttaaagggccaaataaacccaaaaaagggggaaaaaaaaaaaaacggcccgctttttaaaaacgccggaattggaaaaaccctgggttaaccaaattaaaaagctttgaaaaaaatccccttttcccaagctggcaaaaaaaaaaaaaggcccaaaccaatcgcccttccaaaaatttgaaaaccctaaagggaaaagggaccccccttaaaacgggcaataaagcgcggggggggaggggctaacccccagggtaacctttaaatttgccagccc

SEQ ID NO: 38314 - DNA, 1668 bp, Zea mays
  Clone ID: MRT4577_134945C.1
tcgcggacgcgtgggcggctatgcgggcttcgaccgtcattatttagcagcttctcctttgggttgcattcgaagttgtcgacttcggctgttgtcctcgttgcttgcacacagacgaaacttttctgcacactgcttcggttgaagccaggttagcttcgtccgctagtgaaaatgttcctggaacacacttgttcgtgccgaagcagcatgttaatcaggtgatcttcgacataagaggcccccaatagatgttttgtttagttttcagttttcaaaaattaaggtcggtttagatgccaatagatagcaatctatattatattgtgaacataaaccaggttaactcattgcccaaatagtaaattgtgggggtatcaatttgggttgcaagtagtcaacctatcaacactcatcaattagtttgtgtacgttgagatcgaacttttgaaaatgaacctgcaactgacaatttgggctgcacgaagtcaacctatcaacgttcataattggcgtatgtacattgcgattgaacttctgaaaatggctactatatgctggctaatcagttttcataatccagtgcaatttgtaaatatagtacatattagtagcgaatgatgtgttctggaattacacacaaacctatcctcaaccatattatgcagctatagcacaagatattgaaaatgtcagaaagttgctaaatttagtgtcaatttgcataacgttgtaactagaagaatccgatgggtatggcactgaatgaagacaagttgcatcttaccaccgagtcacaagtaaaacttggcaaaatgctggcagaagcgtacattttgaacttctctacatcaacttgttaggtgaatacaagtgtctcaagatcttcaatccacaacaagtatatttgataaggtcgcctagtgacaagattactatgtgctcaagcacttaatcaatcgaagacattgtatctatcttatctccgagaatacgctaaagtagtaaagtgcctcaattcttgtatagcatttcaaactcgcttcataacatttctttcatattgtaataaaagtagcagccaaaaacctagatactccttgaatgtctagtacctttttctatatcaatatcttttattatgaagggcatgtctagtaaagtggttagagctgtctcactaagtcaacaggtgccgtgtttgaggagtctctcctcatcgtctaggctctaggaggctttgaaagtgggtctatctaagattgtttatgatctgaccaggttgcacttgcatctgggaataaaaggaacattgaaaaagtcagaaatgctcaatttagtgttaatttgcccaatgttgtaactgtggatccgatgggtatggcactgaatgaagacaagttgcatcttaccaccgagtcacaagtaaaacttggcaaaatgctggcagaagcgtacattttgaacttctctacatcaacttgttaggtgaatacaagtgtctcaagatcttcaatccacaacaagtatatttgataaggtcgcctagtgacaagattactatgtgctcaagcacttaatcaatcgaagacattgtatctatcttatgtccgagaatacgctaaagtgcctcaattcttgtatagcatttcaaactcgcttcataac

SEQ ID NO: 38315 - DNA, 138 bp, Zea mays
  Clone ID: MRT4577_134946C.1
ctcttaacataggggatttattatgaagcatggggggaaaacaaaccccatccctttccataccacatgctacgcacgaaagttctactacataccacaacacttgtacacaatcaacaagcaaccaaaaggcaaccc

SEQ ID NO: 38316 - DNA, 333 bp, Zea mays
  Clone ID: MRT4577_134947C.1
actgtatgaaccaaaccctggatcacttcaacccaggggacgcgtcggcaattcaaacaggggtactgccaagttcttgactactaccgagctgcaaatggggcggtcttgctatacatctgtggagaatctacgtgtaatgggagtggcgctaactacttagctgtggtggcaaagaaatttggggctgcattggttgctcctgagcatcgatactatggaaagagttctgcttttaacagtccgacaacagaaaatgtacagttcttggcatcaaagcacgctttatttgatcttgctgctttccgccaatattatcaggaaacctttaat

SEQ ID NO: 38317 - DNA, 415 bp, Zea mays
  Clone ID: MRT4577_134948C.1
actctggcagggatctcaacccaccggggtggtcctgctggctccaatgcatgctgcttccggtattagtgagtactcctcgagcgcgggaactattgaatatgacaggtcattgtgcagacatacgaactgacccaatcagcctttctgggaactcgaagcctgcattaatctgaactaggaaagccatattgacttctagcgtagactatggcatccgctcacattgcctcaatgactctcattcatcactgactgacgaagccactatatctcatcatatattacaccgtgtacccttgacgcgctgaccatcgcctctacgtgccgaacttcatgcaggatatcgcacttacatctggctggtacgcatctgagtcattgcattatattagggtgccagatgtaccctcta

SEQ ID NO: 38318 - DNA, 367 bp, Zea mays
  unsure (1)..(367): unsure at all n locations
  Clone ID: MRT4577_134949C.1
ttggcttctggctttttgtagagagagtgggcgcacaggatcccgaagcacaacaaacaagggtgagaggtagagggnagaggagaggagagtggaggagaggagtaggtttctttcttttcacaccactgtgcttcgatgaagcttgtacggtggcggtgatgttcttggaacgtgacgaggtgcgcaacggcgctggaggaggctggcttccactacgagatcgtgcccattaacttcttcaccgtcgatcacaagagccccgagcaccttgttcgcaacccgtttggtcaggttccagctctgcatgatggtgacttgtacctcttcgaatcacgcgcaatctgcagtacgctgctcgaaaaac

SEQ ID NO: 38319 - DNA, 756 bp, Zea mays
  Clone ID: MRT4577_13494C.1
atcctcttcacacacagcaatccacacaagcacttcgacgtccacgggcgctgcacacagacacactcagctgtcggcaccaatggcttactaccaggatgtggactactgctcggaggaggtgaggtcggtggccccggccgtcttcggccgccacggcggcgatcgtccagcagcacgtcgtcaaggagaaattcgaggaggttgatactgtgctgacgcagccggttgccaacacaccacgcaccactctatgtgtcatccacggatggcacacagggattacgtgccgtcgcgatagcagctgctcgagtgaggacatcgaactgcctgatacttgtgtgaggaaccactgaaccgcagagagagatattctcctctcgcaggtggtagatctgtagtgacaccgttggaccggtataggccaccattcatgactgggtgggtgtcccttcaaagcatgagcgtgtcatctttgctgggaattagcttgaggacgggcgcacgcttgccgactacaacatccagaaggagagcaccctccacttggtgctgcgcctcaggggaggcatgcatatcttcgtgaagaccctgaccggcaaaactatcaccctcgaggtggagtcttcagacaccatcgacaacgtcaaggtcaagatccatgacaaggagggcattcccccagaccagcagcgtctcatctttgctggaaagcagtttgaggacgggcgcacgctggccgactacgacatccat

SEQ ID NO: 38320 - DNA, 329 bp, Zea mays
  Clone ID: MRT4577_134950C.1
gggagggaagggtttaattccgtaaaaaaaaaccataaaaagagattggggaaacgggggcggccccttttaatttacgaagaaaaccgaacacggggggggccacgggggccgcagggaaaaaaaaaatattcttactccgtataacaaaacccccaaaaaataaagcccagggcccgcaggagggaaactttttatttggggcgcttaagtttccgcttacgcttgggggggggttaaaatttggggggaaaaccacagggacttgggctgggttgactaaagcaaaaaatccccgcctttgtagtcaaaggaaaaacggaaggggt

SEQ ID NO: 38321 - DNA, 201 bp, Zea mays
  Clone ID: MRT4577_134951C.1
ggaaaagctcaatgagaggattgcgaagcttgctagcggtgttgctgtcatggacgtgggagcacaaacagaatctgaactaacagagaagaaattgagagttgacgatgccctaaatgcaactaatgctgccgttgatgaaggtatcgttgccggtgcagggtgcactcttaggcggcttgcaccttacgaagaccccat

SEQ ID NO: 38322 - DNA, 297 bp, Zea mays
  Clone ID: MRT4577_134952C.1
gattggcacatctctgtatgatgaatacggagccaatattgtcaaagatctcatggccaaagctgagaaaaatggtgttaagattaccttgcctgttgactttgtcactgctgacaaatttgatgagaatgcagagactggccaagctactgtggcctctggtatacctgctggctggatgggcttggactgtggtactgagagcagtaagaagtatgctgaggctgtgtctcgagctaagcagattgtttggaacggtcctgttgtggtatttgaatgggaagcctttgccagggg

SEQ ID NO: 38323 - DNA, 2344 bp, Zea mays
  Clone ID: MRT4577_134953C.1
gggaaaaggaatttttggagaaaattcccattggcccagcccagaatactcagccgcgcgccgcgaccttcgctcccgtctccggtctccgcctgccccccgtccccaacctatcgggagcgctcccgattcgcgggagcgagagaaatagagtgccccccgctctccgctctccgccgcggatcagcgccgtcgccgatcggaggccctcgcttccgccggcgggcggcgcgagccgggagatggacggcggcgcgggtgccggtcggaggagcgtcccctcctcctccggattcaggaggagggtcccgcccgccgagaacgggcacggccatgacgccccgccgccctccaggcggtcctccgcctccctctcccgcggccactccacgccgctgactggcgagaggaccgtgaaaaggctgaggttgtccaaggcactgacgataccggatcacacgaccgtgcacgaggcttgtcggaggatggcatcacgcagggtagatgccgtgttactgaccgactccaatgctttgctctgtgggatccttaccgacaaggacataaccacaagagtgattgctcgtgagttgaagatggaagagacactggtctccaaggtcatgactagaaaccctgtatttgttctcgcggacacgcttgccgttgaggcgttgcaaaagatggtgcaaggtaagttcagacatctgcctgttgttgagaatggtgaagtcattgcaattctggacatagccaagtgcctatatgatgctattgcacggatggaaagggcggcggagaaaggaaaagcgatcgccgctgctgttgagggcgttgaaaagcattggggaacagctgtatctggtcctaacaattttattgagactcttcgagaacggatgtttaggccatcactgtctaccattatctctgagaattcaaaggtggtcactgttgtaccatcagacacggtgttgacagcatcaaagaagatgctggaactaaaaatgagttcagcagttgtagcaatcgaaagcaaacctgggggaattctgacatctagagatatcctgatgcgtgttatcgcccaaaatcttcctcctgagtccactacagtcgagaaggtcatgactcagtgtcctgaatgtgcctcggtagacaccccaattcttgatgctcttcacacaatgcatgatggaaaatttttacatttgcctgttctggacagggatggaaatgttgtgactgttgttgatgttcttcacataactcatgctgcaattgctacggttggaaacagcggggcagctggatccgaggcaacatctgccatgatgcagaggttctgggattcagcaatgtccattggacctattgatgatgacgatgactcgagaagtgaagggtcgactagggtggtatctgaggcaacagatataggaagatcagccttctttccagcttctggcttatcaaacacttttgggttcaagattcaggataagcaagggaggatgcacagatttaactgtgaaacaagcggtctggcagagctgataaccagcattcttcagagggtcggcgacgacattgacagaaaacacctcccgcaaattttgtacgaagacgaggaccgtgataaggtcgtgctttcgtcggacagtgaccttgtagccgctgtggaccacgcgagacaaatcggttggaagagcctaaggctgcacttggactacgcccgccggaagagaggggacggttcctcagacttcgagtacgctggcaaggatgcatgggcttctgcatacagtgctgtcgcggcaggggcggctctggttgctgggctcggcgtgatggcttacttgaaacggtcagggtaatagcttgaggcaagcacggcagggactagggagcacggttttgatcgtctttgtgatacaagtgccacttcatcggaattggcagaatggctgtgtaagtaattcttgtgagagaggaaaaaaatgaagattttaataatactactgtcaaggcagtgaatggtcccttcatacaagtacacggaactgatcgagttttttttggtgggttgagacttgagagtcaccatggctgtcagcttcgtcacgattgtatttattatcataaaaacacatgattcattgtacaagaagagtcttgatagaccttcttcatgcagcgtctggctgattagaatttatccaaggcgatttttgtccaaaaaaaaaaaaaaaaagaaaaaggggagagaaaaaaaaaagaaaaaaaaggcagacaccagatttttgtaaaaaaaaaaaaaaaaaaaaaaagtcgacgcggccgc

SEQ ID NO: 38324 - DNA, 2337 bp, Zea mays
  Clone ID: MRT4577_134954C.1
ggaaaattttagataccctgccgcacgccgcgaccttcggccccgtctccggtctccgccttcccccacctattggggagcgctcctgattcgcgggagccagcgggcgagacaaagagaatcccccgctcctgcgccgccgcggatcagcgccgtcgccgatcggaggctctcgcttcccccggcgggcggcgcgcgccgggagatggacggcggcgcgggcgcgggcgccggccggaggaacgtctcatcgtcctccggatccaggaggagggtcctgcccgccgagaacgggcacggccatgacgccccgccgccctccaggcggtcctccgtctccctctcccgcggccactccacgtcactgaccggcgagaggaccgtgaaaaggctgaggctgtccaaggcgctgacgataccggatcacacaaccgtgcacgaggcttgtcggaggatggcgtcacgcagggttgacgccgtgctgctgactgactccaacgctttgctctgtgggatcctcaccgacaaggacataaccacaagggtgattgctcgtgagttgaagatggaagagacaccggtctccaaggtcatgacccgaaaccctgtatttgttctcgcggacacgcttgcagtcgaggcgttgcaaaagatggtgcaaggtaagttcaggcatctgcctgtcgtggagaatggcgaggtcattgcaattctggacatagccaagtgcctatatgatgctattgcacggatggaaagggcggcggagaaaggaaaagcaattgccgctgccgtcgagggcgttgaaaagcattggggagcagctgtgcctggtcctaacaattttattgagacgcttcgagaacggatgtttaggccatcgctgtctactattatctctgagaatccaaaagttgtcactgttgcaccatcagacatggtgttgacagcatcaaagaagatgctggaattaaaagtgagttcagcagttgtagcaattgaaaacaaacctggaggaattctgacatctagagatatattgatgcgtgttatcgcccaaaatcttcctcctgagtccaccacggtcgagaaggtcatgactcagagtcctgaatgtgccacagtggacaccccaattcttgatgctcttcacacaatgcatgatgggaaatttttacatttgcctgtcctggacagggatggaaatgttgtgactgttgttgatgttcttcacataactcatgctgcaattgctacggttggaaacagcggggcagctggatccgaggcaacatctgccatgatgcagaggttctgggattcagcaatgtccattggacctattgatgatgacgatgactcgagaagtgaagggtcgactagagtggtatctgaggcaacagatataggaagagcagccttctttccagcttctggcttatcaaacacttttgggttcaagattcaggataagcaagggaggatgcacagatttaactgtgaaacaagcggcctggcagagctgataaccagcattcttcagagggtcggcgacgacattgacagaaaacacctgccgcaaattttgtacgaagacgaggaccgtgataaggtcgtgctttcgtcggacagtgaccttatagccgctgtggaccatgcgagaaagatcggttggaagagcataaggttgcatctggattacgccggcgttggccggcggaagggagggggtggtccttcggacttggagtacgctggcaaggacgcagcatgggcttctgcgtacagcgcggtcgcggcaggggcggctctggttgctgggctcggtgtgatggcctacttgaaacggtcggggtaaaagcttggaggcggagagcacgacggcagagggagcacacgcttctcatcggatctgtgtgatacaaatgatactgcgtcggaacgagcagaatggctgtgtaagtaattcttgtgaaaaagagagagagagagggagattttaataatactactgtcaaggcagtgaatggccgcctgcatacgagggagtacacggaactggtcgagcctttttggtgggttcagagtctccacgactaatttaccacggctgttagcgtcgtcacgattgtatttgtatcataaatcacacgatcattatacaagaagagtcttgttgagcctccttcatgcagcgtctggctgattagaatttatccaaggcgatttttgtccatagttacaagctcttgctgcaacctgcaatgtactaagctccttgttccagcagacaccagattttttgtatgatactgtgactaaaattttgctctcccc

SEQ ID NO: 38325 - DNA, 781 bp, Zea mays
  unsure (1)..(781): unsure at all n locations
  Clone ID: MRT4577_134955C.1
tcgacccagcgtccgctaccattgaccattcgcagctgccgccgccagtgccggtgagaagagtagggaggcgcagcgcggggatggacggcggcctcgacgacgagtgggaagctagcttcctcgacgaggtgatacgcgcgacggatgaggctgaggctgtcgtctcccgcaaccctaaccccactcccacccccgcgcccgctcccatccccacgtattatcccttggccgccgcccccgtctcctacctcccagcctcttcggtctcctacatccctgccgcttcgcacctccgctccgcgatcagcttctcccctccacgggacctctcccagaggccgccgctcccgccgctcccgccgccgaccgctgccaccagcaccagggatgcgctggcgacgggggccgacgtcggtcgcgacttctctcctccgccccagctctcccagcgcccggcggctgatgagggcagcctcgtggccttcgcggcgtcgagctcagccagcgaccgccgcttcattagcacgggctgtggagaagcgggcgcgaagagggaagcgagggagatcgagaggctcaaaagagagctggaccgtgtctccaaggaaaggaatgaactggtgcgtaccttgtgttatcattcgtggcagtattatgtatttctggggatccttagaactgtacatttttaccaatcttgtttgaatttaaattgagatgagggctgatctactactactaaaactggggctggtgaccaactctttnttttactgaa

SEQ ID NO: 38326 - DNA, 203 bp, Zea mays
  unsure (1)..(203): unsure at all n locations
  Clone ID: MRT4577_134956C.1
aaaccctacagacaaacngtttnnnttgnatctttttccntttccctctggcggcccnaaggtaggaagcgaggagacgggcggacccctggcggcgcgcacacccgacggaccgtaagagtggaaccccgcccagcacaagctccacatcaccttccgccgcccccgccgcgtcccttgccgggctggcgtcttctgcctcg

SEQ ID NO: 38327 - DNA, 372 bp, Zea mays
  unsure (1)..(372): unsure at all n locations
  Clone ID: MRT4577_134957C.1
gtattttgtctgtgcacatgataattagggactaatattgcaaaatgggacagcttgtttgcatgtttcaactccatttcaaagcattgatatttattcagcaactgatcactcttttagagtagtcaatgttgtattctggattttctacttgatcatttgttagtgagctcactcatagcagatcttacctttagttaatactccattccaaattataagttgttctggctttttagatacatagcttttgctacgtacctaaatacatattatgcctagatatatagtaaaagttgtgtatctagaaaagccagaatgncatattttggaacagggggagtagtatagattcaatcacatagnttttcc

SEQ ID NO: 38328 - DNA, 242 bp, Zea mays
  Clone ID: MRT4577_134958C.1
tgagccaagggctgggctattcactttagccttaaccccagaaatcacaacggatgatttccagaacgaacatacattagcccctgcccccgttgctggctggtggcgcctgaaactctaacatcactaaggagaccgggtatggcactcttcaataaatcacaaccctatcaaagcggggaaacctgcgcgtttttcgttctttatatgtcttaaaaagagaggaccatatcactagtata

SEQ ID NO: 38329 - DNA, 500 bp, Zea mays
  Clone ID: MRT4577_134959C.1
gcgtgcacgacggtaccgacatcgtgctcttgaagtggtgcaagggcgacaaccagagctggaagatcctgccttggggaacgaacgacaaatactactagggtgccacgcctaatgtccttactgcttgctgcgtgcttatgcacagatcaaaggaggaggactacagactcatggtgcgcatctgcactgtgtacctggggccgaccaacacaggcaaccagtgccaggattgtgtcaaagacatgcgcaacatgatcgcgctacgaaacgaggaggactacctgaacataaggctctgcaactaggctactgcataagcactcaatcactatacgttatatgtgcactctgaaaagattatgccttacaacccatactactagtactagtgcgtgctttaaacctagagccgtaacaaaaaaaacaaagttccgctgcctccgcatattcaacaacatctacctcaactttaacacctttcactataacgaggctac

SEQ ID NO: 38330 - DNA, 379 bp, Zea mays
  Clone ID: MRT4577_13495C.1
agatgagggtgctggtcgataatgggggaaagagctgagttccctctgcatatataggccggcggggaggagactctggggcatgggggaggaggagacatgacatgatggcgtcatggcgagcgagtgatgcgctctttcccagtcttctcttgcgtcgtactagctgacttttattgttactgccctaattctcaaggcagtgtctgttaaccaaatctcatgcatagttatctggtcattatgtaattaggagcttgcatttagctgcacgtttatgttcctaataaatatctagctgcatgtgtgtcgagcggttgtgcggccagaacaacgctgcgttcggtgtgcggctagggagtggtcaccgccatgcagt

SEQ ID NO: 38331 - DNA, 104 bp, Zea mays
  Clone ID: MRT4577_134960C.1
gtctgttgttggtgagatatactagactagatgcaatgcaattgaaggagtcgcaccgtgtcctgggactagagccagatttcttgcaatttaaattatgactc

SEQ ID NO: 38332 - DNA, 303 bp, Zea mays
  Clone ID: MRT4577_134961C.1
gtcaaaagcgaggagggggacaggtatccaaaccgagacggcaaaggtggatgtcccataccctacagaatacagcacaatacggggcatccgatatcatactaaggggtagacccactatcatcgggcccaaatggaacgggaccctctcatcccaccgaactttattttcctctgttacaacacaaggacatcatcttgattgccttactatcaaccgacccaataggacaaggcattggtcgtatggaaccgtcaccgtcaacgtgtgggcacaatctactacggccacacctatgtggg

SEQ ID NO: 38333 - DNA, 690 bp, Zea mays
  Clone ID: MRT4577_134962C.1
gggacgagcctaccctccctccagcaccagcagccaacaaactcctccgccggcggcgcgagatccggctaccacccaccgctgccgcaggtcaggggcttctatcgttctttgccatgccttccccctcctcctaccacccccaccaccgcgcccgcctccgctcgcgcgctgcgccgctcctcatcgtcgtcgtcctcgccgtcgtcgccgtcaccgagctcctccgcagccgcacgggcctccccgcgcccgcgcgccgggccggctctgccaccgccaccgcctccccctcctcccttgccagcaccaaccaaagcgtggcgcaacgcaagatcctgctcgacccggccttcacgccgcggctgccgcggcagagccagctgtcgctctccctctccgcgcgcaacgcgttgccgccccgcaacagggaccgcttcccgaccctccccgagggccacctcaaggtcgtgctctacgtgcacaaccggccccgctacctccgcctcgtcgtcgatagcctctcccgcgtcgagggcatcggcgaggcgctgctcatcgtcagccacgacggctacttcccggagatggacaggatcgtgcagggcatcggcttctgccaggtgaagcaggtcttcgcgccctactcgccgcaccttttccctgacgccttccccggcgccagccccg

SEQ ID NO: 38334 - DNA, 455 bp, Zea mays
  Clone ID: MRT4577_134963C.1
attcacgcacctagggtttgcgggccgccgacgcagacaaacaatgccgacagaacactaccttacgaatcaagaagaagctggcaaaaaacatgcgccagaaccgatccattacttactgcatccgcatgctcactgtcaataccatcacgaacaacgccaagcgcagtgactggcgacgaaccaagcttggttagtgagcgtatggatcggccggttgctgcgaaggatggctaggaactaatagctatcttccttctgattaatgaatgagtcagtttgtctgctagctagcacgggctggtatgacgaatttataaagagtctggcgagcgctgacataaagagaaaattgtaactactggggcgcacccaaagattgcttgcatgataggtatgctaagtgacgaaccatttatctaaatatatatggagggatggagtgattgacgaac

SEQ ID NO: 38335 - DNA, 574 bp, Zea mays
  Clone ID: MRT4577_134964C.1
gccagtgtgccgggcgtacctgccggggtcgtgggcgcgggactttaccaacctgggcgactggtacacgcacctgctccgggcgtcgcccacggacaccatccacgtgcacgtgctcggctgcacctggaccgacaacccagccaacgtaccatacatgctgaggaccaacttcaacaacttcccacaaggggaagccttactggagctgctcggggacctcctcggcggcggcatcttcaacgtggaccgccacacctggcgccaccagcgcaagtatggccagcctgaagctcggaagcgttgccgtgcggctctacccgtacgggcatcgaggcgcagaggtggagtaccagctagtgccggtgctagccgccgacggcgacgcttgctcgggcgcggacctgcatgacgtgttccggtgcttttcgttccacaccatttgctagatctccttaggcctggacctcggatgcctgtaccggtagataccccagtggaggctcgccaacgcgttagacgtcaacacgcggctgtgcgcactgcgcggctccgcagagtccacgctagtgtg

SEQ ID NO: 38336 - DNA, 360 bp, Zea mays
  Clone ID: MRT4577_134965C.1
gaacataatcacatgtggattagaaatttggaaaaaggaacaagtttaacaagtgaaacctgatctttggataaagaagcaagagtgcctagtgggatctggatttttggtgtagtttgaagattgttctaattctctagaagttcaagttgtaggattcaagtcagaaaagtaagtccttacttaagtcaagcatagagttattggttatggagacagagttccctagtgtggcttgagagcttagtgatgatattagaatgtttagctcccctgttgtttggttagttttgtgtgcacctttagtaaggtgtagtttgtactgctttagagtatcttctttgtagttgcacaagtata

SEQ ID NO: 38337 - DNA, 2808 bp, Zea mays
  unsure (1)..(2808): unsure at all n locations
  Clone ID: MRT4577_134966C.1
ccgaggaatagatggagtcacacaaatggcactgacacacacttgacctcccggtgacgcagcgccgaccgcgcacacactccccagactccgcagggacccaacgcagcggtcaaacaaaggcagcggcagccggccggcagcggcaacggcgtaactcccaagtcacctccgcctcgggctccaaaaatccccacccgacctcgagactgagcggaccgacggtgatgtcgtcgtcggtgcccccgccaccgccccagcaggagctggagtcgccctccgccggcggcgacaaggtcctggccgcagcgcagcacatcgtcaagtccctcgccacctccaagaacgccgctgacgacatgatccgcatactctccggcttcgacaaccgcctctcctccatcaccaacgaccacctcttcccctcccccgaccttaccgccgcctccgcctccgagatctccgccgccgccgcctccttcgacgccgccgaccagctcatccagctctgggacgccaccccggacgcgctcgtcttcgaggcccccgaggacgacatcgcgcagtacctcgcggccgtggacgtcgccatcgaccacctcgcgcgcggcggccccggcggcgcgcgggccggcgtcgccgtccagctcgccatggtgcgcctcgaggaggagctgcgccacctcatggtccgccacgccgtccccatcgaccccacgggcctcttcttctcgctccgccgcctctcgctcgagtccatggacgacctcgacgcctgccccgacttcgacgccgccacgccgcacagcctcgacgccacccccgccggcccggagaccgcgcgcggcgcctccctcggatctaacccctttgaggaccaggtgttcgatcccgtgcgccccgaggccgtcgaagacctgcgcgccatcgcccaccggatggcgcgcgcgggatacgcccgcgagctcgccgacgcctactgtggcatccgccgcgacctgctcgacgagtacctctccgtgcttggcgtcgagcgcctcagcatcgacgatgtgcaacgcatcgagtggaagctgctcaacgacaagatgaagaagtgggtgcacggggtcaagacggtcgtgcgcgtgctgctggctggtgagcgtcgcctctgtgaccaggtgctcgatgcgtctgatgaacttatggatgcgtgcttccttgagtccaccaaaggatgcattatgcagattcttagctttgggggtgccgtggcggtgtgcccccgctcgccagagaaggtccctcggatccttgacatgtatgaggcacttgcagaggtgatccctgaaatgaaggacttgtgcataggaagttctggggatggcgtgatcagtgacgtgcaagccattcttgataggcttggggatgccgtgaggggtaacctgtttgagtttgggaagatgttacagcaggagacctcaaggagggcgatggcagctggagagatccacccaatgacacgctatgtcatgaactatttgaggttgctggttgtttacagtgagacacttgatgcactcttggccgatgacagcagtgatcatgatactttcagaagttctgatgatcaggatcaggaacacttggagagaatgaccccttttggaaggcgtcttctgaagctgatatcttacctggaggccaatttggaggaaaaatctaagctctatgacgatgctgccctggagtgcatatttgccatgaacaatttgctctatattgttcagaaggtaaaggattcagagctggggaaggttttgggtgatcactggataaagaggcggagtggcaagattcgacagtattcaaagagctacctaagggtttcgtggacgaagcctttgtcttatttcaaggaagatggacatggcagtgggagtgggagtggcagtggcagtggcagcggcagtgggcattcaagttcgaggatgtccatcaaggaaaggttcaaaaacttcaacatggcctttgaggaaatttacaggaaccagacactctggaaagttccagatcctcagctccgggaagaactgaagatatcaatatctgaaaacgtgattccagcttatcgtgcttttctgggcagatatggcaatcaagtggacgggggaagaaatccaggaaagtatataaagtacacaccggaagatttggagagccagctatccgatttatttgagggatcaccagtgtctgccaatcactctaggagaagagcatagttcgtggttggccggatccatgttgcagccaggaccgcatgctgagtgagtccgccgctgggcggtgggctggccaggggagtctccaccgccgccaggatccgcaagcgccgcgccgcgccgtggccgccgtcggaggaggtgggcgaagcggagcgcgcgcctgatcggccggagggtcggcgtcgaatcgcgtcgccgtgatcgagcagcaggaggatgacgtgggagccgtcctggaataaccggcgccaccaccgccacgccgacttcgacgtcgacttcgacgtcgacgcgcggtccgcggcgtcggccaggaatctcgccagcgccttcgaggaggacctggaggaggaaggggacgttgggtgggacncggccgccaagcgccggagctgctcggatcaccggcgcagcgcgtcggtcgagttgtccaagctgtcgaggagaaagaccagggctttcaaggacggtgatgggggcaggagctggcacaacggccgtgcgcatggccactgcttctcagatgcgagtgcgatca

SEQ ID NO: 38338 - DNA, 657 bp, Zea mays
  Clone ID: MRT4577_134967C.1
gggaccctcgggccggccggaacaacccccctggcccgacttgccgagaccgcaggaacggcgtcgctgccttggtggccgccactgcgtccccgacgacgacggacactgtccgccgccgcgctcttcgcctccattggatcgccgtcttaccggcatcctcgcgctggtcctccgatcctccgatgtctcctcgcgtggtcgcgtctgtcctccaatgcccgactccggcgtcctcgccactgacccatccataggtaaagcctttatcccaatattaattcgtatcctgcaccaaggagctgccgtgcgcttgattcgctgcatctgagtgtcacggccgcgactacgcgccctccaatcctccatcgcctcccgtcgccgccgcacagttgcgataggcatcgaccctgcatcctacgtggtctggtgctggggaatggggaggagtgtcaccctgctcttcattatttgcttagttttgcgtcaccagatgatgatccaagcttgaaggattttcttatgaaggtaatggatttctcctttgtacctgtatattagtgtgtgttttattttaggttatttatgagtcttaatctggaacagtattcttagcaatatttgtcattcaagtaaaaattacattgctaagcttcg

SEQ ID NO: 38339 - DNA, 374 bp, Zea mays
  unsure (1)..(374): unsure at all n locations
  Clone ID: MRT4577_134968C.1
tcgcatgacagagggtctgcattcccagttgcaaaaagaaatgcaaatgttgacacaagagtttgacgggtcaacaaagaagctcagtgagttggaaaaaaataagttagacctggagagcatattgaaagaactgaataacaccattttaggtttgaactcggagaaggatgcaacactccttcagcaacagcagtctttacagaaagtatctgatttggagttagaactctcaaagatgcagttggaaatggagggtccttgaagacanctgtttgtgagcttgaagaaggatggttgagncgccatacagaaacanaaccagtcctttgaggtgcttaatacagaaacttggtgaggagataaatacattc

SEQ ID NO: 38340 - DNA, 920 bp, Zea mays
  Clone ID: MRT4577_134969C.1
aaaatcaagagaatattgtattccaaattacgaataaatgcgaaacaagcaaagcagctttcgagatcctatgtgacgggcagtcaaccaagaaggaggatggaactaaatcagagcttcttccaagggcatcctttggcttcccactttggctcgaggtccaaccagccgtcggtgtgataaaaccaggggaaacggtagaaattactctgcatcatgaagatttttacacacaggaagaatttgtcgacggaataccacagaactggtggtgcgaagacaccagggacaaggaagccgttctcagaataaacataacgggcaacagctcaaccaaaaccaagacgcacaccatcaacgtccaacatcgctgcccaccaccatcggcgccaccgccggcgatgaaccaacaaccggtggctgccgcgccaccaagcaatgtccttgccagcgagggacactcatcaaagcgttcctcgaagaagagccagtccaagcaccgggaacagcagcaggattacccgcagtttgggacctcagaggtacacgacctgtgccgcatgcggtgcccttgagacctgtacagactactcttacattactacaaagaagtatggatactgaagttctgtctaggttctgtacatatgcttcactcgatcagctgccactctaacgtagcccaagcaaagagtctagagtcctgggataacagtgttaacaacttgttgttttatttttgttccttattaaggagtgttcgctagatagttgaagccagggatatttgaacaatacttggtgtaatatgttccatagaattaccctaggtttgttctctcttcacgcagcagttctaatgatcttgtacttcacactattgccattgttaatatttatctcatgagactatttgttcg

SEQ ID NO: 38341 - DNA, 1371 bp, Zea mays
  Clone ID: MRT4577_13496C.1
atggagagtcatgatctctgggcagaaagggaatcacggcttgtgggtggctatgagatcgatggtttcggttatgactatggtgctggtaagtggtattctttccgtttggaaaggctaatcatcgatgggaaaggtccagatttccgtgaaggtgcagaaggagtggtatggttcaaagataggttgtgtgtccccaacatcccctcaatccgggaactgatcctcaaggaagctcatgagacagcgtattctatacaccctggtagcgagaaaatgtaccaatacttgaagaagagattctggtggtacggtatgaagagagagatagcagagtatgtggccagatgtgacagttgtcagaggatcaaggcagaacatcagagacccgcaggattgttgcagccgttgcagattccgcaatggaaatgggatgagattgggatggactttataggttgtctaccccgcactcgagctggttatgactccatctgtgtagtagtggaccgtttgacaaatatggcccatttcataacagttaagaccacctataatagtgcagtgttggcagagttatacatgtctcggattcagctacacgaagctttgggtacacacttgaaattcagttcagcttatcacccacagacagatggtcagactgaaagaaccaaccagattcttgaggatatgtcaagagcttgtgctttgcaagacaagttaggttgggacaagaggctaccatatgcagaattctcctacaacaacagctaccaagccagtctgaagatgtcaccattcgaagcactttatgggaggaattgcagaactccattgcattgggaccaacccggtgaacgacaggtattcggcctagagattttgcttgaagacgaagagaatatcaggatggttcgggaaaatctgaaggctgcgcagtccagacagcgaagctatgccgatatcaggagaagagaactcagttttgaagtgggagactatgtctacttgaaagtgtcgcccatcagaggaaccacaagattcaaaagatgtggagaagtggcttatcaactcagcctaccagagaacctgtccgcagtgcatgatgtgttccacgtgtctcagttaaagaaatgcttgcgagcaccagaagagcagttgccaatggaaaaccttgaagttcaagaggatctgacatacattgagaagccaacgcaaattctagagacagcagatcgggttacccggaggaacaccatcagaatgtgcaaagtcaaatggggccatcactcagaagaagaagcaacctgggaaagagaagatgatctgagagccaagtaccgtgaactctttgctagccagccctga

SEQ ID NO: 38342 - DNA, 758 bp, Zea mays
  Clone ID: MRT4577_134970C.1
cctgctgaatggggcaagaatgcaatgcttcgtgttaatgcctggcagggagctccaactggtgggaatccagttatcgagagtttcttagtagacatctatccactaaaaatttatctgactgaagcaatgtacagaatgatgtggggatattttttccctggagatgaccagcaaccacaaaagcgacaggagcttttcaaggtctccactacagcaggaccaagacgaaagaaaaccacttctgttgcagagacaaccagtcccaataaccagtcatcaaaagaaactacatttgcacagaagcctgaacttcgaaggacatcttcatttgacaggacatgggaggaaccagttgctgagtctgtagctaacgaacttgtttcacaaatggagggtcaaacaaatacccaatatgaacctcaagatgctgctaaggattccaagttattacgtcctgtccgctctacccgcgaggataagaaaattgtagagcccaatgagttgaaacaatctagacctcaaaaaatgatggacttccgcaatataaaaataagccaggttgaactgcagctcacatatgaaggattgccatttgctgttagtgatgtaaggctacttatggataccttccatcgtgaggattttacaggaacatgggcaagactgttttctcgagtaaagaaacatattgtatggggtgattgaaagtctgttacaggcatgcagggtaaaaagtttaaagctaaatctagcag

SEQ ID NO: 38343 - DNA, 184 bp, Zea mays
  Clone ID: MRT4577_134971C.1
ggaaaacaactccacccgcaccgtcacactcgtagggcacgactagcacgaccagggcccggtgaaacaccctggggcgcatccaatgccacatacaaagccaccaatccgacaacgacaccaacatatccctagacaaacctgtcggcgatcgacgggccagacgactagagcggaacaacca

SEQ ID NO: 38344 - DNA, 237 bp, Zea mays
  Clone ID: MRT4577_134972C.1
ccctcgcgtgattgatcgccgccggctgcagtctgctgcagccgccatgggaagaaggtctacaagatgctatcgccagatcaagaacaagccatacctcaagtccagttactgccgtagtggccctgaccccaagaccaggatctacgaggctgacatgaatagaatggttcgcaggcgagccgagctactgagcgcagcttgcgcgttgggagaaggacaagcgtctccagggag

SEQ ID NO: 38345 - DNA, 455 bp, Zea mays
  unsure (1)..(455): unsure at all n locations
  Clone ID: MRT4577_134973C.1
ttggctctggacctttgggctgatttatgtgcttgtcccctaccgtcctagctatgtcgcggctccttaaggatattaatcttcggaagtcactggggttactggcatgagtgcagggagtgcgggaggccttacagaggtcacggcggcgggtgcgacgagcaccatggtaacggtggtggtgggcacggtcattgtaggctcttgttcgttacgcatctccttcatagggagagctgggaccaccactttcttcataaggatagttgggatcatttctttcatagggatggtagggatcatctcttcatctatagggatttctgggatcatcatgaaagtaggggcggttggggtcatctgttgntcatccacggcggcggcaggctaaggagggattgactggccctattgcactggacgttagaaaggcgtcatggcggaagttgtttttt

SEQ ID NO: 38346 - DNA, 299 bp, Zea mays
  Clone ID: MRT4577_134974C.1
atggaatgatcttttcgtgcacaatgtctatggaggaatcttcacatggatgactaggctgttacaccattcggatgttggagtacttgctctgatatattacatcgactagatacacatgcttctaaacatacagctgaatcaactacatctcgacagcaaataacagatacatcttgatataattggcggattatacatgtcattagaaaacctatgacctattgctatttatgatgacacatatgttttaactaaattgacacctaaaatgcttaagttagtactttacagtaaac

SEQ ID NO: 38347 - DNA, 675 bp, Zea mays
  Clone ID: MRT4577_134975C.1
ccggccgcatgcacagaccgactcggtaactaaaactaaaacgagcagcgcatgcatgcatctaccgtccggtttcgtctgaaaccatcattaatttcgatcgtccactccacgcacagcaagttctttacggaccttgccgcatatgatatgtacatggtgacaagataaggtacaggagaattgatgaaagaagcgttgccggccagtcgtcgttgcacaagaacaaacacataaatttattgtattgttcaggccagaaatatgtggaaagtgggtctttaacttaattcggaagaagcatatagcactccaaaaaaaaagattcatattcatcacatagccaacagatagcatgtagtagctgttcatgcatgtaattctttggcaagtcctggtcaggaagtaccatttactgtgtgtaggacgaataaactgaagtgatgtgtatgtttctgatttctttcgtacttgcaacccggggcccacgtggtttttttactcccttctatatgtactgtggaaaatattgtaaccgcacaagacacactcctatgctatatatgttgtatgcacaagacacactttgttaacgaacaaagagatcgatgatgcaaatatttatcactatatatatatatggctattgtcaaaaaaaaaaaaaaaaaagcggcc

SEQ ID NO: 38348 - DNA, 1165 bp, Zea mays
  unsure (1)..(1165): unsure at all n locations
  Clone ID: MRT4577_134976C.1
ttcatcaanatgaccgggatcaaggtcgcgggcaagccgctgtccgtgtcgtcgtcggcctactccagcctgccgacgatcatcgactccggcacggtgatcacgcgcctgcctacgggcgtgtactcggcgctcagcaaggcggtggcgggcgccatgaaggggacgccccgcgcgtcggcgttctccatcctggacacgtgcttccagggccaggcggcgcggctgcgcgtgcccgaggtcaccatggccttcgccggcggcgcggcgctcaagctggccgccaggaacctgctggtggacgtggacagcgccaccacgtgcctggccttcgcgcccgcccggagcgccgccatcatcgggaacacgcagcagcagacgttcagcgtcgtctacgacgtcaagaacagcaagatcgggttcgccgccggcggctgcagctgagaagcgagtaagcgacacctctacacgcgcatgcacagaccgactcggtaactaaaactaaaacgagcagcgcatgcatgcatctaccgtccggtttcgtctgaaaccatcattaatttcgatcgtcccctccacgcacagcaagttctttacggaccttgccgcatatgatatgtacatggtgacaagataaggtacaggagaattgatgaaagaagcgttgccggccagtcgtcgttgcacaagaaaaaacacataaattaaaacattattacaggagtagggtatttattgtattgttcaggccagaaagatatgtggaaagtgggtctttaacttaattcggaagaagcatatagcactccaaaaaaaaaagattcatattcatcacatagccaacagatagcatgtagtagctgttcatgcatgtaattcttttggcaagtcctggtcagcaagtactatttactgtgtgtaggacgaataaactgaagtgatgtgtatgtttctgatttctttcgtacttgcaacccggggcccacgtggtttttttactcccttctaatatgtactgtggaaaaatattgtaacccgcacaaagacacactcctattgctatatatgttgtatgcacaaagacacactttggttaacgaacaaagagaatcgaatgatgcaaataatttatcactaatatatatatatggctattggttagttt

SEQ ID NO: 38349 - DNA, 694 bp, Zea mays
  Clone ID: MRT4577_134977C.1
gggttgggttttttctcaagaatcaagtgttacccgaattttaaaaacagcaaccagagcatacacgcatacacagtcgcatagacactgattacaaacagtcgcccagcagccccagctcacgcatacacactaaaccagacgtccagacagtcacaattcacaatcagaattacagacagtcacaaactcacaaacagaattacagctcaccagcacggcagaattctgattacaaacagtcacaaactcacaaacagaattacagctcaccaggcaccagcacggcagcaccagcagacaccggccagccactgcccagctcactgcagcaagaaaggggaagaagttgatgtgttgtttatcctgattagcagccactgcccagctcactgcccagctcactgtttatcctaatcagaattacagacagtctttaacttcttccccttcagtcattcacgcactccacttcaccaggcagcagattagcagccattctgtcattgatgtgttgtttatcctgccatttgattagccttcccctgcgctgcgaactgcaacgcgagccctggcggttggcgcggctggagctagacgatggagccttggagttggagcccttgaggccttgatggctgccgcctgccggcctgccgcgagcccgcgaggttggaacttggagagtaggaat

SEQ ID NO: 38350 - DNA, 623 bp, Zea mays
  unsure (1)..(623): unsure at all n locations
  Clone ID: MRT4577_134978C.1
gaatgggatacgcgcatcatttctccctcgatgcatgcagtacaaggcctgcaagcaagaacacccatacatagttcaggaggtccttttatggacacgtggtgatgcacaaaccatgcacgcctcatgacaacaatatgtgaaaaatatgtaacgtaatgtgagcctaccactacaatctccaccactatacacacactagttcatccatctagtagccaaaaaaatcatcaagaacaagaacagcagcaacacagatcccccggagaagtgaaagggatactagctagctagctagtatctatggcacaagttctgccttcgttctcgactccacgggcttcccgcagtctcctgcccacgctgtgatgaatcacgttgagctgctgggctgctctgctcctgccaacgctggtgctgctgcatccgccagctcctgctgccagctgagtccaccaccatgtcgccgcccccgccctccagtatgcgcagaacatgggacatgcgcggcctgagatgagggtcacgccgtatgcacaggtttngccgcgtgcaccatgcagtagacctcgttctcgcagaacgccctcccagcgagggtccagcagctcgtcctggcgcac

SEQ ID NO: 38351 - DNA, 274 bp, Zea mays
  Clone ID: MRT4577_134979C.1
cctcgaggccggccgggacctcctcctcgctactcgactctaccgagtcccttgctggcaatgagggggagagccgacaacctacgatgaggcagtcggggactacgacctcggagacgacgacatcgtggacgaggacgctcgaggtgttagtcggctcctggcgcccgccgtcccgcgctccgctaataccatcggcggtggcacgacgaggccgaggtacgaccctggtcttcagctttgcaggaatgactactacctaccttggcgacct

SEQ ID NO: 38352 - DNA, 282 bp, Zea mays
  unsure (1)..(282): unsure at all n locations
  Clone ID: MRT4577_13497C.1
tntnctgtnaagntcgngccggcgcaggcgggggcatcgtggggctgggtgctggttgccatgctggccacgagaaggatcagcattgccctattttcttgtttttctcggctttttgaatccaggtcgggggggcaggctggggtgcattcatctcttgcatgtggctggttcgtatgcctgtggcccctgctttgttctgcgtctttcgtgtgttttgtctcacgacgccgttctgggcgtttttggttaatgtccgtcggcctttctgttgcgtttttg

SEQ ID NO: 38353 - DNA, 318 bp, Zea mays
  Clone ID: MRT4577_134980C.1
agtaataagataaaaaagagaattccctccaccaaattgatgagatggtctcgcgataatcacctacctagaatggattgatttttcaaacaaacaacccctaattggagcacaccttgatacataggaaagagcacgaatccaaactagggtttaagatgtcaggctatagatacatttctacatttctggggcctttgtgccagtatataagcacaacatcagctacagttcttccctgcaacagaccaccataatgtgcaccatgatttgtcattgcaaaacctagttatcaagggcgtagtactattggccacc

SEQ ID NO: 38354 - DNA, 284 bp, Zea mays
  Clone ID: MRT4577_134981C.1
cttcttcagactcagagccatcgcgccgcggcatcctccgttcctgccccctctttctctagccgagctccttttctctctcctagagaggcttctcccttcctcctcgctcgcccccattgcctttgggctatatagagcgggattggattggaaacggagcccccggcgagtttgaaacccaaccaaaacccccacctttctcgcctcgtactcgcgcgctccccaccgcccgccaccgtcgccgcgtctggtctagaaccaaatgccgcgagatctgcgca

SEQ ID NO: 38355 - DNA, 440 bp, Zea mays
  unsure (1)..(440): unsure at all n locations
  Clone ID: MRT4577_134982C.1
cgggnctggaataccggggcggaccacaggcgtccgcccacgcgtccgccaaggcgtccgggtattgcttttaaaataatccagtaaaacttttaagccggaacgaggatttgttgggggccactaataaggtttgagcagggaagggatccaaaatttgttgttgggggtgggtaaccatttttggttgggtccatttgttaagttttggttggttccatattggagatttttttggtggtttccatgcttccttccactccacaaatatggtgggcgaaggatttatgtccatgcttgccagattattgccaggggttggaagttttgtgttggccttattttaaaaaagggggttggaaccgtaggtggggttgggatttaattagctgggttggtagtagtgggggtcggaatcgttttgtgaaagggaccaggct

SEQ ID NO: 38356 - DNA, 321 bp, Zea mays
  Clone ID: MRT4577_134983C.1
ggcgaggacagcatgatcttcggctagctcacacacactgccaagagctagaaacacattgatcaccaggatgcatgatcttgttcaggtgtgtgcctagggacttcagatcccgtgtctgggacatgatcactgggaaggacacacacatacaccatgtatgcaaacaacgatacccacactctgttgcgcatcatgaatgtgcttataaccaaacagggtgctaccaccaccctcatgaaggaggacgaagacgaccactaccataacgactgaagtgaggactgatggacagcgctgctgctacctttcacgaagcgc

SEQ ID NO: 38357 - DNA, 290 bp, Zea mays
  Clone ID: MRT4577_134984C.1
gctgttgctgctgggcatcaccggcaccactttcttcgtcagcatgtggatccacaacacggcgtgcacggtcatgatgatgcccgtggcgacggggatcctgcagaggctgacgggcgggggcgcttgggccgggaccggggcgcacgacgaggtccggcggttttccaaggccgtggtgctcggagtggtgtacgcgtcggccatcggggggatggccacgctggtggccaccggggtcaacatcatccgagtgggaatgcggtccacctactgctcggaggaggagc

SEQ ID NO: 38358 - DNA, 444 bp, Zea mays
  Clone ID: MRT4577_134985C.1
cgcacgcatgcgcacacgcaagtgtcaggatacgaaacgggcgacatggctcgcgggcaatgtgccatatcaggggccgtggtggccgcggtgctgctgctggcaacggccgcgacgacctcggaggccgacatcacctgcgggcagctgagctccgccatcgcgccctgcctctcctacgcccacggaacacggtccggcccctccgggtcctgctgtagcgacgtcacgaaccttaagagcgccgccagcaccgccgacgacaggcgcgccagctgcaactgactcaagaacaccgccaggcacgtcagcagcctcaaccgccacaacgccgtcagcataccctccaaatgcagcagtagcataccctacaccatcagcaccttcaccgactgctccaaggtgaactaaaacctagaccacgcgctactacgggcggctgat

SEQ ID NO: 38359 - DNA, 1134 bp, Zea mays
  unsure (1)..(1134): unsure at all n locations
  Clone ID: MRT4577_134986C.1
cccatgctgcccggtcctggcggcctggctcttcgcggcgcacgcgcgcaccgcgctgtccgtgcccccggcgcctccaccctcggcgctagcgggggacgagggaatggggcccgacggcggcgacgacgggcccatggtaccgtacgacaaccagaggtgtgtcgacgcgctgggcgccgcgctggagcggcgcggggtggggctgccccggcccaacgcgacttgcgacacggtgctctgcttctgcggcatccggctccaccagatcggctcgctccgctgccccgccgcgttcgccgtcggtgctggcgccgcggccaggaacgccacgcccaccgccgcggtgaaggccctggagaagagctgccgcaacgcctcctacgccggctgctctcgatgcgtgcagtccctgcaaaagctgaaggggaacgtgagccgcgaggtctccggtgccggcggcgaccgcgcgcggcggatgctggggcgggactgccagcttatgggcctcacgtggctgctggccaagaacaagacggcgtacatccccaccgtctccgccgtgctgcgcgccatgctctacaccgcgcgcccgacggagtccgccggcgcggcgccgcggtgcagccccgaccaggagaacatgccgctggccgtggactcgctgcagttcgagcgcaccggcagcaccacggggtccgcggctgccaacgcgacgccgcgcggcgcccccgccgccgccctccttggcctcgcgctcagcctggcggtcggctggtgggatgcgttcttgtgaactcccgatgcaagagggctggggttggagggcgtggcgtggtggagctttgttgataacatgtattttgtacgtagtagttgttgttagcagggaagggagtagcttattttgcatagcggggatttggcaaatactatggcggagtgacggcgtggctgtgaatgcgatcgtggttgttgcttgcagatggctgttttgacatttcgccaggggaatgttgatgtggcttttaaaaattaaaaaaaaaaaaaaaaatnctaatntcggtggtttctnnaatcgtggtgcgattngaccacttctaatgcaccatttggatgaacttctgattgctg

SEQ ID NO: 38360 - DNA, 523 bp, Zea mays
  Clone ID: MRT4577_134987C.1
gtgggaagcttcctgcccaacagcctgaagcagcaccagaggcggatgagcgcgcagcagcagctctccccggttccggcactgccagaacctgaagcgcccccacccgtgctcaccgcagccaccccgatctctctggcaggtcctgggaacgggttccatgatgcgccgccaccctccgccgcacctccccagccccacgccagcgccatgaacctgaacgcgacgggcttccccgtggctggctggcccgcaagctcgccgcagcagatggtgtacagggcttcccctgacatcaacgtcagcttgactccccaggagtaggatcgttgggctcgtcgtcgtcttctcttttctttccgtcgcctctacgctgatacattttgggagagagagaggaagtgagctaggatcatgaaaggataggcaatatactgaatgagaatgaactgatctgtaggtggcgccaaccatgactgtggcagttgatttagtcctactcctttttcagttcttgtttctt

SEQ ID NO: 38361 - DNA, 1694 bp, Zea mays
  Clone ID: MRT4577_134988C.1
atgctcccggtgctcgaggtcctctgctgcgccgccgccggccgtggggggcgtggactggtacagcctgtgctgcggcggacgcttcagacgaaccccagactggagggcgccctggagatgctcctggtgctcgaggtcctctgctgcgccgccgccggccgtgggggcgtggactggtacagcctgtgctgctgcggacgcttcagacgaaccccagactggagggcgccctggagatgctcctggtgctcgaggtcctctggagggtgccctggagatgctcccggtgctcgaggcgctggaggcatccacatgaccgcatatttcacggcgccgtgggctggtggcgcgacgtcaacgagtcgccgtgctctacggcatcgtctcggccgtcgcgctggtaagcaccctcccgcttcgcttcgcttccctgacccctgtctggtccaattaatcagaatcgagtgtagggtgtcagagtatggatggacaacgcagaaggtgttccagtttctaaacttccttgtgaacggcgtgcggtctgtcgtgtttgtgctgcggcgaaatgtgcaacttgtagagcctgaggatatgcccgggcttgcattcttcacgacatatgcacttttagtgctcttctgggctaagatttattatcaggcacgtgccatgtcgactgattggcttagaccaactttctattggatcaacggtgtggtctatgcaattcaggagtttgtcgcgcacactttgaatgtcaattgtgccaagtttgggaggcgagcatcaaggatcctcatcactggtggggaggatttgaaggtcaatctttgggctatagggaaacccggctttacaagtccagttgagtcagtaagctttgactcttctgaagttacgataggtgctggtgcagcaagtggaacgataaaaatatggaatattgaggaggcgaaagttgttcgaactttcactggacacaaatcaagctgtgcatctcttgatttccatcgttttggagaattcttagccactgggtcttcagatacaaacatgaaaatatgggatactcgacagcagagatgcatccacacatacaagggtcatacccaacgaattaatgtgcttaaatttactcctgatggccgatggattgtttctggtggggctgataactcagtgatggtctgggatttgacggctggaaaactcatgcatgatttttgtcttcatgaaggtccagtcaattgcttagttgttcacccctatgagtttttattggctacaggttcagttgataagactgttaaattttgggaccttgaaacttttgagttgatcggttctgctggacatgagaacaaccgagaatactttgagctgataaaccaattgcttattgttggtaaatgtcctcaattagtagttaatgattggtttttcagatattatggagagatattatggagaggctacataaagatggtatactatcaagggcaagcaaagatggttatacagttaatcaggtcagcgccttcagagcaaaataacagtagggccttgcactgtatctgcatcaaagagaaggatctgaggttactccgttcggaggagcaaggcttttctccagatcctcaaggaagaagatccagtcagatatgtgtcgatgctcatccccaacgtaccta

SEQ ID NO: 38362 - DNA, 296 bp, Zea mays
  Clone ID: MRT4577_134989C.1
agcagtggtaacaacgcagagtacttttttttttttttttttttttttttttttacgacgctggggactaaaaactgcagttccttcactttattactgtttcgcctttacaaagctatgcatccaaacactactaccactaacgatccacacaaaaaccattattttcaggaactaatgggcagcaaacatttgagatagtgccattgtttaagggaaatgagggggggggggggggggccatgtttatacccccgaacggcccggaccctgtctcacctcgaggcgccgtcaac

SEQ ID NO: 38363 - DNA, 1336 bp, Zea mays
  Clone ID: MRT4577_13498C.1
gcttttcgtcgcatgccccctacgtaagctcggaattcggctcgctcgccggccggggggctgtgtgtctgtgtgtttgtgatagaatccaaagcgcaagcggctgcaggcagcagcgccgcgcaggcgttgtggcctgtgggagaggaaaaagagaaagaggaaccggccaagacaagcaagcgagaggccagggccgcggcgttgcgtcagatggggaagtacatgcgcaagtgcaggggggccgcaggcgcggaggtcgccgccgtcgaggttacgcaggtcgtcggcgtccggacgaggtccaggtccgcggcggcgaccggcggtgtcgcgaaggtcgtcgccccgaggaggaagagggcgccggcgggggagcctgctgccgccgtgggcgctggtggggacggcggaagctgctacatccacctgcgtagccgcatgctgttcatggcaccgcctcagccgcagccgtcggttccgaccccggcggcggaggctgctgatggcgctgcaggacagcagggcgcggcgctcgcggccgggctctcgcgttgctccagcacggcgtcgtcggtgcacgtggggggtcagcgcgggagccacacctgccgctccgacgacgctgcagaggctggcggggatcacgtcctggtggatgtctcggcgagcaactccgggagcggcccagaccgcgagaggcgagagacgacgccatcgagccgggcgcacggcgagctcagcgatctggagtcggatctggcggggcacaagactggcccgtcgctaccggcggcaacgccggctgcggagctgatcgtgccgccagcacacgagatccaggagttcttcgccgccgccgaggcggcccaggccaagcgctttgcttccaagtacaacttcgacttcgtccgcggcgtgcccctcgacgccggcggccggttcgagtgggcgccggtggtcagcatctgaagcgagcgtgcgtccggtgcaaggtgaagctagaaagagaaaagatgccccccaacaaacataacggagaagagaaaaaccaaacaattaagcagctttatatagcctaagctaaccaccaccattcatctcgtccaaatgccttgcttttctctggagctagcaggagcgtagttattatttagtactactttacttattcagaggttatcttgaccccgatagatcaatccgcttactgtgtaatttgtctcatgcatctcttagatggagtttaatcgtcttaatttattactgtacagcagcttgctggcttgcaaagaaagatctggtttgtctctaaaaaaaaaaaaaaaaagcggcc

SEQ ID NO: 38364 - DNA, 330 bp, Zea mays
  unsure (1)..(330): unsure at all n locations
  Clone ID: MRT4577_134990C.1
ggtcacctacagtctttgtcagaagctcaaatactgatcncactgatccagtatgactatgtcagaagggaggcgcgccaagggtgtcggcgggccagctggtggctctcgggctagcgctcctctgcgctgtcgccggcccggccgccgcgcagaactgcggctgccagccaaacgtctgctgcagcaagttctgctactgcggcacgaccgagtatgctngggcgacgggtgccagtcgggcccgtgccgctcgnncggaggaagaagaggcagtggtggcggcggtgccaacgtggctagcgccccacccagctccttcttcaacgg

SEQ ID NO: 38365 - DNA, 637 bp, Zea mays
  Clone ID: MRT4577_134991C.1
gccggccggtttccaacaaacagacacatactacctaatttccctcaactcccgcatctatcccgagaagccgacgaggacaaaaccgacagccgagcaccctcaggaccttgattgcccactgcccaatctagacagctctttctcgctcgcctgcatccatgggcgcctcgagaaagaccgccactgtcactcctcgccgcgctgcgtcctcgctctgctagcgcccgcgagcgcacagcatgaagctgcaagaggaccctttcctgcgaagtctttcgccgctgcctgttcccctagatgtcgataccccgcggcatggctagcgtcaagccgcacctcgcaggggcgccaccgctctgatctctctcatcgcctgcctccttaactgaggtgatccctgccatctgctacggtgccgccggcatctaacatttatgctcaccctgtttgttctacgttatcgtgtccctggctggtgacctcactctcgcctgtataagagaggatcacacacacgcatcgtctgatactacatactgatctgcgactatcgtatagcgcgcccctatgcggctgtgcatgaataacaacttgaaatgtcatatgaaacacgaccagatacaccgacgctaga

SEQ ID NO: 38366 - DNA, 192 bp, Zea mays
  Clone ID: MRT4577_134992C.1
gaattccgtgcccacctcgtgtgctaccactttttcataaccaactgcaatgcttcgttatacagacacactctaccatagcgtgtggggccctgtcctttgccaaccacagggcgtacccctgcctactgccttacaacgacatgtgcttaacatgttgcaaacacagttaccaacccatattgggggcct

SEQ ID NO: 38367 - DNA, 341 bp, Zea mays
  Clone ID: MRT4577_134993C.1
cggcttgcgacaacccaagtatacaaccgtacaggctccggcaggtaatagaagctggcatcttacgtttatcgcccttgctgctagagctgttatggggactattacagcacatagcttaggagcatctattggtacaatacatcaggggacaatatcaacaacagcgtgtgctagctgagatagctgactactttaagcatccgcgattcattacattcaaccaactagctgcatagaactatgattcttatttgtaacaccatcatctaccatacagccagctatatgttggctacattcagcgattcataacattcaggcacatgacagactagaac

SEQ ID NO: 38368 - DNA, 779 bp, Zea mays
  Clone ID: MRT4577_134994C.1
tcctccggtaaaaatcacgcgaaaccatcctctgattccccctccccctcgtcccatccagatctgtctatcatcgtcgctccctccactctgaattcccctccccttctctcggtgaaggtcctcaccggcgcccccgctgccacggccctctctccaaatcgtcgccgacccgagaatctccgttcaacagcaaggtcatggcagaaaccattgatctaacaggggatggaggcgttcttaagacggtgatcagaaaagcaaaggatgatgctataagcccatccgatagccttccattggttgatgttcattatgaagggacacttgctgaaaatggcgaagtttttgacaccacacatgaagacaattctattttttcatttgaagttggccagggagctgtcattaaagcatgggatatagccttaagaactatgaaagttggcgagattgcaaaaataacatgcaggccggaatatgcgtatggaagtccaggctcgccgccagagataccagcgaatgcaacactcatttttgaggtggaattagttgcttgcaagccaaggaaaggttcaagtctgggcagtgtatctgatgagaaagccaggctagaggagcttaagaaacagcgggagctggctgctgccaccaaagaggaagagaagaagaagagggaggaggcaaaggccgcggcagcggctcgtgtgcaagccaaacttgacgccaagaagggcaagggaaaaggaaagggcaaatagattactcccaactgatgt

SEQ ID NO: 38369 - DNA, 299 bp, Zea mays
  Clone ID: MRT4577_134995C.1
atctgacgattctcaactcagaaaccagcccgccggctatcgttcttgctcctaattcgtggaagtcacacaagcctgcggcattaggggctctccctgccgcagaactgcgcgccgtcgccgacatggcgactgctgacagtgctcatccttgagtgtgctatgtgctgatgacacctgtgcctatcgactcagcagcgtgctcgccaaaatgtgaggagcataagcctccagcatacacgataaggagcataacgtggcagtcatctacaatgtcacatctgaggactggttccata

SEQ ID NO: 38370 - DNA, 186 bp, Zea mays
  Clone ID: MRT4577_134996C.1
cgcgcagagcggtcatcctgaccggctgcaacgctgagtacttcgtccccgagaagaaccagggcagcggcattcggaagcggtgggcgcaataagtgcgtgggcctcttggcgacctgcgcgagcaatcgtctcaccacgaaactgcgcatctaggccaaagtttccatcgcggcttgtggggca

SEQ ID NO: 38371 - DNA, 260 bp, Zea mays
  Clone ID: MRT4577_134997C.1
cccttccttaacttggaatcttttaaaggggccgccctggtgtttttttttttttttttttaaatcgcaacaccaaaccggtgtattggatattaggcaaaacagggaaattccctaaccccttacagtaattagttgacaaaaaataccaaattcacgttacggcaccacaacaggaccaaaaaaactttttttcatgtggatcctttgggcgcatcctccgggttaattaaaaatcatccccaaaagtggtctttttt

SEQ ID NO: 38372 - DNA, 370 bp, Zea mays
  Clone ID: MRT4577_134998C.1
aaaaaaaaaaaaaaaaaaaaaaaaaaaaaaaaaaaaaaaaaaaagacaaaaagacccaaaaataaatttaccgaccggtacatgccggcctgccacctttgcgtttaccgggttctattatagcttggcgtattaatggtcgtagttgttatctgggtaaatttgttctgcgctaacattttctcccatcatacttccccgcagcataaggggcaaagcctgaagggcttaaggagggggctccctcagattaatctagttgcgcttactggcggtttgctagttggcaaacttgtagtgccagatgctttcgtgacacgtccattactcattgggagaccgttcgcgtagaggccgccagtgtgttttt

SEQ ID NO: 38373 - DNA, 678 bp, Zea mays
  unsure (1)..(678): unsure at all n locations
  Clone ID: MRT4577_134999C.1
cagcatttgtgtgatgcacaccaggagatgcanatcatgggctgaagcagcacaatgtgcagttgctgcagctggcgtgatcatgcaggcacttgttggaaggaatgatgctgtgtggagcaaggagcatgttacttcgctacacaagatttgccctatcgtcaacactgatgaactcataattcctgtgtataaaagcagaagggcttatggacagctggccaaatgtcatacatcactcacaaacatctatgagtcaattcttgaacaggagatcactgctgttgatcctgtaatggaggatgaggacttgggtagcaggagggaaaggattttttctttatctactggtactgtacgtgcacgtgtttttgaccgttttcttttcgatacaccattcacaaaaaatggaaaaacacaaggtggtctagaagaccagtggaagaggcgtactgtgctccagacagagggttcctttcctgctttggtgaaccgtctgccagtcaccaaatctgaatctctggagttctctcctgtcgagaatgcgattggaatgatcgaaacaagaacagctgcattgagaaatgaactagaagaccacggagttctgaaggtgatcaactcccaaggcttcaaagcttgcaaaggatactccaaggaagtgnntggctgtgcagt

SEQ ID NO: 38374 - DNA, 1207 bp, Zea mays
  Clone ID: MRT4577_13499C.1
aggccggccgggacaaattcgggtaggcttctgctttcgctccatccccattccccatcccttgccaacacgattgcttttgcttccccacctagctaggcttagctaagctatatagccagccaatcaaacggcggcctctcatcactaggctgcaaccatcgctcatcagccatctaagcccctcctcctcctctcgagtctcctccccctgccctctaggcgaacgcgcggtggcgccatggacattaggctgctggtatccgccgacgccaacctcgccgccgctctgtcgcgctcccgctcttccaagtccgcgttccagcgccaggttgtcccgggcagccgggcgtcgtcgtgcaggtccgtccgcgcgcgctccgccgcagccgccgcgccggctgcgggaggcatctccgggcatagcaattacacggttggtgacttcatgacaagaagggacaatctccatgttgtccaacctactacaccagttgaccaagccctggagctgctggtgcaacacaggatctctggcttccctgtggttgacgatgactggaacttggttggggttgtatcagattatgatctcctagctttggattcgatgtcaggaaatgaattggccgatacaagtacaaacatgtttcctgatgtggatagcacatggaagacattccacgagctacagaggatattaagcaaaactaatgggaaggtcattggtgatgtaatgacctcttcacctttagcggtgcgtataaatactaatcttgatgctgctacaaggttgctacttgaaactaaataccggagactacctgtagttgatagcatggggaaactagttgggatgattacaaggggaaatgtcgtcagtgctgccctcaaaataaagaagaaaactgaagaaggtgcttgaactagactgctcgtcactgcttgcttggggttaatcatgcagccatttggcattgaattcattgaagcattgattggtgatgttcaaagtgtagctacagaattttgttctcaatactaggtagcatactagtgtagcagtgtgtaggttcatattcactgtttttcatcgtatccatgaacatttttattgatttgcataatggaatcaagagcttgtgaccgataaaaaaaaaaaaaaaaaaaaaaaaaaaaaaaaaaaaataaaaaaaaaaaaaaaaaa

SEQ ID NO: 38375 - DNA, 243 bp, Zea mays
  Clone ID: MRT4577_1349C.1
cggacgcgtggggattctacaaggctcggtgcacgatttgtataaattttgcgatcaagttcacatggaagaattgccacctgacagaaaaagcaccacaatcattcagggattttcttttggagatgtaggataaccattatgatgctgaaacatttcgccgtaggtagtaagctaccatggataccatggatacagaggtaaagaggtcttggttggcatgacctctgtatccacattatt

SEQ ID NO: 38376 - DNA, 388 bp, Zea mays
  unsure (1)..(388): unsure at all n locations
  Clone ID: MRT4577_134C.1
gtactacctgcacgccgcgctgaccgaggcggtcaggctgtacactgtctgtgctctcaaanaacaagcagtgcttcggagacgacgtcctgcctgacggttccagcgtcagcaagggagacatcgtgttctacgtcccctacgccatgggccggatggagtacctctggggcaaggacgccgaggtgttccggccggagcggtggctggatcaggacggagagttccagcaggagagcccgttcaaattcagcgttccaggtacgacgatgacttgagtttctcaatcaaacgccagctagtgtatgttgtgactgaactagtctcacgacgtccttgttgtgcgtcttgtcttccacaggctggtccgaggatatgcctggggaag

SEQ ID NO: 38377 - DNA, 5306 bp, Zea mays
  Clone ID: MRT4577_135000C.1
gcggccgccccaaaatttttttaaactttaggctcagcatcatggtaataaatctaacaacttgtttatgggaacgacttcaataacacaaggcttcaaatcgtgtataaacaaattgcgaggatgccctcgtcagcagctaatttcctacagggaaaaaaatacatatcacccagaataggcactattgtatcactacacaacattacatataactgttgtaaaatgtcggctcgctgtgatacagtagcaaaccgcaaaaaaaaacatggcactcagcatataactggtgcataacacaatacactaggttatacaaactttacactccaaaatcaggaatcggtgctgcaatacggtacagaacttcgaagactagttaatttccggttcctagaactatacaaccaaaactaatggaaatatggacatttggtgggaacctgcaactgaaagaatgaatcattcacatgctacctaatttctggcttgctacagttctatcatagctcggagagtatagcagggatatagtgagatagctcagcggtgagtgactggaacccattgacaagttgggtgtggaattcctggtcttcttcccctatcaatctgaaatgcacacggattgcacgcttgcagacagccatgaattcaagcaatgcagcgatgagctgctgcagttcttgggatctgagcctagtcgctggctcaccagataagaatgcagtgcacacacttaataccccactgttgacctgcacagccacacttccttggagtatcctttgcaagctctgaagccttgggagttgatcaccttcagaactccgtggttcttctagctcatttctcaatgcagctgtccttgtttcgatcattccaatcgcattctcgacaggagagaactccagagattcagatttgataactggcagacggttcaccaaagcgggaaaggaaccctctgtttggagcactgtacgcctcttccactggtcttctagaccaccttgtgtttttccattttttgtgaatggtgtatcgaaaagaaaacggtcaaaaacacgtgcacgaacagtaccagtagataaagaaaatattctttccctcctgctacccaagtcctcatcctccatcacaggatcaacagcagtgatctgtaaatagcagaagccaggctgcaactcatcagcgttgacttgtctagagtctggaattatgtgtaaagtgtgacttccatctattttagcctcatatatatgactaagcttctccataatatcaccgagacgtacatcccgtggttctctaaatacatactcctttttattgagcttgccaaaacgctcaccatagaaaccaactcggtagtatgtggcatcaatgaatggtatagggctagcctcctgttcaagaattgactcatagatgtttgtgagcgatgtgtggcatttggccagctgtccataagcccttctgcttttatacacaggaattatgagttcctgaatgcttgcacaaaaatggtagagttcagcttgtgtgaaaagtttattggctagttgaagatatttgaccgctgagtccactgttaatttggatgcaccatatccctcgacttcagctgcagatgcttctgcactcacatcagtgttgacaatagggcaaatcttgcgcagcgaagcaacatgctccttgctccacacagcatcattccttccaacaagtgcctgcatgatcacgccagctacagcaactgcacattgtgctgcttcagcccatgattgcatctcctggtgtgcatcacacagatgaagcaaccacataatgtgaagatctggaacgggtgcataggccatagctagtttatagaaaccctcggcagctgcatacctgtctacagtcactacagaacccaggagggcgtgttccagaccagcatcaagggcctggactagacatttagacaaatgtttcacctctacccaagaccacctattatcagaggagccttcaggggccgcctccaatgcagtaacagggaggccacaatcttttaacagatccttgcttctcacatcagccatttcctccagtgatttcctaaggcgccgagcttcaccactttcttcaagagaaccatcgaatttcatttgagttacttgcacgtcggacatcaactcggacaaagtaattgtcaacatgacccttaaccttgtagtgttcttgaaatagttgaatgagttcctaacaagaatctgcagcccaacaacagctctttttctaatcgaatcgtttcggaaaacagcaagccgcaaaagatgaaaagcaatttgcttcaagaagcggtcattctcccttgccattagtgttgcaccatgaacattaaatatattgtagaccacaggaaggaaagccttccaaaaagccaaggattggttcctagataaaagacccattaagattgatgttacacaatctagcttcgcgtaatcagtagtgatgcttcgagcgcctgcagcaactgaaaacttctcagttattcccaacacttcgaggctcacggcagtactgagattttcttcccaaagttccattttttgtctcagcactggatgtagagactctctcaatgccctggcggttgacccgattcttgaagattgtgcttgagcaagtgcttcgaggcatgaaataaggcctcagggaacaccagaaaatggatacatgtgggaacagggttagccctcaattaagttcccctaatcagccctattcattgagagaagcacttgctcaagcacaatcttcaagaatcgggtcaaccgccagggcattgagagagtctctacatccagtgctgagacaaaaaatggaactttgggaagaaaatctcagtactgccgtgagcctcgaagtgttgggaataactgagaagttttcagttgctgcaggcgctcgaagcatcactactgattacgcgaagctagattgtgtaacatcaatcttaatgggtcttttatctaggaaccaatccttggctttttggaaggctttccttcctgtggtctacaatatatttaatgttcatggtgcaacactaatggcaagggagaatgaccgcttcttgaagcaaattgcttttcatcttttgcggcttgctgttttccgaaacgattcgattagaaaaagagctgttgttgggctgcagattcttgttaggaactcattcaactatttcaaaaacactacaaggttaagggtcatgttgacaattactttgtccgagttgatgtccgacgtgcaagtaactcaaatgaaattcgatggttctcttgaagaaagtggtgaagctcggcgccttaggaaatcactggaggaaatggctgatgtgagaagcaaggatctgttaaaagattgtggcctccctgttactgcattggaggcggcccctgaaggctcctctgataataggtggtcttgggtagaggtgaaacatttgtctaaatgtctagtccaggcccttgatgctggtctggaacacgccctcctgggttctgtagtgactgtagacaggtatgcagctgccgagggtttctataaactagctatggcctatgcacccgttccagatcttcacattatgtggttgcttcatctgtgtgatgcacaccaggagatgcaatcatgggctgaagcagcacaatgtgcagttgctgtagctggcgtgatcatgcaggcacttgttggaaggaatgatgctgtgtggagcaaggagcatgttgcttcgctgcgcaagatttgccctattgtcaacactgatgtgagtgcagaagcatctgcagctgaagtcgagggatatggtgcatccaaattaacagtggactcagcggtcaaatatcttcaactagccaataaacttttcacacaagctgaactctaccatttttgtgcaagcattcaggaactcataattcctgtgtataaaagcagaagggcttatggacagctggccaaatgccacacatcgctcacaaacatctatgagtcaattcttgaacaggaggctagccctataccattcattgatgccacatactaccgagttggtttctatggtgagcgttttggcaagctcaataaaaaggagtatgtatttagagaaccacgggatgtacgtcttggtgatattatggagaagcttagtcatatatatgaggctaaaatagatggaagtcacactttacacataattccagactctagacaagtcaacgctgatgagttgcagcctggcttctgctatttacagatcactgctgttgatcctgtgatggaggatgaggacttgggtagcaggagggaaagaatattttctttatctactggtactgttcgtgcacgtgtttttgaccgttttcttttcgatacaccattcacaaaaaatggaaaaacacaaggtggtctagaagaccagtggaagaggcgcacagtgctccaaacagagggttcctttcccgctttggtgaaccgtctgccagttatcaaatctgaatctctggagttctctcctgtcgagaatgcgattggaatgatcgaaacaaggacagctgcattgagaaatgagctagaagaaccacggagttctgaaggtgatcaactcccaaggcttcagagcttgcaaaggatactccaaggaagtgtggctgtgcaggtcaacagtggggtattaagtgtgtgcactgcattcttatctggtgagccagcgactaggctcagatcccaagaactgcagcagctcatcgctgcattgcttgaattcatggctgtctgcaagcgtgcaatccgtgtgcatttcagattgataggggaagaagaccaggaattccacacccaacttgtcaatgggttccagtcactcaccgctgagctatctcactatatccctgctatactctccgagctatgatagaactgtagcaagccagaaattaggtagcatgtgaatggttgttcattcattcagttgcaggttcccaccaaatgtccatatttccattagctttggttgtatagttctaggaaccggaaattaactagtcttcgaagttctgtaccgtattgcagaaccgattcctgattttggagtgtaaagtctgtataatacctagtgttatctgttatgcaccagttatatgctgagttccttcttttttgcagtttgctactatgtcacaactagcggacattttgcagttttaaaaaaaacagtcaaaaaaaaaaaaaaaaaaaaaaaaaaaaaa

SEQ ID NO: 38378 - DNA, 2338 bp, Zea mays
  unsure (1)..(2338): unsure at all n locations
  Clone ID: MRT4577_135001C.1
gttttggaaggctttccttcctgtggtctacaacatatttaatcttcatggtgcaacactaatggcaagggagaatgaccgcttcttgaagcaaattgcttttcatcttttgcggcttgctgtttttcgaaatgattctattaggaaaagagctgttgttgggttgcagattctcgttaggaacgcattcaactatttcaagaacactacaaggttgagagtcatgttgacaattactttgtcagagttgttgtctgatgtgcaagtgactcaaatgaaatccgatggttctcttgaagaaagtggtgaagctcggcgccttagaaaatcactggaggaaatggctgatgtaagaagcaaggatctgttgaaagattgtggcctccctgttactgcattggaggcggcccctgatggttcctctgataataggtggtcttgggcagaggtgaaacatctctctaaatgtctagtccaggcccttgatgctggtctggaacacgccctcttggattctgtagtgactgtagacaggtatgcagctgctgagggtttctataaactagctatggcctatgcgcccgttccagatcttcacattatgtggttgcagcatttgtgtgatgcacaccaggagatgcaatcatgggctgaagcagcacaatgtgcagttgctgcagctggcgtgatcatgcaggcacttgttggaaggaatgatgctgtgtggagcaaggagcatgttacttcgctacacaagatttgccctatcgtcaacactgatgtgagtgcagaagcatctgcagctgaagttgagggatatggtgcatccaaattaacagtggactcagcggttaaatatcttcaacttgccaataaactcttcacacaagctgaactttatcatttttgtgcaagcattcaggaactcataattcctgtgtataaaagcagaagggcttatggacagctggccaaatgtcatacatcactcacaaacatctatgagtcaattcttgaacaggaggcaagtcctataccattcattgatgccacatactaccgagttggtttctatggtgagcgtttcggcaagctcaataaaaaggagtatgtatttagagaaccacgagatgtacgtcttggtgatattatggagaagcttagtcatatatatgaggttaaaatggatgggagtcacactttacatataattccagattctagacaagtcaatgctgatgagttgcagcctggcgtctgctatttacagatcactgctgttgatcctgtaatggaggatgaggacttgggtagcaggagggaaaggattttttctttatctactggtactgtacgtgcacgtgtttttgaccgttttcttttcgatacaccattcacaaaaaatggaaaaacacaaggtggtctagaagaccagtggaagaggcgtaccgtgctccagacagagggttcctttcctgctttggtgaaccgtctgccagtcaccaaatctgaatctctggagttctctcctgtcgagaatgcgattggaatgatcgaaacaagaacagctgcattgagaaatgaactagaagaaccacggagttctgaaggtgatcaactcccaaggcttcaaagcttgcaaaggatactccaaggaagtgtggctgtgcaggtcaacagtggggtattaagtgtgtgcactgcattcttatctggcgagccagcaactaggctcagatcccaagaactgcagcagctcatcgccgcattgcttgaattcatggctgtctgcaagcgtgcaatccgtgtgcatttcagattgataggggaagaagaccaggaattccacacccaacttgtcaatgggttccagtcactcaccgctgagctatctcattatatccctgctatactctccgagctatgatagaactgtaacaagccagaaattaggtagcatgtgaatgattcattctttcagttgcaggttcccaccaaatgtccatatttccattagttttggttgtatagttgcaccgattcctgattttggagtgtaaagtttgtataacctagtgtattgtgttatgcaccagttatatgctgagtgccatgtttttttttgcggtttgctactgtatcacagcgagccgacattttacaacagttatatgtaatgttgtgtagtgatacaatagtgcctattctgggtgaaaaaaaaaaaaaaaactgtaggaaatttgctgctgtcgagggcatcctcgcaatttgtttatgcacgatttgaagccnnnnnnnnnnnnnnnnnnnnnnnnnnnnnntaaaaaaannaannaaa

SEQ ID NO: 38379 - DNA, 516 bp, Zea mays
  Clone ID: MRT4577_135002C.1
tgatatacactaatctgaggagcatttgcattggatgtgttgtagtgcagctgaggcccctgtttacttgtgctttcctttatgcctatgatgacataattgccatggaaccatgttgtcattattgcccgtgttaatgtggatgatctttaaattgtgaggtactgggcatatgctgaaaattatgttgtttccaccatgttgtgattattgccatggaaccatggggcacatccatgcccaatgcaactgttatccaccatagatgacttgatggctgggttggatgaataccatggtttcatggctgcccagctatgttccttatgctccaagttaaaagatcacatgaaaatggcaattatatctgaggaaatatgaaataaagtctaaaaaataaataacatacatgaaaaataaaaaaatttaccgttaaaaaaaccaaaaaaaaaaaaataaaaaaaaaaattcaaaaaaaaaaataaaaaaaaaaataacataataaatataaaatct

SEQ ID NO: 38380 - DNA, 339 bp, Zea mays
  Clone ID: MRT4577_135003C.1
aaaaaaaaaaaaaaaaaaaaaaaaaaaaaaaaaaaaaaaaaaaaaaaaaaacaaaaaaaactaaaagaaaaaagactaaaataaacagaacatgcgaaagaatgaaattttcttatagagctacctaatgttctattcactggcacgaagtttcacaacgatgtgcgcctgtataaaccctggacgtacctcgagtttagttctccttgcaaccccattcccctctttcgccaggtgtcagtcattgctgaagaggcctgctctcggccgccctttccaccatttgcgcgccctgaatggccaatgggacgcgccttgcccctgtgctttacccctgtt

SEQ ID NO: 38381 - DNA, 223 bp, Zea mays
  Clone ID: MRT4577_135004C.1
aagcacaaacggaaaatggagaagacttaacaatacgcaaaaaataactttaacttcataacatttcctttttttacttgaaaacaacaaaatcccacatcatccacatgaaacattcctttcaccatatattatccacactcttaactttaacagtttcacctaccgactagtgtcccaattaatatttcacattatcaacatactgacacaaatatttact

SEQ ID NO: 38382 - DNA, 2232 bp, Zea mays
  Clone ID: MRT4577_135005C.1
accgttctttctttttttttttttttttttttttttttttttttttggtttttttttttaaaaagggggaacgatgcatctgttgacaaggcttaacaaaaaaacacagaatcagattcaatagttcttacacagaaacattgcagcagaaacgatcgaggggtgcttaaaaaaactatagcatgtctaagcatgaaagagaaaaaaaaacaaatgtgatagttttcgcataaaccataagaagacatgtatcaataccagcggatcatgtcttccacgacacaaataattaaccaaaaaagggaattttcttgcaaagggtaaaagaaccctctattcccttcaagcaagggtcgcttctgcactcttcccaccctcaccaccattagcagaagatacattgttggcctctgcctcagcaactgcatccatttcctctgcagtggcgtcaacttctccaagcgggcgaacctgctcctcctctggaagtggctcttcaacataatcattctcaaacgcatcagatggtacctcatagatcctcaactgtggctttgctggatctttgacaaacacatacttgccctcttcaaacttcatgcagatgtccacaattgacttgacgattccccacatgtttgcagtgttgaggttgatctgtgcagcaaaatcccttggcttgtatcccatcacagtgagcacagaatggttgtactgatcacgggggttcacccgtgacacatagcccaacttcatcatgtcagcaccagcaagcaaagcctgggcagtccagcgagcaagtttgttggcattgttcttgagctctgtagcaaggacagctcccacgctgggtctcaagcttctgcctccagtcaacaccagtaatctttgaatcaaactcatttagggcattgacggtaataaactggcgagtaccacttggatcaacactgacagcatgcacctcacagcgagcaacaaggctgatctcatcattcaacttccaacggcggtagcggtagccaacagatgcagcctcttcaccctcagaagcaaatgggttgggctcgtcaaagttaaccttctcaccattgcggtgcagcacctgctgagagaagttctggttgatgtaggtggcctcaacagcgagcgagtgtgcggagttgatgtcatccttgttctcaggaagctgctcctgcgcagtctcattgacagtgagcaggtcgagctgggagccatcacgcttgtcaaggaacagcttgttgcccacacgctgcacgacaatgtcccacgacaggatgctgcggggcgtgcacatgagagcggcgaggatggcatcagtcgcgaacaccgtggctttgtcctcctcagcgaggcggcggatgacagggtcgtcggtggtggtgaccttgaagaagttgcgggacttgaagcgctcgagacggcgcgcggccttggggttgacacggtcataggcccgatcgtaggactcgacggcgccgcataagaggagatcctcgggctggtcggacacggagaaggagagcttggtgaagttggcgaaggggatctgctcgcgcatggtccagtcgggctggatgtcgacggagggcttggctgacgacgagggctggttgccccggaagccagggtggtgatgtgagcggttgttctggaagtggcgatcgcggcgtgcgcgctccttctcggccaagcggcggcgcgcctccacctcctcgtcttggcgctgtgggagctgctggcgctggttgaagcgccacttggggccgaaccgttgcggccgcggctgcggcttagcatcgacgaggcggaacgaggagtcctcggccccggcgacgagcgagtcgtccgcggaggtgaagtcgaatacggagtcccgtgacgccgcggcgaaggcggcgggaccggcgtggttgcgcgtccagtcggcgatgcggcccagcttgtcggagcgggagaagggcgcgaaggggatggaggcaccgccccccagagactgcggaatcgccgggacgtcaggaggaccccagccgtcggggttgaacgggacgacgcccacgtcgaagcccatggtttgcggcggcgatgctggattggatccggaggctagaggcggcggcgcggcggcggctggagtgggattacgagggaggaggggcttaccggcccggccgaattcgaggtcttatatttattcgagacccggccggc

SEQ ID NO: 38383 - DNA, 409 bp, Zea mays
  Clone ID: MRT4577_135006C.1
ccggccgggatggttcaatctccgcttgcaagcagctctcgccgctcgccagcgagtcgctcttctggggctcatctaccgaccgtcccatcgtcgtggagtacaccagcgatggctctgggtttgccccttgcatcgcacgcctgacatagctgccgccatcgagtatgccatctgcaccctcaaggtggaggaggtcatcgtggttataggccacaaccactacggcgggatcaaggtgctgctctccctcgaggatggcgcactcgcaagttgaaagcccagacgaacgatcgattcagacactggtgatatcgctggcgtgttcaagctgtcagttttatagtgcccgcacatggcaaaactgggagagtggggtctgcccggtcgattcttgccagatggcggt

SEQ ID NO: 38384 - DNA, 452 bp, Zea mays
  Clone ID: MRT4577_135007C.1
tccggagggcgctaaacctgaccaagacaatccctaccaattttccttttctttgccggagacttcctcaggggggccggggtcaaccatttgggggtcaatctctgcctggacgatagccgccacgcaagggggctgcacacctacctccatgagagggcctggggctatggcgtgaacgacaggccctttgtccagaacgtccataacatgaacaagccggctgcttgggacggcactactgtgcataaatgaaaggaataagccaagaccgggaccctgcgtgagctggtacagggaggagcctatgcatgaaaaaagattactgtctaagcaaaagcatgcgggaatcctactaaagctttcatggtccgtgaagaaaccattccttgccggatactgagaatatacactccgtcccgttgctgccttttgatgaaagctttgggcaa

SEQ ID NO: 38385 - DNA, 274 bp, Zea mays
  Clone ID: MRT4577_135008C.1
caccgctgcatgcttgcttgcgatcaatttgggattaaccctgcatcatgctacgctacttattgttagacactgcatacgagcatgcgatctgttgctgctgtcgctgatgcacgatgctgagaaagaggaagaagaagaggaggatgaagagaaacaggagaatcagggttcgagggatgtgactgatgacaagggttccgcggatgcttcgattcttcacatgaacatcaacgctgcttgccaagcctgacaggtctagatgaacacgatc

SEQ ID NO: 38386 - DNA, 134 bp, Zea mays
  unsure (1)..(134): unsure at all n locations
  Clone ID: MRT4577_135009C.1
cgcagaagccagaanccctcgtctcncggcgcctgttccccgcgctcancgnggntanagatagcctntgccccatnccatttcccagatcccancaanggagcgcaaggatcgagtagccnacnagcnnannc

SEQ ID NO: 38387 - DNA, 195 bp, Zea mays
  Clone ID: MRT4577_13500C.1
cctactcctcgcccatcgatacgagggttttttatatggaccggggcacccacaacaaacttaataacttttatgctcaccactatctcaaaacttatgtatctatatactccataactaataataactattatttctttacattaattattaaatattttatttttttttattatttattcttatatactcatt

SEQ ID NO: 38388 - DNA, 297 bp, Zea mays
  Clone ID: MRT4577_135010C.1
tatccatgcatattgcatacactcatgcactaggattcacgccctgctgtctatcaccgcagcagagttgcactatctgccatggtgggtctctgtatataacgcattcactacttacgtagctgctggagacggactgatgcaaatcaagtgctcctcgtaggtcgtcagtcactcagctgccttttttttggtactctttacaagacgactgctcattcgtttgatggctaagactacacgcttatgcgcccggtttcttttgacagctcggaatgatcagtttctgtccgttgc

SEQ ID NO: 38389 - DNA, 1017 bp, Zea mays
  Clone ID: MRT4577_135011C.1
atggaggtcttgatcggtctccatcttcttcatctccgggcggcggtaacactctcttctgctcgtcacacacagctgatgggcacgcagcagagacgggatctccaggcgaacattccagcgttgcgtaaacttgacacgatgcttctcagagtgagaacgagccaggagagggccaacgagaaatggtggatcccaatcgtcaacgtgccccccggcgggctctccccgacctctagagcctggctcctgcaccagaaggagctggtgaaccaggtgctcaaggcggccatggccatcaacgccaactgcctcaatatggagaacgggagagccagcctcggggacgcgctgtaccgggtcatcacggacgtggagttcgacccaaacgacttcctatcgacgatggacctgacgtcggagcacaagatcctggacctcaaggaccggatcgaggcgtcggtcatcatctggaacaggaaggtgcacaacaaggacagcaagtcgtcctggggatccgccgtcagccaggagaagagggagcagttcgaggagcgggcgcagacgctgctgctcatcctcaagcacaggcacaggttccccggcatccccctgtccgcgctcgacatcgcaaagatccaagagaacagggacgttgggttcgcgctgctggagagctactccagggtcctggagagcctggcgttcaacgtcatgtcccggatagaggacgtcgtccagaccgacaacctggccagggatattgccaagaagaacgcgccgcccgcggcggaccccgcggcccgtaggaggacgaccctgctggacttcatgggatggaacagggacgcgcgcgggatggaacggggacgccgagggcaagaacgacgacgtatcgccacagtcgcacagactgatgaagctgccgaacatcatgaccaacctcaagaagacgtacatggacaagctggacttcttcttgacaacctcatttttctgcgatttccaatttactaa

SEQ ID NO: 38390 - DNA, 1572 bp, Zea mays
  Clone ID: MRT4577_135012C.1
atgaacgccggtgcgcagcttgagcggcggagctcggtgcggcggtcgcagagcatggtgcaggaggaggacaggggccagccgcccgacgaggagctcatgtcccggagccagggctccagcacggagccgtcgggcggggcgctcaggaccggcggcgccgtgcccgacaaggacagcgcgacgcccaagccgcgcctcgccgaacagagcgcgggaccttccgagatggacctgatgaaggagaagttcgccaagctgctgctcggggaggacatgtccgggtccgggaaaggggtgccctcggcgctcgccctctccaacgccgtcaccaacctcgcagcttctgtgttcggcgagcaacggaagctggagcccatggccccggacagaaaggggaggtggaagagagaagtgggctggcttctgtccgtcgctgaccacatcgtcgagttcgtcgccaagaaacaagtcctggacaacggcaccgaaatggaggtgatgggcacgcagcagagacgggatctccaggccaacattccagcattgcgtaaactggacacgatgcttctcgactacctggataacttcaaggaacgcaacgagttctggtacgtgaagcgcgactcgtgctcagagagcgagaacgaggagaggtccgacgagaaatggtggatcccgatcgtcaaggtgccccccggcgggctttccaagacctctagaggctggctcctgcaccagaaggagctggtgaaccaggtgctcaaggcggccatggccatcaatgccaactgcctcatggagatgagcatcccggacacgtatatagacacgctccctaagaacgggagagccagcctcggggacgcgctgtaccgaatcatcacagatgtggagttcgacccggacgacttcctgtcgacggtggacctgacgtcggagcacaagatcctggacctcaaggaccggatcgaggcatcggtcatcatctggaacaggaaggtgcacaacaaggacggcaagtcctcttggggctccgccgtcagccaggagaagagggagcagttcgaggagcgggcgcagacactgctgctcatcatcaagcacaggttccccggaatcccccagtccacgctcgacatcgcaaagatccaagagaacagggacgtcgggtttgcgctgcttgagagctactccagggtcctggagagcctggcgttcaacgtcatgtcccggatagaggacgtcatccaggccgacaacctggctagggagaaggccaagaagaacgcgccgcccgcagcagaccccgccgccggacgccgcggcccgcaggaggccggtggcgacgacgacgaccagagcaagacgaccctgctggacttcatggggtggactggggactccgagggcaagaacgacgacgcatctcccccgccgccacccgagctgccggcgcaggacgacggcaggctgatgaagctgccaaacatcatgaccaacctcaagcagacgtacatggataagctggacttcctcagcgggaacagaagcccctcaggtcgccattag

SEQ ID NO: 38391 - DNA, 306 bp, Zea mays
  Clone ID: MRT4577_135013C.1
aataatttttttttttttgttttttttttttggggtttttttataatatttggggtgctactaaagatcgaaaccctaaggttggggggaacggacccacgggaggggaacacgacaacacaccctacatgaaaagaaggaggggaaaaggggcacgtgaaagggttggcccaaacaacagaaccatacgaaaagagagaaaagccccgggcggggacgaaaaccacaccctaacggaacgggcggctcggcccagccaaccgcttataacaccaaaaaaaggagcccacggggcggggggagccc

SEQ ID NO: 38392 - DNA, 1527 bp, Zea mays
  Clone ID: MRT4577_135014C.1
gggtacctcgaggccggccgggaactctgcacttggggttgggctcaaccgaatcgcccccgcgccaggccgttctcgtcgacgccgccgaccaataaggagcctcgcacgccacgccacgccaccaccgccgccgcaacccacgcgatggcgccaccggactccatctccacgtgctcctcccttcccctcgccgctgcgcccatgtccgaaccgacccccttccccttcgctgcgtcgccgcttccaaacccgctcgtagccaccgcctccttcctacagcaccacctctcccgtttggcttcccacctgaacgtcccgcgccccgccctcgctgccgcggctgcgcgcacgccgggcccccagggcgcctccctatctctctctctcgcgcccgatgaggtcgcgcgcgctcttaccggcactcccgtcttcactgtctgcaactccagcaacgagttcgtgcttgtctccgaccctgccaccggcctccgctccctcggcctcctctgcttccgttcggaggacgccgacgccctcctgtcgcatgtgaggacgcggcaaccggtgctaggcaagggggcaaaagtggtgcctattacacttgatcaggtctatatgttaaaggctgaaggtatcgcatttaggttcttacccgaccctcttcaaataaagaatgcactggagatgaaatcgggcttaactgcttttgatggtgttcctgtttttcagtcagatctgctggttgtgaagaagcagaagaagcgctactgtccagtatattttcaaaaggaagacatagaaagagaacttacaagggcttccaaaggttcaagagggtcagccttatctaagaaaattatggttggaagtttggaggatgtcctgaagaaaatggagataaatgaaagagattctggctgggatgatttgatctttataccccctgggaagagcctcaaccaacatatcaatgaggtatcagcatgattttgttccacggtgatagctcagagtttgaacagactattcactttaaatgctatgatggtcagccaaacgaaatatcaaattgctgcctgagcttttcctttggatagctattttcatggtcagctttgtcagggaaaattaactaaagtgatagaatatggctgtgaaacaattttcttgttgcttcgattcacaaaattaacacaggttacacaagaagatttgatgaagagtaagttgcgacattggtaaatcaccttgcaatatagtttcatgaaaggggttatacaatagaaaaagagacgaatgtttatggccctattcggatgcatagtatataccatttttaccatgattttttaaatattttggttttcgaatgctaaggtgtttggacgtcacaaccttgtagttttgaaaaccatgcttttgctaaaactatagtcgtcttgtttttttagaagcttagcttcgtgcttaaactgttgtgtttgtaacctccgtttttggtgtgagtgatatatttgtattccc

SEQ ID NO: 38393 - DNA, 220 bp, Zea mays
  Clone ID: MRT4577_135015C.1
ccggccgggaataaacaagcaagcatgcagctatctcatgcatcacgactgaattcaccaacagccatctcgcgatgatattgaccagacggagtatgggctcctcagtatggatcttggtgataagcccccgcagctagaggagactaccggcccacacgtagcggattataagcagaagagagcggcggataccgacaaggtgccggtagagaagaaa

SEQ ID NO: 38394 - DNA, 594 bp, Zea mays
  unsure (1)..(594): unsure at all n locations
  Clone ID: MRT4577_135016C.1
cttgcgaaacccattcggtatttccgggtcgacccactcgtccagagtgactcaacgagcgngagctgcacacacgcagctagctttgagcagcaacatcggcggcaacaatgggggcctccatgatcttcaagtcagctatggcggtggcgcctaatggccttgacgtccctcggtcagtcacgccttcttataaaatcgtctcaatgcacaagaagaagatcaagaccgacaagtcctacgggattgggggtggcctgaccgctgatcgtcacaccaacgggagaaacggcaagggcaagggcgtgtaccaatatttctataagaaccgttcaaacgttgtctgattcatatccattctacaacgttgatgactggcttcccacccggcgacttttttggcggtggaaccactgggattttgatctgggccgtcacccttgctgggaacctccgtggaggagcccttctttttctcaacaaccaggcacngaaacggctaaggatatccaaatgctagccctttttgcgattagatgagcaaaaatacggtgtctgcctataatctaacctacatggatgctcaacccttcg

SEQ ID NO: 38395 - DNA, 108 bp, Zea mays
  Clone ID: MRT4577_135017C.1
gtggggttacacgcgggatcaacatgcgtatcgtaaagtgttatttctgttcggggcccatctatcctggacacggcatgatgttcgtccgcaacgattgcaaggtgt

SEQ ID NO: 38396 - DNA, 238 bp, Zea mays
  Clone ID: MRT4577_135018C.1
cccacgcatccgaaaaaaaaaaaaaaaaaaaaaaaaaaaaaaaaaaaaaaagaaagaaaataaaaaagatcaaaaaaataaaataaacttcgggaagcagtcctagactgcttcaatactatactctacgtttttcttaactcgttatccttctatattgtcacgactattcaaatcctggactatcattacataacctccttactgcaaaacccgcttcctcacactattttatcgc

SEQ ID NO: 38397 - DNA, 291 bp, Zea mays
  Clone ID: MRT4577_135019C.1
gactaggaacggtcgtcgcccacggggctgttgatccgccccaccagggggccgcccaactgcacgtgaaggcagccgtggagccccacacatatgacggcggcgatcttaacgtacgtcctacttgtcataccaacgccacgtaaacccgccagaactgctacacttgcccgtgactgctccagtagtactgtaacatacatggcatattgcaacaatggcgccatgccagcgcaaagattacactggaagaaagaccggcacctgatcgcctgtgacatgtcatatgac

SEQ ID NO: 38398 - DNA, 572 bp, Zea mays
  Clone ID: MRT4577_13501C.1
atggccctgccgccgaaattttgatggggatagcatcatcaattgaatctattatcctctccctcctcttttgtcgttcagggttatcgttcttgctcagtcagcctgaagcaactgagcttatacttctttctcttcaagatgcagaaaaaatgaataaatcagaatgcataactcttcgacaggcttttgttcttttatcaaaagggttcttttgccgcccaaaagaagtgggattgataacagaattacatcttaaagtgggaagtgctgccactaggatcctctcagttcctccgaattctgatgaacttttgtgggttctctgggaactttgtgccatttcaaggtctgattctggccgacaagcattattagctcttgggtactttcctgaggcaatatcagttctactgagatctctctcttcatataaggatcttgattcagtcatggctgagaatggagggtcgcctttgggtcttgcaattttccattcagctgcagaaattcttgaagctttggctgcggattcaactgcttcatcgcttgaatcatggattgggtttgct

SEQ ID NO: 38399 - DNA, 298 bp, Zea mays
  Clone ID: MRT4577_135020C.1
aaaaagtgcactgaatctgtagcgtctcgactgatatttgagactagactggagtatactctagtttcaattgcgtatatacagagattcgtcttgtagaagcgagcaggttgttgcgcttaggctacttcagctatatgcttaccacatgtcgatctaagcgtatgctcctgtgacgactgttttctatttgacgcggatgatctcatcttatcacttcaagacggtcgaatgacatgagcggcgtctgaggcaccgaagtgccgtctgaagatgcactttgtggagctctgccagg

SEQ ID NO: 38400 - DNA, 277 bp, Zea mays
  Clone ID: MRT4577_135021C.1
gggccaaaaaggacccgggtttttatatgtataaaaccattcgccacttttacacatgtttgtgcattccctttgtgccggcaggaccaacaaaacaaattttttcattacccggaacttacttctaagcctgaaaacagatgggatgccttggagtcacaccgcggcaattcagacacgaattaaaccttgggcggtgttagtccttaagcactaactattctagaccctgctggggttgggggtttgggacctctttttccacggggcgggaacc

SEQ ID NO: 38401 - DNA, 188 bp, Zea mays
  Clone ID: MRT4577_135022C.1
atacgactaactataaggtaaagctgcgcgcgctctgtagagctccggtcctgtatagccggcgcgatccaggcgttcgtggacgcgtgatcacaccctcatactccgtatattgatggtggcttgcatggacaagcagaacctatgaagatgtatgagaactcgattgatagatggaaaacccaaag

SEQ ID NO: 38402 - DNA, 410 bp, Zea mays
  Clone ID: MRT4577_135023C.1
gaggtacctaacgaaacgagaacgagggaaacccttcaattccatattttttcattatggaatttttaaaaaaaatccaaatatatcgaaccaatttgatcggtatagattttgatagcattggaaagatttgtttcaaaataacggtgataacattcaagggattaaaatttaaattcgatgacatcgaaggaaagctataaatttcgatgacatttaagggattgatataagtttggatgacagggaatggattttctatagattagccgttcggctggcgtcatgcccagcactgctgctgctgattttgtacagtgtatttgatctacgtattgcagtagcagcggcggctggcttaaagataggcaaagacatttgtatttcatctgggcctgatttgatacttg

SEQ ID NO: 38403 - DNA, 672 bp, Zea mays
  Clone ID: MRT4577_135024C.1
ctttcccgacaacagcatcgatcctcagtcctctcccgtgacgcttccgagagcgtccccttccccgcccccccagcagaatccgattcacctcaagagcatccggcccttggcgcgggcgccggagagagccggatgggaactctgggactcgctcctcaactggctccgcagcttgtttttcggggaacaactggaggtcgccctcgctgggtagcaaaatgctgggaatacctcactggacaatgccgctgctacaggccggcctaccgtgaagtagcatgatgccaacgggaggcttcaatatgcggtaagccgcctatggaagagccgcgatcaagctttgtcatcttggtgggcaccgcacattccacactatgcgtcagcgctattgccgcggagacctctgctattctgtatcgctgggtaccctgctgagcgagatagcgtcccaatcgcaacaagtgacttgcatgatctgatgacgatacagacattggctgagagtcccttgcgtgtcctcgacaacaacatagatgagcccgaaacgctttcgaagcaggactcggccgatcaacttgtactgcaattgaatgaggatctggagggtcgacggtacatgatctcgagtacggattctgcggacactgacgtcctcatcgactggcttat

SEQ ID NO: 38404 - DNA, 364 bp, Zea mays
  Clone ID: MRT4577_135025C.1
ttggccatgagcaactgctagaatggggtcttcgacgcgacctctgacttctggtgttgttgcttggctaggagcagtggtgggtgccgggctctagtgaccactgctagagaggagtatcagagccggaaacagcgccagggggtgaggtcgcgctcaggggcggagccagtgctcagcatgcccgggctcgtgctcgggctctggtgggcatcgacttcggcgagaggaggaagagcggcagggcacacacgtgacagcgaagagcacgcgaaaccgaggatagcgccattgccccttctctgccattggtgtttcacgttgtgcatcgaggagggatagcgtcccttcctagcctcggcgc

SEQ ID NO: 38405 - DNA, 103 bp, Zea mays
  Clone ID: MRT4577_135026C.1
acgactcatacaccttctgtctcttatgaggaccttctcgtcgaacgaccagatcaacctcatgggcagcgtccccgaagacgagcttctatttcatttgttt

SEQ ID NO: 38406 - DNA, 318 bp, Zea mays
  Clone ID: MRT4577_135027C.1
cgatctataaccgaacgccggagctcgtcaagggcaaccgacaacgcacgcagtgttccgtaggaaacagagtttgtaaaccgcactggtagacggcatgaggagaaatttgacgtgcggataacgcgttcatggcgaagctcgcagaaaagcggtgaggtactgtagatggttgcgtgatgtccctgtgtcaaacggtggcgtggaggagtactgtgagagcaaaccttgttgtgaacataacgtatgagccgcggcctatgccatatctctcatgagagaggagggggcagcatagaccatacactataagatatg

SEQ ID NO: 38407 - DNA, 317 bp, Zea mays
  Clone ID: MRT4577_135028C.1
aaaaaaaaagcttgtacaaaaaaaaaaaaaaaaaaaaaaaaaaaaaaaattgaaaataaagccgaaaccacactaaagggcgaatatatgcaaatatccatcacccttggcgtccggccggggcctgcctttggggggccccttccgccctcttttgccctgggatgccgtttcactggccgtctttgggccccgttttgccttggggagagcctggctttacccaacttggccgcctttttgcacgtccccgtttggacaactggggccgttgcccaacttgttgggctcgctcgcccttcccttttgggcagctg

SEQ ID NO: 38408 - DNA, 283 bp, Zea mays
  Clone ID: MRT4577_135029C.1
cttacttttttttatttaaaaaaatggagtctgcgtcttaagagacatgcatagaaacatttggttacaagcgaacagctctgctttggtctgttttggggcatcaaacaattggacaaagaattttctgccttcaaacgatagcgcatcctggaacgccaacaccccttgcactgggcaccggttcggcctggcggttcatacattttgcagcaattttcaggggggggccactgatccggcatgaaaatggccgcttgggaagggaatggagcgggggggg

SEQ ID NO: 38409 - DNA, 414 bp, Zea mays
  Clone ID: MRT4577_13502C.1
tattaactaggacggacgatgcacgcgctgcgtaagctagctattaatttcgagggagcgcaacttcaaaccgaatcatctgcgcccaagaagaggaaatccggtttcacttcggctgaaagcaagccgactgaagctactgttgggagatatgctacagcggagtcaccatatacgacaaaaggaaggtctgcctcaaagcttgcagcatctacaccacggcgttcagtgctaattagagcacaccaccgaatataaacatctggatagacatatagaatgcttgtcctgccttgtctgtgcctgcaatgcatggggaagtgagtgcttggctaccacttgctcgacgtgatcgggttactcatactgacgaacgtgaaatgaatacagagaggcgaaaacaatagaacatgg

SEQ ID NO: 38410 - DNA, 286 bp, Zea mays
  Clone ID: MRT4577_135030C.1
ctgattggattaccccttctgattgacaactatgtgccccctttggagggactgcctatcttcattcttcgactagccactgaggtgaattgggacgaagaaaaggaatgttttgaaagcctcagtaaagaatgcgctatgttctattccatccggaagcagtacatatctgaggagtcgaccctctcaggccagcagagtgaagtgcctggctccattccaaactcctggaagtggactgtggaacacattgtctataaagccttgcgctcacacatctgcctct

SEQ ID NO: 38411 - DNA, 242 bp, Zea mays
  Clone ID: MRT4577_135031C.1
cgagtcgaggaggccgacgccgtactcgtccagttcgctggggaatccaatgtttcagctagcggaatctgccggaggactaacttagaagaggagcaggtccgggaccgacgggtacggcggcgcgatccctaatcttggctcagacatggtaggtaacattggctggactctgtcgagagcctatgaaccgtcggcgtgcagacgggccgccgctcgtcacagtgcatggtcatgtggac

SEQ ID NO: 38412 - DNA, 491 bp, Zea mays
  Clone ID: MRT4577_135033C.1
attcttttactggcgtgcagtgttataattagaaaaaacgcttcatatttgattgcaacacaaaaaaaaaaaaaaaaaaaaaaaaaaaaaaaaaaaaaagaaaaaaaaaaaaaaaaaaaaaaaaaaaaaaaaaaaaaaaaaaaaaaaaaaaaaaaaaaaaaaaaaaaaaaattaaagggttagtcctaccacgggggagggggcaaaaaaggggagattcaaaaaaacctaacggccccttgggggaaccatcttaaaagactccaaaagaggccttttttgacccaaactgaaaatgaaaaaaaccggagtttacccaacattaaaaagcgggaaaaaacaaaaaaattccccacctaacgcacttttaaaaaaaaaggccccttctcaaagttgtttgaaaaagcaatagacccgaaaagtaaaaacggcccaccttttggcaacgctcaaaaagaaagggggacttggggtacccctaaagaaacccc

SEQ ID NO: 38413 - DNA, 386 bp, Zea mays
  Clone ID: MRT4577_135034C.1
gcgggggcaccgtaccggccacccattctctcttgtccatcgcatcgcttcggttcccatcgcaatcgatccatccgctcctaggcgagctgcacctatgcagtgcagcagagcgcttcccctacagggaaaagagagtctgatcccagcgaggagaggcaaggcagggtatggtatggaaaggataaggatcaactgatgtggtgtcaggcgcagcacggcactgaagaggatgtgctgcagtgcaaggggtgctgtgagcagaacacaacgcgtgctgacatcacatgctatgccagacactatagtcgtgcgaacataccttccgaggaattaagctgagcctaaccaaaccaatgccgtgactttgtttggtgggacggcgc

SEQ ID NO: 38414 - DNA, 378 bp, Zea mays
  Clone ID: MRT4577_135035C.1
gccggccgggcctggaaaacacaacccctacctcgtcataactcaaacaagatactcaaagcaaactcggatagaattcctacccctcttaaaccgaccaaacgatcataatggctgttcccgtggctgcaagaacgcaacaaacctcctctaccacgggacagacagggcaaaacgaggaaaacccatcaacacaaagcgcaaccagcgccacccaaaccgaaaagaccgaggaggaaaaggaagcagagagacgctacgaataagtgatctgaagaggagtacgcaaagcgtgaaggaggaggttaattacaccttgcaacctatatataagatttctctcgcgtcaaaatgatatccacgtaaacccccctcccg

SEQ ID NO: 38415 - DNA, 777 bp, Zea mays
  Clone ID: MRT4577_135036C.1
gccggccggtccggggcgctcctccacacctgcttcgcgttctcctccccaccgcttttcgggcacgccatcgcctctgctcttacacgaatggatcgagcatggcggacgtgagcaccgcggattccttgcaagctctttgccaacagcgaagacgctccctcaccaactgcttcttaccacacggcgaggtcctctagaccatagatcatccagcacccctatactatcagagcccaccagccacgattccaacaccctctccaacaaagacgacatgcaattggacatactgggaatgaacctccaggatctcaacatacgctccatgaccactatccacttccatcaccacggggagagaattggcgaaatcgtgggagacgatgcaaagaagactggatgtaccatgctaaaggcgtccagcaagcaggcaggcataacagcgtcaggaccatgagaccgtctacgctcacaccagatggaatgcggttgaatgctacctcgcgatggagaagctgacgccacacatcttacgattacactgttatgtacactgacgctgtcgacagccgcgctgaacgcctagcgtatccttgcatcagtatgtgctgaccatgctcgccctattgtataatgtgaatatctccgatcggttgtggtcccgggcccgtaggtttcagttctgggtcttgagcttcggcgaccctgtgcagatctgaccatgagtcccatgctcggaaggagtgaggtgggttgaaaatggccacgccccta

SEQ ID NO: 38416 - DNA, 1212 bp, Zea mays
  Clone ID: MRT4577_135037C.1
ttcgtttttttttttttttttttgcaaaaactaaataatctcgttggcaagtttggttacttgctggccggccttaggggaagcgcttacatctcattaagatacagcatgtacagccttgctgtgggctgggcaagtatggagcatgtgtgttcttccacagatgatcctagcagcttgagtgaaccaccagcttccaaatcacctttcaggaggggtcctcctgctgctgctccgtctgaaacttagtgaactgaggagtgaggtcagcgttccttttcctcgctcgcagcttggccatgcatgctcgcagctactacaactcgtcgtcactggctccagagttgagaacaaagctggggaacgccatggttatgtccttgaggtatgggagcgtcatgttctttagaagtgccgggtttttgctcgcgaacaccttccattcatcaggatctatcttcccgtcgccgttcatgtccgcttgcctgaaagtctgatccacgatttcttcgacggcgtcgtcggaaagaagtaattctgattcgttcagaatggccagcctggtttccttcagctcttcgcgtccaatgaatccagtgcctctcagatcgtacagccgaaacgcaaaggcgatcttttcttccacgggcgtagctgggtggaaaacgtcgagggagcgaacgaactccccgaactcaatcactccgttgcgcttcaggtcgaacaggtcaaatatccgatcggcgaaaaggttcctcttgttactgttccggaagagagcgagctggaactcctccttgtggattaggccgtctttggttatggaatagcttatcctcttgtacagctcgtagagggcctccacttcgttgacagaaaacgtggtctctctagctaaggtgttgggatcctcgtatcccggaggtcgtcgtctggactccttggaggacacacaccccatgcaaaccaactctctctctctctctatctctctctctctctctgaagatggattacagtgacgatcgagaagcaccaagccaaaacaaaggagagaggctggcatgcatgcatgcattagctagcaacaacaagaggaggccgaaaatcaaaacacactaagcacacttaggcgactcacccaccccccgctcagtcgctccgattttggtggcagccgccggtgcaagcggacgtcccggcccggccggc

SEQ ID NO: 38417 - DNA, 303 bp, Zea mays
  Clone ID: MRT4577_135038C.1
ggttgtggttttctctttgggtgtttttttttttttttttttttttaaaaaaaccagaatccatccccgcccaattttgcaaggtttttttccaacgaggggggcatacacacgcttatttttggggcggaacccaccaaaaaaaaaacccggttctcccatgaaacatccggtggtcccccacccatgggtaacacaacgggtttggtggaaaactccatttgaaacgggggacccttatcccaggaaccagccaaaattgggttttttaggaaaccccgccccatttttttctggaaaacc

SEQ ID NO: 38418 - DNA, 773 bp, Zea mays
  unsure (1)..(773): unsure at all n locations
  Clone ID: MRT4577_135039C.1
ctcgaggccggccgggccgggcttctacgtccgcttgaccggcggctgccaccaaaatcggagcgactgagcggggggtgggtgagtcgcctaagtgtgcttagtgtgttttgattttcggcctcctcttgttgttgctagctaatgcatgcatgcatgccagcctctctcctttgttttggcttggtgcttctcgatcgtcactgtaatccatcttcagagagagagagagagatagagagagagagagagttggtttgcatggggtgtgtgtcctccaaggagtccagacgacgacctccgggatacgaggatcccaacaccttagctagagagaccacgttttctgtcaacgaagtggaggccctctacgagctgtacaagaggataagctattccataaccaaagacggcctaatccacaaggaggagttccagctcgctctcttccggaacagtaacaagaggaaccttttcgccgatcggatatttgacctgttcgacctgaagcgcaacggagtgattgagttcggggagttcgttcgctccctcgacgttttccacccagctacgcccgtggaagaaaagatcgcctgtaatatatatacgttcgttccttctctgtcgtctgcctggcctcctaattaaggaatataatttcttcctaatttcagttgcgtttcggctgtacgatctgagaagcactggattcattggacgcgaagagctgaaggaaatggtgctggncattctgaacgaatcggaattacttc

SEQ ID NO: 38419 - DNA, 752 bp, Zea mays
  Clone ID: MRT4577_13503C.1
cccagcgtccgcttatgtcccatttaggcactatcaatgattctggaacacttcatagcttgttttcaaagtgcatgagagaatgtgagtcagaagcagaattagatgaaacatgggcgatgatgcatcatgagtataacatgcaggaacacccgtggctcactgatctgtaccagcaaaggcataaatggtgctcggctcttcataaggatgcatttgatggtgggatcgaatcaatggataggaatgagagtttgaacaatgttttgagcaacattgacgatgaatcagcttcgctttccacttttgtccttgagttggataaacttgcagggagttggcgtaaaactgagtctttagaggacattcagtgcaaccaagctgctccggagtgtacagttaagcataacagaattttgcaacatgccgctgaagtttacacacataaggtctataagtctattgaaacagattttctagatggatgtagtgctacttcatatcaggcagctcagtgtaatgaaacattgcataagtttgagttccttctggaaaatagtccaaatgtttcggtagttttccttaacacctctaccatggagttgagctgtacttgcaaaaaatttgagaccatgcgtatactttgttcacatgctctaaatgcacttgttctcaagaatgtagataggattcctgaaaggtatattttaaaccgttggactaaatatgccagaaaaggaacatatccattt

SEQ ID NO: 38420 - DNA, 262 bp, Zea mays
  Clone ID: MRT4577_135040C.1
cgagcctgactcttacgcttacgctcgcgccgacgacgccgacgtcgctgcgccctgcacctcgcttcatttcgtgtcgtcaagatgacgaagcgcactaagaaggcaggaattgttggcctatatggaaccaggtatggcgctagctagcgttagcgaatcaagaagatggatgtatctcagcattccaagtacttttgcgagttctgtgggaaagtttgctgtgaagaagaaaagcagttgaatttgggggtgcaaggac

SEQ ID NO: 38421 - DNA, 615 bp, Zea mays
  Clone ID: MRT4577_135041C.1
ggaccctcgaggccggccgggccgggagctaatacactgtgactggatcgactgcgtttcctcactgctctcgtctctcgatgatattgtgtgacccttgtcctgcagagtcggctccttgtaaaggcatgcgaccactccatagacctagagtacggcgccttgtcaccataagatgctctacacgaatgaagggcccctcctcataggcgtgccctctaccccaagcttgcctcctcagttcgctgctcctgcagggattcgacgacgacccctacagcttctacacctgcaaggcgaccttggttaacctctactagcttctcgtcgagcaggatgtcatactgatcaactcccaggtcccggagctgcacagccacgacgacaccaaggacaacatcatggtcaacggtcttcgacaaccttgcgagcccgtactacctctctctggcaaggaattcatgaagaagatgatgtcgtggtacgatgaggaggacacgatctactggccgatgctgccgttcgcgagtttcacttatcaacctgcgagtgaagcgacaaaacctcagctactactacttcgctttccttatgtgtcacaggatagtgtgccga

SEQ ID NO: 38422 - DNA, 383 bp, Zea mays
  Clone ID: MRT4577_135042C.1
gtgacgttgtggtaacgccaggtctgccgggtttcggatcagcgtgggcttgctgagcgtgggcctagtgggactgcgccactgcgatctcgccaccagcggctccgcccagcagaaagacattgacctgctcaggagcgtcgaaggctctagcgacgggatcaggccccagtcccaatgccggttctccagactgaatgaagctggctgatacggaatccgatgcaccggcgcctgcgccggcgccggggccgtcgtccggttgaactgagaagcgtgcgttcagccaagcaaagtggtcaaaaccgagaactaattaatgggtccatcgtgtgtcaggctactattgttcttgccataagtatatatagatgcgcaaagtg

SEQ ID NO: 38423 - DNA, 771 bp, Zea mays
  unsure (1)..(771): unsure at all n locations
  Clone ID: MRT4577_135043C.1
gggatttaacaactcatatagcatctttaacacgctacattgactgcgattgtacccttcttcagtcgaaaacacagataaaccatattttactcttttctcaaataccgcccatcatggacaccacaaagttctggagatgcaacaactgctacgctgaaaacgctttcaacactgggaaagtttgccagaacttcccatgtacttcttattacgacccatcatgtttgacgtatgctgtctccgtcaaatgataagcgttgcagtgaaagacaatgccaaccaagacacatggaaacgggaatattcgctcagggagagcaattccaagggagatatctcatctccaagtaaatgatggcttgatcactcgacatcacaactttggtaccatccgtcgccacatgggccactcttgagatgacagaagcagcgagaaggcccaacacagcaacttttctttctcaatcaaggcggtttcgatgtcttttggtctacagcatacaacaaacggcactggctatgataaaagtttagataaaacgatggaaaacggcacatcgacctgactcacgtctgaagggaacagacaggatattgaactacaatgatcaatcatcttgtcctggaccttcttttgttttcacaacctcacactctcttgacgccctttcacacttcacgttctggccgggtgttgntgggtagatgtatntctcattttgctcttgttccttttgccttcatgntataataatatggcgatgcttt

SEQ ID NO: 38424 - DNA, 167 bp, Zea mays
  Clone ID: MRT4577_135044C.1
ggcaaaacaaaggggaccaggagcgggacgaagagcgagacacccagggcggcggcgagaggcagacaagagcgcggagcaagcagacaaccacaccaggggaacgaacgaccgcgcgcagaggaccggagactacagcagggacgaagaggggaagcacaacccca

SEQ ID NO: 38425 - DNA, 626 bp, Zea mays
  unsure (1)..(626): unsure at all n locations
  Clone ID: MRT4577_135045C.1
cattgggacccctcgagccggccggggcttgctcctagtcatagatatccttgtacatagcatcaaatattattnaggggacaaaaatatctaatgatataagttaacaaaaaaaaaaaaaaaaaaaaaaaaaaaaaaaaaaaaaaaaaaaaaaaaaaaaaaaaaaaaaaaaaaaaaaaaaaaaaaaaaaaaaaaaaaaaaaaacaaaagaaaaaaaaaaaagggggccgcccccccccgctttttgtccccttgagggggggggattggcgccccgggggaaaccaggcggaaacttgttcccggggggaaggggttccccccccccaaccccccccacataaatcgcggggggtaaaaggggaaaactggggggggcccaccggggggggaaccccccttaattgggtgggggccccggccccgttttcttgagggaaaacaggcggggcggccgtttttatgaatccgccccccccgcgtccaaagggggctttcgtaatgaggggtttttcgttttcctctcacttgaatccgttgtcccgggtatcgggggggggggggggaaattacctccccccaaggggggaaaaggggtttcccccccaaaaaggggtcacggcggg

SEQ ID NO: 38426 - DNA, 1861 bp, Zea mays
  Clone ID: MRT4577_135046C.1
ggaagctgcttcgcgccgggccgacgaagtacaggcaaaatatttccggtcctcaaagctcccgcccgccctccttccctccctccctccggcgccagtccaggcacaggcaggcttcagtctccagagatggcgaggaacgagcccctagacttcgagaacgaggacgatccgctcctccccgccccgcgccccgccaagaggagcaaggtcatcggcatggatgatctcctgctggattactttcaatctggtaaaaaggacaagctcaaagttaaggctgccaagtctaagcatggccccaaaggaggatatgattcaggtgaggaagacgacagggctacacagcaagagattacagtctgcaaaatatttgaggaagttcagcaaaagggcaaagtgatggatgctagagacgatgtacccccatggggtcaacaattttttagatgccagaaccccccctcaaatcttagcaatggcggagttgagaattgtcatctcctgcaatcattctctgcaattgaagatataggttttgatctagagatgcatcaaggagaggggttcctcgaaggcatgctgttggatggatggcttctgaatttggttcgcatatgtggttttgttgaagactctgtagcatcgtggacgctgaccaacttgttgcattcacccaatgagaaattacaagtttctgcagctgacttttgggatggcattctttccttggatgaggctggtgaaccgttggtcaaccttgggtattttccaagttactctgttctaaaacgggctatgctgagctatggatatctatttgatacttcaggcactaaggcttcaatctctggaagcactgctgcaggtggccctgatgatagtctgcctcataacatcattgcttggttaagagttgtatctgcttgctgcaaaatcagaaaagtgcattccatcttctcgccttctgaggcagaagaacttcttgctattgccatttccctctttttggaccgtcgacttgaagggttgctgcttgttttgggagactgcctgaattcacttatattatacttcaatacgagtgagtgggaaactagctgtgtgatggtggctgaatcaattgctcagagggtcacactggacctcaattgtttaagggttgttgactgcatcactggtacaaataagcgcagcaaaatcctaaggagtcaggtggcacttcagctgctgaagatcagctttgggcttaaggtggcgaatgttgagaagattttgaagctagtcacatccatcaacgtgaaggagaaagaatgtgacttcttcaggctttatgtgtatctagtattgatggacaacttgctcttctcaagtgatgcatttagagataagactgggatggttgatgcttggcggaattatctgcgcaactgttccacccaaattgggtgcacggactggagattctatgctccaaaggcccgaaacaaggcttcttatcttctgcaaggttcaatcttgaaaaaaagcagtggcgatggtaaaagttgtgtccggtaatcaaaggggaccaaatgtctggtgcagcagtgcccaggttgtggttccattcgatgggcaacggcgaagtgctcatatcattccatgttttatgtacaattcttttttagttgttgtgttttagttcaaaaatgaactagcgagcgacaaatattcgagaacagagttagcagccagatttagaggggtgttgattgatgtatctgtgggggtgcttctgcttggttgattgccagaaacaaaaaggaaagagagcagcaagggatgattgggtgcagcctggagggggatgttttgtttt

SEQ ID NO: 38427 - DNA, 646 bp, Zea mays
  unsure (1)..(646): unsure at all n locations
  Clone ID: MRT4577_135047C.1
tattcggcacgagggttcctggaaggcgggggggtggatggatggcttctgaatttgggtcgcatatgggggtttgttgaagactctgtagcatcgtggacgctgaccaacttgttgcgttcacccaatgagaagttacaagtttctgcagctgacttttgggatggcattctttgcgggggggaggctggtgaaccgttgggcaaccttgggtattttccaaggtactctgtgctaaaacgggctatgctgagctatggatacctatttgatacttcaggcgctaaggcttcaatccctggaagcactgctgcagggggccctgatgataggctgcctcataacatcattgcgttggtaagaggtgtatctgcttgctgcaaaatcaggtacaaaatttttaatacacttgatatttttgcttagtatctcagcttgcgcacttacacaagcctaaactcatcactcattagcataggtaacatgggaatagcatatcaaacaaagctaagtgtgctaacctgaaaaatttgtgatttttctcaacactttaaaatataacataattcttccacccccccaaatataacaacacactgcgtcggaaaggaactcatggcaaaggtgcacttatactttnttttgg

SEQ ID NO: 38428 - DNA, 585 bp, Zea mays
  Clone ID: MRT4577_135048C.1
aattcggcacgaggcttcagtctccagagatggcgaggaacgagcccctagacttcgagaacgaggacgatccgctcctccccgccccgcgccccgccaagaggagcaaggtcatcggtatggatgatctcctgctggattactttcaatctggtaaaaaggacaagctcaaagttaaggctgccaagtctaagcatggccccaaaggaggatatgattcaggtgaggaagacgacagggctacacagcaagagattacagtctgcaaaatatttgaggaagttcagcaaaagggcaaagtgatggatgctagagacgatgtacccccatggggtcaacaattttttagatgccaggtcgactctaactttatcttctgtttaccattttcagtcgaccagtagctttccctttcttgatcaccagccactaagttattcatccttagttccttacagaaccccccctcaaatcttagcaatggcgggagttgaggaattgtcatttttctgcaatcatttctctgcaattgaagatatagggttttgatctagagatgcatcaaggttcattatgttcccactt

SEQ ID NO: 38429 - DNA, 418 bp, Zea mays
  Clone ID: MRT4577_135049C.1
ttgttgactcgagagctgagcagatctttccttgtttctccattccggtacgaaggggtggggtccaagtgaagggaagggaagggcctcctccaccgaggtccgctacaccgccgccttcagcgacgagaaccccaacgcctgctccgtcatgtagtagacccacccacacaccgaccgaccgacccacttgttttctagctattagttactagtagtatagtaggtgcttgcttgggagagttgctcttggaggaggttttgctcttcctgtttttctttttctttttttcgttttccggtttcatgtagatgtagtgtgcgttttgatatttgtgaaaaaaaataaaccagtttgtaacggtagaccacttgtgcaaactatgatcagaaaaaaaaaatcagttcgtccttgcgg

SEQ ID NO: 38430 - DNA, 1807 bp, Zea mays
  Clone ID: MRT4577_13504C.1
gggtacctcgaggccggccggggcccttcttctcttcttacagcctttcctccgtgtgggccccacttttctcctcccgcgcccctccgcgagctccctacccctcgcgctcacgccggcgacaagtttccgccagagttaggtagatcaggtgctgcgccggcagccgtggaagggatggaggacctcgcgagttcgcgtggcggcgggggatgcggtggtcttgatgcgcagatcgaacagctcatggagtgccgcccgctcccagagacggaggttaaaacactgtgtgagaaggccaaggagatattaatggaggaaagcaatgttcagccagttaaaagccctgtgacgatttgtggtgatattcatggccaattccatgatcttttagaacttttccggattggtgggaaggtactcagtgcactgcataatctttgtgcattatatctctttgcacttttgatgctattcatttcattctccaagagctgatagaccattctttgttgtttactagtgtccagatacaaattatttgtttatgggtgattatgtggatcgtggctattactctgttgagacagtaacgcttttagttgcacttaaggtgcggtacccgcaacgcattacaattcttcgtggaaaccatgaaagtaggcagatcacacaggtgtatggcttctatgatgaatgcctacgaaaatatggcagtgcaaatgtctggaagatcttcactgatctttttgattattttccgttgacagcattggtggaatcagaaattttctgcctccatggtggtttatctccatccattgagaatcttgataacgttcgcagtttagaccgtgtccaagaggtccctcatgagggacctatgtgcgaccttctgtggtctgatccagacgatagatgtggctggggcatatctccacgtggtgctggatacacttttggccaagacatatcggagcagtttaatcacaccaacaatcttaaactcgtagctcgggctcaccagttggttatggagggatacaactgggcacatgaacaaaaggtggtgaccatattcagcgcacctaactactgttaccggtgcggcaacatggcgtccatcctcgaggtcgatgactgcaggaatcacacatttattcagtttgagccagctcctaggagaggtgaaccagacgtgacgcggaggacacctgattatttcctttgagttatctgccagaccatttttggaatttgcccaatgttggaatagtgatgctagccagtaacaatttttgttggatctatatgataacttaaccgaccagcaacagtaagaaaatgtggaagctgcatctgtcattgcaagaggtgctcgctaacagtaacaggtcgacgacctatacaccccaagctgtcaaaagatccgcttgtctacccaacccaccaagtggtgcctcccttgggctttgggacgtcgagtttacgctttcagcgtagagttgcctcagttctgtcttgtgtgtcagctagttttgtgtttgtgtcttgtgtggttgctcgttgtagcttctgtgattaaatgacaacagacaagctggtctcgagtgttgcaagaattggaattctgctagctcctctgtttggttgtccatgcccttggtacacgagtgttgcccacccttctcatgtagcaccaaccacgttacagtcaagctgttcgcatcctatttttccgaaaaaaaaaaagaaaaaagcggccctcgagctccttcttggatccctttaggagggtaatgcgcgc

SEQ ID NO: 38431 - DNA, 2085 bp, Zea mays
  Clone ID: MRT4577_135050C.1
cattgggtacctcgaggccggccgggagagcacaggagcagcgccgggaggcaccaccaccagctagctctcttgtctgctgctcctctcaaaagagtcgcagttcactttgttgtactagagcgctgagcagatctttccttgtttctccattccggtacgaaggggtggggtccaagtgaagggaagggaagggaagggaagggaagagaaggcctgctgcgagcgatgggcatcgtcgacgtcgtctccgagttctgctccttgccgaggactcgccggcatctcaagaagaggaagcagttccagacggtggagatgaaggtgcgcatcgactgcgaagggtgcgagcgcaaggtgaagaaggcggtggagggcatgaagggcgtgagctccgtggaggtggcggccaagcagaacaaggtgacggtcacgggctacgtggacgccgccaaggtcatgcgccgcgtcgcctacaagacgggcaagcgggtggagccctggccctacgtgccctacgagatggtgcagcacccctacgcgccgggcgccctacgacaagaaggccccccgccggctacgtccgcaacgtcgtcgccgaccccaccgccgcgccgctcgccagggcctcctccaccgaggtccgctacaccgccgccttcagcccacgcgtccggcctagctctctgtctcctgctcagagtcgcagttcgctttgttgtactagagcgctgagcagatctttccttgtttcttcattccggtacgaaggggtggggtccaagtgaagggaagggaagggaagggaagagaaggcctgctgcgagcgatgggcatcgtcgacgtcgtctccgagttctgctccttgccgaggactcgccggcatctcaagaagaggaagcagttccagacggtggagatgaaggtgcgcatcgactgcgaagggtgcgagcgcaaggtgaagaaggcggtggagggcatgaagggcgtgagctccgtggaggtggcggccaagcagaacaaggtgacggtcacgggctacgtggacgccgccaaggtcatgcgccgcgtcgcctacaagacaggcaagcgggtggagccctggccctacgtgccctacgagatggtgcagcacccctacgcgccgggcgcctacgacaagaaggcccccgccggctacgtccgcaacgtcgtcgccgaccccaccgccgcgccgctcgccagggcctcctccaccgaggtccgctacaccgccgccttcagcgacgagaaccccaacgcctgctccgtcatgtagacgtagacccacccacacaccgaccgaccgacccacttgttttctagctattagttactagtagtatagtaggtgcttgcttgggagagttgctcttgggaggaggttttgctcttcctgtttttctttttctttttttcgttttccggtttcatgtagatgtagtgtgcgttttgatatttgtgaaaaaaaataaaccagtttgtaacggtagaccacttgtgcaaactatgatcaggaaaaaaaaatacagttcgtccttgcaaaaaaaaattccccgcaccgctctgaaaaccattcccaggcccgcccgacttcctgcccttgtacaacgcacgcacggtccccgtcccaatggcccagactctgtccgccgcctcggagctggccaccctgaagcgcccgttcggcaacgacgggttcggcgatggcagcaacaacggcagcgcgaccggcgagaagcccaaggcgcggcggcgggaggcggacccggcggcggcgatggccgcggcgcggcacgagttcggcgagcacggcggcgtgaacatgtccatcgaggcgtcggcgacgttcacggtgatggagccggacacgatgcggcggctgttcgcgggcgagctgggccccgaccgcggagacatgtacatctacagccggcacttcaacccgacggtgctggcgctggggcggcagatggcggcgctggagggcacggaggcgggctactgcacggcgtcccgggatgtccgccatctcgtccgtgctgatgcagctggtgggccgccgcg

SEQ ID NO: 38432 - DNA, 339 bp, Zea mays
  Clone ID: MRT4577_135051C.1
cccggtcgaccagcgtccggcgcatccagagtccagctatcaggcctgagaggatggggatactgatgtttggtgatgcaaagacagctggagaagtttgaagctgacaggtcagcccgcagggattactggtgcttcagagaggactggcaagcgagacagcctgtggagtcgacaaggggaggaaaatatccatttgtctggatcagttcttgactagtgaaaaaggtaagaaactgggagaagatggaggtggaggaaccataaaggcgagttgtgggtcctcaatgaggggtgattatgacggggatctgcgaggtccctcatcatcttcgaacg

SEQ ID NO: 38433 - DNA, 384 bp, Zea mays
  Clone ID: MRT4577_135052C.1
aagcgcaatcccgagcagaggtttgactcgagcgctcgcgccggtgtccatttcaaagaggaagccgcggcagcaccggtagcggcagcagcaaggggaagatgtcgtcggcgcccagcgtcgatgagaccgcccctttcttcggcctcctcggcgcctccgctgtgctcgtcttcccatgcatgcaggcgccccactgcacagccaagagtgccgttggcgtggcgcccacgggtgtcatgcggccagagctcgcaatgaagtccaccgagcccgtgctcatgactggtgcgcccagtcctacggcctcatcatcgccgtcatcatcagcgccgagatccacccccaggccaatccatactacctctttgacgtctacgccca

SEQ ID NO: 38434 - DNA, 1203 bp, Zea mays
  Clone ID: MRT4577_135053C.1
ccgccaggggggaaggaacgccacagactccgggaaattgccgttgcatttgcagcaggttagacatgtcgtcgtcgtcgtcaatgctacgccttcctccatgccgtcccgcagtccatccagtgtgtaggggtgctggatcatcaggagggagcacgcacccactccgatcaagctcaagatcaaggccgtcgtcgctcaccgctgcgtgcgctctcaagacgccctcgaatggcggatcgagggggaaggtcaaccccagggacctcttcaccttctcccacaagttcagcaccgacatcccgatgagcgaaacgcaaggggcgtccatcgatgagtacctgcggaacagtcccaggatcgtcggagcggtgtttccggaccagcgcaagagaaggaagatcaacgacgaagaatggagcgtgcagctcctgcccatccggttcctgttcctgtcggcgtcgccggtcatcgtcatgcgcttcgtcagcaagtccggcgggaaggagtacccgcccaacgtccccgtccacgccaccagcctcctcctcatggaagtgacagactacaagctgaatggtctggacagcaacgccatgccgtcgcacctggccctcaccgtccgaggcctcatgtacccgcagcggcagcgggaggggaggaagagcctcaagggccacgtcgagatgaccgtcggcttcgacctcccgccggtgctcgccttggtcccggcgagcatcatcagaggcgtcggcgagacggtgttgaggcagatggcggagcagatgaagcaggacatggacacagggcttgcagcagatttcaacaagtacaggagggagaagctaaccgagaggcgctcatcgccctgaattctgagacacatttcacaatcacatcccggcctgtatcgatgtatcatcaacaagtagccatgactaggaatttcctcagactcgccttgtcgtcaagcagggtcgtcaacctcttgcactatttattcattcataagttggatgacatcaaataatgatattaacttgatgtattcgcatcttattcattgtaaaaacgttgctcataattaaagagcatccatccagagatttctggagcaattgagcaattatgtctgtatgtactgttcattcaccagttggaagacatcaatcaaataatgacaataaaaaaaaaaaaaaaaaa

SEQ ID NO: 38435 - DNA, 373 bp, Zea mays
  Clone ID: MRT4577_135054C.1
tttggtttgtttttttttttttttgttttgttttttttctttttttttttttttttttttttttgtttttttttggggacaaaacgggcccggtttgctcacaaaatttttaacaggttgggggcacttaaattacatcccgaaccccccccttggggggggggcccgggggagaggggaaacttttggggcttgggggccttgggggaaaaggggccccctacccccccttggggaagggcccaggggcctatggggggaaattttttctggggcgaattccggggtttcctccccgggcctgggaggaaatagctttttttttgggggccccaaattaaattcccggggcggggtttcccacgtgggggcg

SEQ ID NO: 38436 - DNA, 586 bp, Zea mays
  Clone ID: MRT4577_135055C.1
cctcgaggccggccgggatacacttaatccactcagcacttcgacgtcatacggcgtgctgcgtacagacacaccaagcgtcggatcaatggcttactaccaggaggtggactactgctcggaggaggtgaggtcggtggccccggccggcttcaggcgccacggcggcggcgtccagcagcacgtcgacaaggagaagttcgaggaggtcgacacggtctcacgcgccggcgccaatcaccaccaccaccatggtcaccacggcgaccacggtttcgaggagcgcgagaccagtgttgaagaggacgtcaacacctgcaccggatgagttccactagcgcaaggagagcttcttctttagggctaactgagccgtgcggagtgcggcatccacgaccgttcgtgcttgtctgcgtgacttatgtatgactgtggatgactgtgatgatgcaggctgtcatgattggctatagcatggtgagctctccatctcctgtacgaattaccacgattggctcgtgagctgtataagacttcctctcatcactaataactacatcgcgatgagatgatacacgaatcggtc

SEQ ID NO: 38437 - DNA, 272 bp, Zea mays
  Clone ID: MRT4577_135056C.1
gagcagatgataacgtatttgtcctcacaaaagagaaacaggcagccctagatgctcgatcctacctataccactggtatcaagagaaacggtcatatgtacagctctgagacatgcatattgccgtatgcggtgtctatggacaagttgctgctaccgtgggctaattgacgagccaagtgtggtacatacatctacataagcggagggacctctcggcttgaaaaactatgggacgagaggaccgaacgaaagttcgtgcaaggggctta

SEQ ID NO: 38438 - DNA, 340 bp, Zea mays
  Clone ID: MRT4577_135058C.1
cggccgcgtggggtgagtacgtgctcaatcgtttgtgttctcttaagacacgaactactgttcatatgaactttgaattttcgcataataagagatggcgctctactaataatttgtgtcaaaaccgttttggttgaactcttggatttaggatgggataatgaatttcaaaaaaaaaaaaaaaaaaaaaaaaaaaaaaaaaaaaaaaaaaaaaaaaaaaaaaaaaaaaaaaaaaaaaaaaaaaaaaaaaaaaaaaaaaaaaaaaaagggggggcccctttttaaagaaaccaagtttacctccccgggcttgcaaagtaaaaattttttttttggggcc

SEQ ID NO: 38439 - DNA, 855 bp, Zea mays
  Clone ID: MRT4577_135059C.1
ttctgctcgttctgagttgtggcgttcttgtccatcccccgttccccgtcttgctgcccgcctgcggtccctccccctcccagccctcggtcggctccgcgccgcctcctccggcgcccggcacgcagtggtctgcaggctgcttcatcccggcctcgttgcccgcgcacccgcccccactccccccgctcatgctggtggccaccacgaccatcccaccgtctccgaggcgcggccgggccacgggcccgccccgcccctccgctcccggagcgcggccgcggctccgctcccggccgccccgcccacgtcccggggctcccccgtccccgccccggcggccgcgcgccggccgccgcccccgcgccggttgccggtgtgcacgtacagtgctcgcccccgggctccctcttctcatgccggcgcacatgacagtatcgacgagtagtactggaacttctcttgccggtgtacacgacaaggaagcgaccgaaaacgatgcgtggctgagacacgtggctgcgacgctactcggcagccgtagcgagatcaggagaccgttcctggaggcgctgtccacgtgcctgggctcccccgacgccggcctggtgggggcgtgcctgacgatggcctggtggaggttatcagtgagaaagtagatatctgggtaaaccacctcttcagctatgattttgcactctggttgtatgcaaatgttgcctatcatattattgaattgcaattatttttttgtactggttaaatactaatagtgccatgagttaacgctagtgtttgtaattctttacaggctcttgggtgtctcttgtatagaatctgcacagaatattaact

SEQ ID NO: 38440 - DNA, 2511 bp, Zea mays
  Clone ID: MRT4577_13505C.1
ccctccgcgagctccctacccctcgcgctcacgccggcgacaagtttccgccagagttaggtagatcaggtgctgcgccggcagccgtggaagggatggaggacctcgcgagttcgcgtggcggcgggggatgcggtggtcttgatgcgcagatcgaacagctcatggagtgccgcccgctcccagagacggaggttaaaacactgtgtgagaaggccaaggagatattaatggaggaaagcaatgttcagccagttaaaagccctgtgacgatttgtggtgatattcatggccaattccatgatcttttagaacttttccggattggtgggaagtgtccagatacaaattatttgtttatgggtgattatgtggatcgtggctattactctgttgagacagtaacgcttttagttgcacttaaggtgcggtacccgcaacgcattacaattcttcgtggaaaccatgaaagtaggaagagattgtggaagacctgggcccctcctaaatgcaagtttttcctttggttggcaataagaaacaaatgttggacagctgacagattacagttgaggggattgccacacccagatgtttgcccaatgtgtgatcaagcccaagagacaattcagcacctccttactgcgtgcatttttgcccggcaattttggcatacaattcttgctgctattggcttggggcatctcactccgactgctgatgaggagaaaggtgagccttagagttatcaagaccaggaaaaaaaggaaaaaaggaactctctgatcatcctgggggcttggtgcctatggctccagagaaacagagcagtgtttcatggggagtctccttccttgcccaggatttttaggtgtttctcagatgagtgtgcttgctgggttttagcaggagctaaggagatcggtagtatgggcttagttgctgccctgggcgaggtcgggtctagtttcagttctactatgtaattcccttcgggataatgtgggtctttgggagatttgctctgcaacatctcctcttttgtaatgtttcctttcctctttaatatataagatgcgaagttctcctgcgcgttctcaaaaaaaaaagtcccactgtttggcaatttagagactaaataagactaaaatgaagggactaatctttagtccctcaaaccaaacagggctttaatcatgtcccataacattagtcagggaggttcaaatctcctgtattattgtagtgcttattcagattcatcatgctgtcttctagtcatattctggataactcgaaagctcttatttcagctctctggttatgttattgactacaatgtgtttacttgttctttttgtctgactctgttgtattgtctttgattcatgcaaacagatatggcagtgcaaatgtctggaagatcttcactgatctttttgattattttccgttgacagcattggtggaatcagaaattttctgcctccatggtggtttatctccatccattgagaatcttgataacgttcgcagtttagaccgtgtccaagaggtccctcatgagggacctatgtgcgaccttctgtggtctgatccagacgatagatgtggctggggcatatctccacgtggtgctggatacacttttggccaagacatatcggagcagtttaatcacaccaacaatcttaaactcgtagctcgggctcaccagttggttatggagggatacaactgggcacatgaacaaaaggtggtgaccatattcagcgcacctaactactgttaccggtgcggcaacatggcgtccatcctcgaggtcgatgactgcaggaatcacacatttattcagtttgagccagctcctaggagaggtgaaccagacgtgacgcggaggacacctgattatttcctttgagttatctgccaggccatttttggattttgcccaatgttggaatagtgatgctggccagtaacaatttttgttggatctatatggtaacttaaccgaccagcaacagtaagaaaatgtggaacttaaccgaccagcaacagtaagaaaatgtggaagctgcatttgtcattgcaagaggtgctcgctaacttaaccccaagctgtcaaaagatccgcttgtctacccaacccacccagtggtgcctcccttgggctttgggacgtcgagtttacgctttcagcgtagagttgcctcagttctgtcttgtgtgtcagctagttttgtgtttgtgtcttgtgtggttgctcgttgtagcttctgtgattaaatgacaacagacaagctggtctcgagtgttgcaagaattggaattctgctagctcctcctctgtttggttgtccatgcccttggtacacgagtgttggccacccttctcatgtagcaccaaccacgttacagtcaagctgttcgcatcttatttttgtcatgttaatactcctgtcaattaaatgaacaatgttaaatcccaacccaccccccccagcccgg

SEQ ID NO: 38441 - DNA, 972 bp, Zea mays
  Clone ID: MRT4577_135060C.1
tgaataatccttggatggtattactcattatgataatacaattctcactaatctttcaaatgaagtgtgcctggcaatttctttccactggcttaaggaaggcaccaaggactactcacttttggcctagactctaaactcagtcagtgtcgctctaaataaatcgggtgcccgcgaaaataaggcggcgcagatctgtccaagcagccttaacagccaatggatgggtgcatgatatctctggaagccttacgacgcaggtgctgtttgagtttttgttggtctgggatttactccaagaggtgcagctgtatcctaatgttgaggatcagcatcggtggttgccatcctcctcggggctgtattccgccagctctgcttatttgcgcttccattggtggtgcaacaacctttgagcctgctaaaagaatatggaagacttgggccccccgtgctgcgagtatttcatttggcttgcatctctcaaccgatgttggacggctgatcgactggcacgtcatggaatggatcatcaagatagttgtcccttgtgtgatcagcaggatgagacagtgcatcacatgctggtggcttgtgtttttacgagggaagtttggtttagacactaagcaggctgggtttgcaacatcttgcgcctacgtctgatgctacagtgttccaggatggtggagtgaggcagaaagaaatgtgtctaacctaaagaaaaaaggttttaactctattgtgattttagtagcatggcagatttggaagcatagaaatgtgtgtgtgtttgacaatgcttccccaaacatccacgcaattttgctgaccagccatgatgaggccttattatgggggctgctgctcttaggcaggtttggttgtagcttgtcttttccttttttcttttttccctttttcttgggtgctttcttggcaccttgtactgggtctttttctagatatttt

SEQ ID NO: 38442 - DNA, 504 bp, Zea mays
  unsure (1)..(504): unsure at all n locations
  Clone ID: MRT4577_135061C.1
gactaattcttttttcgcactgaactgtgcgggggcttttatgacattttatgggtttggacaacaattgctacccttttttctgagggggtgcatctcaagtgaacacaaaaaacattcaggatctaacaaaacagtcaaagctcactgtactttcttgctagggattctgctttgtgctcgctgccagcagtcacaatataaccagctccaacctgaaaaatgggagattggagaaactactgaataagacactagatacgaatttaagctttgcatccatttcagttaacaaactggtaaacagctgcactccacatgataaggccatcactgcacgactaaggagctccactcgtgatcaagactaaatcactatggaccttgacagcccaacaaacaaacttttggcaactaaatgattatttttctattaaataaacctggtaaggctatgacacaantggaagatactgctggtcgattcttgtgcatacattttct

SEQ ID NO: 38443 - DNA, 263 bp, Zea mays
  Clone ID: MRT4577_135062C.1
caagcgtggcgacgaacgccaagcaaagcaagtgcacagagaccaccaacgtggaaccccccaaggagctggaacgcgccaaggccaccggcaagaacgcccagatgtggccccacatgccccacgcgctcaccaccaacccctacaacagcggcgcccaccacaagaaggcgcccgccaaatacgcccgcagcgcgccacaagccacggcagaccccagcccaccgaacctcaagtacaaaaacatgttcaacgacaacaac

SEQ ID NO: 38444 - DNA, 379 bp, Zea mays
  Clone ID: MRT4577_135063C.1
ctatttttttatcctcaccctccgcggttggtgctgggttcatttaattctcctttgttcggtttacacggataaacaaatcttagattccacatcaaatgaaactctctccactgcttcttacaacacctcacctctgccatcaactaccactacctccacacttctttctgcacctacgggggggtccttgattccaagatcatcctcaatcaacagactcataggtccctcggcttcagcttattcaccttctccactgttgattccatacgacacaccatacaaaacctgaacatcaaccaacctaaacacccataacatcaccctacaccatgcccaatcttcctcctgccgtccaggtctcgtcaatccattc

SEQ ID NO: 38445 - DNA, 115 bp, Zea mays
  Clone ID: MRT4577_135064C.1
cgaactcgttggcgagatcgttctcgttttttttagcaccaccattcccaacgtccaggggcttctttatgactacttggggggcaattattcttacaaggtcttgaaccctgat

SEQ ID NO: 38446 - DNA, 211 bp, Zea mays
  Clone ID: MRT4577_135065C.1
gtcaccggcgccgcgggcttcgtgggcacgcactgctcgctcgcgctgagggcccgcggcgacggcgtcctgcgcctcgacaagttcaactcctactacgacccgtcgctgaagcgtcggcgccaggcgctgctggccagccgcggcgtccttgtgctcgacgccgacatcaacgacgccccgctgctggagatgctcgtcgacgtggcgg

SEQ ID NO: 38447 - DNA, 1842 bp, Zea mays
  Clone ID: MRT4577_135066C.1
gggtcgtaccacgcgtccaagcgagcacatttgactgaccgccatagcaacgagaggaaacaaagcggcgaccgacgagccaagcaagcagcagagcatggacgcgggcgaggaccctcggccgggacggacagggtcgttggtacggatccgcgggcgtaatatacgcgtacgcgcgcgcgcgcgcacggcggcgccttgctggaagcgcagcggcgagcggcagcgccgatcccatcgccgaaccggtcaacacacccctcctccacccgcacgatctaaaccgaagcttgagctccggttgttggtggttgggcggcggcggcaggggaggctgcgaagatgtcgtctagcacgatccgggccctgggcgcggtgaaggacccagctcgacggccgggaagcttctgctagtcattgcagccttgcagtcttgtaggcagaaggtgcaatcgacgcgtgcactatggaacatgtgatccagaacgagccaggtggttgagatgatttgtatttatggttgagatgatctggatttgtcgaggagaacatcgccatcgggcagcaggtagcgcgtcaagcgagcagagcagcgaaaagcatggatgccgaagccgccgccgccgagggccaggtgcggcactggaccgcggacgtcaacggcatttccctccacgtcgccgagcgcggcgccgccgacgcgccggcggtcctcctcatccacggcttcccggagctctggctctcgtggcgccaccagatggccgcgctcgccgcccgcggcttccgcgcgctggcccccgacctccgtggctacggcgactcgtccgtgcccaccgaccccgccgcctactccatcctccacctcgtcggcgacttggtcgcgctccttgaccacctccaactcacaaaggtgttcgtggttgggcacgactggggcgcgatggtggcgtggcacctctgcctgttccggccggaccgggtgcgcgccgctgttgtcctggggatcccctacttcccccgcggccctcgcccgatgacggactcatttgccaagctcggcgatggattctacatcaatcagttccaggagccaggaagagccgagagggcatttgctcgctacgatgttgcgacggtcctaaagaagttctacgccttgaaaatcgccgagatgattgctcctcctggagtggagatcatagactttctccaggcaccttcttcgccgattccctggatgacagacgaagaactgggacagtacgccgagaagttcgagaagactggcttcacaggacccctcaactactaccgcatgcttgaaacaaactggagactgactgcaccctggagtggatcgaaaatcacagtgcctgcgaaattcatactcagcaagaacgacgtcggcctgcagtccttcggaaccgagaagtacgtcaagagtggcgctctgaaggagaacgttccagaccttgagatttcgatcatcgaggggcaccatttcgtccagcaggaagaggccgggacagtgaattcggaaatactctccttccttgacaagtttcccagcgagggaggatcagcgtgattgttatttattgtttgcagccagtcccggactcctgagaggaagatggcctcagaatgatccgagggtttatgattgaataaagtgagagctcagctcgatagccgtctgttggcttgcattaaaaaaaataaagagcttgcatgtaaaactatttatgaacgaataaacttctgtcatatactcgcaagtctcaacattgtttacatgccagccaaaaaaaaaaaaaaaaaaaaaaactcgactcgtgc

SEQ ID NO: 38448 - DNA, 446 bp, Zea mays
  Clone ID: MRT4577_135067C.1
gggaaacggaaacccttaactttttttttctaaaaaaacaactattggggatcaggcaaaaaaaagttacagggctaccaggggacccggccttaaacaaaaaaaaagggtttccggaggccaaagcggcccccccaagggggaaaccccattgaccaccccgggggggcagggatcacccggagcccacaaaaatgttggggagggggaaaaaaaaaaccctgaaaaaaaaccccacaaatcccaagacaaaaaaaccgatcgcagggcgcgcgggaaccttgggaaaccccttgggggcgggcttggggaaacccttgaaaagggggatgctgcccttgggaaacccgggggggggggcaaccaccgagtaaaaagggtccataggggggcggggagggaaaaaaaatcccgagggggagtagggaggccctttttgcttgctt

SEQ ID NO: 38449 - DNA, 440 bp, Zea mays
  Clone ID: MRT4577_135068C.1
aaaaaaaaaaaaaaaaaaaaaaaaaaaaaaaaaaaaaaaaaaaaaaaaaaaaaaaaaaaaaaaaaaaaaaaaaaaaaaaaaaaaaaaaagggggggggcggggggctcctttcccccctaagcgcctatttgtgggagatttcccataactcctgcccgcccggggggggcgtttcttttttaaggttcccaggggcccccttttgcgcttttgtgtgtgcaatttcttggctccctgtttctcaattttctagcctggaaaaacccctgaaccccccccggctttaccccccttttgaaggcctgtcccccttttccccttttttccatatttggcaaaaaggccaggaggcgttccccctttcctcactttttaaaaattttgaatggcgattgggcgctccctgccccctttctttaagcccttagggcgggggggt

SEQ ID NO: 38450 - DNA, 756 bp, Zea mays
  unsure (1)..(756): unsure at all n locations
  Clone ID: MRT4577_135069C.1
actccatagggcgattgggatcctcgaggccggccngaanaaaaaaaaaattacaaaaaaaaaaaaaaaaaaaaaaaaaaaaaaaaaaaaaaaaaaaaaaaaggtgttcgtggttgggcacgactggggcgcgatggtggcgtggcacctctgcctgttccggccggaccgggtgcgcgccgctgttgtcctggggatcccctacttcccccgcggccctcgcccgatgacggactcatttgccaagctcggcgatggattctacatcaatcagttccagaaactggagactgactgcaccttggagtggatcgaaaatcacagtgcctgcgaaattcatactcagcaagaacgacgtcggcctgcagtccttcggaaccgagaagtacgtcaagagtggcgctctgaaggagaacgttccagaccttgagatttcgatcatcgaggggcaccatttcgtccagcaggaagaggccgggacagtgaattcggaaatactctccttccttgacaagtttcccagcgagggaggatcagcgtgattgttatttattgtttgcagccagtcccggactcctgagaggaagatggcctcagaatgatccgagggtttatgattgaataaagtgagagctcagatcgatagccgtctgttggcttgcattaaaaaaataaagagcttgcatgtaaaactatttatgaacgaataaacttctgtcatatactcgcaaaaaaaaaaaaaaaaaacccgcggcc

SEQ ID NO: 38451 - DNA, 533 bp, Zea mays
  Clone ID: MRT4577_13506C.1
cctcgaggccggccgggtctcagtcataattgattgggttgtcaaccattgtcacaaaggatcagtcacatacacagtggacagtaggttgcaatgcagctacaatgcagatgaggtgcgcctagcgttgaaccttggactcatgtgtgcgcacccaatttgtaatgcaaggcccagtatgagacaggtcgtacaatacctcaacggcgaaatgccactcccagaaatgatgcccacagacttaagctatagtgttctggccttcatgcaaaatgaaggctttgaccagtatacatccacagttgggagcagtggcatcaccgcctcaagcctctcgagtggaaggtgacaatcccagccgcagaccttgttgtaatcagtaggcctcgctgagttatggatgtccactcaaatccagtattatctaatctaaccaattttgtctgtgaagtttctatattttgtcaaagtatgtggaatatatatggaacgatccggttgttatgtagaaaaaaaaaaaaaaaaaagcggcc

SEQ ID NO: 38452 - DNA, 684 bp, Zea mays
  Clone ID: MRT4577_135070C.1
gattgctcctcctggagtggagatcatagactttctccaggcaccttcttcgccgattccctggatgacagacgaagaactgggacagtacgccgagaagttcgagaagactggcttcacaggacccctcaactactaccgcatgctcgaaacataatttccacaccgcctgccctcctctcgcactgatgccgtctgctggattcccataacctgatactgatacccctctgttacttgcagaaactggagactgactgcaccttggagtggatcgaaaatcacagtgcctgcgaaattcatactcagcaagaacgacgtcggcctgcagtccttcggaaccgagaagtacgtcaagagtggcgctctgaaggagaacgttccagaccttgagatttcgatcatcgaggggcaccatttcgtccagcaggaagaggccgggacagtgaattcggaaatactctccttccttgacaagtttcccagcgagggaggatcagcgtgattgttatttattgtttgcagccagtcccggactcctgagaggaagatggcctcagaatgatccgagggtttatgattgaataaagtgagagctcagatcgatagccgtctgttggcttgcattaaaaaaataaagagcttgcatgtaaaactatttatgaacgaataaacttctgtcat

SEQ ID NO: 38453 - DNA, 304 bp, Zea mays
  Clone ID: MRT4577_135071C.1
gagctactagctagcttggaacactggtgttacataccaaactactacgcattgcgtacctgagctagatagctggcaacttgtgatagagaccagatcaagtgctgcgacaacaatggctcctgagaagctgaagctgatcgtatgagtgctggccctgcagttccttatggcaaggttgcacatggtctccagggcggctctcaacaagagcatcagcgagatcgcggtcatggtggacaggaaccgcatctgcataggcttgcgtcgatccgatagcctacttgctagagaagaaagacag

SEQ ID NO: 38454 - DNA, 601 bp, Zea mays
  Clone ID: MRT4577_135072C.1
gccggccgggccggggagcgcccacccgctacccaacgtgctgggtctagattccgaggtgctgatgactaggccgatggcgaaacaccccgagtgagtacaacagctcggacggctcagcttactgctccttgtcctttcccaccgcatcagacaggcctggataagctgccgcaagaggacgaccgcgcagacgatggcgatcagacaagatgcgcatcaaggtgaagtacaacccgcccgagtccagcctctccaagctcaggatccggcagaggcccaagtgggggagcaagaagagcaaggtcccgtgcacctactccgccgaggatcacatgctacctgctgcatgggcaacgagaaggtgtacccccaacgtcacggagaggagctcgcggagatcggcgcgggagaccttggcgtcttccccaaggacatgagctgcacctgccacgtcgtcgaggccgacgacaagcactacaacttcgaggactcggcgacgccgagtatgcctgcgctggtcgatgtatacttgctgtgctcgtgtatctgaaccaccgtgcaatatagctccagatgagggtgacgacaagactgtact

SEQ ID NO: 38455 - DNA, 389 bp, Zea mays
  Clone ID: MRT4577_135073C.1
gggtacctcgaggccggccgggattccgtccttatctacaatgcgacgcccttccctcacatgcattccggagagatgccaagatcccaacatgatagaagatattcatgaagactttggcaggtaggatcttccagcgcttgacgtcctgagcaatgaactcacttgcgattacgtcctcggctacatacaatcatgaggaacgaaatccgcggggacccagggatcgtgatatctgtcggtaactgaatgctcaaggttggagcccatgaagactatcatgttcgaagggaggatagagatcgcctcgtgcttaggctttgctggaaatgaatgatgcctcgctgaaggcgctcgctcgcaagtacaaccaggacaggcatgatctg

SEQ ID NO: 38456 - DNA, 280 bp, Zea mays
  Clone ID: MRT4577_135074C.1
cggacggtgggcaggacgcgtgggttgggaagaaagaagcaagaatggtgttgtaaaagatcagccttcagatgcagcagtaagtagcaacgccactccttcgcagtcttcatcgatcaatgacatttcatccatgtccactgagcagacgctggcctcagacacagacagcagtcttgatgcctcgacgggaccccttgaaggctgtcgatgataggttagaaatagcaaacctgtcagcattgaaggaactctcacctccgtgggcctgaaatgcttg

SEQ ID NO: 38457 - DNA, 554 bp, Zea mays
  Clone ID: MRT4577_135075C.1
acaaaaaaaaaaaaaaaaaaaaaaaaaaaaaaaaaaaaaaaaaaaaaaaaaaaaaaaaaaaaaaaaaaaaaaaaaaacccaaaaaaaaaaaaaaaaaaaaaaaaaaagttttccttgggccggaacccccctagggggaatttttggaaatttccttcccccttgggggcccttaaaccttccttttagggggcccatttccccctatagggaggcgaataacatttcattgcccgtcttttaacaccggcgggattggaaaaaccttggggttccccaattaaatgcctttgcagaaaatcccctttttcccagtgggggaaaaaccaaaaaggccccccccgtccccctttccaaacatttgcccaccctaaatggcaaagggcccccccttttaccgcgcctttaaccccggggggggggggggttccccccagggtaccctttacatttgccaggcccttagcgcccgctcttttggtttttttcctttcttttttcgccactttggcgggttttccccggaaagttttaaatggggggcccctttaggg

SEQ ID NO: 38458 - DNA, 231 bp, Zea mays
  Clone ID: MRT4577_135076C.1
agatccagcgagcgaacatggcccgtgctctcaccctcagcgtcgtcctcgtcggcatcgcctccgctgtcgtgtccttcgctgcggatgacgcaccggcagcctcaccaaagcattcggcatccacatggtcaaaggcatgcaccacgtcgcgcgacaactccgacaatgtcaccacagggtctttagaggatggtgcagctaccctgacataagattcactgacggagg

SEQ ID NO: 38459 - DNA, 275 bp, Zea mays
  Clone ID: MRT4577_135077C.1
ggggaggcccgcacggcgcggcgcacaggaaaaggaccgccacaccaacgcagacgagcgcgcccaagaagacccgccacgagaaggaggacgagggcgcccccaccaccggcacccgcgagagcccccaccacaaggagacgcagcaccgcaacaacgccaggccgcaggacgccgcgcacaacgacaagcgcaccaaccgcgccagaaagcacccccaccccgaccgccagaagcccacggccgcccccccagaccccaagaaccaccgcccc

SEQ ID NO: 38460 - DNA, 150 bp, Zea mays
  Clone ID: MRT4577_135078C.1
attcccgacctgaacgacccgaacaatccaatcatactctacatatctctactctacctcgtaatcaactcgcctgatctgacgtctctacccaggggggacaatcccttaaaccttctacacaacctatctactcatctaaccaaccat

SEQ ID NO: 38461 - DNA, 3075 bp, Zea mays
  Clone ID: MRT4577_13507C.1
atgggcaaaggcaagagaggtcacggctcgccccgccatgctggcaacaagcggaagcgcgatccaagtcctccctcggaggactttggcgactctaagtactcggaggaggaggtttcctccgagttcgaagggtcgctagccctcgcctctcccccggcgtcgtctgatgactcggacaactcccaggggatagctacggaggagcggagcgatgacgacagcgacgatgagggcgacatcgacgacggtggcagggaaggaggtgacgacgacggcggcaggggcggtgaaggcgacgtcggcggcaaaggcggcagtggcagcggtggcgacgtttttagaagtaaccgccgagcgatgtctgatgttgctagtgttttagagattgcaatggcgccgaaacggaagaagaaaagctccatcgcggcagtcatcccacccatcgaccccaacagccagttgccattcgcgggtaaccacgtgaccgttatctcagaatctgacctccttcatattgtcgacattggggttttgcttccgaaagagctctgctcttggcgaatttgccgcgggatcaccgttccgacagaggataaccatgaatctatcgtttatgttcctttccttattcgtggttttgctcttcccgtttctccctttttccacggcctccttgatttctacgaattgaacttgactcatttgaaccctaattccatcttgcaagtttccatttttgtacatttgtgtgaggcctttgtcgggattctccctcattccggtctctggaaatacctctatcattgtcgccccgggatggctgggggacaacaccaactcgttggcggcgcaagcctggagcttcgtcgcgggagaaaagcagaatacctcgacattccccttaaggacagcattaagtggtggcgtctcgagtggtcagggaggcagctagatgtccgcacaccaagctggatagaatctccgaccccttcagagataacagaggctaaagtattgcttgccgagaacagacagcctttaaaggacagggcgtaccctgcttatttgtacaatggtgtcaatgattctacccgggtcacaaacaggagaattcccatagaagatctaatgagccgactggacataatcttgaggggtagagtttcaaatgctggtgctcctgtggcctattatgcttggaacatgccaccaatcaggccattttctgagtttgtgtccaaccctcttggtagcgatggtagcctgggccttagagtacgaccctctcctgaggacattgaggctctgattgccccactttggagtctttcagaggatgagaggcagactcattttgagatgccagctagcactgacgatgcggagatagatgctgtgcttagtttgctggctggggaatcatctgactcgacccatgccgagccaatgactatcacaactggtgcaggttcttctgctccggttcatgatgaggtaccggcagaggcccttcctgaggttgatgccaagggttgtgatcgtgcacaggctgctgtttgcatatttgatgaagacgaagaggaagaagaagaagtcccactgatccgcaagaacaaccggcactatagaggtagcgaggggggacttccaatatcagactttgatcaagtactggaggaagtcgtccccgaagatatgctgtcagagccaactgccgatgatatcccagccgtctgttcagaggtcccagacagaggtaacccgagcggtgtcttgtgcatcgtcgactttggagggcagtcttcaatgccaagacgctggtccgagtcaccgactcccatggaggtgactgaggagccctcagccttagaggtggctactgcagaagacccagcccctgagggtggtgccggtagttaccaagcccccgagggtgttgctggtagtgatccagctctggtgggtagtgcaagctacgacccagccctcgagggtgttcaggtgggctctctttcccatgcctccatggatgtccacgttgggtcatccccacctcggtccgatggggcgacggcggtacatgcttccacagttttaagtggacaagtcgccttagaggtcggcgagctagatgcgaggagcctactacctgctggcggggctgagatcacccctaataatgtccttcagattgttcctgctgatcttccctcgtcgagccatgacatggctcctcctgccttgggtctaccactattcctctccaatcttcagctgagatcttgtggtgccactgttccgaagcaagctctatctctaatgcagtggaacccattattgctccagaaacagatcgatgacttgaaggcgtcgaacgctgctgtgttgtcggatatgccccggcggtgctctgaccttgaggagaagtactctcgaagtcaagctgacttgacccaacggtgctctgaccttcaggagaagtattctcaaagccaactcgacttggcccaaacctctacttctttagatggtgcgcgttctttgcattcctccctcagtgcccagcttgactctgaaaggatgtcgcatgaggaggagaaaccagcactcgcgacctctcgtgacaatctggataggttatatcgtgacgccagcaattccttgactattttggaaaggagcaaccgcttcactatgtcagacctggatcatcatcgtcacgagctgcaagtatcccaagatgaagttctgcggcttggacagctgttatcaaccaaggattcggccattagagatctgcgtgcttcaaagaaacttgtcgcacaggagctagaagctgctcgactggctgtcaaagcttcagaggacaactgcgccattttgaaggctcagcgcgacaaagctatggacaaagccattcgcgctgggtggatcttgatgaggaggcccggcgtagtggtgcctgacgatattgtcgccgatgtcaaggctgcgcctgatgcttcgagtcgtccttcttcttctattgctcctgcgaaagacattgctggcaaagacattttgatgcagtga

SEQ ID NO: 38462 - DNA, 354 bp, Zea mays
  Clone ID: MRT4577_135080C.1
acgacggaatcgtacctgtcgagcttcagcacgagcatccagagagctgcatacaggaccgcgagcgactcgttaggagaggctgctctttatgcatgtgcaggtacacgcggatcatcgcgctcactgactgacgagcagatctcgcagctgttgttccacgcttccgtagatgaacactggctcgactgtctcctgacgccgttcggcgagtctatcggctcctacaggctattggaccaggcaacatacatttacaaccattactgccagatttacgaggcctatgctcgcagctatcattagctcttaccatccaaggtcagcgactgttcgacatctctacctgtgatc

SEQ ID NO: 38463 - DNA, 2239 bp, Zea mays
  unsure (1)..(2239): unsure at all n locations
  Clone ID: MRT4577_135082C.1
agtttttttttttttttttttagatagaccgaacataatccgcattaaagttttagaccatactttaacgtgttccatagtaagacggtctgggctattacagcctgaaactgatccctaggtaggctgctgcgccggaggcttcgtctttgggtcgcgagttaaggcgacccactgatccaaaataagatatagagctacgtttatgggtcgcaagttagggataggtaggcagctacgcgggaggtatatacatagtacggagagctgatgcaacccacatagttatgcacataaatcttacacaactacaattgtagcttcacgcatccacaaaagccaaccacaaaagcgaccaagatgtccatccacaaaagtaaccaagatgtcatctgtcatacgttcaaacttcaggtttgtcgaggcttcctcaagtctgctagaattagaggagcgtcactcctacatattacagatgttcccatgaagccaacttctagctttgctatgtccatctccatctcttacttgttcgtttcagctagaacaacagctacaccaccactgatactcttgtttgctagctgcttcagaagagagccctggtccacagtgcagatatcgtaagcatgttgagtacactgaatgacaataggatagaacatgttcatacgatttcaaagtaacattgnacacaagcatatttaattgggaaaattgagttaacaatcaccaactaaacgatatttaagggcaatacattctgataagggatgaaccttttttcaggatagaatatttcagcaatatttcccagcacaattgaaaagaagcataactaactgtgaacctctaataggttgttgttcggtgatggtttcctaaatctcttcaataatgtagatccatttgcaaccctgaataaaaaaagttcaacaaaccattgcatagaatagagatgatgggatacataccggtgaatctgcatgccaggatacatacctgtgaatctccatgtggtgatggtgttggtcgacccactgcggcgtcgatgggtcaccacagaagaacatcgtcgcctccctcatctgcctacaccacacgccgacgcccccaccgaccacggagataaaacatcaaggtcgtcgcgagcattcagaatcatgtcatgcagcccctcggcagcggcgtccggaggtaacaaaaaggacagggaggcgtcgggttgcggcttcgccatcccggagacgttgacgaatcgcggggtggtctccttggactctgagacacataaacaaagctggtactctggtttggccatctgcgtgtccaccagacatacaagggggtggaaaatagaagtcaggctggctaacataagcaaaagagaaagctgatggtactcatgactatgaatgtctgattgcggttggcgctgatgcagcgaagccgcacttgaagctgatgaccttccagaagggagtcccatttggttcttctcgtcagtatctagatctgttgatgtatcatcagtcgcggggcttacataagccatctcagactcttcacagctctcagtgcttcttgttgtttggagctgaagctaccagatctggttgtgctttattggtgagagatagatctgcaaatctaaaccacataaaagcctacgaagctattttattcttgttctcgaaactgggaatagctcgctagagggaaagagggtcccgatcgatgaagaccaaagctttggattatgctccaatttttttttcctttttaaatgcaaaacaccaccttctagaagccatgaccaaacaccgtgttctccagccatccgaactccgaagacaagaagggtggggaagggggtcgagagagttcctcacttagtgaagatgaagaaggatgggagcagcagggtctgccacgtgctcacgttagcgacgagccgacgatgccctcattgccggagaggaggaaggctttgtccattgcgaagggctcccggtcggatcgacgcctccgtgccgcggttggcgagcacggccgcaaacaacatgaggcggcagcgagcgatgggagagagcctggagtggggagatctcgctcgccgggactaccacctgacggcgagcatggtcttgaacaccatgaggtggtcggcatccatgggacaaagcatgtgcgtggtggccgggtgtgtcgtcgagagagggtgagagagagtgaggta

SEQ ID NO: 38464 - DNA, 612 bp, Zea mays
  Clone ID: MRT4577_135083C.1
atgaatattataccttcctcaagtctgctagaattagaggagcgtcactcctacatattacagatgttcccatgaagccaccttctagtttggctatgtccatctcctcctcttactggttcgtttcagctagaacaacagctacaccaccactgatactcttgtttgctagctgcttcagaagagagccctctaataggttgttgttcggtgatggtttcctaaatctcttcaataatgtagatccatttgcaaccctgtgaatctccatgtggtgatggtgttggtcgacccactgcggcgtcgatgggtcaccacagaagaacatcgtcgcctccctcatctgcctacaccacacgccgacgcccccaccgaccacggagataaaacatcaaggtcgtcgcgagcattcagaatcatgtcatgcagcccctcggcagcggcgtccggaggtaacaaaaaggacagggaggcgtcgggttgcggcttcgccatcccggagacgttgacgaatcgcggggtggtctccttggactcttgcactaaattgttgggaacatgacataattataaatatttgttttcctgtgcaggttgctggagactttgata

SEQ ID NO: 38465 - DNA, 1616 bp, Zea mays
  Clone ID: MRT4577_135084C.1
ggaaaaggtcaattatttgagatcttaatatggaatgagatgaaatcaaagaccactgtgtattacatgggaacaaggataacaataatttatgaatattataccttcctcaagtctgctagaattagaggagcgtcactcctacatattacagatgttcccatgaagccaacttctagctttgctatgtccatctccatctcttacttgttcgtttcagctagaacaacagctacaccaccactgatactcttgtttgctagctgcttcagaagagagccctgtgaatctccatgtggtgatggtgttggtcgacccactgcggcgtcgatgggtcaccacagaagaacatcgtcgcctccctcatctgcctacaccacacgccgacgcccccaccgaccacggagataaaacatcaaggtcgtcgcgagcattcagaatcatgtcatgcagcccctcggcagcggcgtccggaggtaacaaaaaggacagggaggcgtcgggttgcggcttcgccatcccggagacgttgacgaatcgcggggtggtctccttggactctcgtccggtctccatagcctggtactctggtttggccatctgcgtgtccaccagacatacaagggggtggaaaatagaagtcaggctggctaacataagcaaaagagaaagctgatggtactcatgactatgaatgtctgattgcggttggcgctgatgcagcgaagccgcacttgaagctgatgaccttccagaagggagtcccatttggttcttctcgtcagtatctagatctgttgatgtatcatcagtcgcggggcttacataagccatctcagactcttcacagctctcagtgtttcttgttgtttggagctgaagctaccagatctggttgtgctttaatggtgagagatagatatgcaaatctaaaccacataaaagcctacgaagctattttaatcttgttctcgaaactgggaatagctcgctagaggggaagagggtcccgatcgatgaagacgggtgggcaccgagctgtcctggccactccatcctactgctgagctactcctacctcttccccatctgcaaacaaagctttggattatgctccaattttttcctttttaaatgcaaaacaccaccttctagaagccatgaccaaacaccgtgttctccagccatccgaactccgaagacaagaagggtggggaagggggtcgagagagttcctcacttagtgaagatgaagaaggatgggggcagcagggtctgccacgtgctcacgttagcgacgagccgacgatgccctcattgccggagaggaggaaggctttgtccattgcgaagggctcccggtcggatcgacgcctccgtgccgcggttggcgagcacggccgcaaacaacatgaggcggcagcgagcgatgggagagagcctggagtggggagatctcgctcgccgggactaccacctgacggcgagcatggtcttgaacaccatgaggtggtcggcatccatgggacaaagcatgtgcgtggtggcctaaattgccgcggaacatgacataattataaatatttgttttcctgtgcaggttgctggagactttg

SEQ ID NO: 38466 - DNA, 434 bp, Zea mays
  Clone ID: MRT4577_135085C.1
catcacgtccgccctccccctctctctccctctccctctctcgacgacacaccaggccaccacgcacatgctttgtcccatggatgccgaccacctcatggtgttcaagaccatgctcgccgtcaggtggtagtcccggcgagcgagatctccccactccaggctctctcccatcgctcgctgccgcctcatgttgtttgcggccgtgctcgccaaccgcggcacggaggcgtcgatccgaccgggagcccttcgcaatggacaaagccttcctcctctccggcaatgagggcatcgtcggctcgtcgctaacatggggaagaggtaggagtagctcagcagtaggatggagtggccaggacagctcggtgcccacccgtcttcatcgatcgggaccctcttcccctctagcgagctattcccagtttcgagaa

SEQ ID NO: 38467 - DNA, 139 bp, Zea mays
  Clone ID: MRT4577_135086C.1
cggccgttctcctgtacaggaggcagctatggcgcccagtcggaatggcatgatcctgaagcgccacttccaccaggactggcagcagtgagtggatacgtggttcaaccagtcggcccgcaggatccgcagacgcaag

SEQ ID NO: 38468 - DNA, 827 bp, Zea mays
  unsure (1)..(827): unsure at all n locations
  Clone ID: MRT4577_135087C.1
attgggtacctcgaggccggccgggaaccgctcactcctcagttccctgatcaaccgctctctttcggtagcctctttctagccttttatgagcactctcttgaacaaaccctacgacgctttcgccgacgaaggtgccgcagacgaggaagacgttcaagttgaagtcaagaaggccaaaacctcaaacgttatccacattcgtatccaacaacgcaacggacgcaagacgatcacgactctccagggagttccctccgagtatgacccgaagaaactcttgaaggcgttcaagaaggagtttgcctgcaacggttcgatcgtcgatgacgaggacatgggcaaggtcatccaacttcaaggagaccagaggcaaaagatcttggaaattctgatcgaggagggaatccaaaaggagacgatcaagatgcacggtttctaagcaaaccaacgaccgcgcatcgattctcgactcttcccccttccctcgctctaccacatcttcctctcccaatctttcatttcgcacttttccgtcaatctccttcgccgaccgtcatcttcgcgtccgtctgtcgtctcgttcccggcaccgattccccctgtccgatcccctcgcaagatatcccgccctcgcccctcgcctctcgctcgcacgcacccgaaaattgttgttttcgtttctctagaccgtttccttcattttggccgtcaacgcagggcgtcgggtctcgcgcgcgcctaggtgtgtagcgagtcggggagtgcattttcgaggcggttggggcaggtgtacgacccgcgntgtggggggatgaggactggat

SEQ ID NO: 38469 - DNA, 600 bp, Zea mays
  Clone ID: MRT4577_135088C.1
tattaaaattcagcaaaggatgattaagtctccaataaaaccgtttagcgcggggagcaacaaagcaactatgagaccaaacatagatagaccgaacataatccgcattaaagttttagaccatactttaacgtgttccatagtaagacggtcagggctattacagcctgaaactgatcccaaataagattataggatcgaagtctacgtttatgggtcgcaagttagggataggtaggcagctacgcgggaggtatatacatagtacggagagctgatgcaacccacatagttatgcacataaatcttacacaactacaattgtagcttcacgcatccacaaaagccaaccacaaaagcgaccaagatgtccatccacaaaagtaaccaagatgtcatctgtcatacgttcaaacttcaggtttgtcgaggcttcctcaagtctgctagaattagaggagcgtcactcctacatattacagatgttcccatgaagccaacttctagctttgctatgtccatctccatctcttacttgttcgtttcagccaccacaccaactgataaaatagatacaagaatgtgagtataaaattcata

SEQ ID NO: 38470 - DNA, 113 bp, Zea mays
  Clone ID: MRT4577_135089C.1
gttgtctcgtaaccgacggcatatcatctgatagcattacagctggccatgagcttgccaacttccaacgggtatatataccttgcaatgcaggtatgcgattatcacctcat

SEQ ID NO: 38471 - DNA, 380 bp, Zea mays
  Clone ID: MRT4577_13508C.1
gccagcgtccgtaatacactagccacgggcacccggcatgacagccaccccaacaacgcaaaacgctgacgcggcctaccgacttgtggcatgcgggtcctgtggcgcagcctcaggcagggctgtaagccctggtgccaccaacctggatggaagaacaacagtactcaccatcgaggactagccgcttggcggcgaggtcctgtacaaggtcgaggagctggggcccgatgagatcctggcccgggcccgctcgctcctgccggaccacatgctcctggcggtgttcctgtccgccgtggcgacagtattgcacctgacgctacggccatgcacggtgtacctggtggactacacgtgcatgcgcaccaaccccaact

SEQ ID NO: 38472 - DNA, 690 bp, Zea mays
  unsure (1)..(690): unsure at all n locations
  Clone ID: MRT4577_135090C.1
ggtaccggcnccttttctcgaatttttttttttttttttttttttttttttttttttttttttttttttttttttttttttttttttttttttccaccccctaattcaaaaccctaaaaagcaaaacaaaacccttttttaagggcaaaagggggtgggcaatcggggctagggttcccccgggggtgggggccgggggaaaagttcagcggccccccgggggcagggggaaaaaaaaggaagggcccgagggaaaaaaaaactatgactgggggggtcaaaaaagctttaaacgttttgacccaagcaacatcaaccctaaaatccccagccccagtttgggccccagaaacccccccttttgggttaacagaaaaaaacatccccacaacccgagcggggttaattcccaactttgccgggaccacatttcctctccaggggggaaaaaagcgaccaagagggattttcaaaactccccatttgtttgggggggggatgcccccaaaaccctgccacgagttgtttttttggtgcccgggggaatccccccaattctccgggtatatggaaaatatgaaccatctcccacccccttggaccttcatggctttgggaccaaaggcaccagggccaaggaccccatcaaacttttttgatcgcaccccacaaaatccaaagggccggacc

SEQ ID NO: 38473 - DNA, 1892 bp, Zea mays
  Clone ID: MRT4577_135091C.1
cctcgaggccggccgggccgggacacaccaggccgagcgcgcgcgcacgcagcagccaacaggggctcgccggggtagcttttaacagggacaagcctcctccccccggccggccctctttttctctttgttctcttcccggccgctttgttccctctcgctcgccctcttcttttgcgcggccctgtcattcccctggggatcagccttagcgttgcctcatatgggggcgagctagctagctgctgagcaaagcggcgggacaacaagaggctttccatctctctccctccctctctctgatctgctatcgtccccttccctgcttccctccccctcttcttgtagagaaagaggaggcgagggctgccggccggccgggacgtggtgacaagctaggctagctgggggccggacgagcgagagggcgagatcgtcgattcgcgtaatacgtcccgtcgccggccatgacatggtgcaacagcttcaacgacgtgcgcgccgtggagaacaacctggccaccgccgccgccgtggccgccgccgccgccaagaaacagcagcagcagcaggcatcctcgcacgtcaacctcatcaggacctgcccctcctgcggccaccgcgcacagtatgaacaggtgcaggcggcggcgacgatccaggacctgccggggctgccggccggcgtgaagttcgatccgacggaccaggagctgctggagcacctggaggggaaggccaggccggacgcccgcaagctgcaccacccgctcatcgacgagttcatccccaccatcgagggcgagaacggcatctgctacacgcatccggagaggcttcctggtgtcggcaaggatggcctcattcgacacttcttccaccgtccgtctaaggcttacacgaccgggacgaggaaacgacgaaaggtccataccgacgaacagggtggcgagacgcgatggcacaagacgggcaagacccgtccagtgttcaccggtggaaaactcaagggctacaagaagatcctggtactctacaccaactacgggaagcagcggaagccggagaagacaaactgggtgatgcatcagtaccacctagggtccgatgaggaggagaaggacggcgagctcgtcgtctccaaggtgttctaccagacgcagccgaggcagtgcggcagcggttcggcgacggctaaggacgccatcccgctcgctgccaacgcagcgactgaccaccaccaccaccaccaccatgacggtggcaatggcggcggcaacaacatgttgaaggaggcaggcattgtagatttctacagcccagcagcactaattagctacaaccaggcagcttctaacagcagggttgccgcttctgctcacctggtgcctaactttgaggtgcacactacatcgggggctgctggctttggtccctgaccaagacgcgcaagaggaactattcgactgatataggttagaggggagggaaatgcaggcagataatggcaacttcatgaatgcaataacttactacaaatggtcgacgagtttactgaaccgtaatggtggacaataagaggatgagtacgtgttgagtgagtggttggacatacaaatactgaagtgtaggaatccatacaactatacattgttcattaattgttacacatatatgtaacttgatgctatcaattttttgtttaatgatctttgttccataataagaatggagtttaatattgtacatcagttctttattacctaaaggacttgtatatgtatacaaatcattgtacacctttttttggaagaacatatctgttgtatcattttgttgattgttgctcaacccttccagcaaagtaaaatgaagcatatataactttgaat

SEQ ID NO: 38474 - DNA, 1568 bp, Zea mays
  Clone ID: MRT4577_135092C.1
cactatttagcacatttgtattagtagttagcttttcgctattaatgcaggatcttacttatctctctcacaaagtttcttggttcttgtgtctaaatttggcggtaaatttacagtccgcttctcttctcttctttttcatccatctcagcatttagctagcttctaacctcttaattatacttactcttagagcaagcttaataacgcaacctatagtgagctttataagagcaagtttaacaatagtgcctatggtgggcttaaaacctctatagccatcaataaaacattcatataatggtgttaactataaggttgactcttagattactattttgtctttttgtcttttatctttttattttggagctcgtgtagcagctgactcttgtataagagcccacttctcctaattttttatctctctcttccacgtaagaaaaaatgtcgtgtaagcaggcctgtagctataataactctctcacgataaaaactgcacatttaatacttcgtcaaactctttcttttatagagtctagctactagtgagtaatctgattttctctctctttatttctctttctttcacatcattataatttggtatatcatcccttgcagcccatctacatcatcttattatatttgttcttagactatctctaacagattttctatactttgcaaacaatgtaatctacagtacaaaacagtactttgcacgacctgctggagatgaccttagtgataacatatgctacctattataccacgatagcgcctctttggtatcgctgcaaacaatgcaagggcaactaaggtagtgtttagttttgtagtatggttttggagtggcttcgcttttaatttattgttgttattattgtttggattgattctatatagcatggagtggttctaaaaatgaaaaattatgctcaaatgttgaaccattttagcttctcaaaatcttttggatggagccgctagcgggaacgaagccattctatcccaagtggcttcgaaaccaaacgctacgtaagttaacacattggccaatattgattcaccggctgaacaagaagagggtggatttctcgtcaccaatggaagacccaggccgtggagcgaggaaggcagaaagcaatctggacagccttgtcctctgaaggctaggctgggcacgcctcaacccagccctgtggatccactcccacctgagcggctgagcctgagggtccagactccagatcaccgagctcacgtgggcgacgcaccgtccacaatgcaaccccacatttccggccaggtatctcgtcgcctcccgtccatagaaaagcacgacgtcgcttgtcgatggcccatgggcgagagagaagcgtgatggagacgtgtgctggaattgaactgcggagagggtcgccgcaggcaacgtatagctcggccggccaccattttctccttccagcaggatatgtacagcatttttattgttgttgttctaagagcaactccaataaactccctatattctttctaatatatataaataaagttttttttat

SEQ ID NO: 38475 - DNA, 462 bp, Zea mays
  Clone ID: MRT4577_135093C.1
tcctgtcatcccactggctgcgaagctgaatgcgtatgcagccgagctctgccctccaaaggcccagaagaagataagctccaagattgatgagattgccaagaaaggttggcccatcctacacgacatttagctagcccattctggtcccggttctcatcaaactgtaatccatcaagttgtaatccaacatagaaacaagagagttctgcatgattttgccgaaaagtttctgtaggaatgtttcagcagcctgctgacagcagcgattcattgttcacttggtcacggtgattcatcacatcgtttatagatagcatcaatcatctgtcggtttggggtttttctccgtccgtttgctgtacccatgtttatctcttctgggcttgctgtactcatgttttatcctgttctgggcttgctggacatgtagtgaagttgtaagatgtaacttttggttga

SEQ ID NO: 38476 - DNA, 259 bp, Zea mays
  Clone ID: MRT4577_135094C.1
gtgatcaccgagctcccaacgccaccaagccgtctaggtgatgccgatcagtgatcaccgagctcccaacgccaccaagccgtctaggtgatgccgatcaaagtggtgtgtgctctaggtggctctcactagcgctaatgaggaacaagcgcggattatgattctctaatctcctcactaggctcttggtgcttgcaatgctctagcaatgtgctggaataaatgtggagtgcaagacattgaatatggtgggtggagg

SEQ ID NO: 38477 - DNA, 342 bp, Zea mays
  unsure (1)..(342): unsure at all n locations
  Clone ID: MRT4577_135095C.1
cacgtcattctgatatgagacgaggggggagggaggaccaatccgtatcggcgatctcgtagagccgcaggcctcacgccgcaccgagatgtggcagaccatgtacgggcttacactatgatatcccacggggagcactaaccaaggccgcacctgcaacactgaccaaagcttggtgctgcgtggggcgnacncccacctagaccccataccggcacccctgccggaaccaaatnccgagcctaaaccggaaccccagcctgcgccacagccgggcccctgcccggaccctgcacccgtgccacatgcagagccaaaacctgctctccgtccgggcccggc

SEQ ID NO: 38478 - DNA, 314 bp, Zea mays
  unsure (1)..(314): unsure at all n locations
  Clone ID: MRT4577_135096C.1
aaagcaagnggagacgcnggcaaggagaggaagcacagnggaggagaaaccggaacnanngcngnngacaaggnaacaggagggncngcaaaggggggggagccgcnnngngaggcaacgaggaaggaaccggacagngagaagaggcacccaagccnnggagaagaggaagacganacaanagggggaacagncncccctgcgncagggagcngagaaaaaacaaggccacaggaagggggcaacacaggcaacgaggggcccgagaagggggcaccagagagccaaacgngagcgcgggaaagaaaacagcc

SEQ ID NO: 38479 - DNA, 175 bp, Zea mays
  Clone ID: MRT4577_135097C.1
aggttagcatgttgttgcgtggttgaagtgtaatttgacttgaacgtctctttgtttattggtggaattaaaacatgcaaatattctttagggaggttgtattgtttatagtttgtgacacttgtggattaaaagaatcctatatttatcctaaaaaaaaaaaaaaaaaaaaaaa

SEQ ID NO: 38480 - DNA, 291 bp, Zea mays
  Clone ID: MRT4577_135098C.1
ggaccgtacagcatttcattccgtggctttaggcacaatgatcttcgccatcctccttagtcggatccactagtaatgtgttttattcacaagaacgaacaagtgccaccatccatggtattccacatgggggatttcaatagtgaatatatgtgcttgcttatgaagaaaatatacctgttggggctgactgattctatgattcaaacatactttatcgtacttgcgacgttatttcctttttataacgccactttaaaaacagtgactgacacgtgtgttacaaacagt

SEQ ID NO: 38481 - DNA, 127 bp, Zea mays
  Clone ID: MRT4577_135099C.1
ttaccttgcgactgctcgcggaggattgcgtaagtcatgtatagtgagagggctggagtgttgagcagggccaaggaatgagactgaggtgtgcaatcgcactctttgctctggtgtgcaatgagtc

SEQ ID NO: 38482 - DNA, 255 bp, Zea mays
  Clone ID: MRT4577_13509C.1
agggggatggctaacaatgcaactttgttgcatacgtgttccttacaaaattacaaacccaacatttccagcacgctttaatgacagcagtcagtacttcaggactattacacccttttaggggagcccgggcggtaaccccccgtggaattcatggaacgactgaacaagcacattttccgacaaacggccgggcaggcacccacgactccaggagctgtggtttctagcgtgggggggctgcacctgcacggg

SEQ ID NO: 38483 - DNA, 444 bp, Zea mays
  unsure (1)..(444): unsure at all n locations
  Clone ID: MRT4577_1350C.1
ggtgttgggttttttttttttaaaataaaagaaaattttttaatcaaatagcagaaaagtttttaataaaaatgggggggggggggagaagaaaaacaagaaaaaaaggaggggagggacaaggcaaaaggggagaaaaccaaaaacaaaaggggcaaaaaaccaacgaacaaagggaaaagaggcgcgggcaccccaaggaataccagaccgggaccgggggggaaaccagagtgggggaaagggagatgaacaaaagtttggaatatggaagggcataaacggttcccgggtcgcaacggcccccggtcccaaggccaaaaaagaaaagggccgggagcctaaagagaaaaccctgggggggcaaaagggggaaccaacgtgccctaatgggagggggctaaccgcccgttcctccngcagtaaaacctgcccccccgccgg

SEQ ID NO: 38484 - DNA, 899 bp, Zea mays
  Clone ID: MRT4577_135100C.1
ttttttttttttttttttccccacaaaacaagctattcagtttgaaatttgcttacaacagaatatgattttgttccacaaaacgggagagaaggtgacatagaaaaaagaaaaacgaactctgctgcctactgctaatgattaaaatggtccgtgttttattcacagtggacttttcgatgctactgcacaaaaaaagaatatcaacgatatatgtagaaaaaaaaggcagacagaggaagaaaacacaggatatcaacattttagctagattgccaaaaacgaaatcaaccaaagaatgcataggaaaaagggttggaacgatgtgcgacaacaattgcttcttcacaaagccagctttttatgttcagagaactgctcattcgggtcagataatcgcagaggcatgactcagctttccctaggtcgcctgtaatcagattatcaaagaatggaggcacttagcttccttttaggaatcttcttttgtctctgtttggggaacctatccagtaccagcggacgcccggggttgctcccacacataccgatcggataccttacgcgatctgatttccgtcgccagcaaaagatagacatgacccacttgatcactgtgacaataaagatcttagcgaaggacgagtgcctcttcaccaccttcctctgtgccatgacaaacggctgtggccttggctgcaccttgagcgggacagcagggaacggtgccgcgtccctgcagagctgctgagcgatctccctgagcagaacgacctgcgccttctcatctcccatggccatgatggcgtgccgcatagactcccgatccgcctccaacgcgtgccacctggctttgagttcctgtatctcgtcctcctccgcccagccccggccccagc

SEQ ID NO: 38485 - DNA, 792 bp, Zea mays
  Clone ID: MRT4577_135101C.1
gtctatgcatgctcccccctctttctcacacctctctcttctttcttccgcacgcacgctgtttggtgaggggccaactgccttggtggtgaccatggagaggacgccgtcgtggtgcatcctcctgtgtctggccgccgcttcggccgtggtggcggcggcggctccgctgccgcagtactacaacgccatattcagcttcggcgactccttctccgacacgggcaacttcgtcatcatcaactccggcaagctgcccaacatgcccaagttcccgccgccctacgcccgctgctccaacggccgtctcgtcatcgacttcctggccgaggcgttgggagtgccgctgctgccgccgtcggcgaacaagggcaccaacttcagtcagggcgccaacttcgcggtgatgggcgccaccgctctggagctcaagtacttccgggacaacaacgtgtggagcatcccgcccttcaacacctccatgaactgccagctcgagtggttccaggaggtcaaggagaccgtctgctcctccccgcaagagtgcaacgagtttttcgggaaggcgcttttcgtgttcggcgagttcggcggcaacgactacagcttcgcgtggaaggcggagtggagcctggacaaggtgaagacggagatggtgcccaaggtggtggagtcgatgatcgacggcgtcgaggcgctcctcgacgagggcgcgcggcacgtggtgttgccgggcaacctccccgccggctgcatccccatcacgctcaccatgtacgcgtccgaggaccg

SEQ ID NO: 38486 - DNA, 310 bp, Zea mays
  unsure (1)..(310): unsure at all n locations
  Clone ID: MRT4577_135102C.1
aacacccccactctttctgatgttagcgcctgctacctgtgcancgtggggttcccaccgggacacaggccccctccatcccatggcgcgcgccgccacctccaggctcgccgtcgtggccaacttttcctctactcgcgagtcgttcgcccgccacctccccatccctgccccctcgccatccaccgcaccgctcaatctgcctgaaccaacgaggaagcggcggaccccgttctggtcgtgtccgaccaggtcgttccatgccacaatgcaagtgtatacaacaagattactatgatgtgcttggagt

SEQ ID NO: 38487 - DNA, 315 bp, Zea mays
  Clone ID: MRT4577_135103C.1
ggggacgggcgcaacaggcacggagagcggcgccgacacgcacgtggctcccacggacggccagggcacgcaggagcaaggcgcggcgcacgggcaggaggcgcccgcagcacgacgcgggcacggacgacgcggggcgcaggcaaggagaagcgcacgacaggggccggcaacaacaccgggcgggcacagccgcagaaagcagcagacactcgcgaaagaagctgccagcagacgaacagcaagagaaacccacgacacgaaacccccccagagggaccagcggagaagaacccacagaacaaacgacagagg

SEQ ID NO: 38488 - DNA, 481 bp, Zea mays
  unsure (1)..(481): unsure at all n locations
  Clone ID: MRT4577_135104C.1
atctcgttagaaaaaancagatatataaatggcttacaacacaaccccacacacaacacagtcaaatttatatttaacttactcctacaacactacctgataaaccttaacattcatttatctttaaaaacttccaggttaaaaacatcattttcaagttcttttatttctaccccaaccaaagccatatcctccactcttcgtttagtctgagattaagatgatataatatattggaaatggactcacatatcgatattgatacttattttcaactatattcctcgttacactatatacaaagaaacatcgagaatcttccttggcattataattcattctctcgttgccttaacccaaaaccaaacttaaacactatttcacatatatttttgtaaataaaaacctttgatacacattatactgcttaacaaaacttgaccactaaaggataaattaccgcacattaaaatggtgtaat

SEQ ID NO: 38489 - DNA, 264 bp, Zea mays
  Clone ID: MRT4577_135105C.1
cggcgagactgcacactttctttctgtggatagctgatactcttccccggggccatgaaaccacgtagtggtcccccacacacaccttcctttcggttcatcccgatcttaccaagaatccttgatgcgtctgcgactgctagcggacctatcttgatccgatggattcaccagcaccgtgatgtaaggattcggaggaggatggcggtaacgcggtgtggctgatctacacctttgttgtgcgcggcatccccgttctggtgg

SEQ ID NO: 38490 - DNA, 423 bp, Zea mays
  Clone ID: MRT4577_135106C.1
atcataaacaccgaccttgtcatccgtgcttttaaccaactttaaatcttacttgtcacagactacgtcctgcggacttggggggataactacctacaccatatggttccacaaccactgcttggaatgcaaccaattgccattgacttacatcactcaactacgaccatactaatactgcatcgacacttcagtagttctaccaacctcaccgctgaacgacctgccgtcctatgtcaacctcctcttctacatcatctacctgttgttgataatcactccaccatacagtgttggcttaaacacacccacctttttctgcttcagataattcagcaggtacgcaggcacatcatataataaagatacatgctttttaagtacctattgacgccacatcgttacacaatttttgatcagata

SEQ ID NO: 38491 - DNA, 417 bp, Zea mays
  unsure (1)..(417): unsure at all n locations
  Clone ID: MRT4577_135107C.1
cggccgggnagggcttcctctgttcctcataagnacggagggaaaaacaaggccgcaggcccgcagctccgcgcgaacaacagccaaccaccgtccgcacgtcgcgacctgcgagctccacctccggcctccgcccgcccgcccacaccaccaacgcccggaataggcagttgcagttgcagcagcagccagccagacccgccccgccatcgtaggaggaggcccatgccgcgggggcagcagggggcagggtagaatgggcaacgtcacgtcgtcggtggcggcgcggttggccttcttcccgccggagccggcgacgtacggcgtcgagcccgcggaccaggacggtgctggcgccggctctctgctgcggatgacgggggtgttttgtctttacgcngtcgtcnangtgcncnt

SEQ ID NO: 38492 - DNA, 471 bp, Zea mays
  Clone ID: MRT4577_135108C.1
agcaccaagctattattcgaagaaacaatgttggttattactaaattaagttaaccacccacacaccctccctctttgatacaattttttatatggaaggcgtacagtaacagaccaaaaaatggatgagcgaaataaaacaactcaccggggccgggtttttatttaaacacggcaaaaaaatttgcaagggcccgcaaagaaactcgagaaaaaaaaaaaacaactaatcggcatattaaaacatttcaactgccgcgggagaaaaaaaactactctcctcaaaaaaaaaaaaaaaatgtggaggccccacgcgccggaaaaaaaacaaacgggggagcacaggaggaaaacgcggcctaaataaagtcccccgtacagggaaaagaacagtttttttaccccccaagaaacccccaaccccccccatggacccctccccgtcggaaaaaaaaaagggggggggcacaa

SEQ ID NO: 38493 - DNA, 179 bp, Zea mays
  Clone ID: MRT4577_135109C.1
aagaacacataaagcaaattatgctagctctaataagaaagaaaaaagaaaaaaaacgagaaaagagatctaataaaaaaactaagggccggcccttctaacgaatccaaccttacttcccagtgcttacgacgtcaaagttcttctagagctcacctaaattcacttccctacccctt

SEQ ID NO: 38494 - DNA, 576 bp, Zea mays
  unsure (1)..(576): unsure at all n locations
  Clone ID: MRT4577_13510C.1
aattcggcacgagggtttgcaggtctctcactctcacacatcacgagctatctcgagctccaattaatctgctagccaagccgagctccgctcccaccctagtccagcccttgccttcgctgcttgagatggaagcgtacgcggcaatggcttcgccgcccacgaaggccatggccatgggcgtggacaagctcagctacgagatcttctccctgctggagagcgagttcctgttcggcgccgggtccgggtgcctgtccccggggccctgcacgccggcccgggcactccttggcggcgggcgcgtgcgggtgctggcgatcgacggctgcggcgcggacgccgaggacgcgctcctggccgccgccgcgctcgcgaggctcgaggccgggctgcgggaccacgccggcgaccccgacgcgcgcgtcgccgacttcttcgacctcgcggcgggcgccggcgcgggtggcgtgctcgcggcgatgctgtgcctgaggggcgccgacggccggcccgcgtacaccgncgacgaggtgctcgcgttcgtggccgggagcgtcngcgggaagcacggct

SEQ ID NO: 38495 - DNA, 390 bp, Zea mays
  unsure (1)..(390): unsure at all n locations
  Clone ID: MRT4577_135110C.1
cccctctcgcgctcatccctacgacaacggtcaanaaagtgtttgtcacacaatatttgtgtggtcaaaaacaccancnnnactacaacttgacctatccttcatcctcacaactgcaaacatggccgataaccatgatcctttcaagaaacttgaccctacctcactcatccaaaacaagtttacccctctaagaaaggtcaaacacacccctcaccctaactacgcctactacaataatctccatgctaccctcaagaaccacaacctacaccccatcacccatatccaggatgtcacacatttcaaaaccaacgatcacatcatccacttaactacacccaaactacacacctcttacccctccaacaccaatcccatctactacaa

SEQ ID NO: 38496 - DNA, 454 bp, Zea mays
  Clone ID: MRT4577_135111C.1
aggaccccttggccgaccccttggccgaccccttggtcccccacccactgggagccggagggcgctcactgccttctccacctccaagagcctaccgttctaggagatcatgcagaatccatatgccagaagaagaagaagaaaacgcacaggtaaaaaagacgagcttattcatcgccgtcccttcacagctacacatcactgttttcgtctggaaccttaaattctagctagttgatcagtgatcactcagctaccatatcaacattcaacactgatcttgcagtttgtctgccattgcagtcgatggctgaaccattgtctcacaaaaaggctgctactaaacaacaagtctaatcagccatggaaattttcacttggccctagcaaacaataatatatttcccacgaaccaactaagcacatttttagacttttctcagtttctgtaatc

SEQ ID NO: 38497 - DNA, 261 bp, Zea mays
  Clone ID: MRT4577_135112C.1
atggtgctggtcatcgaaaggacggcacaagaaggccaggaacctgaggactcaggaccagctgccgaggtctggaccgttcagaggccggtctactacgtcagtgaggtcctccacgaggcgaagaccaggaagctgcgccactatttccagacacacagggttgtggtgttcacctctttcccgttaagagccatcctccacaactctaacgccactggcaacatcgccaagtgggccacggagctcgctgagttctag

SEQ ID NO: 38498 - DNA, 276 bp, Zea mays
  Clone ID: MRT4577_135113C.1
cgcgcagctctcatcgtctcgctcgcctagagaagcagccgccgttgctgcatccgcgtccacagaatggggggattcgtgatgactcatatgaccagtgcgtatttcaaacgtatcctagtgatattcaagagaatgcgggctgtcaagacagactacagggccaggataaggctgattaaccaagacaagaacaagtacaacatactcatatacagatttgttgtgcgatttaccaacaaggacatcactgctcgaatcatatctggtagtata

SEQ ID NO: 38499 - DNA, 664 bp, Zea mays
  Clone ID: MRT4577_135114C.1
tcgggattcaacacacaattcttctcttttcccttacaagagagactcaactataccaactaccaaataatcaccaagccaattgcattaaaaaaatgccttccaacagcctcaactaccccctcctcgccatcccggcctactacgtcttctccctcataccccacggctacgcaggcagcctgctctcctccaacggctacaaagtcaacaatgcgaaccccaaggcctctctatccccagatgctgtaaaagggaaggtgccagatgcaatcttccaaaaatatcaacgcgctgagaacgctcaatcaaacaacatggagcaactacccctctttgccactgcagtgctcgcaagcatcgttgctgagcgcacgacggccgtgggattgggacgggaagtagtgtctggtgatgcaacgggcctgacgacatttgtggcggcgtggtttgcggttaggacagcgtacgtagtgtcgtatgtgcagattgcggatcacgcaacgagttttgtgaggagtagcttttgggcagttggaagtgggttggcggtgtatcagatttataaggcagctgcgttgttgggtaagggggggtttgcttggattcgtgtacgcataatggtatagagtgtagtgggaattattcaagatgaagtgttaag

SEQ ID NO: 38500 - DNA, 2150 bp, Zea mays
  Clone ID: MRT4577_135115C.1
cgaagccattgcgccccgaagccgtcgcagatgctgttgcggaggcccgggaccgaaatttaactgcggttggtgaggtggcggcggaccgggtggcggcgggggcgggggcccagcgtggtagggcggcgccggcatcctgtttaggccaccgcagaagcctctaccactgcacgtccgaggccaccgacacatattctaccaaatctatgggagcgcgaggtagtcggcgtctcggcgatttggcgaggagctggaaggaaggaaggaaggggcgatgagaatttcacgacagcttgtgaatcctcgcctaggatgccgacgggcacggcgcccacggtggtcaccttctgcgcctcttcgaggtggtgctcatcggctccatagatctggcaccatgcttagccgaccatggcgaggccatcaaggaggacaccggccacgatccgtcagatgatggagcccacgagccattttcacgtaaacttcttgaagataagcctcggatcacagaagaaatggtccgtggatatatgagcaacactgagcttgagaccgctgtacatgcctttggaagtcgttgttccaatatctccagggtgtacagtatcaaatttacacactggcgaacacttctggttattcttgtagtgggtgattgaaatatcagacaagcccaagcaaagggaatctgaaccagcattcaagttcattggaaacgttcatggtgatgagcctgttgcaagagaggttcttatgcatcttgcaaattggctgtgtgataactatctgaaagattcactggcaactctcattgttgagaacatgcaccttcatatacttccgacaatgaaccctgatgggtttgctcttagatggcatggtaatgcaaacaatattgatctcaacagggattttcctgaccaaacagcctgaaactagagccattatgaattgggtaaagcaagaacacttcacgacttctgctagcttgcatgggggggctcttgttgccaactatccatgggatggaactagagacacaaggtctgttggcatctatcattttgcaaatttgcaccagcaacagaacatgtacatggcgaagacaaatcattaggtggcgacttttttctcaccacggtaacactgaatttcattatggcagcaacaaagttacaatattcaggtttcattaggtggtgttttttactaatatttgaagagtttgagttgggcgacaggggggtattgccagcaactggttaatgaactgttatggctgaagtgaaccattaatatagagtttgagttattctgtgttgtcacagacaaccgtatttacacacacagtatctcgcccgctcctccaagtctccctctctcaatataagcctatttctgaattctatttgtggtcgctttctttgatttgctgattgtcaccactggtttttagggctcaatatgactttgtttcacattgtaacatcctcaacaatgattttacttcttacaacaaacactactacggatgtcctgatgataagacattccagcacatggcatctgtgtatagtcggtctcactataacatgtctttgagcaaagaatttgaaggagggataacaaatggagcattctggtacccaatatatggtggtatgcaagactggaactatatacatggaggctgctttgagttaactctggagattagtgacacaaagtggccaaaagcagatgagcttcctatcatctgggaacacagtaggatgagtatgctcaatcttctagcaagcctaataaagattgcaagaacgggactgctaagcaagctaagatttcaatggcctattccttcatacacaggccattgagcgacgaggaacgccgtgtcacttgcaatgaccagagacgggaggtcttcgttgcccaggacatcgctaacaaggaaattgaccgcaccgttgcattcgacaaggtatcttcgaactcaagtcggcatcacagtagaccagaataatacgaaggttggtacagcgccgaaggtgtgagcaggaaagcttcggcgtagcagcaaaaagtgaaaccgacttaaagatgaaaaggctatttagacctcgacagattactatagaattattatc

SEQ ID NO: 38501 - DNA, 644 bp, Zea mays
  Clone ID: MRT4577_135116C.1
cattgggtacctcgaggccggccgggacacacttacccacaaatacgatgctgcggcgccttgtcgatgccaacgtcgccgtgcattcgccactgccgccgccgatctgtcgactgcttcactactgcacttcacgtggagattgtacctcgtctgatgcagaaaccgtgacaataccgcatcgatctatcgctgcggagcccctctaccagatagaaagaacggggtcacctgacatactggtgcagtctcatctccctcctcgccgctacggttactgcgatttacactacttttcttcgaagctctactgcgaacaccttattctccggcaccctctccgccgccacgcccactacgagctcgtccaccataactgtgacatctgcagctgactgctgaactgccaaatgtagctctaaagaatctgaataatgatgacctcatatatgtatctgtccctcctgactcatttatcgtaaacatcctcctctggctgaacgatgcattgactataatattcaagttccagagctgaattatgatgttgatataaataagaaacctcataatgacgcatactcaacaatgacaccatcaatgacatctgtacaccctcatatgctatgagagaatgagtgtat

SEQ ID NO: 38502 - DNA, 868 bp, Zea mays
  Clone ID: MRT4577_135117C.1
ctttctttgatttgctgattgtcaccactggtttttagggctcaatatgactttgtttcacattgtaacatcctcaacaatgattttacttcttacaacaaacactactacggatgtcctgatgataagacattccagcacatggcatctgtgtatagtcggtctcactataacatgtctttgagcaaagaatttgaaggagggataacaaatggagcattctggtacccaatatatggtggtatgcaagactggaactatatacatggaggctgctttgagttaactctggagattagtgacacaaagtggccaaaagcagatgagcttcctatcatctgggaacacagtaggatgagtatgctcaatcttctagcaagcctaataaaggccattgagcgacgaggaacgccgtgtcacttgcaatgaccagagacgggaggtcttcgttgcccaggacatcgctaacaaggaaattgaccgcaccgttgcattcgacaaggtatcttcgaactcaagtcggcatcacagtagaccagaataatacgaaggttggtacagcgccgaaggtgtgagcaggaaagcttcggcgtagcagcaaaaagtgaaaccgacttaaagatgaaaaggctatttagacctcgacagattactatagaattattatcaagtgtaaagggcatgaatgtaattttgtatgggttgtgtcccgcgcctataaataggtgaacagtacccccgtactgttcacgctgacttggcattcgctttttgcgtcacgcttgtactatcatctccttccagttaaaggtacacttgtaattcaacgatatttctgtctatgcctgataataatacataattgttt

SEQ ID NO: 38503 - DNA, 714 bp, Zea mays
  Clone ID: MRT4577_135118C.1
ggtaccctccgggctggccggggtcaaatttgtgtaactgcctatttgcatgtagatcgtgccgtgacctgtgtcgtctacgtgtctcctatgtcagaccggatagttgatgtataaaaaaaaatctagttcgcacatggcgtggtcagttttgtttggttctggattctggtgaattcacaagtgagtgagagactgccatcagggtcttggtttattggttcccatgtattgctgcatatatgcttgtacaaattgatgctggatttctgttggggaccttcggcatccgaaggtcctcaaaaacaggatttaacagtatttctggagtataatatgtgaacaggtatcttcggactcaagtcggcatcacagtagaccagaataatacgaaggttggtacagcgccgaaggtgtgagtaggaaagcttcggcgtgacagcagaaagtgaaaccgacttaaagatgaaaaggctatttagacctcgacagattactatagaattattatcaactgtaaagggcatgaatataattttgtatgggttgtgtcccgcgcctataaataggtgaacagtactctcgtactgttcacgctgacttggcattcgctttttgcgtcacgcttgtactatcatctccttccagttgaaggtacacttgtaattcaatgatattcctgtttatacctaataataaattaataattgttgg

SEQ ID NO: 38504 - DNA, 767 bp, Zea mays
  Clone ID: MRT4577_135119C.1
cctcgaggccggccgggtacctagcgacattgtggaactacaccgatggtcagttgcagtatccttgtgtcatcaacctacgatttatctatggtttgcttatgtagagtttatctatgaaccgctcctatcctatcatgctaggacttcttgttatcctggtgttctgatctgaaattatgaattcttttgcgttactaggatgtgaaccacgctgttctggctgttggctacggtgtcgaagatggtgtcccctactggctcatcaagaactcatggggcgctgactggggtgatgatggttacttcaagatggaaatgggcaagaacatgtgcggggagtattccattcatttcctcgctacaataaagaacgagaagagatcttgtgttttcaggtatggtgctctagcactagtgacacgatactgactgactctaaacgatgcaggtgttgctacgtgtgcatcctaccctattgtcgcatgaggcccttacgaaatgttacatggtctgtttggcatcaataatgcatgtttaacctgagcttggcgatgggttatacagaacggaaactctgtttgtgaatagaaaatcatgaagggaaggagttgaccggacccctacttgtacgtctccccggctgtgtaggtagattgtcagttggggttccgaagtactctactcatacgtgtgtatgacagtttatttatgaaacaaaatacgcattgatcgttatggtgcaaaaaaaaaaaaaaaaagcggcc

SEQ ID NO: 38505 - DNA, 360 bp, Zea mays
  unsure (1)..(360): unsure at all n locations
  Clone ID: MRT4577_13511C.1
cgaggctatatttggggttactggaaacacaaaaaaaactttgtatgggtggcactactgngcctctcacacgtttaatcaacatatttaaagggcggcaccggctccacaacaagggtactaaattaaaataccagcactggcgtcgtgagcagccctacaatacattgaccctccgatgtcgaggagctccaacttatttatataaagggttaaggcgaacagggcctttctgtgggcaaccggtggcgccccagaatataaattgatgccctacccaactgccgagggtttttctacttgggtccaacgcctaccggtacaacaccattttaattgccaaaccgtttgcgcaccttc

SEQ ID NO: 38506 - DNA, 738 bp, Zea mays
  Clone ID: MRT4577_135120C.1
aagggggggggcacggagccgggggtggcgctgaaggaggaggaggaggcgggttactgttcccgccatagggtggtggcggtggctggtagtacatcggcgggggcgggtgctgctgcggaggcccgggaccgaaattgaactgcggttggtgaggtggtggcggaccgggtggcggcgggggcgggggcccagcgtggtagggcggcgccggcatcctgttgtagggcgcctgcggtggcggcggcgtgtacggattcatctgcggcgggtagccgccctgcggaggcggcggtgcgtacggcctgtaagacgccatcgcgcggcggctagggttcctcggaacccgagccccagcacacagacaccgcgccccgcggacactgctcgctcccccttctcctccgtcgccgccaccgcagaagcctctaccactgcacgtccgaggccaccggcacctattctaccagatctatgggagcgcgaggtagtcggcgcctcggcgatttggcgaggagctggaaggaaggaaggaaggggcgatgagaatttcacgacagcttgtgaatcctcgcctaggatgccgacgggcacggcgcccacggtggtcaccttctgcgcctcttcgaggtggtgctcatcggctccatagatctggcaccatgcttagccgaccatggcgaggccatcaaggaggacaccggccacgatccgtcagatgatggagcccacgagcca

SEQ ID NO: 38507 - DNA, 236 bp, Zea mays
  Clone ID: MRT4577_135121C.1
ggcttgtggacggagcacgccctgtgcgcctactggcttgctgaggaccgagaccaccacgtgctccagattcgtcgggcgtcttaccacaacgtgatccgcgtgtcaggagtggggaagctgctcgtcatttcccaagcgcggtcgtgcgtgatcaacaatggctagaacgtgttagtcaacggccgagctcaagccaggtcacggaagggagtgaccaacacctgtcagatctg

SEQ ID NO: 38508 - DNA, 664 bp, Zea mays
  Clone ID: MRT4577_135122C.1
cagaggtacaagagggcactatcacgtgaagaggttgaggtacatgacgtgggcaaggagatggagctggatcttattaaacaatatagtcaggttgaacggatatttgctgatagggtcagcaaagctgatggagatgatctggttcccgaatatttagtaaaatggcaaggacttccttatgcagaatctacctgaaatttaagagacagatattgattttgctcaagatgcgattgatgaatataaggctcgtgaagctgcctcagatatacttgggaaaacagtagatttccaacgaaagaaaagcaaagctagtttgaggaggcttgatggtcagccagaatggctaaaagctggcaagcttcgtgattatcagctggaaggactaaactttctcgtcaatgggtggagaaacgatactaatgttatacttgctgatgaaatgggtctgggaaaaactatccaatctgtatccatgcttggcttccttcataatgctcaagaaatcaatggcccatttcttgtagtcgtgccactgtcaacattgtcgaactgggcaaaggaatttcggaagtggctgcccaacatgaatgttgttgtttatgttggcaaccgtgccagcagaaagatgtgccagcagcatgaatttttttcagacaaa

SEQ ID NO: 38509 - DNA, 546 bp, Zea mays
  Clone ID: MRT4577_135123C.1
ccggccgggttagtgttgccttcgaggtgatcactggtttcaggctgtacaagagcggagtttacactagcgaccattgtggaactacaccgatggatgtgaaccacgctgttctggctgttggctacggtgtcgaagatggtgtaccctactggctcatcaagaactcatggggcgctgactggggtgatgagggttgcttcaagatggaaatgggcaagaacatgtgcggtgttgctacgtgtgcatcctaccctattgtcgcatgaggcccttacgaagtgttacatggtctgtttggcatcaataatgcatgtttaacctgagcttggcgatgggttatacagaacggaaactctgtttgtgaatagaaaatcatgaagggaaggagttgaccggacccctgcttgtacgtctccccgactgtgtaggtagattgtcagttggggttccgaagtactctactcatacgtgtgtatgacagtttatttatgaaacaaaatacgcattgatcgttatggtaaaaaaaaaaaaaaaaaagcggcc

SEQ ID NO: 38510 - DNA, 2958 bp, Zea mays
  Clone ID: MRT4577_135124C.1
ccggccgggagtcaaacacacaccggcctcgcagtcgcagcctcgctccggaggcggagcgccggagcccggagccccgcccacctcccctaaacggccagggccagaccacccccacctcagtccctctcctgtgggcggcgtcctcccgcgcccatggggatctcgtgcctccagcccgtcgtcctcctcctcgtgctccgggctctcgcgtcgcttcccacgcaggccgccgcgagaggcggccacgatccgtcagatgatggagcccacgagccattttcacgtaaacttcttgaagataagcctcagatcacagaagaaatggtccgtggatatatgagcaacactgagcttgagactgctgtacatgcctttggaagtcgttgttccaatatctccagggtgtacaggtacacgatgtataatgttttacttctgtgataattacatttggagcttctaaacaaacttttaagaccatcagtttttaaggacatgtaaatgactgtgtcattggtgggtagtaccgtagtaatataaggtcaggagcgactgcgtctttgacagacaaaggcccagcatggacagcatcgtcatgagagcgagagaggagagggagctttgggagatggctggaggctggagctaagagcatgtctctccttatggctccgactccagggttgtagggcccccttagtagcgatgtggtcaccattatttgtttagtcgtatgaggtatgacccccccttttttgtattcttgtttttggccatcgtaagtggttttatcttgtaacggccggcttggaccttaaccactttcttcttaatataatgacgcgcagctctcctgtgcttccgaggaaaaaaaggatttaaaatcattatcaaccatgagagaaacaacattgcatgcagtcatgttgatgggtaacaccgtaacagcaaatggataaaatgaaacatgtatctttttgaaaagaaaaccaatcatgaagcgccaacttagggcttgttcggttagagtgagattgggtgggtttaaatcccaagcaagtcaaagttcttctaaattttttccaatcccatccaatccatgtataatgtgaataaccgaacaaggccttatagcataattatatccataaggtacatgtattaattctgttttacttcagattgttttttgaggagaaaaatgtaggttttacttcagattgttgaaatgttccatgttcattggtcatgattagcatttttaagcatttcctgagtaacagaatattttggtttcaatctctttattctgttggtttgttatacaacttctgtactgtccttggatatctcattttttaagtgcactgcttctttctttattttgtgccctccagttttctcatatgtccacacttcacttacattttatttcttctctctttgagggataacacaaacctgctatcagcattggaaagagtgtgaatcattttccattgtgggtgattgaaatatcagacaagcccaggcaaagggaatctgaaccagcattcaagttcattggaaatgttcatggtgatgagcctgttggaagagaggttcttatgcatcttgcaaattggctgtgtgataactatctgaaagattcactggcaactctcattgttgagaacatgcaccttcatatacttccgacgatgaaccctgatgggtttgctcttagatggcgtggtaatgcaaacaatattgatctcaacagggattttcctgaccaattcttccccgttaacaacgatattgactacagacagcctgaaactagagccattatgaattgggtaaagcaagaacacttcacggcttctgctagcttgcatgggggggctcttgttgccaactatccatgggatggaactagagacacaagcaaacactactacggatgtcctgacgataagacattccagcacatggcatctgtgtatagtcggtctcactataacatgtctttgagcaaagaatttgaaggagtcataacaaatggagcattctggtacccaatatatggtggtatgcaggactggaactatatacatggaggctgctttgagttaactctggagattagtgacacaaagtggccaaaagcagatgagcttcctatcatctgggaacacaataggatgagtatgctcaatcttctagcaagcctaataaagtcaggggttcatggaaggatatttgcagcagatacgggcaggcctgtacccggctcagtgatgataaagggcattgattccaaggtaagcgcgagcagcacttttggagattaccatcgaattgttgcgcctggtgagacatatgaagtggtggcatcgatgcgaggcttccggcaaaaatctacacgcatcaggctggagcaggaagccgtcagcctggatttcatcctggacccggatggagccgatgggcagacgaagctgctgccccgtagtaacgaccggggctgccgctgcgacaacgacaacgccgccaagccgttccatgtccacgaagctcacctctggttgtacctccttatcgtgtccgttctcctggccctctacgtagtcttcaagaggaaaacggtgccgaggctgctggcgtatagacactcatcgtcactcagacggcctgttgctgtataagaggaactaattttgtggtctaggcggatagttttgtactacctctgttctcgaatagttgttgtccgctagttaatttttatagctagttcatttttatactaaaatgtgacaaatagaaaagaacggagggaaggagcaactgaagttagtcttctctttgccaaaacggtcggttgctgtataagttgaaggatgggtaatgtaccatggaaatgacattttttttgaatcaatgaaatacatgttgcgttgatgacaaggc

SEQ ID NO: 38511 - DNA, 313 bp, Zea mays
  unsure (1)..(313): unsure at all n locations
  Clone ID: MRT4577_135125C.1
actgcaccgacccggacgccgtcctctgctggacgatccgacacatggttcccttcccagtgatgttgatcagatcgaacgaacgagcaatcattctgcaatccgtttctttgtggttggtgtcggagctgctgtgacgcgacgcggttctttaactccagggatgctgcggcggcctgcacttcagcgacgtggtgacgctggacgtggagacgatggcgtggagcgcgctggccacgacggggcagcggccgngcacgcgggacagccacggcgccgcgctggtgggccacccggatgctcgtggtcgggg

SEQ ID NO: 38512 - DNA, 638 bp, Zea mays
  unsure (1)..(638): unsure at all n locations
  Clone ID: MRT4577_135126C.1
cctanataaaagacctatcgctctagttagtactcatctattcttctatctctctctgtcttcaaccaagccttcggcctagggtctaaccccgccagagaagacggatcaaggctacgaactatgtagccaaggaccccaaagtttaacgcccttgacacatgtgtgtttgtcactttgctcaatcctgcaagctgatcgaatctaaagaaagaccttaaccgactctgattaaagataggatagaatcaggtttaatctgtcccagtcatagcaaagttagaataaaagttaagttagttgtatccgagttggactctttgtcatgttacaatcctgttggtagtattctgtcctaggacagggcgaacagcttaaacccgctgcattgttttcttacagtgcaagctacgctactctcggctatggcgttggaaaagttgagaagcagaattttaggggttatatgggacacatcacacaacggtgcagtgcaacaattgcagttctagacttctttttagggaaacacttaagtttatgactacactaaacagcacttgatgtacatttggcacatcatgttctccagagctaacattctttggacgcaggtatcatgtaccttttttttgcta

SEQ ID NO: 38513 - DNA, 258 bp, Zea mays
  Clone ID: MRT4577_135127C.1
agttctcaccatggacgccgatgagagggccgaaaccctgacgcagatcgagaatggttgggaacaaaggagaagcagccatttcgcacagcaccgctgaccgctctaatgatgagagataagaacaaacccatgatcctcattgataccgctcaacaacaagaagctagcccaggcgtgacagcgctattggatcgctatcaggaacacggcagatccgagaacggcgcaggagatgtggtagacacatccccaaga

SEQ ID NO: 38514 - DNA, 492 bp, Zea mays
  Clone ID: MRT4577_135128C.1
aattcggcacgaggctctatgtgctcgctccattgttctctgctttcaccatggtcagagtccgcgcggtcactgtgttctcgtgcctcctcgcacctgcagtgagaaccaggccagagctgtcggtgagttcgctgagagatgccgttatacttacggcccaccgtggcgtacgtgtgggtgggggaagcgcctgccttcctcaaggggcccgggggcgcggacgccaatgtcttcgtcgtagacttacaggtggagggctgccagacatgatcaacgcaagctctccacgaggatgtgggacgattgatttccgggattttctgaacctgatggcgaggaaaatgaaggacacggactcagaggaggagctgaaggaggccttccgtgtcttcgacaaggaccagaacggtttcatcttggctgccgagctccggcatgtgatgaccaaccttggtgagaagctgactgacgaggatggtgatgagatga

SEQ ID NO: 38515 - DNA, 220 bp, Zea mays
  Clone ID: MRT4577_135129C.1
tggaggccgatgcactgactctgaagctgaacgaggccattcctgaagagttcaagagcctcattgaggtactcaacaggaatgaagactatggtcgcgtattggtagccaagagggacatccaaccaggcgaagtcgttctaattgagaagcctctcctccacatcaccacagacctggaacaacccaaccttgtacctgttgttattgcctttcagaa

SEQ ID NO: 38516 - DNA, 469 bp, Zea mays
  unsure (1)..(469): unsure at all n locations
  Clone ID: MRT4577_13512C.1
gtttccccctcgagtttttttctttttttttttttttttttttttttttttttttttttttttgggtcttaccacccccgaagatgtaaattaaagaaaaaccatcattattctaactggtgcaacactgaagctaaaaagtagccagtaaaccaaaactacagatatcgagacagatatatatataaacaaacaacggccgcaaaggggtaaacgaaacaatcattaggaggataattactactatatacagcagtttggggggggggggnggggggtnnnnnnncntaaccngctnctaactctactgtccctcatttcaagatgtcccnctttactattggggggggaaaacctctggcccctcccaagcgttttgaacggctgagaggaacttggctttttctctcgggggggtnggccccttagctcttccctccctcgcccggggttggtgggttttttcagc

SEQ ID NO: 38517 - DNA, 142 bp, Zea mays
  Clone ID: MRT4577_135130C.1
gagaaacatccacgactctcctcccaactgttttcctaaagcgaaatgataacacttcttagtaatggtctatgctcactctatccttgcgctagcctctatgaccggacctaaactggtgtgtgagaaacattcacgactc

SEQ ID NO: 38518 - DNA, 608 bp, Zea mays
  Clone ID: MRT4577_135131C.1
taccacccatctcggcgctagcccatactatccggttcttacaacccaggcgctgggacggcgactaaaaggagcgggcacagcctgggcgatgctgatctgaaggggaagaacgtgttcgcgctgcgccgacctctacgcctcctcgttgacagacggaccataagatcaccgacgacaccgcgatccatgccttcgatcgcaccatcaagggcctgctcgagaatgcctccaagggcatcctcgccagccacctgagacgcgcacaaggtatcaccccatactacagattgaaccctgttgtttcacgcttgactgagctacttgcagcggaagtcgcgattgccaatgatcgcattgctgaggaagttgaaaagttggctgccgttttctcagaaggcggagttctgctcctagacaatggtagattctacaaggaggaagagaagaacgaacctgagtgcgctaagaagctaccatctgttgatgacctttatgtcaatgatgccttctggcacgctacacagagttcatgcttcaaccgtatgagttaccaagcgtctgaagcctgctgttgatgactccctcatgcatcaggaacttgacta

SEQ ID NO: 38519 - DNA, 1491 bp, Zea mays
  Clone ID: MRT4577_135132C.1
atgccaagtggtggaggaggtggtggagaccaggacaggaggtggagacacgccggcggtggagggctgaagcgtgtagagcggccccgagctgtcacagcgggcgagaagtgttctggtggccagatccttcacagaaaaaccagaggggtcaaactcaatggaacaggagttgtcagtggtgaatcgacggacagaaagaagattgtgagtgatgtggggagctacgagaacatcgttgaggaggttcagcaccaaggtacgatcggtgacgggctcgccgaggtcgcggagagagtcagtcaggcccttcatctggcggcagtattctcccacggtgaggtccccctgagagaacaggtggaactgggcgtcgaggtggagcgcccgagcatcccgattcccgaggaactggtcctcgagagcgagccacgcctggcgcgcagtgtccgcctggtcgcggatgatgtcctgaagctcaacggtgatggtgtcgtggagccacgagaggacaacgctgtccatgaggcaccaggatcgaggcgtcggagcgtcgtggtcgacgaggacgtgatcgtcgaggacgaaccgccgcagcgtgagaaggacctgtccacgccaacgggggtagtgggaagacgccggatccaacaccacggacacaagggcccgaatgttgtgaagaccagctgcttgggcgtggagagcagcgatgagatcggcgtcgaggtcagaggcgagggggtcctccgggggttccacaagggcggccggcaggcgaccgaggaggcgctgcgtggtggccatctgggtggtcagagcggcacccaggacacgctcccgctccagggcgagggaggcggcgcgctcgcgctcccgcgaggccgtcacagcggcctggatcgtagcgagggtgtcgacgagcggggagtcggtggtggggagtgcggagggcgcgacggcgtgactccagggggcccctccatgggcgagctcgctgctgaccgcagcgggggcgatggggccggtggcggtggtggtgatatcatccatggcgggcgacagggcgtcgagccgtcgggcggtgcgggcgcacggctgaaacgtagcgcgggcgtcacggacgggatctggcgcggcggtctttgggcagggcgcgggtcgcgtccttccctggcgcgtcgggtggcgggctcgcggcagggagctcgggagtgcctgggtgctgcggtgcggtgtggccggccgggggcgcgctcgtcgcgcggcctgggcggcgttccagggcgcggcggcaggtgctggcgagaggagcgcacggcgatggggaaggcagtgcggttccgggcagcggcagccctggcggcgcacggcggtggggaaggagggagaagaggagctggcggcaggggggagagggggccggcggcgggagaggtggctgggaaacgagaccggtcggctgggggccggcggctgagaaaaaaatga

SEQ ID NO: 38520 - DNA, 377 bp, Zea mays
  Clone ID: MRT4577_135133C.1
attggcgtgttgggggtttattttatttggggttttatttttatttttttttttttttttttcttggccaaaaaattgggatgggattaaaattaaatttttttttgttcactttaggctaaaaaaccattcccgaacccctcaagagggggggaagggtcaacctgttttaaccgggaggtcccgggttcagccccaaccttttgaatattttgcggtaaaggtttgggctttaaaaatacccttcccaaaacccggaaaagggggggaagccttccgttttgggcccccctttataaggcaaaaaacatacagaacttgtccataggggcttcctccccgggagggttaaattaaacttttttttggccccgtgg

SEQ ID NO: 38521 - DNA, 1686 bp, Zea mays
  Clone ID: MRT4577_135134C.1
ctacgccgcctcccagccgccgacgccttctccacctctctgcgactgcgacgcgacgcggacctcccacagcctgcgcccgtccgccgcgctcccgtcggactcgctcccggccaccacggctgccatcctctctgcttcccacctctcccccggccgcgccccccaactccggcgtgcacctgcgccgtctcctccacccgccggatccgcgcgcgtcctgtaccgcccgcaccacccgtgccagccgtcgccggccctcctctgctggacacctctcctcccctgacagtcgcgccccagcccgcgcctcctgcctgcgcgcagccctctgctgcccgccgccacgccctctgacccatggcggacctccccccggacgcgcacaccgccggcctggcgcaccctgcttccctggccaccggcatcgcctccctgggcctccatgctgccggccagacccaccccatgagccccggccgctccgtggcagatgccgaggctccctacatcgtcgtcctcaggcccctccgcgacgtctcttccccggcccatcgtcgaggctctccaccggggtttcctgccctcgcggcaccccccggtaccgactccacactcggcgacaccctcgcttcgatccaggcggctgtgatggcctcgcgggagcgtgagcgcgccgcctccctcgccctggagcgtgagcgtgccctgggtgccgctctgaccacccagatggccaccacgcagcgcctcctcgccgcccgccggtcgcctctcgacgccgacctcatcgctgctctccacgcccaagccgcaggtctgcacaacatccgggctctcgtgtccgtggtgttggatccggcgtctccccactacccccgttggcgaggacaggtccttctcacgctgcggaggttcgtcctcgacgaccacgtcctcatcaaccatgacgctccgccgcctcgctcctggtgcctcatggacaacgttgtcctctcgtggctccacgacaccatcaccgttgagctccaggacatcatccgcgaccaggcggacactgcgcgccaggcgtggctcgctcttgaggatcagttcctcgggaatcgggatgcgcgggcgctccacctcgacgcccagttccacctgttctctcagggggacctctccgtgggagaatactgccgccagatgaagggcctggctgactctctctgcgatctcggtgagccagttgccgatcgtaccctggtgctgaacctcccgcgtggcctcagccctcgctacggccacctgaaggctctcatcaaacggagcgtgcccttccccaccttccacgccgtgcagaacgagcttctccttgaggagctcaccatggcgaatgaggcacccactcctgcctcggctctctacagcactcctaccagcggtctcaacgatgttctcgtagctccccacatcactcacaatcttctctctgttcgtcgattcaccactgacaactcctgttccattgagtttgacccctctattttttctatgaaggatctggccaccaggacccttctcgcccgctgtgacagctcggggccgctctacacgctccagccctccaccgccggcgtgtctccaccccctgtcctggtctccaccacctcctccaccacatggcatcgtcgtctcggccat

SEQ ID NO: 38522 - DNA, 477 bp, Zea mays
  Clone ID: MRT4577_135135C.1
gttcaactcgagccccaaacatgttgctataaataggtggaggtaccttccattcacaattatgtcacaccacgttcaaaccgtggtgaaaaggattcaacagatccttaatagcacttacaatgagacatagtgcctctaaaaattacacttcctaatgactcatactagagacctaatcatggtaccattgttagccagttgaagctttcttccggagtgtccaaagtcataaacatttacctgtttgaccttttgacaaaaacttgacatgctatgaagtgttcttttgttcctggaactgcacctcactccttcaccaatgccatgacatgtctaatggagcacccattgatctcctttgttggcaaagactcaacagatgctgagctcttctaacttgctggcacaagtttgctcaattgagctttcacccaatggactcccaatgacctgtgctttttacccttggacttt

SEQ ID NO: 38523 - DNA, 973 bp, Zea mays
  Clone ID: MRT4577_135136C.1
ctaggcgactttcacctggagctcaacagtgatggtgtcgtggagccatgagaggacaacgctgtccatgaggcaccaggagcgaggcggcggagcgtcgtggtcgacgaggatgtgatcgtcgaggacgaaccgccgcagcgtgagaaggacctgtcctcgccaacgggggtagtgggaagacgccggatccaacaccacggacacgagggcccggatgttgtgcagtccagcggcttgagcgtggagagcagcgatgaggtcggcgtcgaggtcagaggcgagggggtcctccgggggttccacaggggcgaccggcgggcgacctaggaggcgctgcgtggtggccatctgggtggtcagagcggcacccagggcacgctctcgctccagggcgagggaggtggcgcgctcgcgctcccgcgaggccgtcacagcggcctggatcgtagcgagggtgtcgacgagcggggaggcggtgttggggagcgctgagggcgcgacggcgtggctccaggtgggtgaagcgagggtgggaaagcccgacggagatccgcggcgcagggtcagcggggaaacggcggggagcggcgcaaggccggcgatgtagggggcccctccatgggcgggctcgctgctgatcgcagcgggggcgatggggccgctggcggcagttgttgtgtcgtccatccacgatcatggccgacagaaatgaccctgggatctctgttctcaagaaaacatggcagcattggtcagcaactcatcacatgcttttgaaggtagttatgataaccatactatgcacaccagtaaccgacctgcaaaactagatatgaaaacattcttatataggcttgcattggttgaatgaactgattcaacatcctctttggcacatatcctgtttccattactgagctctgatgtcagaagaacaatgccataataggcaaacgcttttccaaagaag

SEQ ID NO: 38524 - DNA, 782 bp, Zea mays
  unsure (1)..(782): unsure at all n locations
  Clone ID: MRT4577_135137C.1
gccggcctttccgggatggaccgcctacctttcatatttcttccttgcaagatgagactcctccttggcttgttgctgctaccactaacttcgcccgagatcggtgatgaggactccgatatctactaccaggatggatcttatgtgaccacgaccatactgagatcataccagcgctggatgctgcaaaccacaccaccggcgactcgcctgctcgcgacttctacataacaggcttccccgtccttagcgccaccaccgatcctgcatagacgggatgcaatgaacaagaaccttacgatcctaacctgattactggcattcaacggctgaatcaacaatggagcaacatcaggcgacccaacaaccacggactagagcagactggaagaacctcgtgtcaagaacgacggcgactgctccgacctcatcgagatagactacttcgagactgccctctccttccgaagaacgataaaccactcgttctcctccaagccaaaggaatcgagcccgacttcatcctctacagcctctacgggataccatagccttcaagagaggcatcaacgctcactccgcttcatccagcgcagtacaggttacccgttcgacaaacacatgctgttacagctcgacatctgcgcggcggngatctctacgatcatcaactgccccgcgacgcagtagacacctgctcctggtgatcctcttccaccccttncagaagtggatgctcaagcagcagctcaccaggacgacgaccgtttcagctgcctgga

SEQ ID NO: 38525 - DNA, 280 bp, Zea mays
  unsure (1)..(280): unsure at all n locations
  Clone ID: MRT4577_135138C.1
acttcngcctgcggtgnnctggcacccgggcgcccggcgacgcnnnctcgccccttcgnacccgtcatcgccccatcnnnacgacaccggnaggggcgtcannagcaggcnngtcccacctgcgtcaagtgacgagctccacgccctcggcatcttcgattgccgacccgtcaagccccgtcgggcgaccaacgcnnncatctccnngtcgaccggcaaagggtcattcaagggtnncgtgtcccggaccgcaaacccccaagcaaccctggccgtgggg

SEQ ID NO: 38526 - DNA, 437 bp, Zea mays
  Clone ID: MRT4577_135139C.1
tcctataggggattggttccctcgaggccggcgcgggaatcctccggtcgcgcgattgcctccgttggctcttaaccccttgccatggtacgcagtgcaagaagtatgcgccccacggaaggatagtgattatgggggaagtctcagaggtcggcctcctcgacgtggtggtgcatgctgtacctctcggcctcgtcccgcaggggatgtctaacggtaggggagcgatggaagacgatgccgtggtgaatccgcaggtcggccccggatctgcatctcgaccccagtgctcgggggggaggacgcccacgacgaggtcgtgacgggtctaaagccccgggcgtctgagcgcctgtacgggctgaagatggatatggacggggtccggaggctgattccagtgctgtgtgattaggtggcagaaaactacccggact

SEQ ID NO: 38527 - DNA, 246 bp, Zea mays
  unsure (1)..(246): unsure at all n locations
  Clone ID: MRT4577_13513C.1
acgtntttcaatttttattataaacccttgtacttattaaaaacacacaaaaatacgtgagccttttttttaccgataacccctttccatattaaaaacaacttttaaacacccaacacttctacgatacatatatttcttacttaatagaaaaaacttcaagaatttattctcctaaaaccccactattctttacaacaccattatggtgaaaacatgaagtttttacattctaactccacattt

SEQ ID NO: 38528 - DNA, 610 bp, Zea mays
  Clone ID: MRT4577_135140C.1
gccgggctacgtgtggttacaatgtctgatgtatcgttgtcccctgatttttcagtccgcttaagttatagaacagcattttgtacccgaaacacactgtatgcgatcagggggcggacctagacaaaaatatgagtgggggcctaaatgaagggttaattacaaataagcctgtatgattatagtaaataaggtaaaacttccgctaaatcaacaaaattgagtgcccccactgctcttaacgtcggtccgcccatgtatgcgatctaatttgtacgagttgtttttgtcttggccatgcaaattggtagcggcattactaatctcctcactgcgtttcaggagacctatactgtcaatcaccaaaaagagcattgggtttgatctgaagggcagtgctacgtctatgtgactttgagcaatttctggtacttagggcttcgctttcaccaggttctcggggcattgtgtttttggaatacctcctaggactgctgtctgacggccttgctggctaaggaaaaagaaacgctgtgacgctgcttttatttagtggggaaaagcttggatgcgcgtgtggatttattttttatttttccagaacccctgt

SEQ ID NO: 38529 - DNA, 159 bp, Zea mays
  Clone ID: MRT4577_135141C.1
ctagatctagagcgagagcgaccatgccggactttgtctgacagtggaggtgtgtctcggtgagatacaaaagagcagctgcattctgctgcacaaacctggggaaacgcactatgcctgaccggctttggatacaccgtcgacgtcgagtgccatctt

SEQ ID NO: 38530 - DNA, 928 bp, Zea mays
  unsure (1)..(928): unsure at all n locations
  Clone ID: MRT4577_135142C.1
ttttcggattggacaaatggtggtgacagttacccacaagcaacaggctcgcaaacacataatactagaatgcatggtggaacaagtgatgataattacctgtcggcgagatactcccttggatattcaggttctcgctttagccaaccagcttcaactgttcccgcttttgggctctcaggtgcaagttcacaacgaggctcagtaatagacaagtattcctatgggctctcgggtcccactggaccacaggattctggtattaacagatatgctccaccggacgacggaacgagcacaagatccaagagctccttggctgaacaacagtacccgttcggacaatctggctcttccggtggcgagtggcctcatatctgatcgctggaacttgttgtcgaagttttttttttcaaggcaaaaactgtgggaagttctccacggtacttcattttcatttttagaggggattacatgttatcaaaatcatgcagcttttgacctgacctgggtgtaaattggagtaaaaccacaagcatctatccatgcggggctggtgttaaaaagcaaagttgtttcttaaaaannnnatnnnnnnnnnnnnnnnnnntnnnaannngggggattnnnnntnanaaaaaaaaaaaaaaaaaaaaagaggggcggccgttttgggggttcccaggtttccctccccgtgcttgccacgttttaatttttttttttgggccccctaatttcatttccctggccggggttttccacctccgggccggggaaacccctggggttccccactttttttccctttggggcccattcccctttttcccccgtttggggttttttccggaaagggcccccccccgttccgccctttcccaccttttggcccccccctttttggcgttatgggacccccccccat

SEQ ID NO: 38531 - DNA, 300 bp, Zea mays
  Clone ID: MRT4577_135143C.1
atcataaacgaccactttcagacctgtctttaaaaaaaaacaaaaattactttcagaacgggctgaaaaacttccaaaacacaaggatgtcattgggcctaacaaaaagacgggacttgcttgaaaaaatttggttcctaaatgggtgggggaaaaataccccatgttctaccccatatttaatgggacacaaatgcttttccgaaaggaagacttgcaaattggaatgactgctttttgaaaaacaaaaaaattttgggcggcacaaaagatgcaggccagttttggtcagttattacc

SEQ ID NO: 38532 - DNA, 376 bp, Zea mays
  Clone ID: MRT4577_135144C.1
gaagctaaaacggacttcacgttatcattttttttgaactatacagtaactcagacgcttataacgtgcatatactcatctttaagaatgcacacacgttgattctatctctataagcatcttccaagttctttgggattgacgaggtcaccgcaagtttctggctatggctgacaacgtcgcatacaccgtaaacacgacaccgtgttaaatactgaaatatttgctcacacggagagtcaggactcgagactcttgtaaccactgttttcgtcgccgtaggccttgcacagacactgcccgctgggttttttccaagactccagcgcatcggctttccatgtgccatttctttttctttttcaactgcgcagat

SEQ ID NO: 38533 - DNA, 464 bp, Zea mays
  Clone ID: MRT4577_135145C.1
aaaacaacttaaaacagatagctctccgacaggggacagggagatcaaaatatggggacccagtttaattccgaaagttatctcatttgcataacagaactgcaacaagttctatcctcgtgatgtgatgattaaccacaattatatgactttacgacaggtcacaattctttatggaggatgtgaccagctcaaaatcctacggatctcaccactatgcttgctcgagagtctttataaatcaggagcttgacttaagatccatcattcttgagacagagaacaatgtcgccttcctttatatcaactggaatcagattgtctggcttggaacgctcaccatggccaacaggcaccactttaacaaaattcagctgtttgtattttttctggtagatgatgccagcggggggctttttgggctgctccatattcttcaccagcgctcgactcaacatcgggag

SEQ ID NO: 38534 - DNA, 681 bp, Zea mays
  Clone ID: MRT4577_135146C.1
ggccgctttttttttttttttttagctttttttttttttactccagacgatacaggctcacgacaactgtggaaaagggaaaaacagaacacgaggggcacaaccacaaacacgcaagagcggaaagaaaaatccgagtagagggcgctatctcgagaccacaacggggccttttggaaacgcgcacaggggcacaaaaggggcacgtgatatcatgggaacattggcacccgagatcttgggctcctttgttctgtggagcaccctcctcacctcgcttggaagctctatgagcaaaacatattcgagggtaaagcgggctaaagccctctccatagagaacacggaatccctattatagccaccagggccattggctgtataaaattgcctcgacatatactgcagaggagcacggccaaaatagcacttgtcgccaattggatctggggaggaaacgaacactaaaacgcccgtcacagatgggtacaaaggatctcccttcttgtagaaaacaaaggatattttgtgggcgcacacacactctcttttctccaaggacagtattgcgtttagatctttttctggaccacccttgacacaatatacaatttcccagcatatggcctctccagccgtgtcaaacgcgcagggactctccgcatgcgccggagtgcctct

SEQ ID NO: 38535 - DNA, 744 bp, Zea mays
  unsure (1)..(744): unsure at all n locations
  Clone ID: MRT4577_135147C.1
cattgggtacctcgaggccggccgggacgcacgcctgctactgtgatcctctcacctccccaattctccaatatgcctcaggaagcctccaaggtgtctgaccccgacgccgacaccaaagtagccgccgaagcagtcgccgaatcgagcaaacaagcagaggccgagtctgcaaacgaaagtggcgacgaggagaccggaacagcggaaggggccgagggtgcagccggaaagaagaaaaagagcaagaagaacaagataaaggatgcgctcagcggcaagggaaaggcgggcgaggtcacggatttgaacgcgcccgctggaggaattctgcccaaggaagctatgaacatgctgctcgcaaacaatcctgcgcttgcgaatgaactccagggcaaggcgaataataaggatgacctgcaaaagctgctccaagcgctcaacctcaacgagatgctcacagggctcgcaccacaaggtagccaaaaagacatggccagtcacgcgttctggaagacacagcccgttcccagctttgacgagatggcaaacaaggacaacatcaaggatgggccaatcaaagagattgatattgaaaaagtcgacaagaacccaagccccatgtaccccggctttgaatgggtgactatggatttggnaacagagaagcagttagaagaagtctacgagttgctcaccaaccactacgntgaggacaaggatgcaactttccgcttcaatact

SEQ ID NO: 38536 - DNA, 281 bp, Zea mays
  Clone ID: MRT4577_135148C.1
tttttaacgtgcaccatattcttttccacagcgtgtgaaaactaggaatatttcatacgattccatatgcacttgtgaagcgcaattggtggtaaatatgcctggctcattacaaactcattggagcaaaataaatttaaagaatgtttgctactactactgcaacatgcaataaattgcccgccatcagttgggatattattgaccatatgaggatggtgcaaactcatgcccatgtacatggctgttaaagtggtcatcatgtttagacaaagggatga

SEQ ID NO: 38537 - DNA, 363 bp, Zea mays
  Clone ID: MRT4577_135149C.1
ggattaatatctgcttgacttgactgagtacggttacacgatataaatagcctgaggtccaaccgaccaaagcagcaggctcctataatttaggactaaaatagcaagctaatctttgaacccttatgctttatttcctactactttggagccttatcctttggttccatattgcgctgatactctttccttccctttctttacttatcagtcatgcgctgaacctcattccttatcagcgttctctttgcttctcaacgtcggccagctgtttggagcgctcctgcctacggcgcaccgtcctggctcggccacgcctagtgtacgtgccccccaacatgacagatacgtaccaacaaaggc

SEQ ID NO: 38538 - DNA, 417 bp, Zea mays
  Clone ID: MRT4577_13514C.1
cggaatcccggggcggcccacacccttccaaaaacaaataaccttgggggccttcctttttggcggcggcggcccaggtccctttgattgccgccccggaaaatgggggggggaaggtttcaacatgctaccttaaagggcccaagcgtggtaaaggaaattttaattgaactgaccctggttttaatcgttgaaggtttgtggaaaatccaccattggaccaggcaaaggaaaactagatccttttacaacatgcttgacaggggccaaatcagcgtcttcgtcaaggagtagttcttacttgtaaacactgaagtttttttttccagatgtttttgaaaactaattttttgaaaagcttgacaaagtgaatgctgtgaaaatttggcttgaaaataagcttaaccatttgggacc

SEQ ID NO: 38539 - DNA, 246 bp, Zea mays
  Clone ID: MRT4577_135150C.1
cgaagaaatactgggacaagcacgctgccagcgacgtacgtcatggcaaatgagcgctgaggctacctgctagcgtaccccgtgacctgataccttcctctaatataataatgccttcttcccgcgctgcatctccagtggtgattccggtgtcctaggctcctagcaagtgaactcccaaaattgaaaaacttaggattttgaaggtgatataactcccttggattttgtgcaaatatatcgtcg

SEQ ID NO: 38540 - DNA, 285 bp, Zea mays
  Clone ID: MRT4577_135151C.1
gagctatgacgtcgcatgcacgcgtacgtaagctcggaattcggctcgagatccccgtgtcccgctaggattccgccgaaacccttccccaaaaccccagagcggagaagagcgcaggatgttcggcttcgggcaccacggacaccacggccagaacccgccggcgcacggtggcgtgcaccagcccaccttcaagatcttctgcaaggccgacgaggggtactgactcaccgtccgcgacgagaacgtggtgctggcccccggcaacacgtgcgacgagcacca

SEQ ID NO: 38541 - DNA, 387 bp, Zea mays
  Clone ID: MRT4577_135152C.1
tccaatctcgctgaaccaacacatgggcttttgttcgctgatgctcttcacaagccctagggggatagcaatagagcttgtgatggaaccagcttcatgcttgcgtgtattagatttgaacaagacagcagtggacgccatcccgaaattcattggtaacttggcacatttaacgtacctgaatcttgatggggctcacgtcacatacataccttctttcattggatttgtcataaactcgcagaccttgagccttcatgggttccaaaacttgcagagactttctatgtccatcatggcattgatagagcttagatgcctctgtgtatatagaacttacctaagccatgcaccaaagggtgatgtgctatcgacacatcctaatca

SEQ ID NO: 38542 - DNA, 562 bp, Zea mays
  Clone ID: MRT4577_135153C.1
caaaaattgtctgcaagaatgctccaattggtgcgttacaaatgaagcaacttgttgagggggtaaaccatccagcacggtgcacggagtagaggacattgtatacatcacgtcgaggcaagaacacacacacactaaactacaccaaatcaatgaccacaaacaaaaccaccgtaatctgggttaactagaatgtgacagcatgtgaagcagcatgtcgttccatgcgtcgatgggccctggcaggcaccaggggatgcagtcgttgtagagcgtccgcttctcgtccggccagtgcccgtaccggctgggggggccgtcgggccgcatcagcatcgcggcgggggggtccatgagcacaacgtccaggcccttggcctccctgaactcctccagctgcgacgtgtaaaactccagctccagccctcccatcggcgccgtctcgtcggccctgaacggccgcgtgcgcgggcagtccccgccggcgtcgaacgccccgccctcgaagtgcgacatcggcgacagcgtccgcaggatgaccttgccccggaacctggcgccg

SEQ ID NO: 38543 - DNA, 599 bp, Zea mays
  Clone ID: MRT4577_135154C.1
cacaaggttagggcaatcaatctctctgaatgaagtcactttaaaggagcagaaaggaaagcaacaacttgatcagcagtcggttatgcagtccgcacgagacagcttcgtgctaccagatctcaatctccccccacaggactctgccgatgtttcaacagttcattgatcactccagattgctgcgactttgttaaccgaataacaagtgtacatagaggaagcagggtaccaatctacggtggcggcaccaccacgtcatccttctgagaatgacacgcatttgataagttgttactagatcagagttttactaccactatagccgcaagttacaagccacatttgtagctgagggaagtctagttttaacccacctgacattgttttgcctagtgcgtttgcatatggtagagctgaagtcttcttcagctcaaactgatctccacgctgtagtggacttggatgaatttgttcatgttatttcattcaattaggtgaaatgtcacttgtgaagatctgacatttatgagaaaactgttacttatttctgtacggttttatggatcttttgttacttcagttgtggggggaaaaaa
